United States Patent Application Publication US 2014/0057251 A1 - sequence listing, part 50

SEQ ID NO: 63149 - DNA, 1406 bp, Cannabis sativa
ctttgaatcaagaggattacgtcaaggagatccattatcaccccttctctttgtcataggtatggagtatctaacaagaattctaaagaaagttggcaacaaggagggatttgcctttcatgaaagatgtgaggagctcaaaattaaccacttgagctttgtggatgacgtacttcttttttgcagaggagattaccgaagtattgtttttttgctgcaaggtttgaagcttttttcatctacctctgggttgcaaccaaacaaagccaagtctgccatatactgcagcaatatggaagattatgaagtcaaccgagtcttagaagtatcaggtttctcaaggcaaagcactccattcaggtaccttggtgtccccatatgtgctaaaaaaatttcaaagcaagaatgtgtagttctaattgaaaaaatgacagctagaatccgcagttggagcactagaaacttgtcttttgctggtagaattgtgctcattaattttgtattgtcaactatatatgcctattggtgtcaaatattcaaattacccaaacaggtgatacatgaagtagaatccatatgtagggctttcctatggaaaggccaacacatgatgcaaggtggtgcccctgtagcatgggatagaatttgccaagccaaatcagaaggaggatcgggtttgaggaaaatagaagaatggaatatagcagccctgtttaagtatgtgtgggctttggcaaacaaggaggataatctttgggtaaaatggatacatagtgtgtatctcaaagatgaagaatggtggggataccaagctccaaatcatgggagctggtattggaaacaggtagtggcagccaaagacaagctcaagcaattaacttcagttctgcagttcacacagagtaagttccaaatttcagcagggtatagcttactttgcccaactcaaagcaaggtacattggtgtgatgaagtttggggaaggttcaacattccaaaacatagctttatcttatggctagctgtgcagaaaaggctcaaaacaagggatcgactcgcaaaatttcaaaacatagctgacaccaaatgtccgatctgtttgcagcaggaagaaacggctgaacatttattttttaggtgtccattagctcaatattgtgtggagaaaatcaaggattggctgtcttggagaacacaagcaaaggacctccacaagcttctcaaatggatacacaaaagcaaaatcagcaaggtaaaaaagaaagttttggcagcagctcttgcacatttagtttattccatatggtatgtaagaaatgacattgtatggaataaccatatagaaaacaaagatatcattgtacaaagaatgaagaatagcattaagcatagagtagagctagttt

SEQ ID NO: 63150 - DNA, 1477 bp, Cannabis sativa
actctaacaacagatctcctaatagagtggaccaattccacgtgatttgtgcagaggtggaaggttgaagacacttattctgatgcagaactcgttcaccggaactattccagatgaactcgggcaatgtaaatcgcttaccaaaatccgaatcggtaaaaactttctcaatggaaccattccagttgggattttcaatttgcctaacgtaaccattactgaactcaatgataatcatctctccggagatcttccatctcaaatttcaggcgactctctcggaatcttggtcctttccaacaacttgttcactgggaaaatctcagctggaattagcaacctcaagaatttgcatactctgttaatcgaacataacagatttgatggtgaaattccaagtgaaatattcactaaattaaacttattacaaagaatcaatttcagctctaatcatcttagtggtgaaattccagtttcaatgtttagatcttcttctctaacgagcattgatttaagtcagaatagtttaaccggtgaaattccaaaagagattgctgatgtcaaagatctgagtacactaaatatctcacataacaatctcacaggccaaatcccaacaacatcatctcaaatcagttttgatgtttcatataataatctttcgagtgatcaagttccaaatcatgatcatcaccacaaaattttcaaatcctatttactaactctaactctgattggagtgagtgcactattgtcaatcatggtaattctcctaatcaccatcatagtacttcgtcacaagctcaagaacaacaaaccaaggccatggaagctgacaactttcgcgaaatcgctcaatttcaacgcttcagacgttatagaatgtgtcaaagaagagaacatagttggtagaggtggtgctgggatagtttacagaggctcaatgcgcgacggttgtctcgtggcgatcaaacagtgtcgggtaattggtgggagagatggcggtttctcagccgaaattaagactcttggacagattagacacaggtatatagtgaggcttttggggtatgtatcgaacaaggagacaaatttgttgttgtatgagtttatggaaaatggaagcttgggagaggtgttgcatggatgtaaaagagggtgttttttgagttgggaaatgagatataagattgcagttgaggctgctaagggattgtgttatcttcaccatgattgttgtccgaggattattcatagagatgttaaatctaataacattcttcttgactcaaatatggaagctcatgttgctgattttgggttggccaagtttttgatagacgatggaaaatctgaatttgtttcttctgttgttggcacttttggttatattgctccaggttagtcaatctatcaaatattattattagtatctctttgtgtgcactcatttactattgagaaatagcatgcatgt

SEQ ID NO: 63151 - DNA, 703 bp, Cannabis sativa
ataataattaataaacaaaataataacaataaaaagtgcttttaacatgtgtatatgtatgtaatatatttttatattaatctatcaagtatcactccaaaccaaaaaaaaaagttaattagtagaactatttcttttcactgtaaggcacctactcaatttatatatataatgataaatagaaaaaaaataaatgacaattaaagttatatcaactatttgtatacataatattttagagaaagaacaatattgaaatttggattaaatatttaaaatgcatgtatcattttctataaaatacatttacttgttatttgatatccaccactcttctttgatgtacactactcttgaattcattcttgtaaaattattataaaatggtggctcatgtactagatatgaatgtgagaagaagtagagatttagtaatacctaaatatctatgagagaggaaaaagaaaataataatacctaattatctattttgaaggtctttaaaaaattttagtttccacttttttttattgttaaataaataaataaaaagaaatgtgtgtgtcttgctaagttactattaatgaaaaaaaaatgacaaaaaaaacagaaacaagttatttttttagagaatatatatagtaaagagtaatttacggtgaaaatatctaagttttacataaagtagcacttaaatacctaa

SEQ ID NO: 63152 - DNA, 654 bp, Cannabis sativa
tcggttatttggtattaatcgacgtcataggtacacatgtgtcgtataacgagtgcacctatatatggcgttggttaataccaaataaccgacgccataggattaataaaaaacccttaattttatccaacctccaaccgacgacgtaggtataattaaattctatacttacggtttttactaaaaatccgtctctaaatgtcaatttcaaaccaagtaggtattttcacactctttagcttccctttttataaaataagttgaaaaaacagactctaaaaactcatattgtagtagtgtgataaaagtctcttttcttttttcttgtaatgatttttctttatttgacaataaaaatatgtatatattttaataaatatagttttgctaactgagaatgacgaaccataagcaagtcaataattttatatgatttttatgtatagcatcttaattttatcaatagatgcttagatgggtactattctcaaataatttttttatatatgaatgggtgcactgcgaataattgtatattttttcatagaggatgaaactgttaaccatttatttttgttaaagttaactttgtttgaataaattctgttacaaaatgttaaataaacatttatatacatttttatatatatatat

SEQ ID NO: 63153 - DNA, 918 bp, Cannabis sativa
agactctattttaattcgttgatactaagacccacaacccaaaaaactctaaaatcaaacagtaaatattacatgatttttaaaccaacgccacaaaatttccgagtaccatgagtgattttccaactaccacaatggacttttcgaccaccaccgagggtatccaaaccatctcacgagcttaaaaaaatcaaaaacacacaaaaaatataattaaacctaatggactcatattaacgagattaatacctcgatgcaagataaaagacaacatcacaatactaaaaaattatgttttcttgccgattttaaatattcagctaatgtattttcatcagtctctatagtcattgcctattcaaccatctcaaaactagacagaatagccgaaaatcatcgatgaaataatttactgacaggttaacaccattggcaatattataaactatagcctactatttaaaatcattgccatatagcctatggtttaaaaccctaggctatagtgtagaagacatttcaaaataaaaaaaaaaaaattattttaggttctcaactagtttttcaaagttttccatacatttctatgtctttaatccatatctttgatattccttcctctttattattttccagttatccaaaattaaaagtttgaccaaacttactcaatatattcagtatctcaaatgaaacaaaaaaacaaagccaattaaaaaaagtgtcttcaaaaaaaatttaaaagtagatcaagaaaaatattacaaactcatgaaaaaaatgttcttttcaagcagagacgagaaagagtaagagggggagcctgagatattcgagccttgttttgggctcgatggaaacctgggtctcggggttgtagacggctgatggcagctcgagctcattgttaatttgttc

SEQ ID NO: 63154 - DNA, 1698 bp, Cannabis sativa
tttgtgattttgctattgcgattaagttattgtgattagatttttgctacttcaattagttttgtctttgtgagatggttttgaatgtcatagtcttgtctctgtataattttatttcgccttttttgttctttggtggctcaccatcatattactgttagcagttgagaataacaagttatctacgattgcagggattatttttggtgcacttacataccttataatagttgagtattcaagctacgagattgaatgaactttttacaacaattaattgaatataagtgttttgtaatgttataatcttttttatctcattttattttaattaattattttgtctgatatggaaatcagactgccaattaaccaatttgtttttttttttattctaatagcaattcttaaaagcaaatgtatgattcagattatttaaacttgtttgatgcttagttcactaatattgtttgataattaattttgctgaattgtgttgttaattagttataactcaaatactccatattgcatatatggttgttgtactaggaaatatattctttattttttttagaaaagatgcttggaatactctaacaactgcctaaagcaagttaaagtgaaaattaattaagtaaaacacgtgcacaaatgaaaccccaacaaacacaactagacaaagacaaatctaaattgagtgtgttgttgtatactctaaatattggatcatgttgcatgttgtgccacatgccatgcaataataattaatacactctagccaccttttactctttcccaaaataaggtagtttgagaaatgatgaaggaaccaacatatatataataatgagaagaaaaatattaaaaagattctactagaatttaacattttctaccatgttatattaatgttagtttaatttaatatcgagtttttataatttaacataataaattttaaaaaatattattaattaattttaaaacactacttataaaaaaatattgagcagaaatgctaagtaggatgtcaaatatgactagatgcattataacaatattccaatgatataaagcattgttataagatatttgctaatgattattgatatgctataaaaaatattgtattaaactataaaagacttgatatttaattgcattaataataatataatacttgataaatttatagtacaatttctatcgggatattttgttcgaccctacttgtttcaacatctaaggaaattttttagtctattttttatttataatcgtgttcgttatagttatttatgattacttgtaaatttttaaaaaatttgagcagtttataatactaaaaataaagtttaaatatttttttacacgcacgattatttattacgcgtagtaaataaattgtttaaactttatttttgaaattttctaaaaatttacaaatattttcaaataattacaacttatatgatcatgaaaaaaaatagaataaaatacttttctaaatattgtagaaaatctaccagaacactcaagtaaaaaaattcctatgacactttttaattagctaataaattttacaagttttgtaattttacattaaaacataataatactaaattttaatatgaaattactttttatactcaatataacactatttttatatctttctcattttttatataaaag

SEQ ID NO: 63155 - DNA, 995 bp, Cannabis sativa
  modified_base (777)..(783): a, c, t, g, unknown or other
aacaatcttaatagttcggagagaatttttaatggctaaaaaaattcaaggggtataatttagtatattttaaaatttaggtgcaaaaattctaattagtctaatttaaattaaaatggcacaaatagaaatatagcatatagtaatgcttggatctaaaataggagtatactttcttgcattcttctatccccctttatcatgtaatgagttagaagtcgaagataatggtttataggcgaaatttaatttttatatatttttttggtaaaagttttaaaaaaaattaaaagtaatatattttagggtaactattacctccttagggatattcaacatttttatagttttttaaagtttatttacataaaatacgatatcatgtatttttaggttgtacttttgttattttattgttggttttttgttatttgtacattattttttatgttgttttcttattattttcatgtgaattttttgttgttttgttctgtttttataaaataccatataaatgtaaaaaaaaaaaaaaaaaaaactttaaataaaaaatttacaaaaattagtattttatgaaattattccttaaataaggggaacttataaaaatactaaaatttgggttaatttttacaaaaatactgtacacggaaaggttttcaaaaatactctgtttttataaaaaaaaaaacaccaatagaacacaaaacaaaacaactcaaaacaacagtagaacaactaaaaaacaccagtaaaacaccagtgaaaacttannnnnnnatactgcagtatgaaacttataaagaaatacagtaaaaaagtaaaaataccacctggtagtatttttgtaaaaaaatgacaaaattattataccatctaaatttccctaaataagtttgtaatccctccagctcttatgtttaggcccaaaattatcagtctaaatactttagggctttagaagaggcccatataaattggttatttatcaa

SEQ ID NO: 63156 - DNA, 1571 bp, Cannabis sativa
  modified_base (26)..(29): a, c, t, g, unknown or other
agtccaattccctgtggttcgacctnnnntgtgtgagtttactacttgattgcgtatacttgcgtagtgataataattttcgcaacacccagataccacctctatccaatatttctgcccatgtgccgacaaataatcctaccacaaccatcacccgaactcatcctatgaagactcgatctcaaagtggcattagaaaaccaaaatcctaccttgccactaaacatccactccctgaatctcttctaccaactgaaccaaaatccttaaagtctgccctcaacaacccaaaatggctagctgcaatgaattcagaatttcaagctctaacaaagcaaagaacctggacactagttccctatgaaaagcatatgcaagtcattaccaacaaatggatccacagaattaagcttaacaaagatggttctttaaataaattcaagtctcggctggttgcaaggggctttcttcagacacctgggatcgactacgaagatacctttagtcctgtagtaaaaccggtcacagtcagaatcgtgttgtctttagcagtcaatgccaagtggtttttcaagcaactcgacgtgagtaatgcatttctaaatggagatctcaatgaagtggtatatatgcagcaaccactaggttttgtcgacacatccaaacctactcatgtgtgtcttttacacaaagccgtttatggcttgaaacaggcccccagggcctggaatgagaagcttagacagacactattacaatggggttttcatggctcgaaatcagattcatctctttttattcatggctttggtgacacattggtgtatcttttggtatatgtcgatgatatactcatcacgggtccaaatacaactctcatcaacaccttcatctcagagttaaacactgcattctcattaaaagacttggggaagtacactatttcttaggggttgaaatttatcgagacaatacgggtatgtatctaagtcagagcaagtatatcacagatatactcagtatagttcaaatggaaggagcaaaagtatgccccaatcctactagttccacttccaaattgagcctacttgatggggacccttttgacaacatcacactatacagaataccttagcttaactcgacccgatgtagcctacattaccaataaactcagccaattccttcatgctcccactcttaaacactgggaggcatgcaaaagactacttcgttacctaaaaggtacactaacagatggattatggctcaaatcaacagatacttttcaactacaaggctacacggatgcagatagggcaagctgcatcgacgacaggagatccacaggaggctatctaatgtttttgggcaacaacttagtatcctggtccacaaagaaacaataagttgttgctagatcaagtacagaaagcgagtttcgcgcccttgctaatgctactgctgaggttaaatggattacatcacttttgtctgaattacaagtaccactctctcaggctcctattttatggattgacaatcagagtgctgcagctcttgcagcaaat

SEQ ID NO: 63157 - DNA, 600 bp, Cannabis sativa
acttcatcatatcagttcagatgatataaataattgtatcccgtcattttcagactaatgagaaaaacactcttcctctccaattctctttctctctgtttttccattcattttgtaatagatagtgaaatacaatgtcaaaagtagaattacaaatgttagaattaaaaagattaaaaaggtggacaggaattggtttgaagttttgtgagctttgtgaagttgtaagtagaacatactgtggccatttataaatggtaatgtataggttataagggatagttatgaaacaatataatcatctgatttatcaaaaaaaaaaattatccgctctattatatcattgatacaaattttattattctttttcctacattgtacttagcggatttatgaaaataatttatattcgtacaaatatatatatatatgtatatatatctcaacccatatatgagttttttttttatatttttgtgataagttctaacataggcattaagaataaaaaactttatttctacactaactataaaggtactataattaactctcacatatctcatatcttaaattaaaactatcaattcatgtagattg

SEQ ID NO: 63158 - DNA, 853 bp, Cannabis sativa
ctcccaactcatccaactagtttgtcttctttgagatgagcccgtttgccaccaaaatttcgacataagccgttccatttctttgcaagtatccaccggaaggagaaacgcgttcatagcataattaggtagcgcttgggcaaccgtcttcaaaagtacctccttacccgctctagacaaaaatcggccctcccacccttggattcttttgcacagcttatctttcaagaaccccaagatagttgttttgcttctccccataatgctaggcaaacccaggtaagtaccattttcatcagcctcaaaaatgcctaggagatcacatatggaatccctcatggtgacatgagtatttgaactataaaacactgtagacttagcaaaattaattcgctggccagaagcagattcaaagacccgaagtatttccaagaccatattagcctcttcctcggaagccctacaataaatatagctgtcgtccgcaaacaacatgtgagaaacaaaaggcgctccacgagcaactctacatcccctgatcaaaccacggctttcatatgcatgaattaggctagagaaaccttcggcacatataataaacaagtaaggtgataacggatcaccctgtcgaataccacaaaagggtgtaatcggccccatagactttcccccatgtacaagattatagcaaacagacgtaaaacatttcataactagatcaatccagcggtcagcaaaccccatcttagagagaatagcgcgaatatatccccattcaagcctatcataggctttgctcatatcaagtttaagagccatgtgtccatcccgccctcttgttttcctcttaaga

SEQ ID NO: 63159 - DNA, 595 bp, Cannabis sativa
ttgaagttaaattttaataaaatactttataaaataacaatatactacatttcatttcaaaaaaaaaaaaaacaatatactacatttatagctctctattagagatgctgtaatagctcaaatttagctcatttgatggaaagtcacttttatcactttttttatattttagagaatgagatataaatttgattggagtgatctaagatggagattgtaaacctccctcataaattaaaagttcaaataaaaaagtaaaatttctaaatgtcctagttgattttttttttttttgaaataatgtcctaatttaattgatcgtcaataaattataggtgttgagagagatggcaacacgtagcaaaagtgtagatggtgacagtgaaaatgagggtgaagttggagaagataaatttagaaaaaatgaaatacatataaaagctattttgataagtaaaagaaaaataatattgatgaaataaatgcactataatgtcctcaataatgtgttatggggaacaacgtaatttttttctataccaccctatatatgtatttttataaaattaatttcttttaacaaagtaatttaaaa

SEQ ID NO: 63160 - DNA, 1678 bp, Cannabis sativa
tcaggcaattctttgcttgtgatcctaaaaaatcaaacattatatcatcagttgataacactctgatgaagcttggtaagtcctttagtcttatgtctctcatgccgggaatccagtctattggcgtgttaagcgtgccatctttcatgaagttttcatctgaaataaatgatggattaaattttaccttaaaatgtgtaacaccaaataggaaagcagaagtgttagtatagtcacattctttcttactacaaaaatatcaatgagaatatattgtcaataatgaaaaaaaaaaatctcaatgtttacacataatgatttgtttgagctcttaaagatatgggtggtgtttcataggattttaaaaatgcatgagatcatcaaaactaattaaagtctattaaaaaaagagtttttttcacctaaattctctcaactatcactttatttacacttaaatctctaagtttaaattttgacgataaaaccctccaaactacttaactatttacaaatttaatgtgtcatccactttctacagttaactgccaacataaactgcttatgttgtacactcttatacacatgacacatattggtacacctaatattattactttaaaaatataaaaaatatttcaaattttatgatattttattttataattttacttcatttgaaatgaattttgaaaataatttttaaataataatattcggtataccaatataaacgtatcacgtgtacaagagtacgcacataaacaatccatggttgcagttaatcgaatgacaccttaaatttgcaactgattcagtagtttagagggttttactgctaaaatttgagtttggagaattaaatacaagtgaaatgatagttgagagaatttagccgccaaaaatttttaaaaaaaaatacaaaatcaatctatatataaatagtcgataacattaaaaaatgacatatgtttgatgtttcactatttactgtcttgttcagatcttttcatagtattatcatgatgaaaatatttaaatggataagatcccaacactaagttaataatctgtagatgatccaaaatttggattcatcagtagaaagagtaaacaaaaatggagagacataaatattgaaaaactaacaaaagagggatataattgtaagaattaatattaagaacgactaaactataaagtaattattaaaagggtaattactccttgtgttctaaaacaaaaacttgtaaccatatgttcaaaatacaaacttgttaattatcttatgtttcgattatgtgtttatttagtaatttttaattagaaaatgtaaatattttgtatatccactgaattcaaatttgatatggccaaaactagtacgacttgagtttatatgaattaaattcatatgtaattacttagttacatataactgatgaaagttaaacaaattaatatatgtttagtgtactaaatatatataatataataaattattaaaaatataaaatattttgatcaaagaaattaaatgagtttcacttatttatggcatgtttactaataagtaatgaaaatcaatagaaaggtaatcattccattatatttgtttacttgtattattaaaattatgaaagagagtagttgattaaataaaaggagaaaagaaagg

SEQ ID NO: 63161 - DNA, 1120 bp, Cannabis sativa
  modified_base (87)..(89): a, c, t, g, unknown or other
atattgtgttgggctgggtcaatatatatatgtgtattttactctttataattatttagtattgttaattttttttataaaattatnnnaaaaattataaataaaaattattttgaacacttacaaaaaaagtgttaaattattagtattttataaaaaaaaataatcattattgtaagaaaaaaaaaagctatcacattccattcctatatcaaccaaacaaagtaatctttatattttccggcattatcataatattattgggtacaaccaaacacggtaatattactttcttaggtttataattcccttcatcactctacaagcaatgttaaactcattcccatgaaatgaaacttgcatacaaaacagcctcttatagtgtttcaactagggcttaggtttaaattatatggattaaaaaagaataaaatattggccactaaaggaacactttctaattacaattttgccactttatttcaactacttattcttctttcaataataccatgttttctaattcaattctataaatgtcaaaactatttatttaataattataactaatcatcaaataaaattgtcatttatattatttatcattcttatttatacgtggtgattgtgagtaataaataaggctatgttagttgaccaaattctgagtcaacagttacatatttgatgtaactattaagtagtgcatatatatttaaaatattaactttcaatatttattattattattctttttcttaacattttaaatactctatcatacactaagtagccatttatatttcactttgagttcaaatggattgaaagttccacgaggtatatttttttcttccatgtgtaatatcatacagatacaagttaatttcataataggtttacaatttcgtcaatcaatttacaggatattattccttatgtgatgctggatacctaatggtgaaggcaacttagtaccgtatagaggacagtgatatcatttaaacgatttggatgtcccacctactactcctgctgaatttttcaatacgaaacattcttctgctcggaacgtagtagagagagcattcggactattaaagggacgatgggcaatcct

SEQ ID NO: 63162 - DNA, 789 bp, Cannabis sativa
  modified_base (26)..(30): a, c, t, g, unknown or other
tttctgatcttttattaattagtaannnnnattatattaaaatgagttttatttggggtacaaaactcaacaaggtgatcttctcgctatgtgtaatgcgaggcggttgtatgttgctacacttaatctgctcgtgcaggagagtatcctcttcttgtatatataaatgagcttatctcgaagcaaatatatgtctcgttaataccagtttaatagttattattcttgtctcgcataagactgagcagcccacaagtttgaacattatctatcaaacttatatttaatagggatgagttattttaaattgcatttaaggatgcatcattattatattatcaaagttgattcacattctttctgtaggacacatgtcaacctctagtatataactgaattttaggtataacacctaagaataattttgttatagcgtaataagaaatcacagagagtagtactcctagtttaatcgttcaaagatccttaaaaatcgttatagatatgagcatttgtctcagtttcatactttttatgtcaaccacaaaattattatgtattattcataaatttaattcattcttaaatgttatgaatattttatgaaatttaatgtgctaatttttaactaatttgcatgttaaaatttatttagcactttagattaagattaatgtctaaataattatgtgatccatatattttatatagttaagaatgtgtggctgctccgtaattatttaaagttatatgatccacttagagatattatatttatgattaaatttt

SEQ ID NO: 63163 - DNA, 970 bp, Cannabis sativa
tgctaaaaaatattattagtatctcggtcatatttctattgggtgtaattaagtatcgagttctatataatttaaaaaataccactaactaattataaaatgtcacctatattagttactggccaccactatatatactatatatgaaacatatttttgtatgggcgcattaatagggaattaatgcacttaggtctatgtgtacgtggaaataggacagccaaaagtacattatatcttacaacataaatattatttttgatattaattaataaaaatgattctaattaattacttttctcatagggacattcttcttgagtactcaaaccaaataatgaaacttgggattgtgttgttcgagttgttatccgaagcattagggcttgatccaaattacttgagcaacataggttgcgccgagggtctatccattttaggtcattactatccaccatgtccgcaaccagaactaactttgggaacaaccaaacactccgacaatgacttcattacattgcttctccaagacgaccttaatggaggtctccaagttctaaaagataacaaatggtttgacgtaccgcctgttcccggggctctagtgatcaacattggtgatattttccaggcaagcgtttaattatatagcttttatctattctatatgattggctcgacatgacttatattttattttgtgcttctgataatatttagtcaggtgtcctacacggttcttgattataggtgaaaataaatatatataattactttattatttaaaaatatttatactaacactactataaaatgcactttttatgtcggtccaaacgtatttaaaactaccctatttcttaggtagaactgaggaacataattgtatttaatatgttcactcttaatttgcactcacttatgtatatatgcattgaaattgttttatgcaattgtatttatttttata

SEQ ID NO: 63164 - DNA, 637 bp, Cannabis sativa
tgacatttgaataatattcatgaagacactctacatgcaccgtaattattacagaaaacaatgttcactttgctacttcaagatatatgatcagtatattcaattcacaaatgatcgacaagactatacccacattcattctccaatattattaatacaaggtggtctactttaacaaatgaaatgttaaagtagagtatgcatgtgctcatatatatatatatctatatatattattagtagccatattgagttactcacccaatcgtggcaggaaagcatgaaatgatcagctccattgcttgcattccaaaatgggtatttattggccacaacacccacataatcagtcataagtcgatagagtcgatctcgattgtaatcagatgggtaaataatagggctataaataaacttaatgatatgagcaacacttatgggcaggaaaaatgtgtgtgcttcctcaggatgcttagctctaaaagggctcttctcactctctatttcctctatgaattgtccttcaattgaatacacaccattcattcgtccagtatggaatataggcctttctccttctttgtagctccacactttgaatcttttcaccatctctatgtgactcctgattttgttc

SEQ ID NO: 63165 - DNA, 614 bp, Cannabis sativa
ggatccaatgtcccctcttttatttgttcttaccatggagtacatgactagactcttgattcagagatccaatttaaaaggtttcgggttttactctctttgtaggtctcttaaactcgttaacctttgctttgcaaatgacctaattatcttttggaaagataatgataaatcggtggaacgtgtgtatgaagcttttagagtttttagtgactcaacgtcttaaggctaatgaagataaatctttagcctattttggtggtgtggacatcgcttgtaaagactgcattttgggactgttacgaatgaaggagggatctttccccctcaattacttggggaatcatcttaggccaaccaaatggcgagtttcggactacgacattattcttgacaaaatctacaagaagctccatagctagtctagtaggaacttatcctttgctggaagagtgcaattaatccactcaattttgttagggataaagaactacttgatgagtttgttcattctccctcaaaaaattactactgctattgacaaatgttgtagagattttctttggggaatgaagggcaatcgaagcaagtttcatctaacttcttgagagaaa

SEQ ID NO: 63166 - DNA, 854 bp, Cannabis sativa
  modified_base (173)..(177): a, c, t, g, unknown or other
ggctgtctctctttctctctctcatgcctccaaggctatctctctctctctctctcatgagagatctgcctatgtgttcatactttgtaaccttaaatggagctatatcagatctcacctagagtgatctgaatagtattatccctctgtatcaatacaactaaaaggagagnnnnncattacccactaactaagggggtcaaacctctagaaaaatctttatgttctttacttttgagttctaattgcgtaacacacgaccaacatcaaatttatatgaccccgctgtcagttgaccactttttgaggtcaatagtttggtgctttcattgagagtgagttgatatcatatctgattaaacgccatggctaaaacaaggagaactctagttgcaccatctgcatcaatgggtcttcctcaagatcctctgactgtagatcttgatgtccatgttccagtcatgactggaattcccatgaacactacagacgtggtcaatcctatcatctcgatagacaccacgaatctgaccactacagctggccaggatggcacaaacatcctaatggatctgaaaaatcggcctccgcctccaagggaggaccctccacaggcgcctcccattgaaggaaggacccttggggaattgacgagcccaatgtggactggggagaagatttagagttagccaaacttagagaggttgtttgccaagccgacctaattgaagaaccacacgttgttaattgcgatgtattcgctcaaaagagatgcaaattctgaagatggacagatgaccaatagtacatcttttgatctcaccaggcgtagctggatcactgcaacagagagg

SEQ ID NO: 63167 - DNA, 1127 bp, Cannabis sativa
ctgatggattcacgccaagcatactgtcttgctccatctttgtcaacaatcttgatcaagaaatttggtggtgcaacaaccagcctagatcgaatctccataatgcatttatcgaccaaatcaatcgcttcttccaatgacatgccactgtgataatgtctatccatcatggagagtgaaaagtaggatccataaccaaatgctcccttctcaaccttgtgaagtgtggcaatgtagtcgatgtaatagagtgatggccctgtctccttatcatatccagctaaaaggatgttgacagagtaaggattctgcaaaataaatatataaataattaagatacagttaaccaagaactgaagcctgcaaagattctataggaggcaagtacaagcacaaaaaatgcagctcgatataacatgatactaattgcacacaaaactcccatcttggtattgaagctagatgttgagacatacattctgtgccattagaccacagttaaattaaaagatcctagaaactagatttctggattctggttcaactgttaatgaatccagaacacatcagttattgcacagaaactcaatgaatttaggatgcttgcatccaaatttaaaagcatcacatattctaatgaccagataaacaaaattcaaatgggagtaagacagcaaaaggaatataggagacaagaaaatatagaaactatgcagcagtgtgaagtaaagtcgttttaatttcatatgtttattcactacattccacttctttttttaattctgcattcttctaactaatagaacaaatcaatactgagaaagtcagaatcaaccaaaatgaaataagccacaggcacctggtaagttcaaaaacacaggaaagcagatctcagtatcacatatagtatgttgtcactacagcaccataacttcgtaacttgttactccgatagctaagcaacgtaaagaaaacgaaaaaaaacaaaaagttacagcaaaatttgaaaagaacaaaagcttattgctacccaaatgccatgatacttttaatacactcgagttcttataaatttctctcaatctacaatctaaagtgaataaaaggggtttcaatcaacaaattta

SEQ ID NO: 63168 - DNA, 1759 bp, Cannabis sativa
aaaacagagtgaatttctcattaatgaatcaaagaagggagtgagctttatatagctcaagctcaagaagattacaatatgtagttagttaaaaagttagttacaagaaccaactaaccaaattaaccaacataacagaacacaacggaatgtaaccacaaactagtggcagtaaaagaccaataaaggaaatataacaagcctattttaacaggccaccaaatcttggagcttgacattgacaaagcaagcttggctagatcatgggctatcgtattaagatttgtagagcaagaaagaaaacaaacagattagggatcggttaggcattgacctcccttacactagcttcagtagaattttcaaaattataaactaatgtcgtgctgggaacaggctaggggtgcacggtacacttcgtttattttattaggtacacttattgtaaaatgagagacgagataacagaaaaatattgttggattattttgaagggaaaaatattataggattattttgaaggggtatcagcgaactgccaagaaaatttggttagaacttcaaaatctcgttcaccactaacatcattgataggtagagcatcacaaatttctttcatgtcctcttctgaaagcttcacagccaaagatccaacattgttggccaaattcttaactttagttgtccctgcgtaaaatgattgcaaaggataagaatcagccagttaatgagtagagctaatcattttagtttgttaagacatcatgatcagcttcatatcaagcctagtacagaaaaccactttgtacaatggtggctcttaacaaaacttaaaacattattacaaattgaaaggaatattaatttttcaaataggatttggttccaacttaaaactaaatcacctaacatgatatttgacagaataccgtagtacaaattgaaagggaaaagccttttactgcagaatagtaattcaaccttaaaaattagttggtgttaagtgaggtagttatttcttataaaatctggatacttaataactaaatcacatgcacgtgaaaaaataattaaaagaaaaaatagagtcaaacctacccgggattggaattatgtcggtggcttgatggagaagccaagccaaagctaattgaggagtggtacaagcatgtttggcagctagattggcaagtttgttgtataacattttgttcttctccaaattctctccaatgaatctaggatggattgactgtgaaaaaccaaacaagttgataaaattagaacaaactaagtcagcgaaccaaatttatgcacatttaaggttgaggaaacgcttgtttcgatccatgaaaagaagaaaaccttggttacttattattcatacttaccaaaagactctcatttggtaagctttccaaaactgcttttccaccaaaaaagccacgaccaattggactataagccactattccgataccaagttccctgtaaacaccaaattttaactcaaataaaaaaaaatggtccaacaaagaagaaagcagaagaggccataaagagggctgttcaggaattttttttcatctgaatcccaagagaaagagagatggtatagtatcaaagaatgtttggttgcattatctatacgtgcatcagttctttacgtgtgtgtataatagataaacgaatcgaagtcaaaataagttgttaacttgagaaatcgaagtcaaaattagcagtatttcattgatgcgtt

SEQ ID NO: 63169 - DNA, 1525 bp, Cannabis sativa
aaaattaaaaaaaaaaattatttgaatttaatacaaaaatataaattaaagtaagataaataataaaaatatcaatatctaataatggaaatttaatattgttgctaaagaaataaaagtttggggatcaatttactaaaatataaagtttggggaccaacttgccaaaacttatatagtttggagactaatttaccaaaaaaataaagtttgagaaccaactttccaaaacatatatagtttaaggacctgtagtacaaataagccatatataaaaattcaagtaagggataattttgtcaatttatcatttgttccaatattcattcttataacaaaccaaatatcttaatcaattcttattactcttcttatttcattacattacttattactatattccagcaaaccaaacatcacctaaactctcaaaaatctcagtgaacaaatcattgctaatcaaatttagaatacattgcaagattattaagacatgggaaggtaaaaaaaaataagtcacgagtgtgtcattttgttagtgaatctatagactttttgttagttaatatatgggacatattttagaatttgaagtacaatttaatagtaataagagtaaaaaatctcttttattctataacttatattatatatttttttaattatgtatatgaagctagtacaaatattatagtttgctcaactatatattattcccacacatttttcgaatcgatcgaataggtaccttataattgtgcgtttataataaatgttttaaatagggatatactatataatatcttattcgattgtatgatatttagtgtctaaattatgagtctcaaatcatcttatattatattatatttatcgttattaacttaattgaatttcagtttcacattacgtttatgatcatactttttcggtctagtgggaatgtacatgaacgtatatagctaagaataaatgtcatgccgaatctaatctaatctaaatccaaaccaaagtttctaatttattgatttttttagggtttgtgggtcctaatcaagcacttaatatttatggtattctgatacatttcctacttattcatcatcaccatgaccagaacacaggagaggttacatccattaccactattaattattattattattattattactactattatttgtggtaatgaaaatgtttccacaaatgtcattcttggaaagttgtttactcgcggaaaaggcttctttgtcctttcgggaagggtcttcagcgagtgccttctgtccgtgattctggaagctcgtttatgtttctggatatactgggacttacgctaacgtggagacttcactcaaagaggagtttgttattaagttaattattttctaacttatcaaccttattttttccagccaccaattttaagatcttgatcctaagcctataaataccacattgacttctcattttagagacacagttcagattgagattgagagtttaagagagagagagagag

SEQ ID NO: 63170 - DNA, 1089 bp, Cannabis sativa
acatattcgtatcttaaaatattgttatttctcggtactgaatcaaatttattgtataggaatattgatgttatgtatacatatataaattaaattaaggtcaaatatgttttattaaataataaaattacattttctgtatttattcctattagaaattattttaaagttggttataataaaaaataaaattgttaaaaattgagtttagggttctatttttattattttaaaaaatataaagtatattttatcatttaacaaaacagagattctaatttataatttttacaaaatactggattcaaaatagtatttactcttaaattaatgatattttgcaggctttgaagcagttgcctcgagatcaagttcagttagccacaaaatttggtattgtggaaataagagctgaccaaattgaggtgaatggaagtcctcaatatgtccggtcttgctgtgaggctagtcttaagcgtctgaatgtggactatattgatctctactatctgcaccgagtagacacaacaatccccattgaggatactgtgagtacatttttcatcatatatattaatataaaaaatttagctagttcttgatcatttgctatttatatatatgttacaattattatttatagatgggagagctgaagaagttggtagaagaaggtaaagtaaagtacattggattatctgaggctagctcagacacaataagaagagcacatgctgttcatcccatcactgccatacaattggaatggtctatttggactcgtgatattgaagaacaaatcatcccactttgccggtatttaatctttattttatgagattattataagtatcgattaattaacttaaaatagtaatttctgattgattagttttggttaaaatgttaattaatgacagtgaacttggaattggggtagttccatatagccctcttggtcgtggatttttcggtggcaaggcagttgtggagagtctacctcctaatacttttctggtatagtaccataaatattaaagcttcctaagaagataaatccacctgatatttacttattatgtcactttg

SEQ ID NO: 63171 - DNA, 1431 bp, Cannabis sativa
gtctgctttactcccaaagactcttccccaaagactcttccacccattgatcatttcaagcaaagtctaagcttgaatttttatacaacttcagcttaccttcccaaaacccgaagcttgtttcatgaaattcaatgtgactctcgcatccacgtttgtgcagtaaagatcactgggggtacagtacgtcttcaaccgaccttcccggatcggaaggactacataaagtttgtcctgcccctcgtgatgctttttcctttgacgttttcaagctaagtctaagcttgaatttttatacagcttcagccttccttcccggaatacgaagcttgttacataaaaattcaatgcaactctcgcatgcacgtttttccagaaaagatcacttggggtacgatacgtcttcaaccctccttcccaaattcgaaggacttcttgaagtctatcctacccctcgtgatgattttccctttgaccttttcaagtgaagtctaagcttgaacatttatacaacttcatctttccttccaggaagttgaagcttgttacataaaaattcaacgcgacctctcacatgcacgtttatgcaggaaagatcactggggtacgatacatcttcaaccctccttgattggaaagactacttgaagtctatcctacgctcatgatgcttttccctttgaccttttcaagcaaagtctaagcttgaattttaacttcagccttccttcccagaagccaaagcttgttacataaaaattcaacgcaactctcgcatgcacatttatgccagaaagatcactaggtttatgatacgtctttaaccctccttcacgaatcggaaggactaattgaagtctatcctaccccttgtgatacttttccctttgaccgtttacttttccttttgaccttttcaagcgaagtctaaacttgaacttttatacaacttcagccttccttcctggaagccaaagcttgttacataaaaatttaacgcgactctcgcaagcacgtttgcgtagaaaagatcgctgggggtacgatacgtcttcaacccttcttcccagattggaaggactgcacgaagtctatcctacccctcgtgattcctctttgaccttttcaagcgaagtctaagcctgaatttttatacaacttcagccttccttcctgaaagtcgaagcttgttacataaaaattcaacgcaactctcgcatgcacatttgtgcaggaaagatcactgggggtacaatacgtcttcaaccctccttctcgaatttgaaggactgcttaaagtctatcctacccctcgtgatgctttttcctttgacattttcaagagaagtctaagcttaaatttttatacaacttcagccttccttcctggaagccgaagcttgttacataaaattgagggggagtttacaa

SEQ ID NO: 63172 - DNA, 1335 bp, Cannabis sativa
  modified_base (117)..(117): a, c, t, g, unknown or other
accgcttaattttaatatgataaagtagcagataattagggattaattacggaattagatttctatttatgatttataaatatggagatatatttaaattctaggtgtgctatttangttacatatgaaattttatgtttttcatattttaggctcgacaacattagaacgcgacgtttggccaatagaatcgtattttcttatgatttaatattttagtaatagcggagtgagttagatagacattggaaatgtcaagaatattcgagattttgtaaatgaccaaattacccctaggtagtaaggttgccttttggtttaggtaagggcaaaatggtctttttggccatttcgattttgttcttcagtgagtttatttatgttttataatctgattttctaattcaattaagttagatatacactagatttttccattcaaccaaaattagaaaaataccaaaaattcaacactttctctttccttctctctctttctctcgagctctcttgaaactagcagaaattagggtttcatcagcttgattctgaggattttagcaagttttttgtgtatccaattcaaggtaaaattcctagcaccttcctccttgtttttttttttttttgaagttcaagttaagttcttatgcatgtttttgcaattaggattttgtcatactagatagtgtttggttttgtattctgaagttaaattgaagttatttaggttgatttgagttgaatttgtggactgttatggtgtttgagcaaagtttgagtttaagaactcaagctttgctctttaatggtgtttttagtttctgagttaattattgtgatttgttgcttggtttcactttattatggtattaatgggtgttctagaagttcttgtgaagtttggggtcgaattgaggtatttaggagatttttggtgtttcctgcactgaacaggtcgaccggttcagtgggacctgtaggaaccgaaattctggttggttcccaggaaccccacagaactagacttccggttaagacagtttagggaactctagtttttcctatttttgcgatatttagggtattgccatgttatccatcaatagggaaacttttagtttcaattttaagtccctaaaaagcgatttagcgtgtcattcatcagttttacggataatgtgatttaggggcctgtaaatcgtcaagcagcagtttcactcaagttagccgaaacacttgaatttggaagtgaggtaagatttgtataatgatatgcatatgtgtttacttgtttagcatacatgtttattaagcatgttagattacatcgat

SEQ ID NO: 63173 - DNA, 904 bp, Cannabis sativa
tatgttcaaacaattacttgccacacatataagtaaaaataattatgcatgtaataaaatatttgaatcttatttttagtattgtaaactattccaaatttttttaaaaatttacaagtgatactatctcgaagccaaaataaataaaaaatctacctatcagcgaccctttaattaagggatgtactatagacttacactcagggccggccctataagcataggcgggctaggcccgtacttaggacccacatctttcggggcccaaaataaaaaataataaaaaaattattaaacttttatttaagtaaaattaagtgtattgtaaataatgtcatattatacaatgtcatgagttcgaatctcggaccctgcttacactataccatttccctctattcataatttaatagtagtttgtttgaattttaatttgagtttcaggcctgcttttagtttcatcatagcattcatgacagttatgggtatgactattgcttttgccaaagatatttcagatattgaaggcgacgccaagtatgttatcatcctaacctatttaataatcactggaaattatctgatcaagttaatattttaattttcttaaaagataattatgatattttttcagtgtaaatcgtaaaagaaaatagtgatgaccttatcgttcacacaattttaaataaataccattaattaacaataataattatgttaatttgtagatatggggtatcaactgttgcaaccaaattaggtgctaggaacatgacatttgttgtttctggagttcttcttctaaactacttggtttctatatctattgggataatttggcctcaggtatgaatttaaatatcattatttgatactattatgtatattgaaatgaagtattttg

SEQ ID NO: 63174 - DNA, 1347 bp, Cannabis sativa
tatcctcttcgtggcagatatttttgatcttaagtgatagaatgctttttatttctgcaagtactgtttcgtttgacgccttaattctaagagacacatctcctatatctacaacaattattccttaactattcaataagacttaacataagaagttatatatttatttatataaatctttaccagatagaataaaatctctttatttatttatgaattccaaaggataacaagctaaaggagttacactaaaactcctaactaaagtggagctatactaaaaccccttattacataaacaaataaacacataaaataaaatgcaacttgactcttctactcttctatgtctgacccttcctctaacatatcttctatcaaatctacgtagtcgagttctatgtacactaggtttgacgagattggtaacttttaaaggaatttagacctaacaacattattgggtcgatgatatatttcttctttagagccattagggtgatatatggtgttggtaattttgtactgatccactaggttgatcataagtaggtcatacctttcggcctcatctatcccgacatgccctagatgttcccaatttgctcttagactacgttagacatgtggcatattgagagcgtgcatcagggctatgtacttctcatgtgacttcaataaataattccaacggtatattgtcttatccaccccctcatgtattttgttaattctatcaaagactttgttttcttctcgcatgggtggggtcttggggaatctctttaaggctttaatatgccttataatgtgctctacttgctctggtctcatgatgttggtgcttagttggttctaggattctaaaaataaaaagaattttaaaattactaaaatgcacataaaatacaatcatgcaataatacttacttagtagcgagtggaacctttttagccgatttgtgtaactcgtgagaacgttcgggatcaatataactgtggctctcataccaactgtagcgcccatacttttttataaattactaatttatttacaagcattaaaatacgaaaaaaactgtaatgttacttttatttataaacataaaatagttcataattgagcttagttaggactttacagacataataatcaataaataaaaaaaataaatgcgacattaatttaataacacttaataaaataaatggaacgtgccttagaccaccctcagttatatggccctcaacgagtacacacaagcctccaaggtctcactcgccaccgactttctaacttttacaaccttaatctgcacatgataagtttgataagggtgagctact

SEQ ID NO: 63175 - DNA, 1496 bp, Cannabis sativa
attaatgttataaagttagacaatgtaattatatgtataaatatatatttaaataatatattattttaaatcatgtattttataaaatattacaatttgaactatctatttgataattaatccatgtattttttttttaaaataatacaaaataatactctgagcttaatttttgtcaaaattaaacttaataataaactaatttagaggtttatgaccagattgatggttaagttttttttatctattcgtgctagaaatcggtttcaaattggttatatttttttaaaatgacgaaaattgtggtcagggtattattttatatcattttggaaaatacaaggtgatttatcgtttaacaaaataaatgatccaatcagtaatttttgtaaaacaaaaggtctacaaaaaatcttacttttagtcacaaaaaaatttgtaactaaaagtaagaaagttgtgactaaatataaatcaacattcctatgttgtgactaaaaagtttgtagctaaagatattagtcacaaaaattataatttattgtgactacatgtgcttttagtcacaatacttgttgtgactaaaagtaaattagtgacaacttgtatctaaatactatgttttggtcacaagtaatttttgttgtgactaaaagttacatttagtcataaaaaagttatattgtgactaaaaatttatcactaaaattagatgtttttctagtgtatttatatctatctataggaaactcttaaattttggtattacttttgcttttactataagagttttttctatttttgaaatccaaaattataatatttttttatatgacattgtatagtgttgttatataacaaatatcttacttatttttttaaaatattttatatgatttacaatgtcaaagctaaataagttcaaaataatcagttgcacacgtatgaaaaaaaaacacaaatacgtctgcaacttattgtttgaatctatagtacattaaaaattcttgaaaaaagagagaatgaggatcgcctactatattataatatagttatcatttaagaaaaaaaattgagttataatattcttcatcatatactaaaaataaaaataccttatcatatttgaaataaaagattgcagcatataaataaaaagggctaacttctaatttgtgcagcttctatctcatcaagaattgcagcaaagccattaatatgtctattgtatgagtaaaatatggcatcttttgctttttcctcactgcaccaaatatacacacaattatatatatatataatataaaagaaatatatataaaaaataaaataatttattattattattataaatatattaccttcctaagtatgatccaagaaggttgtaatgagaatttgtggcactttcaagatcatcagaagaagggttcacaccatgagaatgtgaatgtgttcccaagtacacaatataaggctacatacacatattaata

SEQ ID NO: 63176 - DNA, 947 bp, Cannabis sativa
tcaacccatgtgagattcggcccaataaatgtgactatgtttcggcccatttcgggttgggttggccgagttggtcggcccatttctaacccatgctcacccctactagcttttatcatgctttttgtttttgtttttattatttttttttaatatttttgagagattttgttattgttatgttaatgtaatgtatgtcttatttaattatttatttcttgactttttttttcacttttataactttaaagtgaatattttagtatttgcgaaagtaatcatttagctagtttctaatatatttaataaaaaaaattgaactttccactcaaataaaaaaactcaaacaaaattttatataccaataaacattttataagtttattactacaaataaaggtaacgtcaaagtatcttaaacaataaaataacataatgttacctaaaataaataaaaagtaacaaaagtaacaaaaatgtagcttaatcaatataaacacttactttaacatattaaaactataattttagcagtaactaattgaataagtaaccaaaattcggttaatacataattttgtgtttagttgaaagtttatttattttatctcttaataaaatattaaagtacctaaaatgtagcttttgattatggtaatcttcattggtgaagataatgttgcttttgattctcaaatagattttgaaggtaatttaaatgttattaaaaaaaaaaacttaaaattatcttaaacaacaatccaacttaatattacttaaattgaaactttttttaatatagttaattacatgttttttaactttaagatatcaattaatttcattaattaggagatatttttataataacatgtaattagcatattgaatatgctgtttaaatttaaagcttagttactttactataaataaaatataaaagaaac

SEQ ID NO: 63177 - DNA, 1230 bp, Cannabis sativa
ttcttccattgcattgagccattcttcaaaagtcgtggcttccttcacattttttggttcaaattgtgagacaaaacaaagaaagctaatcaaattaacatacatcctttgagttaccatgttttcttcaagattttcaggaatgagatctttaggaatgttcaatttaactctggtgcttggttccttctggatagaatcagtgataatgtttggatgagtcaagataggctattctaattatcatgcattagctgcagtggtagatttgtcatttgcatcgtcagaattgacttatgcagcatccgaatctacttttgctacttctggaagagtatccataaagctatttatctcggcttctgtggaaaattctaaaaaatctttaaaatcattatcaaccagattagctgattccaaaatagtttgagttctcatgttgtaaacacgataagctctactattgaaggaatatctaacaaaaacaccaacatcactgttagcatcaaattttccaatatgctcacgatctctagaattataacacagacatccaaaaacatgaaaatgacttacatttgggcgcttacctttcaagattttataggacatttttgaggtacctagacgaatgaacactctgtttattatatagcaagctgtgttaatagcatctccccacaatcgctttgtcagcttcttgctatttaacatcactcttgccatctcttgcaatgttcgattgttcctctcaacaactccatttggctgaggagttttgggcgcagagaattcatgagttatacctgtagacttacaaaagtcatcataaacggagctctcaaactcattaccatgatcactccgaattcaaaaaaattcccaatattacatcctttttcaactcttaatctctaacaaagagttttaaaagcatcaaaagtttcatacttttctcttaaaaaatatacccaagtaaaatgagagaaatcatcaacacacacaaaaatttatcgtttaccattcagactttcaacttgaattggacccataagatccatgtgaagcaactccaatactttgagatattgatatcacacacacttttgtgagtgattttaaattgtttaccaagttgacaaggttcacacttacccaacgctttctttacccagcttgggtagacctcaaacaatactatcatcacatttttcaatctgggcaaccctt

SEQ ID NO: 63178 - DNA, 872 bp, Cannabis sativa
ttaacccaaatacctttttgatattaaaataaaaaatcataaaattacccacacaacaataaaggaaagaaataagattgagacattaagaaaagacccaaatgtgaaacaaaaaccaaataccattccataaaaaatataactttaacaattcatatatataaatgcataaaaagaaggaatacccaaatcaataatttctaaaaaaaaatctaccttggagagcttttcaccaccaagatcagcatcttcaagaactttcttcccagcaacaatgcaataacgaagacaatcatcaagccttcagtcattcttcccatcaatatacccttcagaattaaatccacaggtctgaccaccaaatctagtaggaaacttataatgtacggatgattctaaaaccgttcatcgatatttctatatgaaatggctggttaacccaccaaaaaaaaaaaatctatcagcatcctttctttcataaatagactcacaagccacactacattgatttggtattattgctaggtttgtaattacaatactatttaagaagttcactttgactgattatcacctaaaatataacaaatagcaaatagcagaataagaatagtgaaaaatagtcaaagagccataaaaacctcaaaaatagcaatcaaaatgatattctaaagtcatctgattcgcatacaaataatcagttcccaattaacaacattggagtgcccataattgatgctgcaattctcagtatgaacacacacaaccatctctttgtcaaaaaagtctgctccctaatgaaaaaataaacctttgaaaaagaaaaagaattgagctgcagagggctttatgttgtcaggaacaaaaaccaa

SEQ ID NO: 63179 - DNA, 671 bp, Cannabis sativa
tctctctacctctcaatctctctctctctcaaactcaaagtatcctcttgaaactagtcaattcaacgtactcaaaaagataagtgttggtgatattaataggcttaggatgaagatcctaagttggtggctgcaattgttaagtttttaagttagttaagaaataaaaaatcttaacaaactcctcgtaatggtatctccacatcaacacaagaagaggtactttcggatgagacgtatgctacttggaagacagaccaaaccgtacgttgaagggacttcctagataggaatagcattagttgaagttgactatctgggactcccttccaagaggaaaaaactagcctactaaaacacccttctagaagaaggttaactttcctaaagacttcatacaggtggacatgataggcatccaggaatgcccttctggatggcaattatcattgcacgagactccttctaaatggacaagttagctatctgggaacatacttatgggagacaacaaactttccattattgggatagtcttatggagatcttttcatctggaggaactataccacaaattctacctagttacttcaaattaaagtattgacgatgataaagaaagaatgcaaccatcatggttgatgtttcagaaatctcaatttactaacttc

SEQ ID NO: 63180 - DNA, 2094 bp, Cannabis sativa
aataataataataataatgcataagtaaatattatttaaaagagtatggcaccaatggtgcctaacactttctagacgtgtcattttgcgattgtttagcgatactctctaaaagtttatatggaactcaatacttaattacaccaatagcaatattaacacgtaagaagatgctaggcactactggtgccttttagcatttctttatttaagaagagagcattactattaggcgccaatgatgtctaatacttctagatatttcattttacgattagttagcaatactctttaaaaattatttaattggatcaataacgatattaacacataggaaggtgctaagcgatactagtaccttttagcatctctttaaaaaaaatattactattagacaccagtataaacttgatacttaattgcacaaataataatatgaccattttaagtgttaagcatatcttttagtatttctttaagaatatcatattagtataaataaaagtattgtttgtttcaagatcaaaagttagttcacttttttttttccaacattctataagaaatttttaactcatcaaattttatatttttatttgttgttgagacatttccaaaagtcaatatttggatagctcatttttttagatactagaaccaacactggtcttaggtcttacaccaataacactttgtttgtacctattatttctctctcacaatttttagttaagaattttttacgaggcaattgatttttggggatcaagagaaaaaattatactaagttgtagagtattgccattagacaccataataaccgcagtggcaatataagaccaaggcaaagtcagaaataaaatttatgtgggacgattatctatttttatatttcaataatcacataaggtgtagacataattatatataccaagagacatttcattttaattagtagtataacttaacatagtggtgagtagtaacaaacaattcatttcatttcatatgtattgttttaaattctcaagacattttacagaaaatggtagttcaagccaacaaacaatccaaatttgatgctgcagaatcgaactcgaaacatattatcttacaaaagaaaagaataaagctctatgcaagtccagttgatgcaagagttgtgagatgataagatcatgaaatatgagaaaagaattcctccaactgattctcaccaataaccactccaagtttctcagtgaaaacagcacccaccgaatcagcttcaacagttttcaacgcgtcggaaaggcggatttccatgtatacatttaaattgttcacagttccatctgcacaacaagccaatataatttgaatcaaaagccatttaaatcagaaaagctaacctaagaaagaagaacactaattcagtatggttgttgaaatcggttttagttaacaattcaattgagcattccatccgaatccataataagaaaaggtgccttctaatttctgattgaagaaaggaacaattgggtggtagaagaatgattctctccaagttgaatgatgaaaatatatgtacatacatagcaaatcaagaagattatatgcttcatttttcattttttatcacatcataatcagcaaatattaagatttagtttacagtctagctaaagtgactgcaactatttgcattaacattaatcaagtgctaaggagttgcacattataatatacaatcaattggcatgtgattagaaataaagctttgcttatgtgaaacatgaaaaagaacaacttttagctgttatgggatttaccttgggcaacaatgggatcataagtagggggatcagcagaccagtttccagcagaatctttcatatgtcttctatctgatgcaaagtcaccaagaaatattggagcatgcacaatccggaaaaatctgatgcaaatgggacaagcaatgtcttgacaaaagctttctctagtttcgaatcaaaatgtacttttaaatcaatcttacaagtgaaagtgatgaaacccctttttcaacaaataaaatacctttgatattccgaaaagagcgaaaatgatggc

SEQ ID NO: 63181 - DNA, 1252 bp, Cannabis sativa
cagtaaaatcgttttgaaaagaagaagaatatgactttattgaaaaatgaacttatttaatctaacacaaacaacccagttgaaatattcaaacttttaacaaagatatcacacatcgagaagtcattgtagaattatttgaataactgaacatttaaaaatgatacattgtttttttttataatataataatccaaaaaaaatttgtttcttaaattttgacatgtactaaatcatacccctaagcttttaaacatgttaaaatttttgcccaaattattaaaattattagatttaaagatttctcgaatttcgttcaattttactaccatgatgattatccttgtaccaaattgtgccccttgaattttgatatgtactaaatcatgctccccaaactttaacatgtaccaaatcgtgcaccttgaacttctatctatgtcaaacttcaaataataaaattaaatggaagtccttaaatctaacaattttaatagtttgagagaatttttaatgacctgtaaagtttagaaatataatgtaatacatgtcaaatataatttcggggatcaaaaatcctaattagcaaattttttaacattagtttaatataccatacagattaggcaagtcagcattacacaaatataataaaaaaaattagcatcagtttaatatatattagagttagtcacggaaataaaatattatatataatatgaatagactactcctcttgttgtcaataatttttgaaatgaaactcatgcaccttaatcatacaccttttcaaattctaacatggtattcttagcatgaaaaaggttgaggtgtgatagtctagttcactataattacaaataaatagaaaattattttttttatgtatttttaattatttttctccatagtataaatttatatatatttgataaaaataatttattatatttttatcaattgtaagaaattaaaattatagtttataagaaactctaggtataaaaatataaatataaaatacttcttaaacaaaataaaaaataagaaaaaattatatattatttattttaatatattttttcttaaaaaatatttttatttcttgtaatatataactaataattaaatatatttttagtaataatttattataatcttttaatcaaaataattttttcataaagttgggttctaccagctttagctttaagctgtagcttttccgtaaattctttaataagttattttt

SEQ ID NO: 63182 - DNA, 2895 bp, Cannabis sativa
aataattaatacaacttgattttactaaaatttttagtaacatgtttctctttatttcaaacttacaagtcaatgctagctagcttaataatcaatacttaaatcagaacattatatggctctatttgtaattgaggcatcgctctatagtgacatttatatatattctacatatatcttaaaggataagccattatatacatatttatcaccaaactttatatcatatatatagtactatacatatatgttctaataagtgggggtttgcttttttatctagatgataataattgctttcttatccattaaaagtaacatcatcttttaatgaggtaggctaatatatatatgatcataattaacttttgtttgacagattgatcactcaatagtggagagctttggtggaaaaggcaaagcttgcatcacagcaagagtttatcctaccttagctattggttatggagctaatttgtttgctttcaacaatggtaatcaagatgttcagatcacaagcttaaaagcatggaatatgaagaaagcaatgatctattaattaattgatcaaacaaattaaaaagatacatataagcaacttttcgagtggaataaaagatgtaaccccaataatataataattataattatagcttaatctctctctctctctctcttgcattggttcgatttttttgaaagaattgtttcgattctcgaggactggcatatttgtatggttgtaataacccaattatgcgggtcaacaaaaatatatatcataaattttagactaaatatataaaaatactccctaaaaactattatattaaattatacgagagccgatacttagttgtaccaatagcgatattgacacataggaagttgctaggcaccactggtgccctttagcatttctcatatttttactatattttggctttcagtgagaccagttaacattgggatataacactttaatgttctccagtttagaaataaatctctctcctaaataaagacactgaaaaccatttttcagaaaaaaaaaaaaagcattggaaacatgaccttcatcgagtttattacctatcaagcactaaagattaatataaatatttttttagttaattattataatattagtgatatgatttatgtaatacatgatatcatgaaaatccattattgtgactaaaatgatgtgtgatcatttattatatataatagcatgtgaatcttttttcttcactaaaagagaacgagaaacacattctctcccaccgccaccgtttataaggcacaatgaattttaggtggaactatataacgtgagcgaaaagaaattaaatttacaaatactagttgtggtcatcaattaattaatttatttacagagtggactttcgaaactgattttaagattgatatttgagagaaagggacattggaaagggtaaccttaaaataataaggattgttattagatcttagtgttgtctaacactagaagtagaccttaccactagttaaaaatattctataaaaattatgatatgaaatttaatacttaattacattaataataataataatatgttatgttggctaaaataatatatgatttggtggtgttgtcaccaccgctaaaattattatctcaatatatagtatatacacttagtcttgatgccccaagatgaatttttattggaattgatatacatttctaaaagtctctaaaattttctagtcatatatcattgtaaaaactacaggaatttaatgtagagaaaactatgatattagcatttctagaattacctaaaaactacactagcaagtcaagaaaattaaagaattctagaattgttgtcattactttactttgaaacagaacaattaaaattagtcagttaatcggaatgtgtattatacatatagaggatattttaactgagaaagtttgtcttagaaagtgaagttgtaaatcaaaataagaaaaatctaaaaatttgtaatctctaaccatgttctctaaaaccactccttaactaaaataaagaatgagtttcaaaaaaatgagtttcaagtttcaaccatacaaatagagcattgttatgaagcactcatggtgtctagtactatgatgaagtgttgtcctataattagttagcgattttctataatatttatttaagtaaaacaaataggacctgatattgatctcattggcgatattacactcataagagtgctagacaccataaatgtcctttagcatttttcatataaatataatagataatggatatgagctctagagttttctatttttctattatttttttaaaataatttatatttagcaaatttaaattataaaatatcattaaaataatcaaacactaactaaaatatgaaaaaataaaataaaatggttctctaatttaactttttagttattttagttaaaatttggttaaaaaatagaaaatgtgattggagatcctttttaaataccaagttgaactagtgtaaccaagaacaaccaaaaatcaataaaagtctattaacgtttcctacatattgagtctcccattctttattatatacaccttcaaccaataatcatcaatcatcgtcattatataacactagtcaccaaacacatttcaaagactatcactcaacaccaacaaatcacaactatttactatattccaatttctcaaatcatcagtttttaaaaaataaattaaaaacctcaaattatttatctatgttttaattatttatttgattaacatgaaaaaaaaattacaactagtgtctattacaaaaaaaaaaaaaaaagaatagcccccaatttcccaaggaaaatccattcca

SEQ ID NO: 63183 - DNA, 1044 bp, Cannabis sativa
aatgcatggttggaatatacaaaagatctctttatcaaaatatttgattccttctttttttttagctagtttgtaattattatacaaaaattatataaaattcatatgcaaatacaataagagtagtgccgtttggttttaaatgacattcttaagccctataatggtgtatctttagttaagtttaatttttgtaaccgtgaagttgttctttctttaaataaagtgaaagtttagtggccaaatatacttaatttcatgtaacttttttaacttgttggctagtgcctcatgaagtaattttcatatttaaaaaaaaaagagtagtgacgatagggttggataattaattagtgtaaaaaggtagggacctatactaatgattggaaaaaatcaactggatctttaattatctctagttttattattatttgttttataacattccattaacaataattaatcacttaataagtatacattattttttaacatgtgcaattatatgattgataacaattaattctgtttttgacgtgttaaaattttattaaatgtcttatataattataacatataagacaataaaaaaaattatactaaatattttttaaaatatcgaaataaataagaataaattgatacatttattttaagtgggcatgtagtataattttttaatatttatttgtgattcataattcattgacctaattattgtacacttctcatgaattactaccccaaaccccacggtaccgtgttgttgtttcatatctctaatttttcaagaaaatgacactatatatacatggttgcattgcatataaaaacaaagtttgataaaaaattatctaccaagatggactagatttatttatttttaagattaaaattcgagttaaaatttaactataaatattaattattaattagaatatttacggtaaactttttttaatattgagatatttttttaacttatttaatatatagtcaataatatattattggaagaggtttcaatggttacatttttattgt

SEQ ID NO: 63184 - DNA, 1150 bp, Cannabis sativa
aatatatacacttaaatattagacgtatactaattacaattttttttctcaatttctgtatttgaaaatatatatgggagtatttttttttatagtgacaacatcatatttgtaaaattttaaatttatttttgaataatttacagtatctacaactaaatttttgatattaaatcttttgttaataatgtaaattattatatatttttttaaaaaattacataatattgtaactataatcaactgaaaaaataaatgtaaaaaaatattctgctatatatttttaaacacagctgataaaaagattgtaataagatatgttaagttgtaccatgcatgtctttgtatattaatatttgtgtgcgtattatttatatgtttttcttttagttattgttttatatatacatatatatttatatatctataagcatatttaaatccatttttagtaatactatatcatttgaagtttgtttgtgctatgtatatcatatcttattaagtagttgcaacttttgtttttcatccttgttatttaataaaaactgcatatgaaagtactaattaattaattaagttggttaaatatatgagcagctgctggatcatccatgggtgagaggtgatttggcaaaggaggaacaaatggacggtgaagtggtaacaagactacagagcttcaatgccagacgaaagtttcgcgctgctgccattgccagtgtcttaagtagctccattttcttaaggactaaacagctcaaatccctgttgaaatcccatgacctttctcaagatgagattgaaaacctccggattcatttcaagaaaatgtgagtaattgcccaaaccataaacaaaatgtcttcagtatagagtttggtgatatagcttactcatctcctccaacagtaatgatatgcgaattaaacacttaaacatttcacatatatgacattccaatcaatcacattgacattatctgagttttactgttttaaaaaacaatcactacgcgtgtgtatgttttgacccataatccaattagtgttggaggtgacacaatttctctattgttttctctaacaccacttctctcatacagtattgtatatatataaaaaagaaataattatgtaccaaccattag

SEQ ID NO: 63185 - DNA, 610 bp, Cannabis sativa
agaatgagaatattcaacgaaaagctaaaacttaagaattttgaaattttcgcgagttagggtcaaaaaatttcataaagcatagaataagcaagatgaaagacaggcattatgcagttcaaaaagcaagcattacggacgatgaaatcgcatgaaccgtcacaaaagaaaatggcagagtttttaaacttagggtttcctacatatattctaccacaaagtcaaaggtgcattcaaaaagtaaatgtgcaaagtaaacataaaggaaatcgagaacttactcaaggatcaaatgtctagattcaggttacgccaagccaaatgagtagttttgatgaaggcacttcataaacttgaagccgagaacctctcttttcgctctgaatttacttagcaaggaaggatggtgaaaatgggtttgtgtacaaatgctcactggtatttgtaggcaaacaatgaaaggggtaatcatttcaaaagaacctcaaatgcctcgattcccccctgaaagcgaatatgggaaataaaaagtaatcaagcatagccgttaaccgtggtgggagaaaattagatttcgaaatattaattgtcagagcatttattagctgaa

SEQ ID NO: 63186 - DNA, 856 bp, Cannabis sativa
  modified_base (308)..(314): a, c, t, g, unknown or other
ttttagtcgcaacaagtattaattgtaactaaaaatacatttagtcacaacaaattgtaacttttgcgactaatacttttagccactcacttttaagtcacaaaataagaatcatgatttataattagtcacaattttattacttttagtcacaaattttattgtgactaaaataagattttttgtagtgattttatatgctagtaaaatagattttttgaatactatattctatattgtaaattattctgaatttttcaaaattttgtaagatgtcttaaataactataacgtatatgaatatgaannnnnnnattagactaatttttttttttctgataccgaaatagatagagtatattaatgcattaatgaaatttttttaaagaaagtacattatccatatatatatatatattttattttcatttaaaattatataaaaaaaagtcatatatattttatccggaactttatttggtatatatacatttttatatatttttatacaaataaacaaaataataaaataagtttagagcaatgaatactgcttctttatatatagagaaataatattcattgctttaaaaaaaatgtaaaatagctgacataatgtatgctatttttaaccattttcttctctattttaaagaaaaaattattttttctattttattttagacatttaaagtacatcatacattaaattctttatattttttttttatattatttaaatattatatttatatgaatatatatgggtaactgattttgtgcccatcttgtaaatcacggattgtattctgttgtacagtatagtaggtcgtacgtactttattatttttttaat

SEQ ID NO: 63187 - DNA, 1548 bp, Cannabis sativa
aaaataccttacaatcacattggaacgcagttaagcgactactaagatatgttggcactctagatcatgatcttcatctctaaaagccctctaacctagatgactggctattgtgatgctaactaggttagtgatccagatgatcgacgtagtacctcaggatattacatttttcttggtcaaaatttgattacatgatcatcttgtctcaagaagtagcactaaagatgaatatctcatcttacaatagagattacgtgatttagttactactctcaggaattaaagtccctcaaactagacctccaattgcttggtgtgataatctaagtaaaattttgatgttagctaatcctatttaatttacatgttcggacaaaccatatttaatttgatctcttctttgtaagaaaaaaaagttctcagcaaattactaagttttcagatcatttgcatagatatgatatagttgttgatatattcatcaaagccttaggttgttctcgttttacacttttgaggtccaaacttagtgctcaagattccacgacgctaagtttgaggggggttgtcaatattagttagttttttattagctaggctagtaattagtacaattgttatgtaattagctcttacctaattgcaacttgcttagcttataaatactctatacttatgctaaacatttttctaataatgagaagtaatttcattcaccaaatcttttgtttaacatgagtcacacaaagtttctcaacaaaaaaaaaattaaatttagaatgttttgcgaaacaatcagcaaactgattgtaagatggaatatatttgcttcttcaagattttgtcatgaataaagtgaatgtctagctctatatgcttcgttctttcctgataaatattatttgggactctatatgcttcgttctttcctgataaatattatttgggactagtgtactagtattcatgcatgttgctgtggcaccatatatatgaatgatgtgggtgcatggcaaagtatatatactataacaatatttcaatggaaactagcttgttgaacacacaattgaccaagcaaccacgatttgtatcatccgagtaacaagtccaatatcatgctatatggactttatatcatctgagtaataagtccaattaatctgcgtcaaagtaccccataaagattaatctgtcattgaacttaatatacaacccatagtgcaaggtactttttagataccttaaaatttgcttttgctctctttgtattgtagtaaaagctttcaggtattatagagctccaaatcacgtttttgtagtgagttttaatatttaacttagtaccatcatggatggacaaaggtattccagccaccatatatagatgttggacaggcttttaaattggtcattttattctttcaccagcatatagtattctataatatataaatatgtatgtatatttatttgaattgcacctttgatggcaaggaattataatcaaacaatgttttaatttactaatttatgagtagtgtt

SEQ ID NO: 63188 - DNA, 550 bp, Cannabis sativa
caataccctaaataacacaaaaatcagaaaaactagggttcccaaaattgccccaaccggcatttcggttctggaaaaaaaaaatcatggaagccaaccggaattccaattccaacaggcctctgtgaacctgaattccggttcagcgcaggaacgaccaaaaattctataatgcaaatcaaccccaattcaatttaaactttccagacttgttctatacaccctagagaacatattcaaggcaacaaaacatccacccataaacagaatcaaaacttgccactgatgagtcaagcttgagttaaaaaactcaaagcttgctcatccaactaattagctatcaatacctgctcaaatcaccttatgaaatcataatataactactgaaaacataacctaacaacagcaacaagaacagcaagcaaaacaccaaaacatgcaaaaattacttttccttacaactcaagaagtcaacaacaagttacaagaagcttaccaggaacttgagaccagtaaatccttgctgaaaccagcttgaaaatcacaaaga

SEQ ID NO: 63189 - DNA, 647 bp, Cannabis sativa
tctcactattgcaaaagaggcaaagtctatccgggttgtttaggaaatgcatctttccaaaagttgaaagacaatcccccgggattttccatatcatcatggttaatctcggatgaatcttcttcttccataaatgtttccacacattgttttggttgttaaatctttgccgttggtggagccaatgggcactcttgacagaaaatcttccttctttagctgggttccagaagagtagatcactcccctcttgaataggcttgatgttgatgattgcctaagcttcgaaacaggattgtattaggggcacattccaagtccttgtgccttcaatgaacaagtctgaaactttgttgaaggcatgtaccctgttgtagtggaagccttcacttatgtcttggattgatttccatgggatccaaggctttgtccaaatgtctacgtctccatctgctatgatgacccctgccccttagtgcaaagacttctagtgctaaggatatccttccagacccgggagtcggaatcatgcttctccactgtccaagcatcgaaagtactgcagtatttagcacacagagtgttgatccacaacttatctttcttctgaagcaccatccaaaatagttttgcaataagagcaaagt

SEQ ID NO: 63190 - DNA, 690 bp, Cannabis sativa
caaaaaagatatgattttgacctttattgtgattcttggctcattaagtcacgaagaataggaagaatgtgtttgagttcttgaaaaatacacgtttagatctgaagcacaccctggctggccatagaggccttgttcaagacctagcaagcctagggcctttctcatgggagctggccgaccatagggggtacccgaaaatctggccggcccatgtctaggcatagggtccctagccagcccttggctaggtcatgggacctggtcgaccctctcttagcttgggaatcctaaccggccaaggccaaaattcctagtagacgaccaagtattcgccctattttaacctcggcaagggtcttgagatgaccttgtatgcatatacaactataatctaatatgtggttcccttgggaactctgtataagatttggtaatcattccattatagttaaatgcacaacttaggactcaccatttgtctaagtaggtagactggagatggtacttcactgatacccaaccttgtaaagtgtaatttatcttgcaagtacccttgggtacgattggctagaactttgtctgtatcttgtagctttgtcaggtttctcacctcccattgtctcttctatgtaggttatttcaagtgttggtatggggaggtggcaactgcttagtcataggtccagt

SEQ ID NO: 63191 - DNA, 1559 bp, Cannabis sativa
gtttaactttccatccctgaatccttttgaggacccgttccactaagtgttgagtgtcttccgatcgcttgacagatctaaacaaggggagacccaggtaagaggccctgctgttcatacgtttcatccccaaagtttctgcaattgcttgggcttttctacttgaaactccctttgagaagaacaccgaggactttgggtagctgatcgattgcccagagaattgacagtaggaatttaagcactctagcaatgttcttgcctctcggactgaagcctcaccaaaaagaatgatatcatccgcaaacatcaaatgggtgattggagtaccgttacgagccagcttgaaccctttgagaagaccatggttttctttacttaagaggaggcgagagagtgcctcggctgccacaatataaagggacggagagagcgggtctccttgtcttagccccctctcgggatggaacttgcccaccgtcgtaccattaaggagaagcttgatttcatccaccgatatacaagctttgacccagttagtgaagatattactaaagccgagttggagtagcacagaggtgacgaagttccaatccagtttatcgtacgccttctctaaatctaacttgatgagcatgaagccacgcttacctcgcctcttacccattgagtggacaatttctcgagctatcatggtgttctctgcgatgtgccggcccttaacaaacgccgcttggttgggagatacgattcttggaagcaggtatcgtatccttgaggctaggatcttcgaaattatcttgtacgccacattacaaagggcaatagggcggtagtcattgacggtggttggcgagtccttcttcggaaccagcaccaaggaagtatcattaatgaagctaggcaattccaagtgagtaaagaagtgaataaccatctcaatgaggtcatccttcaccgtgtcccagtggtggatatagaaacttggcggtagaccgtcgggccccggggccttgtctttacccatgtcatttatggctgccataacctcctctcccttcgggatagcattaaggagatcattgtcatggtccaagatcattttatcgaataggccttcaaccagaggagtagtgccgcttgagcatttgctaaagatatctttgaatttggtaaggaaacagtgagcaatctggtcttgatctcgtagccaatccccatccgcggactccttaatacattggatatagttcctcctccttcgaattatagtggaggccatgaagaattttgagcatctatccccctcttgaagccattgcaccctggatttctgtttccaatgtatctcctctcttaaaagtacttccgaaaggtgattcttagctttgtcaatctcttcaaggttatctgggttcttgctctctgccttctcaagaatgagttttgcttgctgaatttgatgagagagcaatcgaaattgggttttgttccacgtctgaagctttttacatgtaacgatgactttcttgtgaaaattaagcatgggattgacatgg

SEQ ID NO: 63192 - DNA, 695 bp, Cannabis sativa
aaaagtgattcagatatactttgttacatcacatgtattataaaaaattgctttgggtgtcatctagtagtcatatgggtcgcgccaattttttcattgtaacgtccttttaaaagtttccttataaaataaatcaaattaaacaattattgctaaacattttttttgcggcatttctttaatttatagtgggctttttcttattttctaacctaaaaagtgctacatatatctttctttccacaatatctgttgctaagaaaatgccgactcaataagttgaactttttacaaaaccccaacggataataaatataattgtattaaaatgcatgtgtcaaaattattcgtaagtatatataggggcggtctagtggtagaatttgggataaattgaatgaggttctatcttaaaatcaattgataatgagatgagtagtctattcatcttatatctgacaatttatttccacacataagtaataatgtgggagtaaactctaatacactttcttcacgtttgggcctagttagtgtggatacaacaaacgactaataagagaccacaggaccgaacgcgacattttgaaagaatcccataaggccaaatattaagaaatttgtgagtatacacattgagaaatttgtagattttgaaacaggtcaaaactcccactagaaattggcacacattg

SEQ ID NO: 63193 - DNA, 1569 bp, Cannabis sativa
tattaaaccagaatctgttagttaagtttagtctgttagttttcttccttgtaaacaaactgttatattcattctgttataaccgttagttgttagccttagtttgttttttctcagcttgtatctgattgtaaatgcatataaataaacatcaaagcaacccattttgtggttaagcttttcttggcaatattgttttcttgctctgcatttgctctgcctttttcttttctggttttgccttgataaagttctacatggtatcagatgccattgacgactgtctataatggcctccactgaaaacacctccggtgttcaatccgatcctacaatcatggctcctgctgctccttcttcaaccaactggaatcctttctcgaattccctctctgcctccctcacggtcaaactggatcgaacgaatttccttgcttggaaatcgcaggtcgtccccaccgtcatcggacacgacctagatgacattctcttcaccggtgttcctcctccacaacatcttatcactggcgaaccaaatgtccagcatcaacaatggaagaagcgtgaccagctgcttctttcttggctccggtcctccatgaccgaaggggttttggcctctgttgcaagttacacaagttcttactctgtatggaaagccttagaacaaagattcacaagtcaatctcgagcgcggcttcttcaactcaaaggacaattttctcacatcaagaaaggctctttgtctatctctgactatgtggaaaagattcaaacactgtctgatgcaattaccattgctggttctgcagtaggcattcaagatctcattttacaattgttaaacgggttaggtcctgagtatgaccctgtagtttcaggaattacctcccgaagtgatgaacttactcttgaagaagttcaagccttactcatggcacacgagagccgccttgatcatcacaattctgtctcagaactcacactaaaaatgcaagccaatcttgccttgagaaattcaagaaatgaccatttcaagccctttcaagctcacggcaaagatccctctactgacagtcaatcaaagaatcaacctagaggttatggtcgtggcttctactccaattctagattgatttgtcaagtttgcatgaaatctgggcacacagcggctgtgtgccactacagatttgacaaaaattgggtaacacccaaaccgaatgtgtctgccccccgtgcctatcttactgaatgtgatgcttctgattctcatcaacctactgtattgcctgattttggtgatgacctctcttggtttgctgatactggggccactaatcacatcacaaacaatcttgagactctagacacatctacttcctacactggacccaaaacacttgccgttgctgatggtaagaaaatctgtatctctcatgttggttcagccattttaccttctcaaaataattactccctcaaattaaattctgttcttcaaattccttccattaaaaagaatctagttagtgtttctaaactaacagaagataacaatgtgtttcttga

SEQ ID NO: 63194 - DNA, 2710 bp, Cannabis sativa
aaaaaaaaaaaaaaaaacctagctagctaataacctaccagccttagctagagctttcttgcttattataaattgatatatatttttttaacctagcttttataaatataaaaattgggtcataaaaacatatatcataatcataaacgtttttcttgaaatttagagtagagtactctctagtgttgaattaatgaaatgtcacaaattccaattcccaattcctaattatcctaatccatattagtagtgagtgtgtgtgtgaagtagtaactatagttgttgttgttggtgttgagttgggcaaatatatataatatatattgtgtctgtttttataaagaagacatagtatattaatgtatacctaacacctgcaaaaacatgtcagttctttctttctttctctttctttgttttttgtagccatgcgcaagcatatgttacaattcttctttttatatataaaccagaagaagtacttacttgttctaatattaagtcttctctatttctttctttctttccttatttttgttttttcttatttatgttggttggagatatgctttatatatatagacaataatcatttaatgcattaatatgtacaatatatatagaattgctaaaatgtattattggtgtctagtaacattgtcggtgtcatatttttattagtgtaattaaatatcggattctatataacttgagaaaataatttttaaaaaatattactaattaatcataggatgtcacttataaaagatattggacaccactgataattaatagcaatggtcatgtagccagcactgctttgatatatggagaaagagtatttctacatattgataagtgcacactagctttttatactaaaatattacaccctaaacaatttcgtgttagatggattttactaagttaaaaaaataaggtaatattacttacaaagttttaattttatgataaaagttttaatatataaataaataatatgtttagtataatttataaaaaaaaaagaagaagaagaagaagatatgttacataaatgtgtgtagtatttttttttttgtaaaaaaatgtgtcatttccattacattttgttatagcaataatattagctctaatgtaatgctatactatagtgggatttgagagtctaggatatatatagtgtgatgattcaacaccattcaagaacaacataaacaaagatcaaataaagctaaaaggaacaaaacattaaaccataaaccagagaacaaaataacagaaacagcagcagtaaaacaatgaaaaacacaaacatttacaaagttcaatcacaagtgaataacacttggatctaatccttgggaggaactgccttgaggctttgcctttattacttgatgaagataactcagagaatacaaaatgaacaccaaaaactgtacacaatggagtcttgctcccactacagagatcattcgagagacatgagtttaactctcattctcttttacaaagaactctcagctcacaccactcaatcccttttccaaagaattataaaatagcctttatatataggctgaaagaacgagtacaaatgactaactaacttaactgaatataactaacagttataacagaaaattatccaacaacaacacttgcaccagaatataaaccccacaattccacctggtttatagtcttgtgcaagttaaaactctaagtaaaaaggctaggcaaaaccgttccatcactaagtgttcccttcatgaaagaagggttaacattctccaatgttaagtagcttcaggcagagcctgaatttctcaccagtgactgctttggtgaacatatcagcaggattttcatgagtatttatcttcttcactttgactaatttgctggcaatgatgtctctaatgaagtgtagtttgatgtcaatatgttttgacctctcatgatacatgggatttttcatgagatgaatagcactttgattgtcacaatgtatgaacaagttatcagattttatccccaattcagatgtcaaaccttttaactagatggcttctttcacagcttttgttgcagccatgtactcgacttcagtggaggacaaagcaacaaccttttgtaggtttgctttccaactgacacagcctccaaacacagtgaagacaaaaccaaatagggatctcctagtgtccaaattccctgcataatcagcatccacaaaaccaggtacagaattatcaaaattgttgttatttcccagtaccagacctgtcttaagggtgcctttgagatacctcagtatccattcaatcctttccagtgttcttcaccaggatcactaataaacctgctcacaacactcatgctatgagccaaatcaggtctagtacacaccatagcatacattaggcagccaacaccatttgcatagggtatactttccatatgctttctctcattatctgtctgaggtgattggtcttgtgacaatttaaaatattgagcaagaggagtggttacaggtttggcatctttcatgccaagcttgtcaattaccttcttgagatagacttatagtatgaggcctatttctcttaatttcaatgccaataattttcttagctggccccaagtctttcatttcaaattcaacaccaagttgggatttcaaactttcaatttgtcttct

SEQ ID NO: 63195 - DNA, 742 bp, Cannabis sativa
ctaaatcatatacataatttcaccaatatataattagggacacgatcttgtctcgtgatgtactttcacagaatgtattctgtggtatattaaatgggtctcaaggtacattagatgagtgtcagagtacattactattttttaaccttaattattcctagatcaatctcagcacttagatcaaataactcatccatctaacggttgtcgtacatcaagtgaaagtacaatcaaaagaaacaaaatcatatccccgtataattaaatatgacacctattataaaaggctagttcctttttgcatttctacattaaataatcaaaaagtgttgtaccaaattaccaatagatattaaagtgtacaaaaataatacaaaattggaaccattaattattatttgtttttattaccaaacaaacaaatatattattagttttctatataaggctatacacggatgtatatcctctcactcacttctttcatatttatttgctctctcaccactcgtttgtgaaaaaatcggcaatggcggacgaggtgattctgttggatttctggcccagcatgttcggcatgagagccagaatagctttgactgaaaagggtgttaagtacgagtacagggacgaggatctgagggacaaaagtcccctgcttctgaagatgaaccctattcacaagaagattccggtattgattcacaatggaaagcccgtatgtgagtcgctcgttattttg

SEQ ID NO: 63196 - DNA, 1230 bp, Cannabis sativa
atcctggtaaaataaattccaacgccatctaatcgaatcttattgaaacttcaagtgctcgcactctcttcgacctccttgaagggtgtttgattccttatgaggcaagacttaaaaagatatctcctaaaagcttgtacaaccttctcccaaaggtagcactgttgttctccttttttaaagaacttgattgcagagtcaagaaatacaaaattcaaacacacatagagaaagtcgaacacactcttttcttcaaaacaaagactccagtttctaaatatatgaagacaatttaaagtgaataaaagagatactaaacctaggtgctaaacgtgtatttataatcaatacacaccttatagaaaattcatacatggtttgaacgagaccacaattcacaaaaaactttcctaaaaaaagatcttcaatcagcgtagggatttctgcttatgtacctacagaatcatgggtagtaagtgcgactttccttttatagaaaagaaaagtcttacatcagcacaaaaaatctgatcaaactaattaagaaactcatataggattagattagcacgattggaatatagaaattgatttattcataaaacttaccatttatgataaacttttcaaatatagaaaagctaatcactttttatactttatataaatcaatcaattaaatagaaatatatgaaaataacaaacacaactcaactaacattaaaaatgaacttatgaaatatatttcttaatgtaaagatgttaaaaatagaattgatattttaaataaaaatttggacaaattagtttatattaatttaacatatttattttaattaaattcaaatgtataaatgatgattattaattcgttacaattcaagtgataaaacaaatagatttcgtgtaatttgataattgttgattttaattaccataacggtgagtacttgtacaaattcaatccaacaaatattgtatacttttattattattattactagtaaacatctcgcgctgcgcagcggatatataaaattttttaaattatataaaaataaattgtgtattttaattaataatagttacttaattaaattatattaaaattttaactttactattaaaaaattattaacataaatacttaaaattttaaatttattgctaataaatattgaaattcgaaaaatagtaacataaatccttatttatggtttaatttttatt

SEQ ID NO: 63197 - DNA, 922 bp, Cannabis sativa
ttgctcaaactttgttgtatttgtgatagtttaattatttaatgatagtccaaactgtaaaaaccacataaaccgcaccgcactattttttgtggtgcagttttttaatttcacggtgcgggtgtggtttgagaaattaaaaaaatcgcatgtgcaggttagtttgaaaaaaatagtcaaaaaccgcaccactctcaccgcgaaacccctaaataagagtgacaaaaataatatgaaggagaaattaaataaaatattatatttttaaatgatgtgtaaatttttggcatctaaaaaatgctatctattagagatgctctaaggtctggaactaaatatattctaaacaaaacaaattttaaaccaaatcaggttaaaataatatgtcattgttggcatgaaattttcattagaataatctagcttaatcacttcattaataaaaatcttcattaacaaattatatctaaaagttgcaactaaaaataaactaaattataacgataagtgtaatctagtaattttacatctcttaaaatatatatatatatgtatatatatatatattgatataacaagttggaaatggaattcctttataaaacaagtaaataaattgcatacaagtaaatctcaattttgaccaaaaaaaatgcctcttcattggaagtttgtttgaatatttagtcttaaccttgttttgtgtttttggaataagatattttcctagtcaactcttcattatttttttctttagtcttttatcttgggttttgcggagcaaaaattgtagactttgtagttttgtaactgaatgaatggagtgattacaaaatttgagggtcacatagaagttggtaaaaattctatgtaatagcaggtttactaaggtaattgaagtcttctcagatatataaacttc

SEQ ID NO: 63198 - DNA, 3701 bp, Cannabis sativa
  modified_base (26)..(30): a, c, t, g, unknown or other
agcaaaggagtttcagcatcaaagannnnnagaaagagatccaggttcatatattgataatgctctgctacacattataatagtgccaattttgtgaattcgaacctttgtaacagtagggaattggacaaaaaatgtagtaggattagattgaatggaagagaaacattgaaggtggcaacaaacgtggtgtgtggcaccactatctataatccaggaaaagggattagaaatacttgaaaaattattcacaacagctttgtctgtaaatgttgaggcatttgtgggttgtaattgttgagtcaacattgatataagttgttcacattgagctggtgtgagttgtgtgttggaaagatcaggtgtggggttggaaacttgtgaagcctgaggattatttctggtgtgattgtcaacattagagtttctggtgtttgtagagtcagctggttttcgattaccatagtaaggggaaacccaattaagaagtagcatttatccttataatgggcaagtttttgagaatttgtgcagtatggcctaggcctttaattttttgaggctgcattggctgcaggggtagattcttgaggaacagtatagctggtagcagctaatgggagaattgtgcgatggcctaatgtcctttgtctttcttggttgattaccatggaaacaactttgtttagaggaggacaatgatcaagaagcaagatttgatcacgcatgacatggtatgaatcattcagaccctttcaaaatttaagaacttgatcataattttggtgatccaagtgttgtgcagcaacaacacatgtccagggaattcaaggccttaactggttgattccgtcccacatggctgtaagtttggtgaagtatgcactaacagaatcatctccttgattgaggtaggttagtgtttcattcaactcaaaaatgtgtgaccatttccttggttaaaccgattgtttaacacattccacatctcacatgtggtgtctaagtacattatactacttttaatttcaggtgaaaccgagtgcatgatccatgaccttacaagttgattacatcgaatccaagaatcaagaaggggatcattagcaagggttgaggaagtgtaccttaaagaaagagggtcttgtttcgtgctccaatggaaagcttgaaatctcgtttctattgttggaaatttttgtcagagagaaccggagtaaccagagcttaaccaggatggtcagctgtgctaagatagtaggggaatcgaacaccctcgtaggctggtctgtcgactagattgggacaatgaatagcagggggaggagtgagatttgttcaagatggatttttagcggaatttgttgatggtgtaggagctatgggagcttcaactctggtaggatcatcaaaagtggtagcttaactcgtggcctgtgtgcgcaccatgattgtggagggaagagcttgaatctcgaagctggaatttgacttcttggagcttcagtttatgtcatctgataccatattgggaactgagcaatgagagaaaagaaagctttattgaattgcaatatatgttctgtacagaaaggagagatacatgtatttataggacaaaagccatgagaagaaaaaataatcgaaaaactgaactaattccctaactaactctaatagtaataaattatgtggaatatataaacattcaatatatatatatatatatatatatataaaagcagaaaaaggtcaaaagaacactccatccaattctatattttacgtttttaacatattgtcattgtgttttatctatatttaaagactattactcatcctttgagattttttttttttgaataaaaactaatccttgctcttctttaattctattgatataaaaaaaacttagaaaatataatattttaatattattaacaaatctatatattattttaatattgagatggtgaatgaactaatttaaaatattccaaaaaatacaaaactaatgtaaaataaaaaaaaatacataagaattaaaataatagggtagatatagatagtactgtaatggtctgtaatgatgcatgatttgctcatataaaattctaatagcttagttttcagctcaaatacatagcttgagagcttcactcatgatgatgaaatttgaactataaacataccaatatttgaactgctattcatttatacatttgaaaccgtcgtttgataaaaaaataataaaataaaatagttaattgataaatatttgcaccatatgcttattatttgatttacaattgattgcatgatggaagaacaaaaaagttaaaataagtagctttgtcttataaccatataatatattcgtatctacattacatttagaaaaagacacattataatattaataataatgatgtactcagaaaaaggaatcttgcacattatttttttcagggataaaaaattaaaaataaaagatgattggattttatagtaataaaaaagttaccgtgtcaggtgagtgaacaaatatatgcttatttatttattttaaaattttgtatttctgcgacacacaagtgcagagcgtgtgtgattgctttttttgggccaaaataatagtgcacgttctcatctgcaaatgctctatataaaattactaatcacttacctagagatattttactatttagtatttaacctttttgttttaaaaatataataaactaataaaaaaaaaaggagaaagctgagtttgaggtgaaataggtgtcaaattatgaggcgttgaatttttctgtaagtgatattgaaccgtacgatgttgtacagtttcaatgatgtaggaagtcatagggtatcgtatcagcatctttttttttgtggttaaagtcactccacgtaaaacgtgccattaatgaaattgggctttcgtacttctgctcaaattattaggattgagtatatttttcttattacgctgttagataattttaattgataaatatattttgttataattaaagtgaaataatttttaatgtacaaaataaagatataaagtgtacgtagtgggatatctattataatcaattcacatattacactcaccagtgtcttgtttgtgcctgatttcaaatataatctactctttgttagtgcactcacacaggacaacaagagcacaattttctttgatactaacacttgctatatctaggacccttctcagacatcgaggattgggatagctaaacgtcttggcaacctatactatttgcaacaactcgatcctgaggacaatacatctgtacaaacttgtaatattcatttagctaatatccaatggcatactcgccttggacatccatctgtaatgattactaataaactcaataaacgattacaagatcttgaaatttcaattccttttaattgtcccacttgtcacattgccaagcaaaagaaattaccattccaattgaataataacatttcttctactatatatgatcttgtccatatcaacattttggggccatactgcattacctctattgagggctatagatatttcttaaccatagtggatgatcattcaagacacacttagttatatttctcaaaagcaaaatcagatgccccattggcaatacatatttttttccaattcatacacactcaat

SEQ ID NO: 63199 - DNA, 1423 bp, Cannabis sativa
  modified_base (67)..(71): a, c, t, g, unknown or other
aaattagataaaagtccttaactttaacaatctcaatagttcaggagaatttctaacggccaaaaannnnnagggggcacgatttagtacatatcaaagtttggggggggaaaaaaactaattagcctaattattattgtgagtaattgattggtttggtgaggcgtgggtggagtgaggtgagctggtgaggtaagtaggtgagagagaggagtgattgattctaataaaataacataatatatataaataaagtaacaatgtaaaaagtaaaagattcctgacacgtaaaattatttatatatgtataaatgaaaaaacgtttaatatatattatataatatacattaaagatataatatatattaaaggtaagtaaatgttagattactggtcggttacggttataatcgccagcttattggccaaaccgtaaccgaccgccagttacagcggtgtggtcggttttttttttaaacggtttcggttatgacgtggcgccattttcttggttttttaacagtcaatttactggtcggtgtcggttttgcggtttgaatgttcacccctaacttgggggatgtcatctatgaatcaagctaatgagatgtcgaagggggttgggtgcctttgccttagatggtttgctgccttcaacgatcgatagtggttcgggtttccattggcacttgtcagtagtggtgtaattgaaacaaagatggaacgtatgtacttttcagttaaacagaatgttgttgagattgagaaatgataggagaggtagtcatagtaatatgtgttattatttagtattcatttttatatatatggggtaacttgattttatgggaattaggcttacaattatagttttatttatttgggtaacctgttattattataatgtggtatttttttttttttttgaaggtaaatctttattaacaaaccaggaacaacatcaaaaaaggtgatcagctttacaaaaggtagctagccacctaggaaaagaatgagtgaaaatatgagtattcttagtagcaagacatttccttgctaacatatgggcacactcattattgtttctatgaacatgaacaatgtttgtacaattagaactttccatcctaacttgaatctggtgaagcaaagtgctaacagcacttagcttgttgtccctgtttttgattgcatcaacaatctttttgcagtccgattgtatttcaaggggcatgttggctgtgtgaggttggtgtgcttgagagcttccaaaatggcccaggcttcagccatctccaccgagcagcagctgtgatgataaaccataccagcaatcagcaactttccttcctagtctcgccaaatgaagcctgtgcctactccagcagtaccggtattcatagcagcatcacagttgatgcta

SEQ ID NO: 63200 - DNA, 1870 bp, Cannabis sativa
atccacataattattaatatttataacatttattatttttttagctaattttttatttattaagaattgtttttaatatcttcaacataattgacattaaaggtagattactttcttaaaatataaaaaacaatgaaaaaagtatatattaaattttagtccaaatttcatttgtaatgaatctttaatataaaacttaccaggcaaattaattactataaatgccaattttaaaaatattaaattattagagattttgattcaatagccaattataaaagagaaattaagtttctatacttaactgaaaaatatctcttaagtgacataataaaaatatctttttacactatattaaaaatatatttatatttaaaatgttatgtttagtgtgatttcatcaaatatatatatagttgactatttaatggtcacgttaaatatgtaactacgatagttacactaattttgatcattggatcattattaaatgattataattaataaaaaaatattaccttataacctaaactacctttcatttataattatgttttgttttttttttcttacaaaatactaattaagattaatttatttaaaaaataaatttaattatacttactaattcatttttgcaattagttataaagttcttttaacaattaacttttttgcattcaaattatacattaaaaatcttatctttctccattacttcatttttttttaatcttaatacatagacccaacctcactaaagaacttctttttcttcttaaatacctagatccaatcccaagatatttctcctcaattccgagacccaatccttaagatggctcctatcgttcacgaccttggacaaactggtatagttattgtttcagttctaaagaaataaaattcatattgtgaatggtggtgaaccggttgtcagagaaacttcaggagttgaaggctacaaccttagcgtcctaaactttagcgcgacaaatagatgggtaaattaggttatggttgataggcatatagtcgacagaggaatgtgcacccaccactcaacacgataaattaatttaccatcttattctcagattttcaaagttattttattttgacataaatctattgatgttgttgtactcttgaaattgtagattttaaacatactttttcttctatattattatttggtttaagattggaacttatttttaatgttcatattgattgatgtgttttggtatttatttagtatttttgcaatagatagtgtaactatgttaaattacttttgactaaataatattttaatttgtgttgtactcttttttttttcttcttgtaaagaatttgtctaatgctcatgttgattgatgagttgttttttctctctttgttttaatttgtctagtgtgccggtaaaagtctttccacctaccattcttaccacgcgggaaattttctccttttttctggtaacttttgtcagcgcaccaacaaaaattttccctccaaaattgttcacatgccggaatatacttttgccggtatattattgcccctcttaacggttcatattctgggttttaccggcacaattcaccaaatgcgacgatattaatatacttttgccggtatattattgcccctacaaaaattgtggttgaaagatattattgattcaacaacttttttatgtcgacaacttttgccgacacatttagccaaatacgcagataaaaattaaatttcttgtagtgaacataaaaatatatcaaaagacaatatttttttataaacaaaatcatatgaatcgtaataatatttaaaatcttgtactactgtatttttgtaattttttgtt

SEQ ID NO: 63201 - DNA, 1041 bp, Cannabis sativa
cgggttcgggtccgggcccgggtccggtcccgggtctgggtctcaggttagggtctgagtctgggttcgggtgccgagttagggtccatgtcccgatctcgggccccggtccgggtctgggtccgggtctgggtctaggtcccaaggcatcctagtctggggtccgagtcttgaattaagttttttttttaaataaattaaaatcagcttgaattagattcgatccaaaaaaaagattaagcggggcaaagcgtaggaagatccaataagtattcgaaggtttcaaattataggtgatccgtcggatcggagctccaatccgctccaactaaattgatctttttgacatgcctatttctcactaaacgaaaataaagtcatttcctcctcttatcttcttttcctgtttaccaaacaaaaatagcctaagcaagaactttcttattaatgcgataagagcactctctcgatgctctaaagtctaaacttagtctgtctttctctaattaattatttaatactgcagctaaagttgccaatttacaaaaaatatcacacaacatatctatgtcatcacctccggttccctggtacatctcggcgatgattgagttgaagatgctctcaagctccttcttcttgtcatcaaactcatcaaacttagcaagttggttacgatcaagccattggattgctccgtcaatggcatcctcgatcttctttatatcggcttcagtaagcatcgatgcaatcttctcgtccttaattttgttccttatgttgtaagcgtagttctccaaagcattcttggaatcgacgttctttatgtgctcttcatcctcggcctggtacttcttagcctcctgacctttcccagccatgagttcagatatataatatttgaagagaaagagaagcagagagagaggctgtcagcaaggttaggatttcgagtgtgagtatgaggggagctttagcttagtttatataggatttttgagttggatcaatatatagtaatatatggttcagatttcgcat

SEQ ID NO: 63202 - DNA, 1424 bp, Cannabis sativa
  modified_base (60)..(66): a, c, t, g, unknown or other
ttatcattctaagttctaactactgcttaaagtagactactattattattattattattnnnnnnnttattattattattatttaaagattattgtcattaaattaaaattaatttcaacctccaagttgatgcatataataaagaaaaaatatcgaagagtaatagtgatgtcaagtactctttttatatcttaatattgaaattggtctaattaagtattatgtctcatataatttagtgtaataattttaaaagagtatcggtaaccaatcacaagatgatatacatctaaaaggtgttaggcaccaccctaacgccaacaatactcaataaaataaatatcatgacataaaataaatatcatgacagtgtttgttataattaactacaacattaattttttttaaaaaaaaaaatctaaataagctacaatatttactacaagaaatgttacttttgctagcacatttttgtgctggcaaaagtttggtattgcgctcgtaaaatggaatttacttgtgatgtgttggcaaaatgggttggcaaattaacgttggtattagaacttttgccagtataaaatgaaaatcactggcaaaaataattttttccagggcgtaaatacgctggtaaaagttaaattttagccactgcaaatgtgcaatggtaaaatgttaacctttttgccagcgcagtttgcgaaatttgccggtaaaaattacttttaccagtataatttatgcgaaatttgccggtaaaaattacttttaccagtgcagtaataaattatactggtaaaagtgatattttttgtagtgactagcaacaaaattgttagatgttttatttaccatttatatttaaaaataaaaaatttaacctactataaattatcataacttttaaaaatatttacaaaaaataatgtttgtgataataataacgtacataccatcatgaacaaaattatacttaagaagttagagagagaatttggaattagcacttatacaaaaataaataagattataagtttacaaaatcatataaaaaaaggtaataagcagattacagctggagtggagcgaaaaaaaatgtgatagcatgtgaaacctacgtggttgcataattggtaatttggtggggagtgatgaggagtacttaatcattgtgttatttatataaatatataaagaaatgctaaaagttactaataatacttagtactctatattaatatcgctattagtttaactaattattgaattttatataatttaatgtaataagttttaagaaatatgataatcaatcacaaaacgatttatctaaatactatacttatatccaataacaatacttatatatatatctttatatattaaaagtgcctatctatcggcatttcttggtttaacagaa

SEQ ID NO: 63203 - DNA, 1058 bp, Cannabis sativa
  modified_base (863)..(872): a, c, t, g, unknown or other
aaattgtatttttttttatttatatgaagatatatatatatatatatatagtaggttataggaaaaaaaatattttctactcttatttaaaaaaaatatggtaatttttaaagttagtaaaaagatatatttaatttaaaaggagataatttttttttggtccttgagctaggtgtaccctaggcacatgcctaacctaagatcagacctaaatatataatatagttatttcatttaaaataaagttgaaaatattaatactctttgaattttgaaatagaacaattctcatacataaatggccaacccccataccaatccaacccaactctaatgtaaaatatagttcactttattaaaagtttactctaatagtgtgccaaattatgatacaaatatgtctcgtgaacttttaaaactgttaaaaattttccttgaactattaagatcacgtttgtctaactttattaagaagagtctaacataaataaaaattcaagagatataattaagtatatattaaagtgtacgggacataatttggtagatatcaagtatgagaagtatgatttagtatatgtacaatgttaataatttaacaaaaaaacttaacagctaaaaaaatttaaaaaatataatttaatacatattaaaaaataaaattgagaataacattaagacaaatttgatgacattcttatgcacgtgtggaccacacgtgttaattagtggatggaggatgggaggtgatgtggctaaagtgagtccatactatgtatttccactatccaaatccaatcatatccacacacactgtcaaaaaacttctctaactcttacttcattttcttcttcttcttctnnnnnnnnnncttcttcttcttcttcttattttcataaaacttaaactaaaacaatgtcttcctcagctgtagttacaactggctcatcatcctcttcatcatgtaccttcaacaacaataggcactccatcaaaaaaactcatccaaagtcaccatcaaatattcccaatttcacccaggtaataattaattatt

SEQ ID NO: 63204 - DNA, 4229 bp, Cannabis sativa
ggttcggttggccgaaggtggtggcggggatattggtggtgccgaaaaaaatgggagtcgtctgttgaaccgtcgggatcatggtggtggcggagaatgacgaaggcggattgtaagatggtgaagccctgaaggatggcgccggcgtcgagtgggaaccaatcggagctgtggagggtggtccgatcgttccactaatggagagatcgacaacgtgaccggagccgaaaaacactagaagtggaaggatcggacattggaggaggagctccgatcgtgtttgacgagagaggagcagtaggaggtaaggcgggcggagcttcgacgtcggcgacaatggcttcggcagtggagatgtcgtggccggagatggtggtgggctcggtgacagaagcggcagccatggagttcctggttcttggagccatggaacaagaagatgatgaaggaagggaggctagggtttatgtgtatctgataccataacaagatgaagactcctttattattatgctattcccatacggcagaaatgccaaaagtgaaataggaaaatacaaagtacgtatttataatgagagagagagggtaaccctagaaagaatgggccgaaaataaggcccagtcggctaaaatctaatatcgtataagagttgtattgtattaaataacaaatatattatgtttggatgtaacattgtatcgtataaattattacaaccataaattttaatataatttgaatcgtagtatttaatacataataaatgatccatattaacttgtattgtagtatttacaaagggtctgtctggaccccagacccggactacgaacccagacgtaggaattggccgcatccttggatccgaacgccagacccgaaccctagacgttcgggcttggatcgttcccttagacatccgggttcggggtctgggaatgactgggtttggggtctgggaatgactgggtccgggccgaagtcggagttgggatcgagtttatagtaaagataatattagtttgcacaacctattaatacaagtcaataccaaacatagtattatattaaataatactaatataatccaacacaatattatacaatataatataatacaacacggtgtattaaacgagcccttactgtttaattccttttccttctttttattttagttaaggtggcttgttgatataaaggctttgtttcttacactgtaggctatgccatttaatatcttgtgggtgcatgagttggaagtgccagtgtttggatcgcttgccatgagttctctgactgggaatagtatgtttttcaattatgtgactttcatctagttattgtgtttgtatctttgagaaatcctgtcgcacaattttatgtagtttaattgttagcccttttgatgtgtctggtctctcattgaaattctgtgatatttttttgacaaatgcagtaatatgttgcttggtggatgggcgtgtaatagctttggattcaagtggatccaaaatttggaaggtacaatacaattctagttgtttaaagccaaattttaaattctactttgttagattgacactgcaaacatgagttttttaatctgctgaaagcacttgtttatctatcagcattgcagccctttgggcatctatcactgcaatatattaaacacttgtttaatggatttttattttacaatgaaaagtgttgtgtactagcttctccatcgtcaccattttttttttcaaataccagaagaaaagtgtaagaattaatatttagttttatctttctccgagaattaatatttcgttttatctttctctggtagcattttattttacatactgatatgtaatgtgtatacataaatataggaaaagaaattttgtgagagcatcaattttgctcatatcttaggggtatctcttgtttttggtatatagagaaaatataaactaatttttttatatgatactatacattatagttatactaagaattctacctgttttcggaaaattttgaataatttatgggttaaaaaataagattcaaacatttaattgtactcgtgtctattttattttatacatgtgcaaaagattattttgaattttatttttgatttcgaaagatattcaaaatttctcgaaaacggatataatatctattataactataataattcatacaaaaagtaggacaatttcttaaaatacgaaaaataagaaatgtttggagcaaaagtgatcccccagctccctatgtatatatttacatatataaatgtacttgcgtttgtgtaatctaggagttgttacctctttacaccattccttaagttcgcatgtgattcattattttttgattgaatatttgatcaaatgtattagatgttatgacatctatcaaatccaattcctcgagatgatctgtaggaaatttatattaccatctaaaacttttacatgaaaagaattttctaatacaaattgatttagcatggcatgtgtacgagacatgaaagcttgtggtttgatcgtagggtggaacgaagctactcgactgattttatcgtgcactgattttatcgtgctttctctccatacttattttttgttagactaattaaagttctatcctattgatgatgtcaatgctcttatttcagtgtaaaatttccggtccaatatttgctggagccaccatatgctctgctcttccttctcaagtatgtttttaaatttccttcgacaatttttttttttttggtagtgatctgaatcacatgaagacaaaaacgtggagggactttaaaagacaagtataactgaataaaacatgacattaaccggaaaaaaaaaaaacagaagaagaataagaagaatggcaatgaccatgatgatgtaaacttttttctttgtaatctttctgtaggtgctcatatgttctagagatgggaggatatattcatttgaacaagtaagctgcagtgttcatcccatctctattttgatcttatttataagttatcttgtgaaaatttaacattgatactaatgctaatgcaggaaaagggtacaatactctggcaatacaatgttggagatccaattactgcatctgcgtatgttgacgagcacctgcgtttgacgtcggattcttctcttttatcagacaggtaaaaataaacgcaaaggaagagatttttatttttatttttttttttttgatagggaagacggaattagcttaaagaaaaatacccattcatatggacattctaaaacgattttgcaggttggtatgtgtatgttctagctctggaagtgtaattttgcttcgagtgaagatggaagcgcgtggagaatcggatgacgtcgaggaagttgcaaggctagaccttgaaggagatgtgttttcctcacctgtcatgattggtggaagaatttttgttggttgcagggacgattatgtgcattgttttgttgttaacatatgaatttttaatcataattttgatgagcttatagctaatacctgtacccaaaagcagtacttttccattagttaaaggggaaagaggagtcgcatatgatttatacatgcgtgtaagaatacccaaaataacatgaaaagatgaaaatattatttattatcctttcgtttgctcaagatatattctaccttttttgttttgggttgtttattttatgttaaactaggaaataaattcgcgtttcgcgcagttttatgacagtataaagacagttttaaataatgtattttgtaaaatagaacatataatcctaatttcagaaaaacaaataattttagtcaattaatcttttgattctatgagttcaagtttagctaaataattttaatcttagttctaaatttttctccttctaggggtgaaattttttatttcctaacactaacaaattttgacccaatttttaatacaatcctaattctaaaaaagctacacatttaatacatttttttgtaaaaaaaaaaaaaatacaatgctctcataaaatactaacattatgagatgctctcataaaaatttgtaattggttttaattttggtagtgggttggtggtcaagtcttaaagcttctacgaagcaagtaaaatttatgtatgagtttttgtatttgtaaaaattttttgtaaagaaacttatttttaaaggaataattacata

SEQ ID NO: 63205 - DNA, 866 bp, Cannabis sativa
attggaacccaaaaaactattaagatgattataaaatataatcatggaaaccagttacatttagcaactaattaaaaataggatttttttttttaatttttactctttaaagcagtttatttttttttttatttttttttttgtatttttacggaaatccacataaaccaacgaaaaacttaaatcacgaccaaaatctacataacaacccacataaaaattattggagcaactaccggtgcaactcaaacaataatttttttttaaaaaagataaaaaatggtatatggctgggtaatttcccttaaaaatatgacacaaagatatcacttacgtgaagcaaccaaatgagaaactaacacacaaaaattagctaccgaaagataactaaatcaaaatttgaaactttaaacccagttacgtaataaataaaaccaacaattaaacagaataaccagttacattatacaacaaaatgaaaagctgaaacaaaaacataagacacctaaacattcaaaaaataaattaggacataaaaatcagttagttaaaaaaaataaataataaaacatattacaaaatttaattacattaaacaactaattaaaaatctgacataaaaaaaattagttacgtaaagtaactaaattaaaaactaacacataaaaatcaatagccttaggatgcgtttggtaacacttttttaatcagttttttgttttttaaattggaaaagtgaaaatattttcaaaaattatattctataaaaatgttttactttttgattttttaattgagaatcaaaattttaaaaacaaaaaaaaaattctttcaatatttttttaaacagttttttttcttaatca

SEQ ID NO: 63206 - DNA, 671 bp, Cannabis sativa
tattacctcagggtttcttacagaaaattcttggaaatgagaaaagcttgaaatgggatccttatacttgactcccaaaaactcttttcctcgcttctccaaaagtgcgcccatattggtggactttactttctccctgaatcataataaaagaaaaacaaccattaatgattttggtgttcattcatcttgtgtgatcgatcgccttctaattaattactcttaattaggcatgccttctcggatatacaacatatattataagatttaaatttcaatgaacaccttataatatagagcaccagtgctgccttgcaactctagatatatatgtcgccttgtgattgactaacgatactctttaaaaattattatattaaactatataggacccgatacttatttaaacaatagcaatattaacacataagaggatgctaaacactagtaccttttagtatttctctataatatcttcaatgattagtttacaaaactgcatttatcaacaaagttattatctcctaacacaaaaaaaaaaggacacccaaagttgttgttttttatgaacattttagtcacaacataaatttttaatgattaaatgtaatttttattcacaataaaaaattaattgtgattaaagcataaatattagatataagatatca

SEQ ID NO: 63207 - DNA, 578 bp, Cannabis sativa
caatctcaacaacctctaaaaaaaacatataaaatacagttgctgaaaagttcggtaaacatctaaaaacatgaaccacctaaaatttcttatttgttatctcactatttactctattattattttcttaagctctaaaaatatttagttgccgaaaaactcggtaaacaagcgagtttaagagtacaattcttttcgatgtcattgctataattaacattcaatgcttgctgaaaaaaaaaagtaacaattttatattaatataaaaataaaatattatagtgaaagtgaaatagaggtgtggttcgtatcttatgttccgtggtataaaaaatattgtcctatttgagtcgtagtgtttaactacattgacaattgattgatgactattatcttgtcctgctcattatcataactaagaagctcgatatcataaaacttgtctaactctttttgtgataaaacttgtataactctttttgtgattagttttatttcttgttgatcatccctttatataagaagtagatgatcaataaattagataagactgttataattattaattacatttaaat

SEQ ID NO: 63208 - DNA, 926 bp, Cannabis sativa
tttgttttacagttgttttgtcatcattatttatttaacgttaatttcactgcttttgcttaatcttgttggaattaatgggtgtttttcggctgtcctagtgttattgtggtggttctgtttgtggttgtggaagatggaggtatcatatatatatatatatatattggtgtttacagtataaaagaaaaaaaaaagacaatataaatataatttctaccgtgtgacagtaaaattgaaaagtattaccccaaatctagtatttttgtaaaaaccctttttttaatataccattcactttcataaaaaagactcctaatttgaaaataccattatatataataataccatattttgtattaggctcgaaaaattttcaggcccaacatgctatagaagtcgagataagttaaaaaatatatcttttttatatttattaataaaaaatactctcttattattatttttactaaaatatactcacttttttaagtgagttgtccaatataccctcactctctacttaagtctaatatataatttatattaacttaaaggatctaatggagacatcatccataaaagtgggtatatctaaaaaatttgaaaatagaggtaaaattaaaataaataaagtaaaatgggtatacaatgtaatttcctcctataagtcacctcatgttttggtaagaaaattacactctatatttattttttattttaattttaattttattattttttaattttatacccaattttataggtcatatctctattatgtgtgttagagactgaaatttagataagttatgtgaaattatatttggtaatttgattataaaagaagatcttcataaattaaaattattttagagttatatttgattaataagtaataaaaaaaatagtttttaatttatcca

SEQ ID NO: 63209 - DNA, 886 bp, Cannabis sativa
tattaagctcgatggtttttgataagggtacgataaaggcccaatggttttttagttcagagattaggggtgatgtccagatgaacatttgattggggacgatagaagcctgatgatgttcgggtgaagagtcaagaataatgtcccaatgttgtttaatgggggacgagaagagcttgatgtttagccccgcctattaagtacgatataggtcaatgattgttcgattgtgataggataatattttaaaatattcttctttgagtacaattataggctgatggtgttcgatatgcgttcgatattacacatattcaatagttattttagcatttatgtttttcattattgtatttttttttcgaatgacaaggtcaattgtgttcgtgttcttgatgtataatggtgtttgtgagcgtgaggataaagattgacttttaatggagcaaaaaatttgacattggaaattgatgagaacataagttactcacaactggttgaacttttgtactcatagttggaggttgacaaagtgcaatatgacttgaaatttgaagtgaattacaagtacatgaaagggttaatgtaattgcttgaagttataagtaatgataagtgtctaagtttatattgtcaatgctttcgaagaagccaaatgaatttgttcccctttttttgactttagtgaagaataatgtaatataccagaaaatataatgatattttaattggacatattttattaaatatgtgatttgaggggccattagagtaggattataatcctatttaaactaattacgagttgattaggaaaatatgagtaaatgaataaataaagcgtaatttattaattacggaaattttattggactatgggggtatc

SEQ ID NO: 63210 - DNA, 1185 bp, Cannabis sativa
ggcaaaatatcggggcgttacaagaggattgttaatctcttttgtattatttagtattgggaaggatggagaaaaaattaattagtaaaattacaaaattatcgctattgtattttgtaaaatatattttgtctttttataccatccttccaaatttggagggattaaattttgaaagtttcaaggaagaatgtctccctctatctctcttctctctcattctctctctcttgccaaacaagtgatttaacctctccttccatcactcttcttccacccctctccatccacctatttttccttcctaccaaacataagtgatgggcaattgtgagagtagttgaagaaaaggactaaaatggaacatttaagttcaagtttcaagtacccagcactttgatacacaataccatatctacacatttatttggtgagtttcaattcaattggctacactattttcatatggagtaatttattagcactgattcttgttattgttaattattgtctttgtcagtccaaatttgattaaaacgacgactctagtcaattttcagcttaacaataaacagttatgcggctttaaggttcatcactgtgatagtcacctaggctatcacccatcaccatatttccccttttatgatcactttttttactctttttatagttcgtaaaaaaattcagtttctttgataaataatctttagaagcaatttattaaatataagttttaaaaattaagagcatgtttgttttggtgtaatcaagattggaatggaatggaattacaattacaatatttggttggactttttaatttttgtaatctttttacattgtaatgagtaccacttgcatgaattctcatattacattactcaactcatgaataaagattacaattactaatacattacaaaaagatttttctacccttctctctcttacctctttatcaaatgtagttgacaataaataaaataaaaacattttggtcaatatattaattaattcaattttatttttataataaaccaaattaaaaaaaattaattaaaatgttcgttacaaaataaaccaaatatgtattactattacattccattactattcctattaccattacaattacattccaataaatcaaacaccacataaatttacatatacataacatat

SEQ ID NO: 63211 - DNA, 834 bp, Cannabis sativa
atttttaatctcaactcagataataaatttgtttgaggtggagttgcaagacaatggcgatgctaggtttagtttatgcatttttaggttccgttttagtaaaatttatatgtaaaatttttacgtctttgtgatgatatattttaatataaaaagtattaaaaatggaaaccctatttgctacacaagtcataaaaatattctcgtctaatatgtaacctatatctatataactatagcatattaaatttggaaatatatttataatttttgtattacatatatttgatttttaaattattatcttttatattaaaacattaattgtacatttaattttgtttaaatgatatataaatatatgtggattgaatttagtattttatgaatatccttatatatatagtaataaattacaaaaaattaattaataattataattaatttaattgtaaaatataattaatcttaattaaaattttataaggaaataaattattaggttacttccaagttacaagttatttattatttgataattactctttactgttatttggttaatttctattattgtttttatggggttagaatttgtagtttcatgtgttaaaactaattaggtttttccattagtcttcatgtcttttgacatggttctgacctctgccaactgaccaatgtaccatgtagtgagttgtcattataaggaccacatgtaaccttagccataaaagctcccttatgaatagattctcaccccttcttcaaaggggctagaatttatttctagcaaaagttcttaagctgataatacaagatactcattttcac

SEQ ID NO: 63212 - DNA, 652 bp, Cannabis sativa
actattgtgttctatgttatatacaaatagattttgggtttattattaatttttctaacattttatatataaaaatactgtggagataaaaatttgagaacaatagagaccaggcgaatgcgtgaaaaatatgcacgagtgggaaaaaactctcacacaagctgagtcacacgcagggtctacgattatgcaactattatatgtttctaagctcccacaattaattttttaaaatatatattaaatttttcataggtgaacaattacacaacaacaaataatctatacaaaatgaataaataaataacaacgaacaaacaaccgaataataacccctctaatttaaaaattaattaaccctcaacatagtacattaacacaaaacaaattaaagactaacaattaataatttttaaaaaataaaagcaactacaaaatatttatacattacctcaaaaatatgtacccattaaaaataaatatatactcatttttctatttggttaaacaatttaatagtaactaacatacaactagatgacaagactacataaatatataaattaattggacatcaaaaaattgtgtaaataacatgaaagaaacataaacaatctcaataaaactaaagtaagtacaaaaaatggactac

SEQ ID NO: 63213 - DNA, 1093 bp, Cannabis sativa
ggcaaaaattataattagcctttttttttttaataatggaattttattaaatgtaaatttcattcaactagatcaactcgacttcaacaatattagcaacatcaaaagggagatcaaacgctaaaaaaatacgattaacatataaacaagatgcttagtcataatatgagcagcccgattagcagactgttgcacaaaacgtaaagaaacatctttaaaagaatataaaagttgtttacaatcctcaatgacaccaccaaaaatgaatgacaaaatattcaaatttctaacagattgtaccaatacacgacaattggattcgataatattaacacacgaaaaagcgcacttcaaccatgataacacttccttgagagctaagatttcaacaatctctgaaagaacttgcccaatccgcagtccggtaatcccagtcacgacccgacccttgtgatcccgaataacctcactaaaactatgctttccctccttgtcaaacaatgcagcatcaatattcaccttaagtttttcataacctgattcagaccatagctcatccccctccgaaagataccaagtatcaaatgcatgaaacaaacttttctcttaaacttttcttcactgatcaagagtgatacaagccaaattgacaacgaactccactcgacttttcttacccttccataagagttgatttcgtgcgaaccaaattgctcaaaccaacatcaccgcatgaaaacttttttcctcacccagtcgtgagaacaaatgaaaaaactgatctccaaacaaccttgcatcaattagaatcatagccaaacccgctactcgccaataattctacgcaaaatcacaggcaactaaatagtgcaaaattgattcacttgtcccatgacaaatcgaacacaacaaagagacatacacatgtttagtcttcaactgaactctcgtaggaagacacccactatctccatacacaatttttttgcctttggaagaagttctgttgtgaaaattatattgatttataattgtgcaagtgtacacaatcacaaacaagtaatacaatgataagtaatcaaagttcgtctcc

SEQ ID NO: 63214 - DNA, 938 bp, Cannabis sativa
cctcaaactaatgatcacatactcgtggtctctcctccagcgaaaccaccttatgtcgccgctatcaccatccgaactcgctgcctgaccattacttttgtcaggaagactttctacaggtcctaacaccgatctcaatcttgtaccgccgttatcatcagtaggacacgtgacctgactacctcaatatatcaggtagactttcgatacaaggcaccatatagatcttcaatcacgaggccatgtacattgagggcgtctctcacacattgcaaatacagcctactatcccagcgctcataaacttttggctctgaatatgtcacttgttgggccccattcttctatcttgtcaggctgctacttcacgttgactctcacattagtatgatattgtccgctttaggcttaagctctcacagttttatttttgagcactttcgcaaaatatctcatattaataaagaaggtcgaatacttatatccaagataactcttatttattcttctaatacgagacttgaattaatagcccaacaactatatgtatatacatacagataaaattagcttcgcattaatgctttacataattagtaattgaagaagtcaaagatcgattattacataacatacaaaaattaactaattaactcaaataattataaaaattaagactacaatattaaattatttttcttttcttattaatagtacaaaaaagtttagtagaatttcatattattaaaaaatttatataaaaatgtcaaaattcaaaagaaaaatttacaaaacagattaaaaatttaaaaaaattacaaaaatactttaacacgaattttttttttcatttttactccatgaatattttttatttacaaaaatatattttcagtgaaaataaataaaccattattttagttgttttatagttgtat

SEQ ID NO: 63215 - DNA, 1126 bp, Cannabis sativa
ataaattaaaatatacacgcatagtacaaatcataaatcatcctaacttttccaattcaccacttaaaaccataaaatagtaataaaaacaccattaattaaatctcatacaccataagaacaggtttatgtgatggccacattaccatttatacgtcattaattaaaagaatgagaatcacaactagcttccttcctgtgttctttaaattccaaatgtagttagcttgtgaagaaagcaaacaaagagagaaaacagagtttgtttctctaaaacagagacaaagaaaatgcagaaaagccttacttctttattgataagagaatgtatttatatacatgatttacaatcagttaaggcaagaaatacaacaaagaaatcataacagaaaattaacaacctaacgaccttaactaactcttatccaactgactattagttagttggttatcagcttgtataattatttcaatgtaattaggatgaacaaaaagcatgagaataaatatgacataatccaatcttaattagcacaattgtataattatttgttatctttgttgtgatcggtacttataatcatgagaataaatatgacataatccaatcttaattagcacaattgtataattatttgttatctttgttgtgatcggtacttataatcaggggtgggtggctcaacagaaaaaataaattagaaaattttgataaaaaaatattttaaaaaaaagaaacttttttttttcttgaacttagttaataaatttactgaaaaatgtttagtgaggagcatagttttacaatagtaatttaatatttaactatagcttttgtctcttctcaatcacgattaggttagggggttcaaaaagtttctcttcttcttccttctgacccgaaaacaaagctagggttctatgggtttttcctctcttctcttcttctcacttgctgccgaaatctaggattcttataacaacaaaaaattgacaagttaatgattggatttcgagaagtattaaacacaaataaaggttttaaggtttgtcgtttgggtattattaataaaatagtgagattattcctattgtgattaaatgacctaaagtataaattgtaagt

SEQ ID NO: 63216 - DNA, 731 bp, Cannabis sativa
gtgatctaagtgaactgtttttttctcagattcccaaaagaaaaaaatagaaacatgattttcccctaaaaagctaaagaaaaatttataaaatagattaaaaattttgaaaaaaaattacaaaaatattttaatacataaattttttttatttaaaaaaaatactttgataaaaataataaataattttttagttgttttatattttatttatagttgtattataattttcatgagattatttgtttagttgttttataatttatttacgagtaattataattttaagtcctgtgttttgcaaaagttatcaattggaccctctattttattaaatgacaaaataaaccttatattttccaaaatgataaaaaatagtacattgagctcaatttttaataattttataatataaccaattttaagacaatttttaacagataaagaaaatgtaaccagatttatcgtaacatctcgagattagattattattaagttttattttgacaaaaatcagttcaaggtcctatttgttcaattttagaaaataaatgattcattttgttatttaacaaaacagaaggttcaattagtaagtaatttttacaaaatacagggtccaaaataatatttatcctttgttatagttgatttatagtgaggagattgatttctcgttattttttagttatttttttacttgttacaaagcaaagtgtatttttgtaatt

SEQ ID NO: 63217 - DNA, 876 bp, Cannabis sativa
  modified_base (599)..(606): a, c, t, g, unknown or other
acatacgtcacctcgtaccccctatagatccatttgcatctcgaaatacttgacgtggcaaagaggatcttctcttccagtgtacattttccaggttggcattttaaacttacggggcaacgccaggagactgatctcgggagagaaaggggtcccacttgctcggtccgactcgagattattgtttctttgtccagccatgccttggaacatattgtttagttcgtccagctgtgcctacagatctggactaacctgttcggtattttggccgatttgagtcacgtcagaatctttctgagcgagaatttgagcatgggttccgggctgcacgatcggcgtgccaagctgattgtctactcctctccttctgtttagatcgtttctgagatcatgagttgtccccaacctatcgaatacagaagtgcctagctgtcttagtgattgattggctatattgacaggtggaatggcaccgttagcctgtttggaattatcaggtatgacttttccgatgaattactagacaaggtctgcccacctacttcttggcccacaggcgaagcctgtgacaagagatttggcggctgaccatttannnnnnnngaagtattcatcgctggatcttcgtctgtttcacccaaggggatgacattcgagggttgttgcccgacaatttggtaggctttttgtatcaacacagtagcttgctcactacgattgtcaatctctggatgatgagcccttaacgcttccatctctttgtccctccattcagcaaacatgcgtctctattcctcgaatgcaagatttaccggagagcagagttcctcctgatcatggtgtagggtgttggtattgttgggttttatgccc

SEQ ID NO: 63218 - DNA, 757 bp, Cannabis sativa
tattgcggaagaaaagggaaaacattcaagagattttattgtattgaattaattgatttacaaaaggaaataagccttaaataggcagcagtaaaatcagaagcagatctccttaaatcaaggagaaccgttgaaacaaaggaccaacctaacagaacatatacatatgtatatgtcactaacagaatacaatataaactaacagagtataacagaaatacaatattcttgttattcccaaatagttatcattgttcacgctattgtcccaagtcattctctcagctaactaataatcttaattcagaatcattgattatgattaagaatattgtaattgaacacaaactacaaataagcacaacaccaaccattaacgactgaagctttttttctttctcagcttacaagccaggtaagattttgaagccaatgtaccccatgctcattaaaagagtaaaataaaataatgttacatttactctgacaatcaaggatatatatgcaaaaatgtacaagtattattatgtaggttacagtaaaattacaaatcattctcttcaactaactaatcttaattcagaatagttgataatgattagtacagttaagaatgctggctactaaggaaagctcaaacaagccatacaacatggagatttttattattggttgtttaggtaaaacccacaagctaaataagaacatgatgagttaaaattgggaagccatattttaaaatctcattaattaatag

SEQ ID NO: 63219 - DNA, 2632 bp, Cannabis sativa
  modified_base (830)..(830): a, c, t, g, unknown or other
gtacacatatatgtaaaagggaatccttatttggtggaacagttacttatggtatcttaaacagagaagtgggacaaatttcaagccaataatagagacaagggtaggcctccattttatgataaggaagatagactagtcattttccaggtgatcaagtagtggaagcaaaactgatgtgcttggtgtttgtcattatctttttatatatacatatagagaaatgctaaagagcacccgtgttgcctagtggtacctagcatcttcctatgtattaatattattattggtccaactaaatatcaggtctcatataatttaatataataatttttagaaagtatcactagccaatcgcaacacaacatgtcgagaatgtggtaggttacctgatgtaatagcaatgctcatatatatataagcaggatcgaccctctcctcaagccctgtcttaggctgacacctgtccttccacatatctccttcacccacttatctatatatagtctataagccatttcaactaacatttcaagtgcttctcatcaataagtgtctatatttgtacctttttcttttctttattttctcttccttttaaggtcttagcttgtaaagtagtatagtcatatcatgacgggtcagttctcctccaatagagccccaaagcttcgattatggcagaagtgttcaaggctcgtcaaggaacaaagaacacgattctacattatgtggaggtgcactgtgattctcttgagttgggatgatggactttgatgatgggtatgtaatacaggactccaagagttttttgttttttttgttttttntttttttttgtgtgtgtatatatataaattatatacatacattaggggatttagactagcagcagctatagtaaagtgtatcttacatttttgaatatatatatatatatatatggtagtttgttcattgttgtgcccttcttgactaagtcaattgctagaaaaatctgtaaattagtatgtttctttatgaagctgtcatctagctttttgtcaacatcaatagaataccattttggcttcaatatacaattgataggtagacttataattcaagcatcaatccctctctatctattaatttgtttacacaaattggattgattttacacaaaaagacaagctcttgaaatgaaaggaaagctaattcatagtattgggttttattattaatttttaggattttatttatatcccgttattccatataaaaagtaaaaaagaaaagaaaaacattcatttgggtctctctcactttacatctctcactgtaagagtcatattctaaaagactacaaaatctttgagaacaatgcttattcacatctcaacaattacaagcctccctccttttaaaggttgttcttttgttgctcaacacaagaccaaaaaagtaagtaatacagtaatacagaggaccaaccacacattagcttattagcttcttcttcttcttcttcttctttcagatggaaataagcaatgaattttcttcaacatcataggataagaatgggaataggaataggaatacaacatgtaatcaatcaatcatctagtactgctaccgaaaggaggttcactcgatgttccttgcaactttgcgttcttcataacatcctcggatgatctctttggagttagccctgacttagcttggacttggccttgtccttgcgttcccccctagtagatcataacaacataataagttatatcacataattttaggctttcaaacctggacaagacttactacaactcgaattgagaagtgaattacaatttttttccttctttcaaaatagaaaatgttatccgaaaacaaataggtgtctcttttttaatttctttccctcgttagcattttatctctcatagtttctcccctttttcctattgtcatttctcattttactttcccgaacaatattaaatttcttttgatttcctctaacaatagtctttctcataactttcttttttatcactttgattcagattagtctttcttatccctttcactctttattttctccatgaccattgtttcctcatcacttctttccacactactctctcatcactgtttttttcaatctctcatagaaaatcagcagaaataaacacaagcagaagaaagtgtctctctctctctcccaagtttaaaaattattattagttcaattaattgaaagcttattaagagggaaaaaatggcaaacaaaatcattaaagaaaacaaatattttagacttttaatcaaatagaaagttcagcataaataaacacaagcactcttttgaaaaagaaaaaaaaaacacaagcagaagaaggtgtctccctcacatgtttaacaatgattattagttcaattaattaaaagcttaaaagaggaaaaaacaaaggcaaaaaaaaccaataaaaaacttttattagtcttttaatcaaataaaattactaatatatttttctaaacttgaatggtactattaagaaaattaatgtaatataatttggtaattttaaaaataaatttcatcaaaattgggttattgttttttactaattttcaaattaga

SEQ ID NO: 63220 - DNA, 895 bp, Cannabis sativa
ttactaaaattagacaaaagttcttaaatttaacaatctcaatagttcgggggaaatttttaacagctaaaaaaattcagaggcacgatttaataattacgatttaatacatgtcaaagttcgaggctaaaaattactaattagcttttaaataattataacgtatgtaataaaataattaaaaaataaattttttcttaattatccaaaatttcctaaatagattaatgaattttttgaagttgccttgtaaatggtaaaaaagtagttttgatatgaaagtggtaagagaaaggtcaaaggttgtcgttatgaatatgaaggggacaaagagacaaaggtgggacccaaaccacatgtgtgaaaccctttcttgagcgccacgtaagccgacaaggtacgcggctgaccttcccaatctctcctgcgtggggaccactctctcttattccttcaattacgtttctttcactttcacttcataaaatccttaaatctttcttctcacgcgctcttttctaccttatttatttattttattttaaatttgtttctatgttactattactttggttattttagtgctttaaattcttgtgtgccatgctaattattttttttttttgagaaatttcactgatattataaattaaaatcatttacaacatcagagaaaacaggatagggaatttctcctatccaaaaagagtcttcatccaaccccaaagcatatttagctaaaccatgtgctgcttgattagcagttcgtttcacatgagtaactaaaacttgagggaaaaaggacaaaagacaacgaatatccataataagatcagaaaagcatgataaatcggaatttaatatatttaaagcatttgagacccgagaagcatca

SEQ ID NO: 63221 - DNA, 1112 bp, Cannabis sativa
  modified_base (431)..(441): a, c, t, g, unknown or other
tatgtggcaacccgacgccattaggtacgcgaattttagtttttttcattttttttaatcttctctactaataccttgcattcataaagttttcaagtaaaaaatgaggatacaaatcaataatgtctatttagaccatttttaataaaatgctaaaaaggtggtgttctcaactattctgccttaccacacggactatatagatgattaagcaattatattatttttcttctctttaagttgaaattttatgttttattcatatttgtgcgatcttttgaaaaaaatatgaattcttgataaattattttatttggtaatattatttgtttgtgtaacaaactaaattacaatgaattttcattattgagtaatgatatttttcaaaaattaaacatgttgctataatcaaggccacaaatcatgaaaannnnnnnnnnntagaaatacatattaaaggtagatttgtctctatgttatttttttcttgttccagcaattaagttttatttatttatatatatatatcctaatttatatttgattgtctacctaatgctatggttgcagttgagtaaactcttcaattttaattataatttattaaataataagataaaaaattaagttataccattaattttagagtaatttgcggcataaatacctaagttttatgccgagtagtagataaatacctgagtcgtatttttggcggtaaaaataccttccgtcactagtgtggaactttcgtaggtacctggtcgttaactgacaggtcggcatctacgtggcagccactaataggtccatgtcttttaatttttatttattatttaaaaaattcattaaaatctaaaatttacttaacaaattatttaaaaaaacaacaaaaaaaaatgttaaaataacttaattaaaaaagaagaaaaaaaaaaagaaaatcctaatatctttctatcttcccaacacaactcttctcccacgccatttcttcttcacgcactctctcttcctttctccttcttctcaggcaagctgcagcctttctctgttgtcggccaatggagctctttcctcattgccgggcgatggagctcttctctcagtgt

SEQ ID NO: 63222 - DNA, 1563 bp, Cannabis sativa
atatgatatataatccaattcaatataatacaatacaatatgacctaatacgacgttccaaacgagttctaaaaagtttattttgttagccttttgagacgcaaaattatttattaaataatcatagtaaaatttatttaatattttttttttgacaacattactatttcatttaatttttttagaaaacaaatgatcttaagaataagattttataaattttagtttcgaaaatttttctttaaatttcacaatattacataaaaaaatataagtaattagaaataaatcaattttatatatttatatatatatataaaaataatcaagtatttttagttatcaaaatatctattataactttaaaaaattcaagattcattcgatattgtttaatatattatcttcatccatcaattttaacatagtaaaattgaattaaatactttatagtataatcggtttttatatttttccacaaaattggtattatttaagtataaaacctataacataataatagagaataaaaaaaaattaatttacttgtaaaagtggcataacattgtactactactagtttcttataatatatttttttttttaaaaaaagaaagttactgtatataagaatactaatattagaatttgaccctttttttattattcttgggccactattatttttttggttaaaaatgtagctagtttacattaatgtatcatatgcatatatgtatgtagaaaaatggcctttttttttaataatgggccttgggcaattgcccctcttgcccatagcttgagccggcactgggtatgactagagtaccgagtataggcagtgttatacctgaaattcggctatacttcagaggttgacacgtgtcaattaagtggaatatgaaccacttggtataataatgattatatcatttaatgcaaaaaggaataactcattaaatatagaattaatagaagcatattgataactcgctaactatatagtcttaggtaagataaggatacaaaactattaatgtttgtattgacgagacactatcctgcctcggaagacacagatccaaggacaagattcattttaaaagaataagtgaagttacttgaagtattcacgagcagtatatagtgagacatccacctcgctattcacaagacatattgacaaggtgaataagttgtaatatacttagcgtattgtatacattacaataactaagtgtaacaacttggaaatatgcaggacatgattgtccagtctacgaggccttatggtcaaagagaagttcttaagtttgctcagtacactagtgctcatgccattgctagaaggcatatgattattcaaattcagcattgaccatttacaggcaaagcgagatgctgttatccaaatcagcatcaaccgtctttaaggataagaataaaaagctgttatgcgattatcaattgttatctacacgtgtttgaatgaaacatgatcaattcccacgttttatgaatttattatgtattttaaatttaaaatgtaaataactgcca

SEQ ID NO: 63223 - DNA, 971 bp, Cannabis sativa
ttgataacaaatcatattagattgtcatgggttttatttagggcataaaacccaacacctacttcctataggagtttaattggcaaactcctctatatagccattacacggcctgacattacctatgttgtaaatcgcctttgtcaatttcttcatgatccaaggcaacctcacatgaaagctgccattcaaatccttcaataccttaaaggcacacttggtcaaggcttacttttcagccctagcattccacaacataacaacaaattccaactccatgcattcacagatgctgagtggggcactagtcctgacaccaggcgttccatcacaggatattgtatcttccttggcaactctttaatatcatggaaatcaaagaagtaggcaaccgtgtctaaattctctgcagaagctgaataccgctccctagctaacatacttgcgaaatcctatggctcttcaacatcctcaaagactttgggatctcacattccacccctgcaacaatatactgtgacaaccaagttgcactccacatacccgagaatgatgtcttccatgagcgcaccaaacacatcgacatcgattgtcatattgttcgagaccaggtcaccaacaatcgaatcaagctcattcatgttccttctcggcacaatgttgcagatataatgaccaaagctttgtttcctactcaacacaagttcctattgagcaagatgagcaccatcaatatctactgctcaccttgaggggggcgtattaggatatcataattctgttacagttagttaggcattctgttagttaggaatgactccctacttgttagtttgtaacaataatcttgttacacctcttgtataaatactctgtttttcttttcaattaataataataagagttcattacactaatagacttcaacttactgaaactttgccaaattgtataatcatttcatacttaaa

SEQ ID NO: 63224 - DNA, 748 bp, Cannabis sativa
aaagcttacgataggttggagtggggttttattagagccatgcttgaaagaatgggctttgatgatagatggattaatattgtcatgttttgagtcctattgaagcatctcgtgggattagataaggacatcctttatctccgtatcttttcattttgtgtgcggagggactctcttgtctgcttcatagctatgaacaaaatggtttgctcactgggtgtagaattgctcgtcaagctcctactatttctcatatgttgttcgcggatgacagttatatttattgtaaagcaacggaagaggaagcatataatatcaaagagttgcttcatacttttgagttggcatctggacaaagtataaacttttcaaaatcctcagttttttacagcagtaatgttgcagctgggttgagagattctatttgtgatctgctgggaatttttgaggcggatgaaaatggttcttacttgggacttccatattcgattggaagaaataaaaactctattctgggctttttaaaagataaactgaggaaaagaattaatagttgggaggggaagatgctttcgctggcagggaaagaggtgctcttaaaatcagttgctcaagcaattcctacctatgctatgagtgtattcctattgcatgtcgatacttgcagagagcttgagggtctaatggctaagtgttggtggaataatgggtctactcattccagaagtaaaagttggatgagttggag

SEQ ID NO: 63225 - DNA, 569 bp, Cannabis sativa
agggcacaaaacccaacactataacaacaaatgcttccagaagagttgatcctaaagatcctggaatctcaaatccttgcaaggataaagagaaagggataataggtgaaactttgaagaatactcctttgactaaacagcaaaataagtctaaagttgtcaaccaaccttgaaggaaaatataaatgataagaaaagatggtcatcttttctcttctctttttatacttagaattttgaattccattattcaagagggaataaggatatgaaatcctactcccagtaggaatgcttgaagaacaaaaataattgtgcaagattactaaaattgatgccaacctggtagtttcgagagaaacgagcttagttcacgttattaagtcaacctcacacaagtataaattgacttggggacaaagtttacactaaaagtagtgttgatgatgttgacattaatgtttgacacgtggcaggaatgaaaacatcctggagttgagtagtcccaaatcatagcaattcgacttgggagaagttcctggccatgcccccaagttgacttcgagaac

SEQ ID NO: 63226 - DNA, 2116 bp, Cannabis sativa
  modified_base (26)..(31): a, c, t, g, unknown or other
gtatttttgtaattttttttcctttnnnnnntttttctgtttttttccctaaaaacaaattccaaaaaaaagaaaagaaaagaatagagaaaactgttacttcaagttaggaataaaatctttcaaaaaaaaaaaaaagttaggaataaaagaaaaagtaagtgaaatatattgtataggctatgattcctttcgtttccttgtaatatgaaagcatctctaaataagtgataaaaaactaaatatagtttatttagtaaaaaaatatgttttaatagtgcgttaaaaaatgatacaaatttagcatataataaattttgtgctaacatgtgctagatataaaatttgtattataataaatgtactatttttgtggtcatatatttagttagttatctatacttttgtttataaagaggaggtttcaaatttaaatttttctctacaatgtcaaaaataagtacactacttcttattatatttatattattttattagtatatttaactataatattattttatgtatatgtatattttttttattgttttacataataaaattgatgataaagttaataatttttatatttttaataaaaatagtaattagattatttaaatattatatcaagttttataattgtatattagagtataatactaaaaattgttgtaaatttatcacaaaataattttttttatgacaaatatagtataatttatcaccaataaatctttttggttttaggaataatatgaatagctagttttacaaaaacattgaattttgaacaaaaatttacaattttacggccacaccgaattttttacaaaaatactatatttttataaaataaccataaaacaacataacatgacaattaaaaacaataggaaaaaaactaaaaaataaccgtagaacatccgtgaaaacttaatacagtatacagtataatatttatatagtatttttgaaaaaaaaaagacagtatttgtgaaaaaaattttgccctagtaaaaaagaaaaataattaaaaatttcagtatgtggtgtaaaaattccttataaataatgttagattaatttgtcctgttactcttgcaactttattacttgtgctagctttagtaaaaacaataataaattgtaaaatattgtttgtatatatacattcaaactaaatttataaatgtagtgtgtgtattattaagtagtatgaaattgataattttagtgttaaatctataaaaaagattatttaaatttaaagaattgaattgaataggtcaaaaaaactattaccaaaaaagcctagaataatataagtctcaagattcgtcaaaaacaaatataagtctcaagaaaaagaaaaagaaaaagtgaatttagtttttttttcttccttttttaaaataagttatgcattacacaatctaatacaacaatttatgtgccatccaatttttttttttcattctttttaaatgcaaattaatagaattatagattcagggtgtactatattaatatttaacactaatattatatatctcagattttgtgtgtataaaataaaaaaagtggaactaaattactgatagtcttgagcattatttaaaaccttaagaaaattgggtatttttcttaaactttttaaatgtagaatagatgtttttttgtgcctagataaaattggatgacatgtgtatatgtcacaacattttaaactttaaaaaattaaataaagaaatgaaatataaactatatatatatctgtactttttttttcttaacataaacattcattaaaaaagacaaaggccaaccaaaaacacaaggtctatgtatatgagatatgtacttttgttttaaatgggatttcttttttattttaaagattgaaaattattcaaagatatatatatttactagatagatgttacgtgtgaaatcacgtatgttaatttattttaatttttttaatatcataattttaaaattaataatattaaatgtagtgataaatattcaaatttgaaagcataatagtgatttaaataaaaacaaaaattactattatactttgaaatagtaattaaaaaaaattattatt

SEQ ID NO: 63227 - DNA, 816 bp, Cannabis sativa
atatttgttgacacttgacaatacttgaatgttagattttatttaatttcttaggttaccaacccttgcatgtgatactttattaaacatgaaatgtacaatacatgaatgttagtttttattccatttctatcatgtacttctattttggtagaattattactaattaagtgcaagttgttagatggtatgaaagattgttttgtttctttaaagtttgttaattaaacggtctgcaaataatggagttcactatttagcgagatttacttgttataatactttggtaacttttcacaatgtagaactctataacaagcacatcaaaattttgccaattatataggtacgaagaatgaaacttaataaaatccttaaaatttttaaaaataatttagaagaaatttttgatgaatgaaaaagaaagagggagatagtacaatttggtaaaagttatatttcagagacaaaattccaaataaagtatattaaaaaaaatcacggttaaactctttcaactattatttcacttgcacttaatcgtccaggctcaaattttagcagtaaaatcttccaaactactgaattattagcaaatttaaggtgtcatctatttttcatagttaactgccaacatgaattgctatgtgtatactcttgtacacatgacatatttatattcatacacctaatattattatttcaaaattataaaatattatttcaaaatttataatattttttatttttttaaatattttattttttgttgataaaattttgtttaatttgaaaataataatattaggtcactac

SEQ ID NO: 63228 - DNA, 738 bp, Cannabis sativa
  modified_base (699)..(700): a, c, t, g, unknown or other
aaatagtgttgctcatttcttagctcaagcatcctatttagttgctgatcgtgttatcaagagtactgatgttactctagattttaatcatgtaatcgctatggattacaattattaaagatgatgaattttttcaaaaaaaaaagaaaagaaacttaaaagacctgagttgcttgctgccatttgcgaggaagaagatgatgtggcttcgttggagagggaggagctgtgtcgcttccgtcgttggtgaagatgccgtcggcgacttagagaggagatgactgtcgtcgtcagcgagtaggggagaaggtgttgtcgtttgcgttgtcgtcaaatggctgggcagagaatcactgtcgtcgtcgtccactctctggaaaatgggctgcaggcggcttcaaagatgggtgagctgtgagagagaatacgacagagagaggggtatctagggttttgtttttttttttttaaatatttttttatatatgtaaaaataaataaaaattatatgatatatggagagaggggtctgaatcccgtgaatgtgatgttttattttggttttcaaaatataatatatttaatattataaatttataatatatattttttttattttaatattagatgatattggatgaatattggattggatcggtcggttggatccattggatttacatgtcatccaagaaccgnncgatccaatattggattttcaaaaatatcatccgatcc

SEQ ID NO: 63229 - DNA, 3784 bp, Cannabis sativa
  modified_base (3729)..(3734): a, c, t, g, unknown or other
aacaaacataatctatgttccctctaagtgatcaaagaagttccttcattggtcacttgccatactaaatcccctgggccttcttgatcatgactcttgagtggtgttacacttttgagcattatcaaattatttgaggattcgtgggtgatagtgtttaactcacttaagaaataacctgagttatctcaataccagctcacaagcattactcagcgcttagagagtgtcgtcaggtttgtgagttgtaattgattaatttaaatgatgtaccaaaaaaatactttactaaacattttttctcatcaaattaaatataatttcattactgtgagctagttgaaagaaaaaagagtacactttgatgtagtagttatagaatttcttcttcatccaagcttagctgaagtgatcctcactatactaatgccctgttcgaatttttagttaggagccataccttagcaatggacctcttagcctaggacaacttcataggatcccatcagttaagaggcgatcgattcacacaaggtaaggtgaatcccattgttaaacaacctattttgaagacagctaattttattggtagtaccatcgtagatgcaccccattccaataccttggtactacaacttgattcaggttgtagtcatagcatgctaacttgtaagttccgggttcaagcacttctaccacaacatatggtccttcccaattaggcccaagtactcctactgctgcgtctttcgtgttcaggaatacccatcgtagcaccatgtcttaagcttaaatttcctatctttaaccttgaagttgtagtgttttgcaaccctttgctgatacgcaacctttctaagctcaaacctttctctgatctcttcaattccatataggggttcaaccagcaactaatggtcggtttgctagtcgtatgtaagtctttgatgggatgtaggtgtgagctccacgggtatcatggctttgtacccataggttagagggaagagagtgtgacctgttgctatttttttggtagtgtgataagcatatagtactttgggcaattttttaggccaattcccttttgcttgctctaggtgtttctttagcgtatccttaagattttggttaactacttccacttgtccattttcttgtggataggaaaccgctaagaaactcttaattattccatgtctgatgcacaaataggaaagaggtcattgtcaaaatgtgttccattatctgacctatcttctgtgggagtctaaatcgacagatgatgttctttactacaaaatcaagaacttttttttttgatgtgatggtggctaatggctttgcttctacccatttggtgaagtagtcaaccgccaccacagcatattgcactctacttttccccttaagtagtgagcctatgaggttgattccctagacagtaaatggctagggtgtttgcatactcttaagatcatttgggggtagctctgggtattttggagaacctctagaatttgtcacactttttgacatagtccattgagtcttctatcatttttggccaaaagtaaccttgtctcaagatcttctttgagaggctttgcccccagcatggttaccacaaaacccccctataccgtgaccatgagaattttagctttttcctttgtgacacacctcagaagtggcactgagaagcttcttctataaattactctgtccatgatgatgaagcgagcttcttttctctacagtctcttagcttcgttctagtaagtttgaagaatcccttgttctaagtactataaaattggtgtcatccatgatgaagtgtttttaatcattaggataggcttagagtcttcattaatgctccatttggtgaggtatttgacgggaactacactaagggtgttagaaactgtagtgctagccaacttggctagtgagtctacattggtgttctgtaaacgcaacacttattgcagggagtaatgcttgaggtgggctaatagatctttagctttgcttaagtatgcaaccatgtttagccctcaggcatgatactcaataagaatctaattagcaaccagttgtgttacactatagatctcaagtgattcgactttgattactagtgctaaccgtagtactgctaggagtgcctcatactccacttcattgttggttgcggtgaactcaaaccacaaagcattgtgagtttgaaatccctctggagtaattaagatgagtctagcactagaaccgtgcttgttggaagagccatcaacatataacttccaggaaggtccagtgtcctcctaagttacagtctcaggcgtgtggacctagtcttcacaaatcatggaatcgttttcatcatcgccagtgcattcaataatgaattttgctaatgcctatcctttgattgttgtttgaggctggtaggtgatcttaaactggcctagtttaactacccacataactaggcgccttgatgattcgggcttcatcagaactttcctgagtggttggtcagttaacaccttgactatatgagcttagaagtacgaccttagctttttgggaggccaagaccgaaagtaggctagcttcttaatggggggaataccttgactcagacctaataagacgcttgctaatgtagtagatagggtgttgtgttccttcctcatgcatcagagcagcactgcctggatgatctgtgattgctaagtagatatatagttcttcaccatatattggcttggatagggtgggaggcttggctagatgatgtttgagagattggaaggcttactcgcattcaccagtccattgaaatctgttattgattcctttaagtaatataaagaagggaacccacttctctgatgacttggagatgaacctgctaagtgcaacaattcatcttgttatgcttttcaggtcttttgatcgcgacgatgacttcatgccttgcaaggcgttgatcttctcaagatttccttcaatacctcttgagttgacaatgaatctaagaaactttcttgattggacgtcaaaggtacattttagagggttgagcttcattcgatactcccgcaggatgttgaagcacccctttagatatttgatgtggtcttcaaatcttcttgacataaccagcatatcatcaacgtagacttccatattattttttatttgtttgtggaacatatggttgattagtttttgataagttgcacctgcatttttgagttgaaagggcttaactttgtaaaaatgaagcccaatgtcagtttggaaaattttatgctcttcgtctggtgcatgcatggttatctagctgtagctggaataggcatccatgacagatgacctgggggttgatcctgatcatgtcctcatgaaaccaagcaaaaatgtcttgatttcttctgaggcaagccatgagtatctcactcaagacctttatcaagcttgttccaatcttgacaaccttggttgggttcgatgtgttgactcgatcggaccaacacctgagtcaattttcctcgtcttgggtgcaccttcaagtggctttaggtactgtctctgtcttctttgtagtttgatcttcggaggtcttcgttttcttttctgcttttgtgggagaggtcatgctcgtctcccaaatgttataatagtagggggtctttttgttagaaattattttaccannnnnntagatttactcacaagtatgtttattaacatcctaaataagaactttcta

SEQ ID NO: 63230 - DNA, 1174 bp, Cannabis sativa
  modified_base (31)..(31): a, c, t, g, unknown or other
attaatcataaacaactgctaatttccaaantaactaagcgggctttacaattgccatattctctattaacaaagaaaattaataattatcttgatgatttagtatatttaagaaaaaaattgtgtttctaaaatattattgtgacatttcatatttattttagacaaaatcatatattttatttatgctataatgtctattaccacattctctactaataaagaaaattgataataatcttgatgatttaaactattaaagaaaaaaattatgtttctaaactattattgtgacattttatatttattttagacaaaactacttattttataaatgttataatttttattgctacattatttacatttcataataatcttgataattttaatctatttataaaagagtataatatctattgtcacctctaacccttacaaaatttgatcaatataaaaattaagttgattaataattatgaatctcaaccatgaatggtcgagctctactgattacagtcaagtcatataattataatttttactaatctcgaccacatataggcgagctcaactactctcagttgaactatttttttgaaaatttgattaacaattataaatttgattggctccaatcttcttatataatttatccaataacatctcaaatgtagtgctcgaatcatcgacaattatagatataactttcttattttttagcgaccatttatatgacccatattcatccttccacttcccatcgttggaacatagattactattcaagtcattcttatataaaaaatagatggttgatattaaaaatagttaaattatattgatgttaaagttataattaacaagttcaattttcaactaaaatcaattaagttttatcaatgtgtccatcaaagagtttaataacaactgagtattaacactatcttgaccatgtttggtcaagctagttgagctctattaaaattaccatatctattgaatatcactcttttagcaaacatcgatgaaaaaagtttaacaattaaaaatataaattgggaggaaatttagttaagctctaccgtaacgtttgtcatctcaactgacaacagtcgagctctactaaaactgtaatctcaatgataactctatggtatagagttaattttta

SEQ ID NO: 63231 - DNA, 1153 bp, Cannabis sativa
atactacctttcttaatcaaatgttatgatttgcttaaaaaaatactactttttttttttagttcgtactattttatttaactatttaccatatattttttttttgctagtatacagtatattgtttacttataggttcaacttcaaaaagtgttactataaattttcacacataaattttaaatcttaccttttaattttattttaataattttagagaaattttctttttattattgtatttcataattttatcatttatttgttaacaaattgagctttttggcaaaataactaattttaattgagatttaatttattttgactaatttctcaaatctataaataatgcacgttttattgactagtatatttttacatttgaagacttaattctaataattagacataacaaattagttttgatacaatagtaatagtaacattatgagcgaaaaaagttttctaagctaagttttttgttaaaataataattgtattttatcttttatttaaaaattcacaatattataattgtatagggaactccacttttctatatctattttttctaggtagttttggtctatttgattgtttatatcagatgcctcttgtaggtagtctcaagttgttttgtctaataaattttggaggaataacttagtcttatataaatgtttgtagcaactcatattatgactttgcatatctttagttagacaatgagttttttgactgaaaatattcttctacgtcgataattactataatataattctgatcactctaaaaaaatattatgatttgcatgctaataagtacgaaacaattatatatatttcatatttttatatacatcaaatagatatatatggccaataccattttaatgggtgtattattaaaaaattttgaattttaatatttaatttttttatctaattaaaaaaaatattattttatgttatatgggttcgtattattatatcagttaagttcatttaaatttttttataaatatactgttgatataagataaaaagaaattttttgttttattaaatagtttaattaaaggaatttttttcttttatagaaattctaatttttgttttattatgattaaattaaatttaatagtttaatattt

SEQ ID NO: 63232 - DNA, 1101 bp, Cannabis sativa
agaacagtacactagatttcgactcactacaagcctggccagaccatttctcatataaagagatgcaattcatgagcttctttgcgttcccttcattaccacggcaaaacaagatcgtatcatcagtaaacataaggtatgaagttggcggggtcgaagaaccaattttgattccatataaggtttttctcctctcagatctacagatgattttttagagaatttcctgccatagaataaaaatgaagggagagagcgggtcctcttgcctaatccctctttggggaacaattttcttgagagggcttccatttagaataatcgagtacgacacacttgtaatacatcccatgataagcttacaacttcttacatcaaaaccattcgcttgaagaacccaatgaatgaaaggccactccatcctgtcataagctttaagcatatctaactttattgccatcagacctccttggcctttttttctgtctaatcttgtgcatgatttcttgagttaaaatcaatgactcagtaatccactgaccaggaataaaagtagcctgcattggggacactaaatcatccataaatggtctcatcctatttgagatgatctttacaacaaccttgtagaggaaattacaaagactaataggtctaatttgatcaattttctcaggatttaacaacttagggataaggcatacaaatgtatagttcaaacttggttcgatctcaccctttggaaaacctcctgaacagctgaacagaaactgtctcccacaatctcccaatacttgtggaagaaagatccatatagtccatctggcccaagagccttaagagggtggaagccaaagataatattttttttatatcgataacatcaggcacccaaacaatactgtcatttgtctccatatcaagcttatttggaaaaagctcatcacaatccacaggtgtagatggtctagcagacctcccattgttgtccttaaaagcccaaatctaattccttcttctacgaacaacagtcgcaacatgaaagaatctagtattctatttccaagtttgagccagatttccctccatttctgtctagtc

SEQ ID NO: 63233 - DNA, 568 bp, Cannabis sativa
ggcataaaacccaacactcatcacacacattaaacaatgtattgcctcatattacacagcagtagtgcacatgctctcaaataacatgatctgaccaagtctaatactacttcaaagacttcaaagagtacttttttgtattttaaagataaagcagttatttatacttatcaaaatattctgttatatgtgaaacgtaggcagtaaccacccatcaattgttacttttcactaagataagattgagtaaccaccatcatatttctataaatatggcgtcactcaaagggaaaagggggtgcaattttattacttatagaaactttttccaattgtaaacacaaccaaaactcagaaataatatggactggtagagtatgtagattttaactacaaaactacgtaaaaatatctggtattcattattagttttatctcttcttttcttgaatttattcttgaattaataatcttcttagattgagttgacaaaaagttgcatcaacaattctattgatgagcttaataataatcaattatttattggagcttcaaaatataggtccat

SEQ ID NO: 63234 - DNA, 722 bp, Cannabis sativa
agttcagggagaatttttaatggcaaaaaatgttcagggggcatgatttagtacatgtcaaagttcggggagaatttttttttttcatttttgatactgtaaattatttaaaaaaatttaaaaatttacaatcaaaaagtattagattaaaaaactttcattgatataaaaataaatagatattacttattacttataatataaattaagggaattatctcatataccaattttaatttttttttctttcaaatttaccatttgggttgcttaagttgttgctccggtaatttctacgtgggttgataaataaattttagttgctctattgattgctatgtgagttattatgtaaattttagttgcgatttaaatttcttttaggtgctaaataaattttcgtaaaaatatatataaaaaaaatctaaaaaaaaaaaccgtataaaataatcctattttttttagaacctatgtttgaagcaacttgcaaagtttagtttggtacatagcattagcattaccaaaataagccatacatatttatttattttatgtacttttaaggtatctatttattttacctctaagttttgacacatttattaagattttgagtaattttaaaaactgttatcaagaagagaagagagtgacatttcatttgtacaatgaagtaaaaggggtcaccatcaacaatgactacacaaaaaccactattatat

SEQ ID NO: 63235 - DNA, 540 bp, Cannabis sativa
cacatattcttctccactagccacctcacctgatcaaccacctactcctaaatcaccacatgaacccatccctggcccacctacggatcatgggccagtccactcaactactatagcagaccatcacaacatagagaatgcaacatgttctatttcaacttttactactgaaactcaacttggatttgggttacgagataagatcctgtcagttcgacttcgtgactatgttactaacactgtttccacaaaaaactccatctactctctcttcaaattcacctgcaccatcagcatcctcagggacgccatttcatatagtacactatattaattgtgaaaaaatttctatgggccatcagaaatttcttactgctgatactgcaggttgtgagccaaaatcctttaaagaagctatgaaaaatgctggctggcgtcgtgctatgcaaatagaaattcgagctttagaggataatggtacttggactatggaacttttaccacctagcaagcgcactcttggtagtcaatgggtgtata

SEQ ID NO: 63236 - DNA, 1230 bp, Cannabis sativa
atatgtatttcattttaataacttaaattggatttcaatataaatatatatatatatatatttatatgtatataacaattgataaatttatacaaaattgatcatcataattttaaaatcattgtgatcactgtatctcacttatagtcgtcatcacatttaaaactattgtcgtcaacatatctcacttataataatcactattttttccaataggtttactttgtacacaaaacaaatcatgcgttaactatccacttttataaatctacaaatttttttaaaagaaatttacgaaataaaattcattaatttataatgagaaaatagataaaattgtatcaaaaatttaaattcaaatagtatatatttttaattaacttatttaactttttattttttgtaatcatatattccatgagatatctacaaatattatggtgaagaaaatattagaaattaaataatccttacacaaaatagatataattaaaaaaattgataaatttataaaaaaaacaaaaaaaaaacaaaaattcatcatattatttcaaaattgttgtcattaccgtatatctcttgtaatcgccactatatttaaaatagttatttgatagagaacataaaaattaatataattaagctaaaaagacaaaaaaaaaaaaaaaaacaaatactattaacttaataatcatatagcacaattttgaaaaaaaaaaaaatctaaagatagctatattgttttatctctattaattttatttttggaagctttaatttgatcaaaatattttataatttattaattagtttcaattatggtatttatttggtttccatattttgtgcatttgacttttatatctttgtattaattgatttatgtatggaaggaaaattgcctagcttttctttttatgaaaaataatgtataaagagtaagtttgaaaattcatcctttctctatctatccaattgtgttaatctgatcttgtgtgagttttctattatgtttgaccagatttcttatggagaaaattgaagcaaaacttttcttttctataaaaagaaagtcgtatttagtgctcacgattttgtaggtacagaaatagaaattcctagattggttgaagatctattttagagaatcgtctagtgagttatggtcttgttcaaactatgtgttagctatcaataaggtgtattttgattataaatataccttatagc

SEQ ID NO: 63237 - DNA, 2076 bp, Cannabis sativa
  modified_base (1629)..(1636): a, c, t, g, unknown or other
ggaaaagtgtgcaagctgaaaaaagtccttatatggacttaatcaatctcctagagcctggtttgaacgttttggtaaggtgttaaagtgttatgggtatacttagagtcaagcagatcacacaatgttctataaacattcagaagaaggtaaggtggctatactaattgtatatgtggatgatattgtgctgactgtggatgattatagtgaactcaaaaagttgaaaataagacttggtgaagagtttgaaatcaaggacttgggtaatttgaaatactttcttggaacggagtttgcaaggtccagagaaggtatttttgttagccaacgcaagtatgtactggatcttctaaatgagacaggtatgatgggctgcaaacctgctgaaacacctagtgaacctaatgttaaacttgaacctatagatctgaagaacgtgaaggatcgagagttgtatcaaagattagtcgggaggctaatttatttgtctcatacacgaccagacatagctttctctgtgagcatcatagtagtaagtcagtttatgcattcacctggttcaaagcatttcgatgctgtttacaaaattctaaggtatcttaagggaacgcctggaaaaggtctctagttcaaaccacgaggacatctagaaattgaagcttatactgatgcagattgggctggaagtatggtagatagaagatctacatcaggttctagttacgtggcgaagcaagaaacaaactgtggtagctagaagcagtgctgaagctgaattcagggctgttgctcatggtatctgtgaaatgatttggataaaacgattgattgaagagctgaagtcatcacagtcaactcccatgaagttgtactatgacaacaaggcagcaattgcaatttcccataatccagtgcttcatgatcgcacaaagcacgttgaagtagacaagcactttattaaggagaaaattgagagtggtcaagtttgtatgccttaagtccctaccgaacaacaagtggcagatatctttataaaaggattatgtaaaaaacagtttgattatctaattggcaagctggctatggagaatatttttagtccagcttgagggggagtgtaggaaaatcattatatttttagtattattcttatgtaattgttgtaatttattattgcatatttttagggtatagttaagagttttattctgttattattatttgattttatttcccttttaagggattcttgtacatgttaaatacatgcatatttctgagaaataatatagaaaaattaccctctttgttgacttcattacccattataatcgcatccttagatagttgtcaaaagtttcatcttctcaaattcattcatcatccaagtctttctcctcctcaccaaacatagctttagacacagaaagttattgctataataataggggtgtttatccgatctgattcgcacaattttactcatagtgcacctgatccgcactaagtgcgaatttcatattttagattcaatctaatccgcatatccactcaaatctaatccaatcaaatctgcaaaagtgcagattgtatcgattattttagattagttactttttaatattnnnnnnnntaatatttattaaaaaatatatatatttcacattactaacaataaaatacaaattattgttgttttatgtttaaactacaaactaaagtaaacaaaaaaataataaaaaatttaaagtaagaagaaaaaagttaaatgtataaaaaaatgttgaatttgttttagattatattttttttaataaataaaaatagaatatataatttatctactatattttaaaatatatttatatgatatgtattagatttttaaattattatttttacattaaaatattaattatatataattcttttatgattatctataaatatttataaattgaatttgatcaattacttttatatgtcaatcaacatccaatccgcacaattgcggattttaaatttttcaatcaatccaatctgcacaagtacgcatatccgcattttgcaaat

SEQ ID NO: 63238 - DNA, 1130 bp, Cannabis sativa
gagaacaatgctgaaggctttcctggtcttgacttgaactccggatgaaactgaaccccaacatagtatggatggttcctaagctcaacaatctaccaacacacacatatatagtcagttgaaactcattcgattatagttatataaatgatgagatgaaactaagttgttagttacctccattcttcgccctgttatatcttttcctgtaaagcacaagccacccttttcaagacgcccaaccatttcaggattaacctgcaaaacaaaacaaaacaattcaatatagccataaaactttaattacttactactgtttcttaatttggtgcatacctcatatctgtgccggtgtctctcgtcaatatagcttttattcccatatctaataataagtaaggaccacaaaaccattaattattcattatgaagacacaactacctcatttgctattgctttggaattatagaaagaaacacttacagtttagctgatttgcagtccataacttgaaaatatgttcttcttgacccaacacgcatggtcccacccatgtgtgtttttgacccctgatattattcattcataatcaaaaagtgaaatgaagagatcagatcagatgatttcagcatttaagaaaaatgctgtattagagtgtaaactaggtacctcaggcataaatataacacatggattcttggtgttaggctcaaactcagtactgttagcatcatgcagaccaagaacagaccgagcaaactcaaccaccgcggtctgcattcctaggcagattccgaggtaaggaattcggttttctcttgcatactttgctgcaagaattttcccttgaactcctctgtctccaaaacctcctgggacaagaacaccatctgctccctgaatatatatacatacataaaacaagcatactcagatgatcagaagaaggctgagaaacttagatatgaagcaaaaaaccaaaggcaaaataaacacacaaacctttaataacttccatgcagccttataagcatcaggattctggttatgaatgacgaacataacattagtaataatgtaaacaaaaatacaagtgaacatgttttaattagtcacctctttagctgtt

SEQ ID NO: 63239 - DNA, 759 bp, Cannabis sativa
ttttactggttaaaggatccatggggaaggaagaaggatagacacaggattatgcaaagaacagtgtggaacggttagaaaggtttgcagagaaactgcagatcagaaaaaaaaccataaaggactattaactgcctcagagcaacaaacggcagacgctcatagattttttaattgttaaactaattaaattaccattagactacaattaataggtatatacaggaaccacatttacacacgtctaaatttaattggttaccctttatttatagtaattttaacctcttttgaccttttaagtaaaaaagaaaaaaagaaaaaataacaatagcaaatattcaaaacaattaacatacttaatttattttttctttttgagaaacatactttaattaattgacatatacatctacatattttcatttttaggtatgactaaatttttactccaatcttttatcaaaacaatttatatatataaatttactccaacgaaatttcaccacaatttattatttataaataaactaaataactaataacaaaatataaataattgacaaatataataatcttgtaaaaaaaacaaatataatatattatatatttttttgttagggtttataaaacactccaaaaatatatatataacagatttaaatatatttctaaaagtgctttaatatagaaaaccctaaatcataaatttatcgaacttttgctaaattaaagaagaagaagatgacaaaagatgag

SEQ ID NO: 63240 - DNA, 1020 bp, Cannabis sativa
attggtttaactgaataactaaataaaatagatagacatttctcttcgtctcaggtcgacagatcttctcaattgaaagatccagtcaacaccaacttagtgaattctttccgcttagcattacggactgcctcattgtaatacttggcgttgaatagatctcgaaactcttcccaggtcataacagtgatatctcgggtgagggatgccaattcccaccacacgagagcgccttcctagaactgaaatgtggcgtaggtcacccaatcatttccaactacccccatgaaattcaaaattctctctatctctgtgagccattgctcagccttcatcacaccaggacctcccagaaacactagaggtgcttgcttatgaaacctctagtataacgactccatacggtttctagcaatatgttgttctgctagcaccacatgaactacaacggcctgagcttgtggtggaggcactgcaggaggaccttgttgccttaatctaataatttcttcatcttgtcgacggatacgatattcaatttccgcaaacctctgctcctaatctggaggagcttgtggttgattcacaggatgaccaccctgtactctgccacgacctcagccgcgaccactgtgattttggggaatttgatttccctgaccgcctctggtctcaaccctattaccctgacttcttgtatttcggtgggtgtccatttaataagacttagcctgcgaatccataagccaagtaggtcaaacaacgatcataaaaacttaacactactcttatggattttaatgcaacgcatttaaaatgaacaactataactaatatgcttcctaacatgctttaataatcacataaaatactaaacaagtacgggcttactgaaccgtgagccatgctttctttgatgaagattgtacatgccttggcgagcatcagtagacaaacctggcgactctgataccaaaattgtaacgtcctaatgctaaggcacgctacagtaatttttca

SEQ ID NO: 63241 - DNA, 1204 bp, Cannabis sativa
ccagacatcataaagctcatcatcaacatctagttcaggcagtcgaccatcaacaaattttattttgtttctggctgcaagtgctacaatcatggatcttctccatgagctgtaattctcgtagccaatcaaaatcttgggaacaagattgacagttgattgatctccattagagatgaagtaaggacttcgaggatcttctcctggtggtcgatcgttggtttgcaaaacagagaatctattagtctcttgagattgatttccttgattattcgaacttcgagtattaacaccacgagccatgaaccaaagggacaatcaagaagaagcagacgaagaagagctagctcacgcaaatcgtggctctgataccaatttacaaaataagaacaaaccagcaaaaccagaggaaagaaagaagaaaagcataggagaatgaaaaatcagaattcattaatcatgaatgagagtgagtgagccttatatagtgctaaagctcacaagagtacaatcgagttagttaacaaccgaaaacaactaacaaaactaactataaccgtacacattaaactgaaatagacaaaacagaacatagctaacaaacttagctaactcaacttgagtagttatagaactaattttaatagtctcttttattaaaaataataatgaattcattaaaagagaacaaacaaacaaatcaatcataattttagacttgtcaaggatagtgatcactttgttcacatttaagcgctcctgacaatctgcggactgaatcgattgcccgaactaatttggcaataacacatagtatcgtaaatttagttttaatagcaaagttcttgcccaaatagttatgattcttttatgcatgatatttgataatcatttcgattaaaactaatttgattataataattgtaaaaatgaacttctcaaaagtggagacaataattagtagttaaataaaataataagtaactaaattgatgatcaaagaaaagtacattataaatatgcagaatattaagaacaaagctggtaacgtaataaggacatcaattttggcaaatttattttaccaataaatttattaataatttttctaagcaatcaaattttgggataacaaattaataaaaataacaataataatatagagatatatggtgataattaatagattaacttgcctgcaatc

SEQ ID NO: 63242 - DNA, 937 bp, Cannabis sativa
ttccaactgagatgtagagcattgtacaaggctcaaactcgttaaacctagtgttgttttctttgttttattactttaatatgttacctagttctttgtgattcttctgagtattatttttttattatatattagttggtccagtataattacatcgtaagtcattgattgttatttcacaataaactggtatcagagcttggttggtaatcatgactgcaacaaagtacgatgttgaaaagtttactggtacggatgactttggattatggagaatgaagataaaggctctatttgttcaccaaggattgtatgaggctcttcttggagaaaaatctcttcctgattctatgtttgagaagcacaagaaaaagattcttccaaaggcttattgtgacatcatattgaatcttggtgataaggttttgaagaaggtcacaaaaaagccacagttgcaggtatttggctaaagcttgaaagtttgtatatgattaaatctttggtgaaaaagttatatctgaaatacgccctatattcattcaagatgatggatgaaaaatctaatggagaacagattgacgagtttaacaagttgattctgaatcttgaaaatattggtgttaccattaaagacgaggatcaagcctattgttactcagttatttactgaagttatttggacattttaaagatacaatgctatatggaagatattcaattacagtcgatgatgttcaatgagctttgaatttgaaagagctaaatcaaaagagtgagttaaagaactctggaagtggtgatggattgtatacgagaggtagaagtgagaaaaggaaagccataaaggtttaaaaggaaacttaagatctaaattacagtctgatagccggaagagcgctagatactggatttttaggaaaacgggtcatgccagaaa

SEQ ID NO: 63243 - DNA, 961 bp, Cannabis sativa
tggttaaaaggtgcaaaactccctacacataattatgatcgataccggactgattttgccaaaggaaatgcttggccactcattactcgattggctcgtacttctctcactactgctctaccatctctgaaaaatcgaaaccaagccccaccccgtacactatttgaaggtgagtcctctcaaaatccacttcctatgccttcccaacatacccgcttgccttctttctctgctccagcatccacaatcaatagttatcatcacttacaactggcctcaatgactacaccttgttctagtattatgcacactcccaacatcctttccaccaaccctcctgcttccatacgatgcccactctttaacacacatggcttcaattcacaaataaaccagcaacataacacaccatccactcctactaatcagaccagcaaaaatggaaaaaacaagcaagttatggacccttctgaacccatctcacacctacagacctcatccgaaacttgtgattcaaaaaataaactcaaaggagtctgctacaaccacccgagccattcccaggccttttatcctcactgcagcaacataaaccagcagctaatcgcacataccagcagtctttcaccatctccttcatccgcaccagctgccatccaatcttcaagtgagtcaattgctgatctctcacatatttacatgcacgctgtacacagtcatatatttgccacttatccaccatcaccacaaaccattgatacttacacaaatgccggccctccctcatctcaagcctcactcaaacactatgccacaactcccacagccattgtttctattggaaaggaaaacttgccacctgccagtacctttaaaagacaaaatgactaactttctatgaggaaattcttgaaaagatgtcgcaacactcaaggtacatcatcatctcccttgtcacgag

SEQ ID NO: 63244 - DNA, 513 bp, Cannabis sativa
gtatttagaattatttatatatttttaaaagattttgaatagtttatagtaataaaaataaaattttaaataattacttacgtagcacgcacgtataaaaaaatatataatcacttgtaaaaaatatgtaaatcttatttttagcatggtaaattattcagaattttttaaaaatttacatgtgattttaaataactacaacatacacgatcaaaacaaataggaagtgaaccgaaactacccttttaaggaatgtacttacccataagtttaataatgtatacaccatgactataaatgcttgcatagtatagcttaagtgtaagtacattttgatcaatacatttgtaaatggccaagtttcaacaaaaaaaaaaaagaaaaaaactaggaatggatcgatgagggtactatggtccttcatattttttattatttataaattagatgaaaaaataataaaatgtgtataaaaaaattataaattttttcatttttacactttaaaatagt

SEQ ID NO: 63245 - DNA, 878 bp, Cannabis sativa
aatatatataggatataaaatgacaataaataattttaaaaataatctaaccagattaatactaaatttttatagaatgtatgacatatattcatccatgatatgtatatgaaaaataattatcatatattttatcaaaaaaataatttcattaaacatgaggattttttttctaacacagtcacataaatttatgtaaaaagttcaaaaatccacactaactgtaattttaaatcctttcatgtgacataatataaagtatttttttaaaaaaatattatgtatttgttgagtgaacaatttatacataattatttgaatttttttaacaaatatttatttgtgtttttctcttactcatatttaaattaggagagaaatcgcgcttttcttgcagttatattttagaaaaatttacaccagacgttaatttgtttttatttataaaaatgaccttttgttatttaattttattttataccattattaagtttaaaataagatgtcagccataccgtgaagaaatatagcttttagttactaaaaagttggtagcaaataatgtaaatttagtagctaatatatttttttggtagctaatatattttttgctaccaaatttattggtaccaagttggtagttaattatggttgctaaaagtttttagctaccaaatttttggtagttgtcacaattattttggcgaccaatcttttggtagcaaaacttatattttaatatccaatacaaaattggtagcaaaacatattcattctagtgcaaaacaataaattataatgtttaatagaactattttactaccaattgttggtagcatagttacaaaagataattatgtaatataatgatatatata

SEQ ID NO: 63246 - DNA, 1154 bp, Cannabis sativa
tagccactatggccagccaagctataataatgccagaaaaaaatgagcaaagtaaagtgtacaactcactgtagctaaatcttgaaggccaggaaaagagagcctctctggctcactgtcatcaagctcttgaagctcatcatccataaaaggaaaggctctatcaagatgcctacgagcagcttccatggctctctaccccgtggctaagcctactccccaactaggcctcggggtgcccctgcccaaaggccattccctcctcattagagggtcatccatcatgggttgcccagtcgacgtaggccctggaggaggaggaagagatgatcccgcaacatctctggcacaagtggtctgagctaccttggctcttggacgacctaaatgctcatctaaaggtccaccagtaagacctctcaacttggaagacaaatatgcaaaaagaaagtagcaaagtcagactgaaagttacaaatattcaatggaatacaataatataaaagatggtacaatcaactatcaaatactatcatcctcaaaagaggaatcatctgaatccttaacaactgccttgcccttgcctctagatgtaggcaagggtgagtgggtcctgcagagctcgagcgtccaggcctaatctaaagagaagcgtcaccaactgttcccccacaagccttttgttggcggagggccctctctctcctctctagaccttagactatttgggataaaggaacatcatcatccacatcagggacttgtccatcactaggacagaccccctcagcagctggggctccatccactccaagtgatgggccctgggcccccataactcccaaggcaggagggtactggtcgtacctcttaaaatttgccatattggccaacctgattatgttcctcttcttcgtagggagagagaatatgatttgctctatccctcatctgcaatgtagggatggagcgcttgaaaaacggaactcactagaagtggcggtatcaaatctcatggatgtcccaagcaatgaattagttctaggcatacccactaactttggacaaaggcgtgctattggtgtctcccaaccactaatgggcgacctaattgaagtagaagtatctagtccggttctacttcaggcagattt

SEQ ID NO: 63247 - DNA, 773 bp, Cannabis sativa
gctacaagggttaaagctcttctcaagctcatctagtttgaacccaaaccctaataaatcagctttctattgttgtggtatggatgaccatgatatacagtgcattgttgattgctcaggatttagcaagaaagatgcacctttaaaatatttaggtattcctatctatgctaaacgaatatcagggaaagaatgcatggttttagcagataaaatgacagccagaatcaaagtatggagctcccggaatttatccttagcaggaagggctattcttgtgaactttgtattaatatcaattcattcttattggagtcagatcatggtgttacaaaagaggtcaactagagatattgaagctatctgcagagcttacttatggaaaggccatcatgtgacacatggttctggaccaattgcctgggattatgtatgtcaaccaaaagcagcaggagggattggtttgaagaaaattgcagaatggaacattgcagctaggggtgggcattcgatccaatccaacattttcccctcatccgatccaatccaattagacatcaaaatccaatccaatccaatccaattactaactggattggatcggttttttaattggatatccaattacacagctaaattttaatattaatttaaaaaatgaagaaaaatacgaaaaaaataagtatcaccttttatttaagtttaatatttcataaacatattattcttacgagtgtaatgtagccaaaatttttaaataattaaaacaacaa

SEQ ID NO: 63248 - DNA, 1162 bp, Cannabis sativa
  modified_base (961)..(963): a, c, t, g, unknown or other
cgagacagggtctgggctgtgttcatatgcaagctggaaaggtaatagcctatgcttctcgatagttaaaggagtacgagcaaaggtatcctactcacgacttagaactcgcagtactagtatttgaactaaagatttggcagcattacttatatggcgtgaaatgtgagatatacactgttcataaaagtttgaaatacttcttcacccagagagacctaaacatgagacagagacgttggctagagttggtgaatgattataattgtgaaatccattatcgccctgggaaggcaaacgttgttgccgatgccctgagtagaaaaggttagagtctgataaataacagtgaagcaaatctcccaacagttagcacatgaaatgacccgagctggaattgagtttgttgtggggcaattggcttatattaccctgcaatctactcttttgggacgaatcaatgaagcacagttgtaagatccaaaattagtgaaaaccagagatagggtttcggctgagaagataagtgactttacagtggatgatatgggaatgctacaatttatgaatcatgtttgtgtgcctatgtacgatgacattaaaagagagatcatgaacgagtctcatacaaatccttattcagttctgggtcaacaaaaatgtatcaaggccttaaagccatgttctagtggccaggcatgaagaatgatattgctgagtatgttgctaagtgtcttatttatcagcaagtgaaggctgaatatcagaggcctgcagggttactgtagccactgaatatcccggagtggaaatgggaagatattgccatggactttgtggttggattgcctaggatcacgggacaatatgaatctatgtgggtcatagttgaaaggtttacaaaattagtgcactttttacctgttcggatgaacttctccattgatcagtatgctgagtnnnatgttagagaaattgttcgtcttctttggagtcccaaagtccattgttttaagaaagaatccgaaattcacatcaagattctaggagagtctacatcgagctacgggtacttagttgaaattcagcacagcatttcatcctcaaacggatggatcatctgagaggactattcatatcttagaagacatgcttcgggcat

SEQ ID NO: 63249 - DNA, 1166 bp, Cannabis sativa
gaatccaagcttttcgaaaggatcgaatattagttcccttatagtgttaattctaggagtactaacagttggatccaaatctataatgagattttagatgctagatgttgttttaccaggacctagattgtcacactctactagcttaggcgtgttatcgtgatttaaaatttattgtgcaattcattgctaatcaacaagtttattggaaatcgtgtttaattaaaacttttcttaattaacatttacttaaaataaaataaactttacaaaagccagaatcctatattttcaaaagttacaatcaagatacaacatgttaattataaaagttgttgcctagctaccatttatagcctgttttcctaaaaatcgtatgttccaggcctaatcgccccgacatgtacaatcttcatctactcacactcaatgttgttcagccttagctttgtccttacctacacatgcaaatagtaatggtgagtcgacagactcaataagaaaaatataatcataaacaattaggcgctcatacacccaatcataaccctatccccgcgtctcacgtgatactgagtctagaatgtttgtatgacagtactattgaccataatatcaacctatactcggtactctagtcgtaccgatgtgatagcatcaatcagtacttaagccaaatatacatttatcggtaaccaatataattctatatatactgctactgctatttcaatgtaatctaacaggcaatcataaacatgcatactaaacatgtatttagatacgcatatcattatactagtcttacctcgattccaaattcaggtgtgtcggtcaacctgagtggaactgctgctcgacagtttacaggcccctaagtcacaatatttgtaaaactgataagtggtacgctaaatcattttctggggactttaaactcaaaactaaatgtttccccatcaatatctaacaagacaaagtcctaagcatcgagaaaacacgagaaaaaccctaaacggggaacttgcccaaaaaacaataggctattttctaaaaaatggcaggccgtttttctgggttctacaccaggaaaaacagtaggttgtttctacagaaacaacctgccatttttcactgcagaaaaatgaaagacctccataacaaac

SEQ ID NO: 63250 - DNA, 791 bp, Cannabis sativa
gactgatagagagagagagagctggatggcagttgatggtggtcttgggccaacttcatttcctgctgctgctacctgcgagagagagaaagagaagaaggtatgtgagaaaagaaaaaaaaagaaagaaaaagaaaaagaaagaaacgaaaaaaaagaaaaaaaaattgtttttttatttataatactttttaaattttaaattaattttattttattttttaaaattttttaaataattttttacgtgaaccaataaaattgtatattgtgtccgcgtggacaatccaacctggtacttgacagttaaatttggacggaagtgttaaattgttaacagaacacgagtattaggggtttgggttttggattaagtgaaatcaaaatgaaagttttgagagtttgccgccatttaccttttttttttctttttcgcatttttcccataatatatactgtttaaaaaatccatatttttccttgaataaagacagtaatttccactttttctaggttactttgctccaaaaaaaaaaaaaaaaaaaaaaacttgtgggtcctgtgatgggtgtggcgccttttagttatggttttaccatctgtagcagtctgagaatgggttcgagggctcgacaatggcaatggcatcaaatattaaagtcccaattttcgcagacaccaacttaggcactcgcatagccatggccgtccctccagatatcactgcagtagattttaagagtacgccaccgcacaaacttaaattctcactacattagtaatttttatct

SEQ ID NO: 63251 - DNA, 2837 bp, Cannabis sativa
  modified_base (2697)..(2707): a, c, t, g, unknown or other
gtcaaatggttcataatttatttctaatgttgttttgctccaggcgattcctgcaatgcttcttgcactggtcctctggtttgatcatcgaagaagcagagatacggtaactctcttagatctacattcttcgaaaggacacaagtacatatggtatgcccttcctggatatgccattggactcatttcagctttggcagctggtgttctgactcattcccctcaacctgcccttctttacttggtaattttccagtgctacaataagtccattttcagtctttccgagctgtcttgcttggtttgtacttgttgatttttccttccattaactttgtaaattttcttaatgaacataggtgccttctaccctgggaccagttgttgtcatatcttggataaggaaggagctggtggagttatgggatggccccatgtcaaatctcactgataaagttcaccaggttgatgtttaagcttgtttatctttgtatccaatagccacatggtgcttgtggaagagccatttgaaagttgtaaattcactttggaaatcctgatagaaaattagcaatcaatggttattttgttataatctgattttgggctttacacaatgcccttccagtactcaagtttcactaatgaaagaagcagagcatatatatgtgaattgaatctcatcctctcctcccttcttatacatgaataagttcttgccataagaaatttcatacattttaaaaatgaaaaggaaatttaaaatattggtttttgagaatatttagatatattttgtgtagattcggttattgatttcagaataaggagaaaaattagaggtgcatatctttatatttgaaatgtgaaactatttaaggtccactacaataatggtaaaacttatatttagtgttgttttaacattaaaattaacactaaaatttttatctatttcaatcataatactaagaagtacattttagcaaatcttaataattgaactattatttaaaacttaaacaaaaatctttatgatgtttataatgccttctaaatttagtgggacactataaatatactcatatttagattaatgtttacagctagttggattgcatttagtattaaactacactatacttgacattttgccatatggttggagttggcctaaaggaactattaaagcttccttgcttctttcttgcttactccaaaggaagaagaaaaagaactcgtctgattggagtgccactctccaaatctaagtaggtgtaattagaccatctttaaaaaattgtgctatattatatttacattaatttttaatattgtattttaatgcagaattgtaagatttaatataaaatttaatacttttattaaaagtatatatatatatataaataactttatcattgattttattattatttaattatataaaacaataaaaatagagaaatataaaaggtttataattaggcttttttttaggtataaacaaaaaagacaattatattaccaaaatacagtaggttagccctttaaacatttatacagcctacaaaaaaaatattacaataatacatcctcttctaaagcttcagccgcacgaaacaaaaaaaaaaaataccaactcaaactttgatcgatcaacccagcaagacaaccgaaatgaaacccaagcaagcgaaaaatcactattaattccggggacttaacctgagaagaagataggaataaatccaaacaaatattatttcgtattgatggaagaaagagcaaaaaatctagttcgaaactaaaattcaaccctaaattccagtttaattcacataaactaatcctcataatatcaattttcagattcataaaatgtaaatatctaacaaataggtgtggagctcctaatcaatttaaattaggtataatccaaaaaaaaaaaaaacatcaatactatagctagtgtttatctcattgcattgacgttgttttacaaatttctaatagtgaatttattaatatcaaatcatgaaaaaatatagtaaattcgcatgcatctacagccaagtacatcaaaatatggttttgggttttcatgttgcattatagttacattatcattttattaaggttttcataacgttttgaaattgaaatatgaaaataaaataatagtgtttatcaaatatgtaggtgtttcatttgctagtataagagaaatctcgctttaaagagacttctataacatggtaagctatatgaatatatttaattggttgatatttaagttggtttacatatgtctaagatttatttcgattttttccacctgatgtggcatgcgtacgtggacaatattagcgccacgtatcaatacaactcaccagcaaggaggtcaagtcagcaccctagccaacatgggtctcgacactcaaataggacgacaagtgacaaaccaatcacctcaagggggctggtcggtcctatggtcggccaacttctggaaagcacaaggccgcccagcttgcttcctgcaagtgcctggccgggcaggattggacctagtaggattttggtgcacaactttacacgtggattgcaaattgtggcttaacagtccaataaagtagatgaaaaagatctatgtttaagggacattttagtttttgtatttaatcaatttaatannnnnnnnnnnacttattttatttgtaaattagggctctcttatataaagagcctcaactcaaccctaaaaaccctaagtttgatcctaagtctcatcctaaataattaagcctcattctaagtctgataactcactccac

SEQ ID NO: 63252 - DNA, 696 bp, Cannabis sativa
tcgcagtaatgatcgagagagtacgggcacaactagaactaaaagctacccaaggatgaggtctgtaagcaactatgacccacaagggaaacctacggttttatgaatagtgtttgtgtgcctatggatgataacattaaaagagaaatcttaaacgagtctcatacgactccttactcggctcacccgggaacaacaaagatgtaccaagaccttaaggccatgttctggtggccagacatgaaaaatgatattgttgaatatgttgcaaggtgtctaacttgtcagcaactgaaagctgaacaccaaaggcctccagggttgttgtagccattgaacctttcggaatggaaatgggaagacattgctatggacttcgtggttggatttcctaagactacgggatagtatgactctgtgtcgatcatagttgacaggtttacaaagccagcgcactttctacttgttcaaatgaatttctctattgatcagtatgctgacttgtatgttagagaaatagttcgtctctatggtgtcccaaagtccattgtttctaatagggatctgatgttcacattgagattctgggagtgtctacatcgagctatgggtactcaattgaaatttagcacaacatttcatcctcagatggatgggcagtctgaaaggaccattcaaatcttagaagacatgctt

SEQ ID NO: 63253 - DNA, 2210 bp, Cannabis sativa
  modified_base (29)..(30): a, c, t, g, unknown or other
  modified_base (459)..(470): a, c, t, g, unknown or other
atagaaaagattacattgaaatagagttnnatttagggcacaaagcccaaaaatttgccacacgagaaaaaatcatcttggggatcaatagtcagatattttatgtattttactccaataatgggtgggcttttggaaaaaaccataagcaaatcattggtatgcccatacctgtattttagcctataaatacccctttattcccacataaagaggggatcgaaaaagtgatagccgaagctgtgtgaaaatatctctaagctttcttcttcttcaagagaaaccaagagagcagagttagtgtggaccttgcttttagcaaatgacaatgagtcaattaataagcgataagaaatgtaattaagataaggtaagaaccagtaagcaataaagaacacaggatcttaaagaggtttggcccctttagttcggtgatagcctactccccttagattgtannnnnnnnnnnncaaagaatacagtgtttcctctctcaaagctctcacaaaaaaatctttgagtattttctattatatctctttgaagtaattcttttgaccccttttacagtgacgatggatcactatttatagggttaaatgcatgagggaaagtttttcttttgcttacaatatctataattggtaagaacatacattacatgtttagaatacatagattgagggattcggacagcttgccatatccttttgatatgatcccatgattgtagggattgctcgtgaactccatgatatcaatcttgaagtttctatgtcttgatacattgcttggagaaatgactttattcgttgtccggatcatctgcccttgccctgctcggtcaggcagactttgtccgtacagatgtatactaagctctattcgaaatatctctttaaccagatgtaggaagtaacagccacgtgtcaccagtatgtgctgccacgtcatagtgcaaaaaaaatgggagaaaatttttcccccaagtctgcatgggacttccaaagtcgcgagtagacttcactcagcttatgttcgggtctgaatgggtggcacgtgttcgatgtgcctattggtgatttgatgtgattctgaccaagagtcccttcagtattcggctaattaaagctctaattaattcgtacatcgagacactcaaacaattcgcatgctttgacggttacccttttttaggtacttaattacttttgatttcccaatatttacttttgggaggaaatcgaggcgtttgaaattcaaagtaattgcacccgtcactaatctgcttataaatagggcaaaaagtcctaataaaccacttttagcatttttcttgtttagtgagttcagcgcaagaacatcattctttctcaaatccttcgaagaatttctagaaagtgtcgatcaccgtcatctgagcaacgtcaaagcttcgaacattgagtgagtttctcatctttttctcctttaatgtttgaatctccaattttctaagtttcttttgcagaaaattcatcttgcacttattctaggaaaactctagagaatctaggtttagaaatgtgaactttgcttttggatgatcatataacttgattgtgatggcattttgacgttaacttcaggatattcggttctcactttgaccacttggggtttagtcaagattaacccttaatttgaggttttgaaattttgggttatgaacctaattcatgcaaaaaaaatttctttttaatcttttgattggacctggtcggtatgctttgcttgttttttgttcgacatcctggccaaatactcatcttgtgtcttatcttttatagatgaaccctgatgagttttgcggaggagaacaccataccgaccaggatcttctccaactcttctacgaggaccaacctcatctttgcgctagtccatcttcctcaagcgacaaactttctaattcgagtttcaaggattgggaagtgagtactgtgggtacaccttccccagaacttgaggtgcatcaccagttttattccgagtagatcgcaggcgaaggttacgggcattttatttgggaactcaggaaggggtggagatgatacttgtcgtccaactgggcatatattgttcaccctgacgtagttgatgttggaattattttaccaagatctagatttacaaccaagtatgttttattaacaccctaatatgaattc

SEQ ID NO: 63254 - DNA, 2152 bp, Cannabis sativa
tcttaattttatgtttttatttattattaatgttatggcctaaattttttaattgcagaagtatatttataaaattttaaaattataaaaatatatttttttcaacaaaaatataaaaaataattaaaaaataacaataaatcaatctcataataattataaattaactataaataaactataaaataaccaaagacaatcagaaaaataacctcgtaatcttataatataactataaataaactataaaacaactaaaaaaaataatttattatttttactgaaaagctatttatacaaataaaagaactcaaagagtaaaaatgaaaatctttttgtgttgatttatttttgtaatttttttaaatttttttatctataattatgtaaatttttcattatattattacaattattttatgtatgtagaacatcatgttatttggctaataccatatcaagatagtatctcatgactatttatgagtttcttatattattaaataaattattaaaatatataagattcgatattaaaatacgccaaagtacgttacttttcgcatgtttgtcacgtgacccttagcatttttcatttatgttggatatatgtaaatgagcattgttattaggtactatatggtgcccaacaccatattgttgcgattggttatcgattttttatattatttattaaattaaattatgtaaaacctatattaatttacactaataacgatacgatgatgctgtggtgcttggtaccataaggtgccctttaatattattattattttttttttttgataaatcaaattaatttataatgcattacttcaacttctatttccaactgcattatgtgtgtgaataaaagttgcatacgtaagtaggtacgtaagtaatatatatgtatgtatagctagagagattatatattagagtagaaagaaaaggtgattcgatgatgaggtccaagtaatatatagtcatgatcaacatatgaaaaggaattatatatatataggtagtagagagtagagagtagacatatgggagaagtgaataataaagagaataaaagtagccctaagtacagacattcctgtcttttaggttgaaatgtggtcgtgccattgctaggttttggtagaaccccctggtacccacatggcctcctcgtgcaactcatcatcaattcatgacatcgacctttactctatcaaaattcaccacccacccaccatataatatatatatatatatatatatcaaaatttgctatagctatagctacattaattttctttcttccatgacaatgatctctttctgccttcatgtctccatccaatttcatgaatattccgcactctcaatggtccactttttaaattcctcaactacacaactacacttcatattattaatttattacttttttcattaattttcagtttcattttagattgttttgaaaaatttagagatttttttagcttcataattttaaaattattttttatttttaaaagcaacaaaaaaaaaataaaaactaatatgagttatatagctaaatttttttataaacagtttattaaaaagttgagtttaaaaaaactagaaaatagaaaacatcaaaatgttgttttctaatttcaaaaataactttttttgtctaacatattatattttatatttttgcttacataccgtggacctcggcccagaactacatctcgaaaccaaaccctgacctcggacccggatcccggaccccaacctagacacgaactccaaacttggacccaaaccccgacctcggacccgaacctagacctggacctagacccagacccgaactcgaactccaaacccagacccaaacttagaccaagacccagacccgaacctcggaccaagacttggaccccagaccaggacctgaaccaagacccagactatcaaaccccgaacccagatccaaaccctggccgagcccaaactcggatccggatccaaacttagacttgaacctagacccccgaccccaaagccgaacaccgaacctgaatcgaaccccagatctaggacctagaccaaggcctcaaacccagacttggaccttggacctcgaacctcaaactcggac

SEQ ID NO: 63255 - DNA, 1114 bp, Cannabis sativa
tagcatatatttaatcaatctcttattttagtccttgtattattttacaatagagttgtaataaatcttgattttcttccattgttataaaatctctaacacccataacttgaaagatctagctacaaaatcatagtatccacccctaagtgctatctttttctcttcaactccctttcgaacaaatggataagaatttagattcttcagagacacatttactgcttcctgcatattcaataatcaattattaatataatagtaatattacaaagaatatatacattgactaattaattagatataatagtattatgaagcgaaattattagaaatattatagcaaagaagagatatatatttgagggcacgtaatctcttctatttataagccaaactcacttgggatgccattaaaatatgcatatacatatatatatatatatatgcacgttttttcttttcatgatttctttacaaaaagtaattgttgtataaattagtgaaaaatatggatgtgcaacactaagttttcattttagtcccttggcagctcaacatgatcatattatattatgtaaagtagtataaatggaaataactatatatatattattggtggacgaccatagtcaagagtcgactcctgtatggtcctcaatatataattagtctgtaatatttagagaatgtacatgttatataaatatattatattattttttattggattaggcttggcgtataggttgagtatgattcctggaacgatcattgaagtttaattattctgtacttcagctataagaaaatcatgttaaagtacgtactataattaataagataactgcaacgttaaaaaattcaattaatatattacatatcattattatatagagtttaattattaataactattattcgttctcacctaacaaagctctaaagtgatattgttgatggataaaacgcgtaataagttaaattactcaaaatttaaagggataatggcggcaaaagtccccaaaaacttgaggttgatgccgattagtcctcaacctcaaaaattgacggtgaaaatacctaaggtcccaatttttgtttgtccgttggt

SEQ ID NO: 63256 - DNA, 1772 bp, Cannabis sativa
aaaatcatgtttttatgtcaatttaaaaaatcaggtatgtaattggacatccaattagaaaaccgatccaatctaattagtaattggattggattggagtggatattgaggtctaattgaattggatcggatgatgattttttaaatccaattactaattggattggattggatgaggtaaaaaatattggatcggatcggatgcctacccctactattaacatattgtaaaataccattacgctacactcaaaaaaaaattatttgtaacactcatataatctatattataaataaataatataacaatagatacatcttctttgctctttgggtattcattaattattatcagtagctaaaggtgaattttgtatcaaaatttagtagtccaaattattggtaggaagtatataaatgtatgcttacaagaaatgaaaataggtaggtaaatgtaataaataattagtgatgcatccctacaaatcactttaaatctctttctttctttcttttttttaatttttgtttttcattttatttacataattttacaaatggctttctaatttctagggcttttttaccactcttttcctttgcctgagttcctaccacagtaattatctccttcgaccgccgtgtcgccgcgcctagggctccggttgatggtctaggaccttccaggctttcagaattttgttcacgtttcggtctggtagtctcgctggggcgcttggtctcaccattctcttctgttcgaggtacatttatctttgctttgatctatggggattatgtaatctctcatccatatgcttatacgcctaatatgatttatggttataatgtatgctgggtgatgttatgctctcaggattcttgttttgatttgtgtttccttaaagatgcagcatagtagttagtttcatctatgaaaattccctcccatttgaccattatatttaggttctaaccccattgattgccaaatccaaagattgcagaaaacaaaaactagtgaacattccggagtttgggacttgtaccctatggaaacaaattgaccttagggctttgtgaaattactgtgagaatatgctagtacttgttggagaagttggattagtacattatggaatcatttgtacaaccaaggtacgaaatacccatttagattgaaggataaaatgctaaagtttgtgtttttcttatgaagttggtggcagttaattggctaaaagggctggaggtatgaatcatgtagtggtggaggtttagtttggtttgcttgccatgtgcaattatgattgtcatttaggtttttggaaagagggttttgaattattttttagtgttgaatgccctaagtttgatcctctctatcatgcaatgcatagcactagctagagatatcacgaatctttaccattaagagggaaaaaaaagagtttttgatttttttttttaagttgacaaatagtctccttgaccaatgactcattttaattgcttgtcatatagtgttgactacacgctttctcgatattgaataactattgcaggaggattttgaatttttatcaaattcccaatcacaataggaagacaataggcaaagtcattgaggcttgcttaaaacagtggggtgttgagaggttttttgtaatcacagttgataatgcctatttaaacaatctagatattcgtcacacattgagaagagtttgcaagtttggaagtctgtggtttatgattggtaggtattcata

SEQ ID NO: 63257 - DNA, 1016 bp, Cannabis sativa
tttttttagaccaacttgaagctcaactatatttattcccgagccaaatctattgttctcgggatcgattcttccaccaataagttgaagaaagctttgaaagaggacaaggatgaaaccaagcagaaagcacttatcttggcgaggtgaataagcagcttattgtcgtaaacaacacgatcaaggagttaaagcagtagctggctgacatgtcttccactatcaagttggaaaaagacctagaacatgagtcaaaaagggtccgagaacttatggatgagagagaagacatccatactctccttcaaaattaagagaccaaaattaaggatctcactgaagctctcaaggaaaaggaggaatcctaccaaaaggagaattcaactcatgaagaagagaaaaaatgagtcgaggaggcgctcgcagctgagcgggatgcccatgccaaagatgttgaatatcataagaccaattttccagaagtattctatgagttttagaaggctaatcccaaagctcactttggctatctcactctagaaatatatgctaacatgattgggtattgcgagttttcgaaagctgaggacaaggcgaagaaggttggccaaaatgctagtgaataaatatgctggggcaagtactgaccaaactgaagctattgatcttacctcttccgtccaggttccacaagacccattattcagtgaatacctgaatcctgcaaccccaatggactgaagttgaaaagttttaattttttcttcttttttacgaccttaatggccttattttttgatacaatttagtcgaccaagaggcttttaaacttggctttattttttcactctatagacatatgactgaccgggtagcttttaaccccgggctttaactgttatatatctgataaaactttttcaatttgcatatatacttaattcttagatttttgcttaagtattttccatgctatcttacttatactgtagaggtgtaggtgccccccaagtgac

SEQ ID NO: 63258 - DNA, 671 bp, Cannabis sativa
tctcattaataaaaatcatataaacacttatcaattcttcatttttcttatcagtagatatatataatatatatatatatatatatatttcgagaatttagtaagagataaaaaaatgataattttttaaatatcctaaaattaacaaaaccaaaatatgatgataaattttgaagttatcaattttttaaaacataccatttttaaatatcttaattttttttaaaaaaaaaaatccaaaagcacacaaatattatagctaaaattttgagagttatcattttttttaaatattattttcaaatatcttaatttcaaaaaaaaaaaaaaaaagccaaaaacacaaacaaaaaaatacatcactctcctgatgaaaaaaaaaaccaaaaagctaaaaaaaaagtaatacttttttgaaaagctacaataaaaaaaaaaaaaaaacgagagaattttggaaaaaataaagaaaatatttattttatatcaattaatatttatgaaactaatataaaaaatgagagaattaagaagagaacaaaaaatactaattagagagattttagagtattacgtcaccgtctcatatctctcctttatatatatatatagatggtttaggatatatgtagagtattatagaaaaaaaaaattaaaataccaaaaaatat

SEQ ID NO: 63259 - DNA, 557 bp, Cannabis sativa
gaatccatcgaacacctgtttctttcctgtgaggtggctctccatttctggcgttcgtctccttggggtatttatccagtgtgtgatacaggaattcgagtctgggactgggttaagttcatttgggatctaaaacataaaggagtttgtgttgatgatatattcctctacgcttctattgtagtagataccatttggagagtgagaaacgagaaggttcataataattaccctgttgatgttaacaaatgcattgctaatatttgtaattcttatgcagatatgtatgattccttgctccatagtcctcccccagctttaaaggaaacttggtcccctcctcctcaggattggatcaagctgaattgtgatgtcaaggtgggtttggacagcatgtgcatagcggtagtggcaagggaccatctaagcagagtaattagtgttcgtactgctcgagagaatttctcggacgttttgtgtggtgaagcggcggcctgttctttggcggtgtcagttgctctggatcttggctataagtatgtaatagtggagagtga

SEQ ID NO: 63260 - DNA, 682 bp, Cannabis sativa
cgatttagcattaaactacaaaaaagaaactatttttagtgataacttttcagtcacaacataaaatttttgtaactaaatatgacttttagtcataacaaaaagttagttgtgactaaacatagtatttagatatattgtcactaatttaggtttagtcgcaacaagtattgtgactaaaaatatatttagtccaatttttatgattaatacatttaaacattttataattacaatattagaatgataatttataattgaggagtgctaaggacactctctatatatcacactctcttttgcactctctagttaatttaatgacaaatgtcatcttttcaacaaggcttaattttacttaatgactagtcataagattatacttttatttcaactatgccattgccactaatttactcaaataattcttgacttatgaaaaattaaatatattaaagaaagtaagtcataataaaaataaataaataaataaacacaatacacatatataagttttttattgttacatatgttttgttaatttctcttaattaataaaaaagagctttttcaaaaaaaaaaattaaacacctcacatgagtatactatctatataaacataattaatattgcaatataatatgtatataaaattatattattgatgattatttttagtgca

SEQ ID NO: 63261 - DNA, 785 bp, Cannabis sativa
tgttcccattagaccccttaagttatatcaattatatgctagacttaatgtctctttctctctcgctcttcttttctttttgtttttgtttttcaattttgacatacataaatgtctcttttatgtatcttagaaaaaaattatctttttttttttgtcaacaccaaaaacattgttgaatattggagacattataaattataagtgataaatagtttttttttatattatttattaattaaattaaaattgataaactgctttttaatatattatttattaaaagtacgtttggtaatactttttaatcacttttctattttttaattagaaaagtaaaaatatttttcaaaaatatgttctataaatttgtttcacttttcaattttttaattgagaattgaaatttaaaattttttttttttaaaaaaaattactttcaattttttttaatcaatattcttgattccgatcgaaacttgaactttgagactcgaactccagcctcaatcccagtcccaaactcggatcacgaccccggtcctagatccgaacctaaacctgacttaaatcaaatcaaataataaaaatgaaagtggaagttatagaacacagaaaatatttttattttttaaaaataaaattttaaaaacacaatttttttttttttttggtgatttgaaattaaaaataaaaaataaaagtattaccaaacgctcctagttaaattaaattgatagtatctaatgttgaaacacatcacttttagacattggtgtaatggt

SEQ ID NO: 63262 - DNA, 620 bp, Cannabis sativa
ggcacttgggatagggccccaaggggtacccaattttgtgcgaatgggtgaggacacacacacttggcccaccacacacgcgcgccattcgaccagccgagctagttggtgtggtgtgacattttagtttttagaaaaaatttatttaataaaataattatttttttatttttattatttaatttatttgaaaaacatgtttaattgtgttatcccaatttttttccacctgacgtggcatgtccacgtaagcacatggagtacagccctgccaatagcagaacatggcctccatgcaagatatagcaaaatcgtcaagcaacaatcgaatggagtgaagcaagccctcgaggagctgtaccaacatccttggccggccaagagaagcctataggccgaccaagatctgtgcataagctggccggccaagaagtgacttctggaccaagggagcttccattcgaccaagagaacctggtctctacaaggaaatggtgtacaaagttatcctcaacttacaaaaggttggcccccacgctcaaaggctggcctcctcttggtggagctatagtgacctgacagatcctgcagggcttgtcctgccagatcctgcaggcctt

SEQ ID NO: 63263 - DNA, 1716 bp, Cannabis sativa
gttgccacttaaggtgacggcgtgttgccattttcttgcatttttggctctaaagttgcgtttttcaaattgcaacatgtgaaacttgcctaggcctatcactatttaaagggtcttagaggggtccaaagagactgatcacacttttgctttctctcgctagctctcaaccgttttcttcaagaaattcatcatgaaattggttgcttcaagaattcaaaggcttgttgcatcccatttcttattatttctgtgtagaaccctgaagcatcttcctattggattttaatagagaatttgcacagagtctcttcaagccttctttgtgtttgtttactgttcattgtgttgcagaatctttctataatgctcaaggcaatatatgtgatttgcttatctaatttatggccagttactaattgttgatttatctttgttattcttcccctattcttgaaacttgtccagtttatgaatgcgtttgatagggcaatgaattcgctcgatgataaatttgcattcctatcatcatctaaacaaatagtgagcagcacgaatgaagaagacaaggtaatacagtctataatatgtctggccgtttctttactatttgtgtagttacaattttcaattgggcttttggctctattttctagtgcttggacaaaaaacaatgagtacttttgcggattacaggtcattgtcttcgagcgtggagatctagtttttgtattcaatttccatccagaaacttcatatgatgggtaatttttgctttgatcttagctctagcaattttttttctttttttctttttgagtgggtttgaatatgtgatatgcaggtacaaggttgggtgtgacttgcctgggaagtacagggttgcgcttgatagcgatgctttagaatttggtggacatggaagagtaagaaaaatatttgtgtaccgtattattaaacatgaatgtctcagtatagtaagaggggtagcttaattagccaaatttgtagtttactcacaaaaaactgtaatttactttagttataatttggcactggcaggttggccatgatgcagaccatttcacctcgccggaaggaataccaggagtacctgagacaaattttaacaatcgccccaactccttcaaagtattatcaccctgtcgcacctgtgtggtatgtttttgttctcttttttttctctacaatcactcctctcctgtcaaggtgacatattgcataatctaattttctccttttcctgtttgtgatgtattttatttcgaagatttactatagagtagatgaagctggtgaaggaaacagtgggagtaaagttagtcaaagcaatgagaagaagataatattgaagaatcagcttcagaaaaggtgtgactaagttgctctggtagattgttgtagccggagaggatggtgtgaataaataagataattctcttattgagtttgtagattttgctatggagttaattatgtataaatactttgttgtgaagtagagatgccatgtcagcttttaaatgaacagtatttatatagcctttggaggtttgaatgaaaatggagctttatttacataaaaaaaatgtcatttttccctaccacagtattatttctattaaatgagttttttatcttgcaaataatttgtttagaaatgtttcgaatctcttagagtgactacaaatttga

SEQ ID NO: 63264 - DNA, 3597 bp, Cannabis sativa
  modified_base (2373)..(2383): a, c, t, g, unknown or other
tagaattttcctatttttttttatattttttaactttttttaaaattttcctataaaataactaattttttgagaaaaattattttataaatcaaaaatttctcttttatatatttttgaaaacttatactataaaaaccctacaagagaaatttctcttttatatatcaaaaattattttgccatttgttaaaaattatgttttagcataatatatgctattatcaaaacacaacattcaaagcactaatatatagatacataattagaatttacgtacggttgtatatgccaggaaaaaaaaaagacaaattaatatgtatgtttacaaattagctttaattttttttaacctaatttctcatattttttatatttaattatattacacttaacaactaccaaaacctaataacacaataaatattagtaattaggtttggataacacattgggtttttgatactgattaatctatcaaaaaatgtgtattccacattaattgctcaaaaaaaaaattctcataaattttagataatatttaggaccatataactagttcattaaataaataaataactatattgaaaaataagtttattaatattacctgcactagaaggagaggataagaagacaatccattagagtaatcaacagaaggaaccaacaaagatcttagcttaggcgacggaacaaaatcgccgaaatcatcgagcacaaagctagtctcagcttcaataaaaaggacaccttcgccattacaatcaatatcgatacgcccatttttagaggtaattaagcgaccggccacggggtaaaatgggactaaaaccttactaagagcatctttgagtatattggaatcaaagaattggtcatcaagagacaatgtagacattattggtggtttgaagacataaattgttgggacatgaatgtgtctaggcaccatttggtctaaaatcgagtttcttaagacgtgatgaggtgtttcggctgatggcttcaccattgttgtcttccttaatttcatcaccattgttcctcacaatgaaaaatatttagtatttgactatagagtatagagtgtagagaatgtttgtatttttatacatgttacataagtatagcattatatatataaggtttgtaaaaagtggtgtgtggagaatgaggatacgtggtcaattttggagcacaaaaaaccaagttgttgacgggacatttaagaaggtgtcacgtgctcaattttggtgcacagccacaaatgttcaaatgtcttattgatattttcactaaaaatataagtacatttatacctacgagaaaagactcaaaattaggataagtttttctaaataattaatgttttaaattttgtacacttaaatattttatttttatttttgaaggtaaaaatatttaatcttacgattctcttatacttgttactaccactttcattagctcataaatatacacatgtggagggtccaaatgcattacatttattttcgttttttttttattttaaatcttaatattcttaatattaaaaacttaatgctatgtgtttcaaaaaaaaaaatcagttctgataacaattttcacataatattagcacttcaattcgataatcatgttccatatattgcattggttcacatagctatggtaatttggtattgcatctctctcattttttttaaacaagtagaacatttagtttctactctaatattaagaatatgaggttttaaaataaaataaataaatataatgtatttgggacctccacgtgttcatatttataagttaatggaagtggtagtaacaggtgtaagagaattgtaacattaggtatttttgcctccaaaaataaagataaagtatttaaatgtataaaatataaaacattaagtatttatgctacaattcacatgtaatattattttgaatgatgtgtgttttttgtaaaagttattagttaaattatttattttgttaaatgagaaaataaatttatatttttaaaaagggatattggcggctaaaccacctgaattttacggtttgtaacatttaaccacaaaaaccaaaattttggcggctaaactacctaaaccctgattccgttttactctgcacacctccgcccaaaaatcacagttaagtgtcacggtggactgtccacgtgtacacacttgtacacgtggcaaatttttagtagtccacgtactattaatttttaaaaataattataaatattaaaaaaattaaaaaatcaaaaaaaaaatctttttttattttttttaatttaaaaaaattaaaaaattaattttttaaactttttttttctttttcttcttnnnnnnnnnnnttcttcttcttattcttcttctttcttctttcttcttctttttctgcagaaaaaaaaattgtcgactagaaattgttcagaattcactctatctctagaaccaaatcaattcattaagatccccaaaatccctaaaaatcaaaaattttgaaaccctagaaaaaccaaatcatatcaaattcagatcccaaacctttgatctgaatttgaaagctctcaatgtcgtgcttagccctctctcttcaacccgctaatagagtggtttcctccggcacgagccctagtcgcactctccgccttctgccagactcttctcgctttcggctccagcaagaacaacaacaggagcaacaaccagtctcagttcaccgattctgatccctccgttgattccattggcgacgatccactcgcagcttccaatggccaactcatcatcagagtcgagagtcgataccaagtcgtgtacagactcgtcaacaacatttatgttctcggaatcactacggccgatcacgacaacgcaatcaacgtctttgaatgcatccaccaccaccagtcggctgcccagcaaatgatcaactatgacgctaggaggaggagaaggagagcaagagggatgggagagtttctgcgccaaaaattaaacttaaatatttatctgcaatcaggagtcaaacttaaatatttatgctacaaattattcttttgattaattgatacaaaaaaaatgtatttcttaacttattccaaaaaaatattaaaaaatataatgtatattaattatatttttattagattttttgtgtttaatttgtaacacttaattattttgtgtatttatttttatgatgttttgttctattttattaattacttcaaaattttagttgcattacatgttgtaatgattgtatgtttatagagtatcaaacttaaataaatggcaatatttagtttatacatatttttcttcatatttttaaattaatattaaaatttaagtgtgtaattggatttttaattaaaaaatcaatccatttcaattagtaattagattggattcgattttacgatttaattaaattagatcggatgacaagagaaaaattggattgaatcagatttccaccccttatttatagaagtggatgatttcaattaattaagcaaattcatgaccccctactactactacaaaaaaaaaaaaaaaa

SEQ ID NO: 63265 - DNA, 1832 bp, Cannabis sativa
acaataatcataacattaaacataaaagaatagaagcaatttgatatggcggaaactagaaattaacattcaataatgaaataaagaattcatgttttggggtttgaaataacccttaactaaaaaaaaaaaactactcaaaattagacattataatgataatcacaataaatagtaagagtagaaggagaagaaaagaactagaatgaagaacacttcaaagtcgatctctgtctcttccttgctctctctctctttgagtttctctccttaatttgaagctttagaattattaaatttgtagcctaagaggtcctatttatagttcttgaaaagatagatgaatccttttagaattaggattctatttatagtgctcgaaaagatagattagaatccctatagaattaggattctatttatggtgcttgaaaagatagatgactccccttagaattaggattctatttatagtattaggctatatctcactaaaataaaatatattactctatttatagtattaggattctattttttcgctatattttatcttctttttttttttgtcagaatttgcctgctgtaattattaatcatattattttggtcataactctctcgatattactcgaaattggacgatttaagatggtctggaaagctaagaacgagatctaaaacttttatgcttagttccaagtttagttatgcttcttagatcatcaaaatttgtaataaagctcagtcttgtaaaatcgagctcgccggcttccattattttccaccaaaatatgttgaattccctccaaaagactctaaatgtatgaatagtctttaaaatagtctaacaaattagaatcacactcatcaataatttaaagaatcaatttaagaatttttttttatcaataagtgaattttattactccaaaacttaatcttttacatcctattagcatcttcatccgaagacctaatattttaatgtatacaatcttttttctcatctatacatcctttgaataaaaaaaatcaaaacaattctgatttacaaatttgaaaactaagcacactcaatcagcttgactttaattggccaacaacaaatggttctactcttaacatcttccttagtcttccgaacaacctgctcaactgcaatggcttctgaattccataaaacaccattacgaaccttccatatttgatacacaacagcagcaacaatagctgctaaaatggctttttgaaaagagttaatttttgctcttttaatccacttgagaactcaaggctaatgtttcagctctccaatctaacaattttctttacttgagatagataaatgttagagaaagcacacgagaagaataaatgattagaagtttcggcctggtttctgcaaaccaggcagaaatcctccctaataatgttcaatctatgcaatctttctctagttttaagcctatcttggacaacaatccataaacaaaagctatgtctagaaatgttaagtctattccatacctcatggcttcaattcactctgctttgggagggacaaagagctttgtaaccattagcaatctggtagggaactgttgcaaattgatgtatgtccatgacatcttttaacttgatttttgacagcaaccaacttcttccaataccaactagcttggggaggagcttgatagctccaccaatcctcccctttgatatacatacaatggatccatctaattcacaagttgtcttccttattcccaattgtccacacatattttgtcattgcagcaatattctgttaccaggatctagatttacta

SEQ ID NO: 63266 - DNA, 907 bp, Cannabis sativa
gcagaggttttgtaagtaaaaaatcgtttacccctgcatataaaaatagaggtatttctatgcacataagtgggtaagggcacaccctttacctaactagggtgtcttactccacacgcaagaaaggctaaaagcaccacaagaccatctaactgttggtttggtaggtagctcttccatcatatggtgtttaattgatgtaggatatcacgtaaagatatgaactcgtgtcgttcaaaggtttctcctttaaaagtaattgcccagacaagtcgttggacaataagcactacagaggcacgtacacgcacaaccacggtctgacgcaagggacatggtctgacttggtgtcagacgaggcgtaactgtcgggtgtagttccagattaggtcgtagggagcttctaggaagttcagccaagggcttcttgggatagtcgattattgatcatccaggagtacttgtgctttccatttccctccaaatagcgtaagcatcaaattagaacttcaagaatcattctgtcattcgcaaaggaaatattctttcgaatacttcaatatctttcgtgatcctatcttaaaaaagggcctatgatatcagtatatgatctgacgtggcacccttctgctgcttccatgtagaaccatccgtgaacagggataacagtgattggtattaaaaatcaatttttctacctcctttctgtttgtgtattttatgttaggcgagatgttaactaatctgcttatggtttagctaaataaattttactattgaataataattgtatttagttagaggagactctatttgctattttataccattttttatgtcgttgtaaacgactcattttaatttataataatagacatttttttataaaaaaagaaagaaagaaaga

SEQ ID NO: 63267 - DNA, 619 bp, Cannabis sativa
ttgaatctaataatctcaatacttcaggggaaacttttaacgctcaaagtttaggtggcataattcggtacatgtcaagtttaggggacaaaaattctaaataacatctttttgacatatagccccaataaaaaaattaagactacgttgattttgggattaatttacactttgtataatagtaaaattgtaaaatttgagttaaatacatcatcaagccatttttaaataaattagctataaaatttatactatacattgggtagtctaatctttttgagagttgcaatttacatttatattttatttttatttttaaaaataaaacccaaatctatatgtcaagtcaatgaagttttttatttttatgtttaccttctaatacacatcaatgttgttgcaaattaaatagagaaaaaataatgatttcaagatattaatttttttgaagtggccaatgtttatggaaagagtacaatttggttgacattttattagtttatgttattgaatagattttacattggagattgtagagttgcatttaaagtcaaaattattcttaaatctctagggcattttgcatattacgaggtgatcttattactatttgattaat

SEQ ID NO: 63268 - DNA, 681 bp, Cannabis sativa
atgatctgattcttgctgtcatttatttctgatagaattgagcattcctgtttcgaaatccttttatggcaaataggaataccaagatatctgaacggagtttgttgttgtgagaaacctgatgcctccaggactctagtgacatctgattctatcatattgcagcaatagattgcagattttgctttgttaggttggagccccgaggtacctgagaagagtttcaatccttgtagcataaggatgatgctcttataatcacctttacaaaaaagtagcacatcatctgcaaaacttaggtgattgagctttaggatgtcacatcgctcaagaaaagagaaatcttctttgttcccaactttcttcaaaatgcgagtcaatattccatgccaatgacaaataaaagaggagaaaggggatcaccttgtcttaatcctctcttagtttcaaagaacccgtgaagggatccattgaaaaaaaagagagaattttggagttctgacacagttcattacaagagagatgaacttttcaggaaaaagtagcccccttagcacctcctcaatgaagtctcattctatcgtgtcataagccttttgtaaatcaagtttgatcatgcaattcgactttgttgacttccttccataatgtctcaccagatcttgacatatcatgatgttg

SEQ ID NO: 63269 - DNA, 803 bp, Cannabis sativa
atttagtcatctaatttttgtaattgaattagtttttatttaatttatttaaattaactagcctaaaaactttatcaattgaatttaacttagcatttttatttatttttggttacctcatttcatgcttgtatggtcactccccttacttgtgtttgtagatgtatgctcgtgaccattggggatgcgacaaccacattggcgatgacctccttgctcatctatactcagactatcggtcacctccaaattcatctgattcgtcgtcttcacctagtcctttaggtagcaatgagtcatctagcgggtctcacgaaactacatgtcctattcatagagtgaggagattgaaaagaatccttccacgttgggccttgtacttcctgcacgaaggagagtgctccacccctctcgctatggcagaaatggccgatccttcctcccaagatggcctagaggaaaacgaagctcatattgctcctcaaagtcctcctagtcaaaagaggcggactcaacaagaggtaacggcccaacacatggtgaccaaaaaacaaaggaagcggaaccaacgagaggcacaacacatggtgcctaccttagaggcgaaggcacactatgaccctagtacttgggatcccagcgtctcaattgaacgtccagacagtagtttggagtcgtccgaagtgcaaagttacctctctctgtacgctcttggtgaggggataaaggtagtctcggtgaagaaaggccaaaatgctggctctcccccagatgattcatgtgcttggaaaaaataccacatc

SEQ ID NO: 63270 - DNA, 693 bp, Cannabis sativa
tttttaacgacctttaaagttcagagggtatgatttggtatatgtcaaagttcatggggtaaaatagtcagaaaaaaagcccgtaaaaatataaaaaactcagaattacctaaaaacgtaaatttttattgtttttgagtatttttgaaataaccctttttctcaaattccccccaaaaaaagcccaataaaataaaacaggcccacgaaggcccaaccaaattgccgactgggattgaatcttctcaaccaagtcaaaccaaaactgtttattttattttgagtttcccaattcagctcaagggtttcggcgctatttttcgaattgagaaacctttcaatcataatggtaagaattcagaaaagctagggtttttgaatttcattcttcaatttctcttttcttgttcttatgggtcttaattctttgttttgtaggatgattttaccgaagaattagagcccttgttcgattacaggcgtattcaaccacacaatttcgtttgcctcgatgacggtgagttttaaccctaactatctatgtgaaatttgtaatggttcttttgtttttattagggttgattagaaagattgaagcttgaatcgtttttgattagtttcatgtaatagtgattagtgttggatttggttttggggaaataagtgaaatttgatagtttctacttgaaggag

SEQ ID NO: 63271 - DNA, 1352 bp, Cannabis sativa
  modified_base (1027)..(1027): a, c, t, g, unknown or other
agtaaaaatttattctctaaaattctctactaaaattttagcaacataacgactttaatcatacgttctcaaaaattttaaacatgcaaaaaacaagaaacaaaaaaataacattaacaatatagaattatctacccatccgactgcagcatatgtattcacagaacttactgtattgcagatgaatatttaagatattcaaacccatcaaacatgcatattccacccactcgaccgtagtacaattaatcgcaaaacctacttcacttcggatgaatatctaaattattaaaactcttctagataaataattttacaattttagtgattaccttttttcaataaagctagctagattttcactcttcaataaccaccaaaaactcaatatttattgagattgttagatttaagaacttttgtctaatttcattcaattaaactattttagtgattgtttatgtactaaaccatgctccccagattttgatttctaccaaatcatgcccctcgaatttcgacatgtactaaatcatgccccttgaactttcatccatgttagattgtttatctaaaattggacaaaaatctttaaattcaacaatctcaatagttcagagggcatttttaatgatttcaaaagttcaagagacatgatttagtacatatcaaagttcagggaaaagaaatcttaattaagcaattcacaatgcacataatcacaatataatctataaaactgaatatatatttaaaaataaaataaaataagataaaaaataaaataaaaaataaaagtagttagcccgatgatatgagaaattttacatggtatactaatttctgtcattttttttactaaaatactgtcagacggtattttttacttttttattgtgtttttttataagttacatactacagtacagtgttaagttttcattggtgtcctactggtgttttttagttgttctactgttgttttaagttgttttgctttgtgtttttactggtgttttataaaaanacagtatttttgaaaaaatttccgtgtgacagtatttttgtgaaagttaacctaaattctaatattttatgtaagtttcccatgagaaccagaggcccaggcgcagatacaaatcgaagagaaaattaaactctataacctttttatattgtcctcttttattttttaccctctttttcaaagtctatcatttttacctttttttctaaatattgtactaattatactctccatgtgactctcttatatcagggtattttaagtacaatacatataaaaagaggtatgtctcaaataaatataaaattagaggtaaatttaatta

SEQ ID NO: 63272 - DNA, 7131 bp, Cannabis sativa
atatcttttacttttccaatagtcatattcatcagaactattagtgaaagaaggtgtcttacttgtctaatcattgaaaatgaggcaaaaggatcaagactttattggtggaaatcttcactaacaagcatataattaaaacaacaatatattataacatatttgaattacacttcagttgaagatattattacatagaatcacattactgaataaataatatgaggacttaaatgtaggaggaaacaaattctaaagaaagaacaggctttacaccaccattatttaaaaatttaaaaccattaagatcatgaccaccaccatataacaatattttgattaaattactctcattttctaaaagagatcatttttctgctgcctatacttgatgtcttcctgatcttgagcttagaacgattgatataatccgcgaacatgtcattagcatcagatttcttctctgcaccataaaattcattttctttggacataatctccatgtcacccaccaccaccaccaccactacttgacatagctctgatcttaatcttggcatggtttatgtaatcagaaaaggccttgttgacatcggaacctgatctgttaccttgtctgtgatgagcatcatgttcaacagcagaagcagcataatgtagcatctccccattggatgcttttgcttgagattctagctcagccttgttcttctgctccgaaaaaccaattggtttcgattcaggcacatgtggtgagtgatcattttctctagagcctgaaaaacaacagaagattttctcacaaacactcgtggagttagagccattattttccatattgaaatgtataagcacaatagactatagaggtgagtatgtttgttttgtgagctggtgaaaatatgagtttgtgaatgccattttgtgagagccatggagctcattttataatttgcatgaaagcactgtaaagaacataaaaaaatatatttataattttgtgttatggagaatcttcctttgatccttgttttaaaactagttaccaatgaggaaagtttggcttagattcctataaaatgaaaaagttggccattttttctaaagtgatgtgatgttttaagtatcatattccctcgttttccctactctattttctacaccaactaaaagctttgcaagaaaatggacctaacacagctcaatcaattgaaaatttacatttttgttagctgttttgtgctaaatgagaattcaaagctgagttttcaaaaaaatggaaggtggtcttggcaggcagagaagacttgggaaaaagtgtctggaaagtctataacgaagaagcatggtcttctatttggttactttgggcatagacaagtcatgattctacaacttttttatttttatcattgaatttattgctaactgaaaaaaaaaacactttttaattttatcattgagttttggttactgtattgccatttcaatttggtcgtgctccaaaactcaattgaaatagtgctcttgaaatttctagacatatatatgcacatattctattcaagattctttaaaacatagaattgtacaccattggtccattgtaagtaagatagtattatagtacctagataaagttacagtttggcaaagctttcaaaaaaaaaaaaaaactactttacaaaagggtttccaattaataaagctgtttggtaatagacattaaacagatttttaagggtttaagcaactaaagttaacgtctaaagttggtacaatccaactagaagaatctataattattttatgtattacttatttactatataaattattcaaaataaaactatttaataaaaattatattacaaaattatttctttcttttttttgaaccatataacaaaattatttcaatcttaaatatgttttattttgttttcccattttaataattttatcagcaaaaccactattagagtttatattatttttgcatctcaaccaaacacacagcaacttcatgcttcagctgttttttctcaataacacagttaaagctgattgttgagtaaattacaactttatgtaattgaccagatgatggctcggtttgacaaagcttaaaataagtggtttttaacttaatagaattaaaaaagcacttttgagagtctttagttaaaaaataaaataaaaactctttcagtttttttatagaaactagaattcgtcgcttgtcaagaaacatcttatcattgttaagaatgtataagaaaaaactttgccaaacaggggagtacattcattcagtatatagtttttgaactaaaaaaactctttcattcagtttgttgtacaatcaacattgtgcatatatctaataataacactcttaacatgcattagagtatgtcatgtatatttatatgtgccatctatacttaactttattcaaccaaagaatagaaaatcacacaagtcttttctagaccaaatccattcgagaggcgaactgttctcaatttcttcctccaaagacaggacagaacatagtttttaatgttatcattgtttgcaaacaaacaccagtgacagtgattttctttttgtggagattaaacacaagatatcagatatctataaagggtagtgactaaaggaagtgactccaaaaatgtgagtctttacactcttctgcaccaagcccttttcgacggaataccatgagccttgaacaagtaatagatgctgtaagtgatcttgagaaaaaaatatataatgggaatggaaaaggagagaagaacactgtttgtagccatatcagcaagccctgagttctgaggaaatactgcgagtgcaccgtggacaaaagccagtgctaatcccacaagtgatagttcagtcaagattgtcacacagtatattgggtatatgaatcccaaccgcttaggccaggctgcaaccaaaaagtggacaaacatggaggctgccgagcaaccaaaagccaaagaatcaaacagaagaaacatcttgaacgcctttttctcactcgaaacagctatgccttgctcattgtatccaccaggcattgtaaaggctgctgcaaatgtgactgctgctatgattgaggatactattaaattaatgcttgacatgtttgttatgtccaagggcttgtatccttgagaatttgattctggcccgtcttcttggtacttatctgcagcataaaattcacttgcttcaaacagtttactcttgcctttgtcatgttcttcaaattcatcaagttggttcgtgtcaataaacgcctttgcttcagcagcatctctgataaccttttgttctaaacttggcagagctcctgtgatctccaaagctgccatactcagagttttaagctgtcacaaataaaccttattagtaattagaaagaataacattttcttctcttctatgaaaatgaaaattagcttacgatttcaagctccctaagctgcttgcttgattggacaatgtcaatggtggtcattccagccttgttttgagctcctttgtcaactcttgggtccctagccagaatttccaaaattttggaatggccttggaaagcagctagatgcaaaggggtattaccttctttatcttgctcatttataagatcttggaaagcaagtgtccggagtaagaatttgactgcatttttcttaccactctccacagcaacatgaagagcagttcgatctctatcgtccaatgattcacaagtatcagggcattttgtgactattgatctcatcacattgacatgcccttccttagctgcaatatgaagagcagacatgccattgttgtcatttacatatgtaatggaagaatggtttatctccaaaaatagctcaacaacttctacatttcccaagtgtgctgcatagtggagaggtatccaaccaaagtcatcagcttctaacattgaagatggacattttttcagaacatttcccacaaaatctgcatctcaagaggagataattttttaaagttagccaaaagaaatgcacaaggatgagttatttaatattaatggaacttaaactttacctgctcctgtgatatttagttcatatcttgaaagaggaaacttgagactaaggtttatatatttatcaatataagggattttcttccataatgaaggagtctttttctcagttgatttaaactgcttgcctataagaaatcaagtcaatagcttgctgtaagtcatagctaaacaatgataagaaagaagaagaaaatcaaaggaactatatgatcaatactaacttttatgtgttcgaatcacggctgcatgcaaagcattcatgccattccttcctacatacgagcacttgggggcggtctcaagaatatgaagagcaaccttgtaaaatcctctgtctacagccaagaacagaggagattccccaacattgttgacaaaacatgtcaaatctcggtcttcatcaatgatcaaaatcgccacctcataatgatcatttcgaacagcttcatgcaaagctgtgtcacccttcaaatttgacatccttagcaagctcctgtcagcttcaagatcttgctcctttgacttgtttacaatcaaccgaaccatctccaaatgtccaagccttgctgcaatgtgtagtgcagtgttgccttttgtatttgtttcatacagaagtgaagaattcgagtacagaacatcttctgcaagctttctctggccagatttcgctgcaacatgaagaatggtgttgttttgggatgttacttggccaagatatatatttgaaccatcttcagtgagtttctcacataggtcactgcttccaaatattgcagcattatacagctctggatccattttttgttattggatcttaagcttgtattagtttcatatacattaaatcaatcttatatttatataccctccattctctaagagagtgtctttgctgaatttttttattatatttttgtgtcacaatatgaccaaatgtaatttaagctaaagtgtctctttcttccattccctctctaattccacagtccactgaaaatttcagagaaaatgcttcaccttactaatttaataaaacaatgatgctgaataaaaatatacaaaatatagaaaggacatgtaattggctgcctttaaatttaatgagaaggtcaactcaaggcaaattttattttagttttcttttaatataaacttgtaactcaagcttagtgctggtatgagccatttttttcaaaccaaatgattaatatgcatgcatgaccttgctttactcccatatttttcatggaactcttctctcagtaacatcagaaagaaatatgtcattttttttatataattcatatattagtaaagataaagtgatttaagctgtcacagcatgaattgcattaatttttattagttgaagcttaattctttggtatgactttgaagagggtttgaaaaaaaaaatggcacttttattattggttttgatataatcacatagcatgttacaagtcataatcaagagtctttgacaaaatcaagtttattaaaccaaattagatagcattgggctgattatggcctagtaattctgaactgcctgactctggccttgttgggtttaaaatatgattttgtctcagtggtttgagtggacgtttcaagctgatctttacatgcatgcctattttccattttagagtctaagccatgtgtgaaaacaataatgaaaaaaaaaataattaaaagagtgctatttataataaatattttagagagtacttttcatggttcaaatggttgacttgattccattaaaaaaatggttgacttgtaactcatcatagagccatatatagcttagacttagagctctctatagcttaagggggcaaatgcccttcattctttctttttttaatgaaaattttattgcgtagtgtataaaattttagctaaaatgatttatttgccctttccaaaattttaaagttgacatatatattgttttaacttcaactcatccccatttctattttgtttagtgtggacttcataaatgtttgttttctctaaactcactttctaatgattaaacttagaatcaagctgtatacacttgatttacactttattcattataatataaacaataatcaaacacaaaataaatatttaattactacatattaatattattatataccaagaaaaatgtttaagcacttaatggtcgcataaatctatttgaaattagtactcattgcattatttttaaacttgttataaaattccatcttatgtccttcattaagaggggtttggatattatttttcttaaatttagattattttttaaatcacaattaatataaaaattaaaaaatggaggctatgttgaaaaatttgtatctttcctagtttgttgtgcttgtttcattgttgtttgccatgaaatgctttttcttttcaataattaaagagtatttacataaatatgggaaaaataaaaataattcaaataatataataaggaaacttaataagaaaaaatatagtatttaaaataaaaacttaatatatatgggattgaattcccataaaaaatactaaaatttacttcatatttattttaaaaaaaataaaacaaatgaaactacaatgatcgtcggagttgtcactcgtgctgaaaaagtcgctggagtttgctgtcggtgccggaaaagtcgctggagtagctgtcggcgtcaaaaaagttaccggagttgctgccagcaccaaaaaagttgtcgaaattggtattgtcaccgaaaaaatgccaagaaattgttttcttgaccaagaaaccggtttcttggtgatttttccaacatcgatagctactccagcgattttttcggcaccgacatcaaatttcaaaagggaaatttcatttaatgtacataaaaaaaacctttatttcaaaaaaaatcctcttaattattttgtacaaaacaattctattaacttccctgtaaagaccgcttaatttaatttggaaattagagttaattatgtttaattatgga

SEQ ID NO: 63273 - DNA, 1233 bp, Cannabis sativa
tgatgggttcttattgatactagtatttaggttagtctttcttaagcttttgtaattggttcatgtcgatgatgagtacccctatgtagctgaaaaagatcctaaaattttgataactacatccaggaacccaagtgctccacagacacagtttgcaaaggttgattttggagcttcccacttaacagtaagactagaagtgagtctacatgatatgtcttactaactgtgtagcttaacatgttacaatatgccacaatttttgttggccagtgattattgctcctttgtgatagagcgattttttttttttgttttagaagtaagatagccattacgtttgagtcaaaatgcttaggaatttcgaaatagttagcatgagagagtgagctaacttgtataaagttgaacaatatgtttcagtcacattgatgtatttaattagtttgtacaatctttatgcatttcttctctgtttaattgttactttttttttatgaattttaagattagtcttgtaattatatgtagatttactttatcaacattctcttatataaaagtgtaagttcggtataataatattttgtatattattaaaagaagtagttgaaactataatcatcattatcctgtattccaatcagattgttttgcagattggttcttataaatcttttataaggacggatgtgaaaaaagacatatttcgatagagatgaagacattcttgaagtggaagatactactatacaaagtactcacgaaattttgaatgatatttcaagagatcaaattcgtcaaatggctaatgtccgtgatgaaattgctaatcatatatagagagcaaatcaacgatgaagataatgagtggaatttattaactgttaggacttttttaatatttttctttaagagtggacaattattagttcatattttattatgacttttggcggttttgtgttataaataatgattttcgtgatttcaaaatacttgaattttttttaagatgttaatgagtattttttatttgatttttttattataatttttatatatttatctaaaaataaaaataaataagattcataatttttttatttaaaaaaaaaacaaaaaaaaaattcgtgctttttgtttttaaaaattaaaaaataaaaatggttacaaaacacatttttgttttatgtttttaaaattacaaaacaaaagtggttagagaacata

SEQ ID NO: 63274 - DNA, 1761 bp, Cannabis sativa
attataataaattatatagcactaataattaataaccaatcctcatgaaatgaagtaggtctacgtactttattttgtttggtcattattgtctttagtatctctcttttttttttttatatatatatatatacacacactcccccaatatagagagacttaaatctcattttgtgtctatacatataaatttttttttctttactctaaaagggtttggtttggttttggttttggttttgggtctaaaaatcttcaagtatgggaaattgcttggagtcatgcttacatagagagcaagaaaatgatattgatgataataataagaagaatatgattttggagcaagagcaaaaagaagattttgggtttgtgaaggaaagtagttcaagaaaagggagtctaagattgaagattgttttgagtaaagaagagcttgaatattttatggttcaacttcaaaacaaaggtggtaaaacattacaagatgttttggaagagattgagaaaagtagaggaaaattacttcatcatcatcatcatcatcaatctcataattgtaattggaaaccttctttggaaagtattgtggagtgttctgatgaggttgttgaaatgggtagatgaatttaatctttttttggtttttttgggtttagaatgaggtttttgatgtgggttttgatccaaaattgtaattatttagttaagtttttgtcaaatggtgaagcccttcttataaagttgttgagacttttaagacatttaaacactttttatttaggcttttgttttgctttaaacccacatttgaaacttaattagggtactaagttacttcttttcttcttcttttatttttctcttttgtgtgttgaagagtgtgtttcatacctatatatatacttgttttgcttattctcacttcatgtaatataaggctatttttgagtttttttagtgataaaaagttacttgttgatttacttgttaagaaatatggtgaaaaaagaaaatattataacattttagttgtttattttggaaattattagtattttattatttaattaataccattataaaaattatagtgatattctggcttctttttgtttatattcatctggactagaacattttttaactaaaaatatttatcaattttaataaaaatgtacaattttaaattagtaataaatggaggtaaacaactcattcttactcattttagttagcactcctatcctttcggtggtgggaccacccatcatcgatgatataaagagaaaaaaagataggaagtagagcgagctaataacaactaaaaatagcgctaatcaaaatgaggtatgtaatgtatttccactctaattagcgctagctctatcataaaggtagcaaaacaaaaaatccaagccttaaaatcatcgaatgcctctctataaagtagagcgagctaataacaactttacaatatttcttaacaaatagagaattcttatttagtgatcttcatttaactcagtacataaatggcataatattgtcatttttttttacaaagtttaatgtatagaaaaggtgaagttgataatgatatctacaatatcaattgcaataatttgttcatgttcactaaaacaataaaaaatagaacactcccacaccatataattaagcaaattaatttcaatactttggtgaattggggtcccaataattgaattttggtaccaaactttgctccttgaaaaaaaa

SEQ ID NO: 63275 - DNA, 2158 bp, Cannabis sativa
  modified_base (833)..(835): a, c, t, g, unknown or other
tctgttcaccaagaggcttgttgctgaaattagcagctcttccaagagctggtggtgcctagtctggtttataaccatggactgttttagcaagtgatcaatgttttaatggctgccaccctatattacatatggaaaaataggaacagttgtgttttcaatgcttgttgtttggcttactggttttatcagtagagaaattaagaaagttgttaagtttagagtgcttggtttagttgttaatggactaaaaagagaggatcaatatgttgtaaacatagttgagaattagtgaggtttataaaatttgttcttttgttcaaaaaaaaataaaaataaataaataaaaaaattcatatatgttttaaaattaaaaattatttgatttgatttcataataaattgagatattgacaaatgagttttttctttattcaatttaaaatataaaattgttacatttggaaaatagatttgatatttacggttttataatttatttcatttgaaaaaaatgaaatgtgtacaaaacaaggcacaaatccacatgggacatagacccagtttcaacacaaaaatttcatccactcattaatcgtccttaaaatcatctttcacggctttgcaaaaaaaaaacatcatagacaaggcattttaaataagtttattaattattaattaggaagcttctacaataatgcaccttctactattttgtcactaaaaataaggctaattaaaatttttgtctttcaaattttaacatgtacaaaatcatgccccctaaatttttatggttgttaaaaatactccctgaactattgagattgttnnntttaaggacttttatccaattttaataaaaaaaaaagtaaaatatggataaagttcaggggacatgatttaatacatgtcaaggttcgagagacatgttttggtagatatcaaagtctagggagtataatttagtacataaacaattactgaaatagtaaaattgaattaaattagataaaagtggagaatttttaatgaccagaaaagttcaaaaaacataatttagtataggttaaagtttagggaaaaaaatcctaattaatctaaaaaaaagttgttcatttttataattgtgtatattacagttatttaaaatatttttgtaaaattttagaaaaagggttaggtttttcttaatttttcaaaattttatactttatcttaaataattacaatatatatatatcactatataaaaaaatagattaaaaaattttcctcgtagccgaaacatttagagggggcaatcgttgcaactttttaagagtgttatatgatagtaattgctgaatggagaatataaaagaagattgttgtcgtgaatctcaagtgtttaatgcatggaaaaagcaaggctagtactatttttcaataaactatactatttaataagttatttataaaattataacataagaaattccataataataataatgtaacaaaacaaaaatcccatactccatcaacattatttaatttcccatcgatgtaatttctactttctaaaaccaaattcaattctatcttcttttgcctctctcgatcagattcattcaaagcccatttgtacaaaccttttgatgatagcagataatttaagaagctctttgattggggctttccatatactaaacccaataggcccaatctaatagagcaaaaatgaaagagatttcacttgacttttcaatttaatgcgagaagagttaaagcttgaagttattaaagtcaacaaggtcggcagatggtacttaggacataggacagtacatatcatcactctgaccaacaacattgattgattccactctaacaaggtcagcaactccggcaccttcttccacttaacaacacacctcaattattgtttatttctttattaaaacaataaataaataaacactactacaaaaattataattcccataaatttttaagtgtcacttaaaaaatttacgtcgatttataaaaccgacgtatatatcgtagtcgcaaataggtaggaatggcaaaggagtctgatttggcccaatctgcagctgacccgacccgacccgacaagatattgtcccgccagtcatatatatatatatatata

SEQ ID NO: 63276 - DNA, 1357 bp, Cannabis sativa
aatatatgtatatgccagtgcccacacacactatcatacacatagtttatagacagaaatttatgtatctacccttgttttgtacgactgattaataacattggcgtcccattaacattattattagttagttgagaaaaagaacttaatatattatattatcataagtgcaaaccgattaattagtttaatttctttttcttgtcatttttgtataattctagatatgataatatttggaatgtacaataattaaatgtttttttctgactagatataactgaaaggtttacggattaagtatctagtcctagctaggagatttttataatttagccagctatatagcatgcatgtagtttagctaactcttcctcgtatgatcatctctatcataagtccaccttagtttcatctagtttgtaatgatgacacacaagcataaaaattccgacacgtggcacaatcacatatagctggtcctcacaaatgtccaatattcaccaaggatggcctcttctagcccataacgtatgatgtcatagtgtcagctcgtaaccgtttgactaactaaggctgcttttcacactcttaaccacacatacatacattttttttaattaaaatatatatatataacttcttaaatgtttttcaaaaaaaaaattgacttactatcacagaaaaaatttcaatgacccgccgaataagaataatgcaactaactgcacgtgtctttgaacacgcaacttgatctttcttgttatatttagagaaaaagaaattaaccgttacttttatatcttttttgttatataggatagttatattatataaggtggtagaacgaggagttttagtttgaataatcagttaataaggcggaccttaatgaagatatagagacaaattatcattatatataatgtcgaatatataactgtggaaagactaatttaagtttaccactttatatacttgatttcaagttgactaatttatctcaatttcattatattatggtctccatatagtactacgtgttagatcataatttatattggatttatttgaatgtggattattagtcaaaatatttcaagttattccaagtgtgctatcatttcatagtttaaaatctctttttagtatgtatgccccgttttggtgtgaaaaatggtacaggtaaaacctaccccacgactaatttacaatttcattttgtactacttgacaatgaaaacattttgatgttaattatgtgtaaagtaatcttagctgagacgtttcattaattaattaacattaaagtctttccattatctattcaaagtaagacccttggttcacattaatt

SEQ ID NO: 63277 - DNA, 1153 bp, Cannabis sativa
tttggggaaaatggaaaactcaaatgaatcttgggctaatgacctgaccaacttcccaatttggggcaaggctatgggggtgccgaccgatctactgaccaagaacaatacaacaagaatggccaacaaggcaggggcagttatccaagttcaaaactcagatgtttcaagaatggtggcagatgggttttttcggttccaagtttggatgtccatcatgaaaccagtttgtccaggcttcccattaccgtattctggcaagaagatatggatagcattcaaatatgatgaattgccattcatgtgctttaaatgtggaagaattgggcatagcgttcaagattgcaataaagaaccaattaagattcacatggaggagaatgaagaagcagaagcttatggagtgtggttgaagacagaaaatggatgtagagatggctttcaaggaaaaagaactagtatggggcaagcaaactctcaaggcagattgatggaaaaacatgtgacagagggggcaactggcactataaattccaatatgtttgcaccattggcaaagagcacgaccggggaaagtgggaaaatgctaacagaggccaatactcacaaagaaccacagcaacaatcaaatcaagggggtctaagcgcaaacaataatcaccaggagggtgaatcgatatctcttaaaaaaagaggtatggaagagatgtatgaggatggaggaaaaggaaagagacgattggtggaaactatggaggaaattggatatggaaaactgaaaaaaataagccactcaatgtacaacgaattaccgaaccaagggctgtatgacataccagtaaattacacaacggaagctcaattcttgagtgaagcaacaaattttgcggctggtagtacttcgaatgaggtagctaaagaacatagaaggaaagtctcggtgaagaaggacccaaaggcaagaaaaggaaagatggcaaacaaggtggctaaggtttctcaacaaggagattcggaagcgacaaagatcatggaagaggcgaaccctgaaactcagggtcgccttcaaccatgaatctattactttggaacgtccaaggtttgggaaacccttggacggtccggtcattacaatcccttgtgagttattaca

SEQ ID NO: 63278 - DNA, 1656 bp, Cannabis sativa
ggcaagcatacatcgactccttcacccaaaaagctgaagtccatatcaggattggccgaccgtgtctgataaatggttctcctggcgatgttgtgaccctttccttggtttcagtctccatctctttgagttttttgtcatggtcagcctagagggacttgagaggatcctcaagctccttgatcttcttttggtcggcctgatgctacttttcagcctcttcttttatgcgagaaacctcggtctcggagtaattccactttttggctaaagtgtccctatgctccctggtctggcgaagctccatctcgagcattttagcccactgagacgacctatgatgagtagcaaaggagagaagagatgcctgggagaaggaagcaaattaaaaatagtaaaggtgataaaatgaggaaaagtgagaacaaggagaaagggaaattaacctgatgtaaaagtttgtaactccttttggcaagatcctcagagctgcctcgcgtgagaagctcccaatcaccagacccaagagttaggaagttacgccaaccattggtagcatgcagtgagctgatttacaagccttcagtctcgacctcgaggggtaggggacaggagggctcgagaagaaccatttctggatgagaaccagagaatttgacttggtgcacagacccagtgggttgttcattggcactcgttgcagctgagacctccttctctagagacttagttggctcgatggtgagcttgcctaaggatttcttcttgttggccttggttttggtccttttaagctcttcagtagaaccataggcctcacaaacttggaaagctctcttcttagacttcttgttgactgggcgaggactcttgaacatgttctccaaatcctgatccatatctgtgaggagacggaagcacattagcacttaagtaaaataaataagtgaaaatggggactaaactcccatttgagaaaaataccataattttcagaaggtgacgagggaggactataaaattcactaaactccctagatcctgtgatcataaatatgtcataagggtttagtggatcgaaatccccatttgaatctatatgacccgatctatccaacatagtctaatactgctcggcaatcccatagtatgaactaatgcagctaatctaaacgtggaatttcgggtactaactatcgaacctatgtgttatgcgatctacgagaaagggattatcgactatctcggaaagatactaggttgttacgttaggctctaagcactgtgggtgaccacccacattgattacatcaggatgctgcttcttctcacggggcagttctctgaagatagtgtgcacgagccacgtagtccacgctctcttcgttggctggaactatgaccttttgccatgaagaatagttgggtactttgtagtcacaaataaattcatccaaggcaagaaggtcaacattcctcagattaatctcattgcataagaagtctgtcgatcttagcccaaacagaagatttaacaagattttatgacgctcgactatctcaggagtaggaactggccttcgaggaaccgttgtgaacagataatagtttaaaaagcgacctcaaaaatacaaatcaatatatttcaaggttaag

SEQ ID NO: 63279 - DNA, 724 bp, Cannabis sativa
aaataaatactaaaacttaatttttttacttaattattactttataatgtgcatttttatacacttatcatgtcccatggacacatggtttactcttgaattgctattttggaaaaaattccaagcaacaataccacacataacttatttatttctctatatcatttaaatattatatttattataatatattttaattatacaaacaaaaaagtttaatatattaaatgaaaaaaatagaacgagaaaagtgaggaattattaaaatattgtttaaagagtagagaaacactaatattaaattttgagctattttagttcacttttttttttttttatgtaaagtaatcaataaagaaagagcaataaaaataggttacaattacaaagacaaatttgaaaaagaaccattccaaaaaatctttctatctaagcctaaaaatagttttgaaccaaatgtataagatccgagagggaggatctatctctccatttgtgcttgatattgttaaaacacttgacagtccgatcctacctcttctagtgggaagtgaaccgttgcacactaacactatgtttggtgagatggatggagaggataaaggatggagagttgagggaagatagagaatatgaaggagggatagtatggtagttatcctttcaagttgtttggaaagaaagatagagaggtagagggatatgttggaaatttattttacca

SEQ ID NO: 63280 - DNA, 964 bp, Cannabis sativa
ccacgcgtaatatcttttttttttttttttttttttttacaaaatatagggcaactattaaaggtaattcaaaatgctataagattgaaaccctctaggttgcactgcagcgatatgtacaatccttgccaagctccaactcactgctcctctagcttagcttttcccttacctacacaaggtagcaaactgatgagtaaacagactgagtaagacatgcataacatatatataagaaatactatagcggctttatgcttaagccgtcctgagcccaacaatcgagctcaccaaaaagttaagaatgttctcaatggaagtacgaccactgtaccatatgcactaatgtaccaactccatactcgtgttggtagtgccattattgtactcctaggagttactaagtgttgtactacatacacaacgtacctcctggtactcgtgttggtaacactataactaccctaaaatcctacattgtactaacacccttaaaatcacatttttcgttagtgttagtagtgtaaataattaatacaatgatacattcacatatatattatttatgttgtattatctcgtttccgtgctcaagtgtgtcggtcagtctcagtggaattacagctcgacatttcatagggccctaaatcacaacatttgtaattctagtgagagacacgctaaaatgcttatcggagacttattatttaaactaagaataaccatatcgatgaataggatggtaataccccaaataacacaaaaatggggaaaactaggcccaactgtcagaccggttcccaactggaagtctaattccctagggaccaaccggtcgaccggttgttacaggtcccctgagccagtcgaccggttcagcactaggaacctcaaaaatgtccccttgacctcaaatcacacccaaacttcacaaaaatctacagaatacctgtatatactccaa

SEQ ID NO: 63281 - DNA, 1215 bp, Cannabis sativa
catcactgcctgaacactttgttcctcacctagtcgtgagaataagtgaagaaactagtccacaaatgaccctgcatcaactggaatcatagccaaacctgctaccctccaataattgcgcaaaatcacagtccactaaacaaacacaaaattgattcagcttccccatgatgaagactgcgatgcgtggagtcgttgtaatggattgatgatttcatggatcttgcattctatctgtcctaccattgccgataacattatgtacatggaagatgcaatgtgtatttggtctgaattacaggagcgatttcatcaaaagaatgcaccaaggatctttgaagttaagagatcgatgcagacaatgactcaaggtatgaatgatgttacttcatactagacaaggcttaaaagtctttgggatttattacaggagtatagaccacaacctgtttgtacttgtggtgctatgaaaactatacaagaatgtggtgctatcaaaactatacaagaatatcttgataaggacaaagtgtttgagtttctaattgatttgaatgaatcacatattaatgttcgttctcagatcttattacaacatcctctcccaaatgttaacaaagcttatgcagctgtgacccaacaagagaaacaaagaggaattataataccttagtctaaaactcctaataactctagtgagaatgcaggtcaatttgcagaacaattttcaaggaatggccctagaaataggagcaacaatgataatagacttatttatactcactatggagttcatggccacactgttgctaagtgttacatcgttcatggttatccaccaggccatcgattgcatgggagatttcctaaggaaattcctaacaaacctagaaaccatcagaatcgatctttggcaaatttttcaactgctaataattggcgtgaaggttttcctgaagatcaggatctgatttctcaatgccaaaaacttatgacaatgatggcacaaagaatccaattccaatctcaaacatctccatctcaaccatttggatccccaactcaaaatgatcaatgccaaaatgatcacaatcagcagcctactgtttccaacatttctaataatgttccttctattccaaaaacttgttggatcatatacactggtgccacacaccatgtctgctctaatccttctttatttacttttatcca

SEQ ID NO: 63282 - DNA, 678 bp, Cannabis sativa
ctctactctcagtaatccgccattatcatgcttcttctactctggtaacacgcctttatcttttatcatcatcattgttttccttcaaatttatatatatatatattgttattcttattgtttggctcccaagaaaatcatgcttaatactttaatttctcggaatatcatatcattatttcaccatgaacatcttttaatcgacgatcgatcactgttttttggcagttagagtacgctcttctcattcatctgccatttttatttatgctttttcttctgctaacgagctttaataagacgtaggcagggcattgagttgtttggttcgtaagaaaatcatttcaccagagagatcttctctgtttctctctctttctcatgatctaacaccattaatctgccatttttatgcttcttcattctcttctggtatataatgatatgtttaaactcatcattgcattggattgctttggtttactcttcaaacgccttattaaggagaataattatcgtttttgagttgtttggttcgcaagaaaatcatgtattattttcttttctagttttctcggaaaaccattttaccagagtcagagaacttataaacactgcttttatttataatttcttttttctttttgtaactgtggacttttaattatcactccaaaa

SEQ ID NO: 63283 - DNA, 827 bp, Cannabis sativa
ttgtcaaatgggaccactgtctccaatgaggaagctattattcgcgaaatggagtcgcacttccaatcgcttttcactttctcggacccttccgcagctgacatgcaagctgttctagaagggatcgaccgttccttctcggttgacgacatacaccttctagaagttccttttacccacaccgaaattgagaaagcttttcaccagctccccctcgataaagcccctggtatcgatggtttcaactcccatttctataaggataattgggcttttctcagaaatgatgtccttaatgctgccctcagctttcttaatggagatggggacatagcacccctgaacaccactcttatcaccctcatccctaaggtaaaaaatcccactgtcctcacggaatacagacccatcagcctttgcaacattgtctacaagatcatttcaaaggccattgctaatagacttaaattggttctcaacaacttgatttctcccaatcaaagcgctttcctccctggtcgccttatctcagacaatattattatagcccaggaagttgctcactccataaagcttaggactcgtgggaggaaaggttggatggccgttaagctcgatatggcaaaagcattcgacagagtgaaatgggctttcatcgccgcaattcttagtaaattttcttttccccgtcggttcattaatttgatcttggcttgtctctccacagccacttttcaattcaactttaacgggaaagtggatggcaatgttgttccgaccaggggcatcaggcaaggagaccccctctccccttatctcttcctgct

SEQ ID NO: 63284 - DNA, 1956 bp, Cannabis sativa
tattcttggaaaagagagagtctctgttggagcagtgtgagcaccatcttgagtggaagatgtgttactagatgttacatgagctgtgttatctgcaagaagcacattagtaggagcaatagcaacaagttcagcattattcaaaatgtcaatttgggtgggagcaaattgtagagatgcagcagtagcagtctagagtgtgtaaaaccaggaggagggaaaggaagagtggttctctgaggtaaaccagaggcagatgggggaaaattgtgggagacagaaaaggatgatgaggaatgagatgagttttgagcagcttcaacaacatatgggaagatcagttcatcaaacaggatatctctaatagagtattaaaataagaaaaacaattgatctataagcttcatcccaaaacacagtgcactctttaaagtctttaagtattttaatatattcctaaaatattttgatatttaagaaaacattttagtgtttttatttttaattgtaaaattttttaaatttagattaatttataataacaaaaataaaatttaaatagttactttgcatataaaaaactgcacaataaactatttgaacattcatgtgaaataaaatttaaatagttaggaaaacagtacaataaactatttgaactttaatcataaaatttaggttcattgttaatgagtggagtaccatattatttacaattaattttgtgaaaattcagtgaaaaaagtttcatactttgaaaactttgctttgcaagttagtctttttattaccttttcttaaaaaaagagttgtctttctatttttattggtacaaaacaaactgataactgatattaagccagttagttaagcttaagctgcgagccacaaatgagccgatcattaaacgtagctgtgatcggagccggagtggctggcctctgcgccgctcgtgagctaaaaactcagggccaccgagtcaccatcttcgaaaaagccaatcaaatcggtgggacgtgggcatacgacacacgtgtggaatccgacccactgagtctggacccaacacgggaaatcgtccatggcagcctctaccgatctctacgcaccaatctccccagacacctcatgggatttctcgattacccttttgagaagcgcccaaatggggactccagaacattccctgctcaccgagaagtgctctgttttctcactaagttcgctaatgaatttggactcgttgagttggttcggttcaactcggaaatcgttcgagttgagcgagttggagagaggaatgatgagtggctcgttgagtcgattactcggggatgtgactcggtgagtggtgaagtgtttgaagctgtggttgtctgtagtgggaacttcgtggagcctcaaattcctgttcttgtgggtgagtcagttgactttttgtgtattttgactcagccatatatttataggaacatcattataaatattttatattataaaaattctgaaaattattgttatttcgaaaatttttatcagccaaataactattcaaaatttcttattaggaaaataatcacgaccaaaaattacaatgtgccatcataaaacgatcataataattgtttttacaactataaatttacacttttgcaaattttatactttaatgttgttagtttggcaaattcttcaaattgattcaaacaatcgggtgtaattttttaaatttctgtaaattattttaattttattgaaaattggtaggatgtgtaagataactataatgtacatagttatataaaaaaatttggactgaaatttcactatataccgaaaacaaaaaagtccctattatgttttatcaatagaattttccaatatttatttgagcattttgactcaggaatagagaaatggcgaagatatcaaattcatagccacaattaccgtgtt

SEQ ID NO: 63285 - DNA, 609 bp, Cannabis sativa
  modified_base (76)..(80): a, c, t, g, unknown or other
gaacaaaacccagacctaaaatcaaaactggaactgtgactaggacccggacctgagaccagaaccgaacccaaannnnnacccaaacttagaccaaaacctggaccaagacctgggacaggactgggacctgagacttgggacaggaacctaaacccggacccgtactagggcctggacttgaccttgtcctaaaccctccccgggacctgagacccgcgacccagaccaggatccagaccctaataacgacccaaacctgaaaccagaccaaggcgaggaccgagacctggacccgaacccggactaggacctggactaaaaccaagactcgggacccgaacacgaacctggacctagaccaggcgctaggaaatggacttggatgggggacctagaccagggacctaggccctggaacccagacccagatctaaaccggtactcaaacccgaactaggacctgacctggacccaggaatctgaagtcggacctagacctagacctgaaaccttcctcagacccaaacaaggataggaacctggacacgaacccatacaaggacaaaacccgaacgcaaactcgaattaaaatcgaacctgaactcg

SEQ ID NO: 63286 - DNA, 726 bp, Cannabis sativa
aaaaaaaaaaaaatcaaaagaaattagactacagaatactcttaaatgccaaaatatatagaagtgtctaccaaaaaactcatttaggggatatactatagagtttttcaagaaaatattgttagttttttattaaaaaaaatacatatgatatataaacttaattgcactaaatatgacattttattttttttaaaaaaaaacttaaaaatttgagataaatatcatagatgagaaagaatgctataaaaaactgaaaattcatatataaattttacttctgtataattaaaatcagtttcttgataatatcataaaaaatttaagaacttatacataaattttacttttatacaatcaaaaccggtttttagaatacgatacatttaccttctctagtttatgcttcaaacaaaagaaaaaagagttttaaaactttaaatatgagatttagaaagatatttacaataatatagcaaatctatgcccaataaaaaaagctcaaaaaaatttcataaaaattaggcaatgataaatctgctatatttaagtaaaaagtttttaaaatcttatattaagtgtaatttcttataatttgtaaaagaaaaaaaaattaatgatgcttagtaagccctaagtgtaggtctaacgtttttcagtctaagctagctctgctaataaatagttcataatgtttgtgcaatattattggattataatgtccca

SEQ ID NO: 63287 - DNA, 1969 bp, Cannabis sativa
acaactgacatttgcaaaaacacggttttccatatataaatatatatttattgtattttgaccttgaaataactcaaaaattttaacaaaatatttaccttggggctttgacagagacttgtactaataacgtgttataaaataatatataataaagaaagaaacaagaacaaagaaaagacaaagagaagaagagaatgaatgagatttttctcaattatttattttgatggagtaaattcctatttatacaaaaatatgactaaaagaatgagaaactaaatttatgaaaatacaatcaagcattaatggtgataattaatttaataataatttagacatctatatataatatttcataacacaataatattaatatggtatattgccatttcattattttaagtaattatatgtgcatttaaaatttgagtaatgtaacatattatttaacttgttacatttattttgaaacttgctattttaatggaaaaaacattatcatattattattaggtgtaatgtttttgcttatcaatattctttcatattagttcttttaattttggtatgtttactcacgggattagggaatttgtttgattagtaattacttaaagggaatgagaataaatggtatgctattaattcctatataattgtttactaaattttgaaaaaagagaaagtagtaggacctacacaaattaggaaaaaaaacaaaaggaaaagttctccccgtttttatagggaataccttcccctttctctttcctaactattttttttttaattctaattttattaattaaaaatgaaaaagataaatataccttttaaaaatctataaacagaaaaaaaaaaaaaaattacatgttctaataatgataattttatcaaattaaagcattctgattactttttctagttatgtaaacaaaataatatgattttggttttctttccggacaatttagtaaacagcataataaaatattgttttcgattattttcgaatttaaatcgatacatttattccattgattattttgattctaattacaatttaataaacgtgccataaattttttaaggaatgtgaacaaactacgtgaaacccaccttaatttgtgattgagcagtgggagtggcaatcctcctatactcattatttcataaattatgaattattatttttacccttatttaattattattataatttttttagaaaagttttacatatatatcaaatttgaatggagaatatttttgtaacctatttcgattttaaagtaatgtaaacatatagcaatgaaaatactgtttatttcaattttaattcttgcaagtcaagtaaataattgcttttttttattccgattcatcaattcgattgagagtgaatctgatcgattgttaatgaaatgtttaattattctcattaggtgttagtaaatgtatcattagtgtaaaagactcagatagtttagttaaattggtaagatatttgtttgggattataagtagttcccttgcaatattaagtagtggcagctggtgtatatagtggaaacaatcttttaagtagtagtggagttgaagaagtcacattgatgaaaacactagcttaacttaacacgatgagttgtcccactcactctcttccctaatttcattatattttctctctatatccataaatctgtcattgaaaccttcctcacctcacatcgaatatacaccactcaacacatatagtttgtgcaaaagtttttgtcaaatttggattacatacacctaaagtatggtgcttaattaagttaaaacgtcagtgcatcaatgaatgattaggatccatacacgtcggatttgacacaccacctacaaattcagtaagcttaacacatacgagaatggctaaacaatatattattaaaggcttatttttccggtggttttttttttt

SEQ ID NO: 63288 - DNA, 1131 bp, Cannabis sativa
agacatttaattctgctacaactaatgtaaggatttctaatctcttatgtgttatttgattgttttaagtacttcatattttaggatgtaaaattattatgtgataataaaacatacatgattagtaaattaagatcctgctaaaataagttccaacagtttctcgatgattctagagatagacgggagaacaagaaggggaaaaattattttgtaacttttattatttaatttcttttttttaattattttacattttaaaatacttttaataatataaaaataattaatattatgtagaccaataaaaatagatcatgtgtacactgtgtacacaacaaacagtacaagttggtatttaaaaacaacacactaacaaaatagtgaataccaaaataaattgtaagtttggagagttttatcatcaaaaaaatagtttgagaaattaagtgacacaaatcgtattaaatagtattctcgtcaatattcttaaataattaatatattaatgtccaatgtaagattataacatgatctttaacatgtattaaatattatattattgtgtgtatcatgaatttatctatttataactatattaattaatattcttgtttacattttataacattgatgttgaatcagtgttaaatataatcataacgtgtcaaaaaaacataaaaattgccagccttattgtatttatatattatatacttcttatttattaatttattataaacaatatttacgttagttttagtagtatttgcaattctcacacaactaacacaattgttttaactaattaaaaacaatttcttggttagtcagtttgttttaactgatcacaactagttattagatgttgagtttatgttttgtctgttacaacttcacttgtacttttggtagttgttacttattttgtatttgcaatctattaaactagagtttcatgtcttttttgtaagaggatctccaattaaatttttataagaggtggtgtataggtatattttagtctaaattggtcatatatgctaaaaattaccttaaatttgacacaataaaaaataatatatatgagtcaaatttatagtataaaaatattatattttttatttactc

SEQ ID NO: 63289 - DNA, 1207 bp, Cannabis sativa
tttttttttctaacttgtctcacattgtgaaaactaggttaagttattaggtgagaaaataagagcatcattttctatttataggatttcatctagggttagcgtttgaattatatggaattaaaaaagataaaaaaaaaatgctcaatttaaaccttaagtggccgaaccctatagtgggccttacagtttccatttaacttatttattaattataccttacaaagtctcttaattaataaataaatcctaaatcatgtctttcctctcaattaagctcttatttagtaaaaattcataaataagacttcttcttatttagaattttaattgattaattaaaactaattaattgagtctacaaaagaatattatctcaaacaatgtggggagcatggacctatataaccaagctcccaataagtagattcaaaatataccaaaagaatttcccatcttatcaatttaacctgactctaatatagattcagaattgcactcatgattacatagaacgctctatatgttccaaatatagatacggtatgaattatccattatttcaatctaaataatcaaagatttttctatagatgatttacatcgagtaatgacaaatttaccgttctacccctcaatgtattttatccttaaaaaacttagcttcctataaatgatatttcggtaaactaagataattactgaaataagagctcttctatttatctctattaagtcaatttcaaagtaaatcatcatttcacttctatatagttatagaagctatagattctgtatctatgattagggatcccactcaaatgtactaccacgttcccaagatgtaagtattgggaagatccatttggttaattttaacaaacaagtcaaaaaacacaaataatacaattaagttagaacccaaccatctcaagattaagatctattgatcttagatcaactaagtgatattgacttagaaaaatataacggtatgtttaattatgatatcttattcattgtcaatatcggtccagtccgatgtatactccatacaactgatactagtatactttgctaatgccctagaaaggacattccacatatcaatgtgtaagtaacctttatcgctgattatcacgtcagtataaaaccagtgcattgataaattatgggactaaagtctttgaagcatataatcacaatt

SEQ ID NO: 63290 - DNA, 584 bp, Cannabis sativa
gatcattctttgttcattcaaagaaaaggttcaatcatcatcatacttcttgtttatgttgatgatgttatattggctagtaatgatgtagcagctgtcaagagcttaaaatagaacctaaataagagattcaagttgaaagaccttggtaaattgagatacttttttggtattgagattgctagaactaatcaaggcatttttctatcccaaaggcactatgctcttcaactccttgaagacttaggacaattgggatgtaaaattgctagtactcctatggaagttaacttgaaacttagccaagaaggagaggaaaagcttgctgatcctaagctttataggagaatcattggaaaactccaatatctcaatataactaggcccgaccttgcctataccgtgaacaagttgagtcaatttttggtcagtcctcgaactaatcatatggatgcagcaactagagctcttcaatacattaaagggacacctagacaagggcttttttacccatctgattcaaaaattcagcttgtggcttataccgatgctgattgggcagcatgtgttgacacgagaagatc

SEQ ID NO: 63291 - DNA, 987 bp, Cannabis sativa
  modified_base (744)..(749): a, c, t, g, unknown or other
tgcagagaaggaagtggctgcctcgactctgctgatagacccttggtgctgcaaagttgatgcgtctatagttggggaagatgctggctttgctgctgtccagattgacgagttggacattgggaactcctggatttctatgggatgttccaaattctatggagtgcttgaaggtgatctctagggtatcgctttggcgctgcatttggctagggagaaacaggtgaaagatgtccaaattgaaacagattcattggttgttgcctctgcttttgcggctgagaggcttccctttgggtggagcacttttcctttgtttattgagtgactgaatttgtgtaagtcttttaacaatgttgttgtgttacatgttaatcggaatgacaatgtcttggctaataaactcgcctgctgggctaggttgcataaagttaaggcgtttggtttgttaagggaagtagccgcctgttgtggctactagtgtatttcttgtttttaataaaagttctttaaccataaaatatatatgaaaattctacaatgcaccctcttaaaatggatacattgatgcacccttatctgatttagcacccgaaataattttttagtcaaatttttttccatggtcatgtacgttatagtcatttaagacaacctgcaaaattttaagaaatttggaaaactttaacacgccgaaaaatacgttcaaactgtgtgttgcacgtgtgactattttattttatnnnnnngtaaaatagactgtttgaacattagtttttatattgtaaattattctgaatttctcaaaattttgtaggttaccttatatagctataacgtacatgaatatgaaaaaaaaaaattagactaaaaaattcttcgggataccaaaacaagtcaagggtgtatcggtatttctcttttaagtgggtccagtgtagaatcacccaaatatatatataatttgtttcttcttttttttttttt

SEQ ID NO: 63292 - DNA, 1251 bp, Cannabis sativa
atgagccacgactactaaaatactctattggtagtcaccaagaagacctcctccaatataaaacagaggagatgactaaggcctcctccattctgaagccgaggagatgataaaggtctcctccattgtaaagccaatgagatgataaaggtctcctttactataaagttgaggatttaatgaaggcctcttctattgtgaagttgggaagatgatgaaaacctcctatggtctaaagccgaggagatgatggagaaaccagtgtattgttaacatcattttttgtaatattccttttgtgtaatcttttgccatctatctccttattcaatggctatgatcaaacattataaaccttaaatagcaatgaaattactcatgttcattgagaggagatttatcatctttctactctatttttcaagtttttctactaagagggatctgactctcaagccaatggggtatctattacactatgaaatagtacagtgatttactagtaatttataaagagtgaaagactataaatatataattgtgtagctattattaaatatggaatgagaaaatagaactttagtttaattggaatttggcactgactcgaagagtgtattttaggagatttgtcctttctcaaagaagactattatctatcattggtgctttcattgagttgagagctctgcaatataactgacaaagaactttataaattcatgagatccacgttgatatccatcgagttgcatatggatcaattcttcaatgctcaactgaaggcaatacaagtgcatctcaaggaggaattagatggtagagttgagcgatattgctcatcagagacatctttggctccctcagtttaggcacttcctactttgtcagatgttgaaaaccacatcgatgaccctattgaaccaacgatcaacacgaaaccattggagatgcatctcgatctcatcactgtcgatgtttccgctagatctgatctaggtagattgcaattgactctagttcaatatacgatagtagctcgcagatcattgatgccagagaagacgcccttagcgcgcttcaacaaaagtgtgggatctaatgattttgccacctttagatcgttcagctagtgtggtcccacaaccgactcatggtccttcatcgtcaatggaagtgactcgaagaacactagtgccagaaatgatgaccttagctccaatgaccgatgttagctccgatatggtcttc

SEQ ID NO: 63293 - DNA, 1051 bp, Cannabis sativa
catgaagaagatgatcaactgactaggcagatcagattagaattgatttggtcaacaccatgtgcactgattgtggacaattaatttgtgacttaattgcataatattcactatagaaagtttctccattaatcatgatacaatactctgttacgatctggcagctggaatttctttatttgaacgtaggaataaaagagaaaattagaagggtctttcaggaacacgctgtcttgtctttccagtctcgtggtactagacattcttttgggtacagctcattgaaggcagaaggctttgcaattgcgaaattgggatacattcctggaaggacttatccaagtggacttggcccactttacctttgttgaggatcccactgatgggtcttcgatgctgacctagattccacgtgtccaataccgaaaacggataacatttacccccaagcttcgagaatgctgtgcatggtggcaacttgcatcactctttcaatatggacatgtggaggctaaggaataaaatcatgatattttgaatgttactcgactgcgcaagggggcttccatttgtgatgataatacattcatgtgtcaatcggatgaggatggaagggctcgaccatcgaggagtcattttctagaaacggctacattttttacgactgttcacttcttggcgcgaaaattgaaaaagggcatctttatcattggtttctgccttgactctggggaacatcgattgcgaggatacacatggatcgtggaacctcttagacgttggatgcaatttgtgtttttgaaagtctgattgtagaccctccattctctttcacgtggatcgcttctcgttggtataaatacacttgacgaagaccatttaccatttttcactcatttcctaatttttcaaaatttcaaacatcaaaccatttagagcttgaaaatttctctgatcattcgagaccaaaaactaaactcagaactaatttattctcagcaatttggaatgtgctgtcgatttctacattcatcttctactaaggatcaga

SEQ ID NO: 63294 - DNA, 949 bp, Cannabis sativa
atattgttttagagtttggtagaagattttttttttttaaaaaaaaaataattagaaaataaatttttgtgtggtagtagaagatttttaaagaaaataataaaataattaaaaaataacttttgtatatatgataggatatagattttttaatatattaattgtatattattttttcaaattttaatttaaagaaaaaagaagccaatacgtggccaaaaaaaacataataactaaattgtttgttgagttatcattttttttttaaaaaaattaaatgaattaagaaaaaaatatattaattgtatattattttttaaaattttaattttaaaaaagaagctaaaacgtggcaaaaaaaatctaataattaaatattttgttgttatcatattttttttttaaaaaaaaaataaatgaattaaggaaaaaatatattttatattaattaatatatatgaaattaataaaaaattaaagaaaagagagaattaaggaggaaaaagaaagatgactttaaagcacttttaagccgccacgtcaccgcttcatatttctcctttatatatatatagattctttttaaatatcttttcaaaaaaaatatcattactgagtatttgttttaaagaaaaaggctaaaaagtattattgatgtttaatattatttttgaagtcatattattattagtgtaattaaatattgtgtgacatataaaaataattttcaaaaaatattactaactaattataaaataaaatgcgcttgacactactaaaatctaatatctaataataatatattttttttacttcaataataaatatttaacatgtccatatgtcaacatgactactttaaagcattttagtttggcacaactgtgttgtgggaaaaagcagctgtagcagaactgtgaaaaacactgagctgagtgtttggtaaatt

SEQ ID NO: 63295 - DNA, 2206 bp, Cannabis sativa
  modified_base (744)..(745): a, c, t, g, unknown or other
aaaatacaggatctattttatcatttaacaaaatagagggtctaatttgtaacttttacaaatcacagggtccaaaatggtatttacccaatttatatcttattcattgaataatggttccttttagtattatttaattatgaattgaactgagatatgctttctatacctccgagttgggtctggactaagacgggctagcctacgcttagagcccactgatcaatttagaaaccgaaaaaattccttttaaaaatacacatattttttaatagtttttcgataatatcttatatttctttttaataatgaacccaataattttctttattcctaaagtccacacagcctcaggtcgatccaatggctaaactttattaccataaactatatcataaactcaatattatatataatagagaaataaccaggctagctcaagtggctataggtgggtgtgtgtgtgtgttagaggttttgggttcgaatcccaggtaaaatatgtttgtaatatataaacacttaaataaaatatatatataatagagtaatttgcaatataaatacttaaatttaactctcagttgaggataaatacctaagttttattttttatggtacctaaattatatttctgaaacttacctgaacattaagagtcaaagttaatgggcacatgatagtctctgatttgtctagattattaaatttttattttttatttaaaaattaatttaaatctannaataaaaaaatgacacgtaaataataatttcacacttaatggtcagctagctacctacaaaagtatatactttaagtaaaaaattaaacttaagtatttatcatcaatcgaaagtcaccgcaaattactttatgtaatatcatataagatgttatatctacatactttaaataaaatataaatatgagtgaaattattaattttattaaatattttacataaatatattttaagagagagaacatattcaacatgtcttgaatcaacatttacatgataaattataataagaatatatatacatatatttatggaaatgatgatggataataatcattttgaagtttatataggtgtaggtggggggtcatgatctcgacaatgatcttcttctatacaacctctttggtaagtgttatcactatgtcgatttttcatacaattttgtggatgtttgaagctacatcctgcaatttcatctcttgtaattgttccatacccaataattcttccatcaatcaactcaacattactacatccaattaagttgattatacaaatagcaacaatcactccttttgacaaatacatattctccattaattttttatttgaagtaatattgtatgatcatatgaattaatgtatatatgtatatgtttgtgtgtatatatatatacatgcttttatgacttgagtaatactaatattagggtttgcttaaactgaaataattaaggccacataatgtagcctaatttgctagctagaaaaattaaccatatattgttatatgttacaaaaataaatggaatatttttgttgttagttatagttagtttatttgtttctttcttattgtctacattaaacttttaatattttaaatttattataacaaaatttattaattagatgatataatgcaattacaaatttattagttttatatatctatctatatataataaatggctattggatggaatttgttgtgtttaacaaatttgttgtgtatattcaatttactttaacagtttaaaactaacacggttaattagtaattatttatattacaaatatttgtgactattcaaaacagtgcaatatcaatttttttattagtattattaaggagactattcaaaacaatacaatatcaatttttttttttttttttttttattatcaaagagatgtgttaacagggacaccaattcatccaacaaaataataagttcaaaggcaataaagaaacaacgaccaaggacataacatagagaaattgttctaagaaccgagaagaagtagaaagatattgaaattacaaacttaaaacttgcaaatgtatatttatatggtgggccataatcctattaaacacaattctaaaagaggtttggctctaatatatacaccaaaatggcatcttttttcatttagcaatgttgtctacctatt

SEQ ID NO: 63296 - DNA, 927 bp, Cannabis sativa
gtccaagtgtgtcaagtttttacaactcataattctaatcttctttaaagtgatcaaaggggcctgcatgagttgagctcttgggagtaataatggtattagttcctcactaccatttaatacaagcactgtcaatacaggaaagtaatctcctaacaatgtcactttgagtctcttgcacctatcaaaattaagattcttaagacgaggaaaaactccaccttccataaatgaccactcttggagataatacaaacccccaaatgtcaagttctccaaagatctaaagaatggttttgtttgtattgcaacagaagaatcaagactagtagaatgataaaactctgaacctattcctaccacaccacaatatttaatcctaaggtctttgagggaagatagctgtcccaacgacggcaagaagctgcaattagaacaacatgaaatctctaaccttactaaattagacaagcagcgatgatctcccatccagttcgggaaactgttgcctttgtagttctcaatcgtaagttccttcaggtttggatgaggctggaggacactgagtagctctctttgtctttctttgtggaagtaatcaggttcatgaccaaaaccccatttcaaagatagctgactaagaaacttcttactctttaataatggtgcacctgaaacttcctcaaggctactcacattttctagtcccttaatataaagcttcccgtgtagattttgaaactctttcaacagttcaataccaccagaatctctatttcttcccacaacaaatctattaagtgtttggagattttgtagctttcccaattgcaatggcatttctaataatctaggaacactaagatgtcgcaacttaatcaaatttcctatatcatttggtagtctagtaacttctatacattgctc

SEQ ID NO: 63297 - DNA, 580 bp, Cannabis sativa
taaacaatttactcctccgagaactctccaattgattgaccctccatcttaaaaacccggttttgggcatccatcaatttaaatactccaatttctttttaacagcaaaaaatctaatttgattgaaaacatgctatcgaaaaattactacgcgtaaacacaatataaacatgtatgtgtattatttgattgaatacttcaagtatagcaaaagcaaaagattaacaagggaatcaagacatattcttcaaatccctaacaaaagaaattgttgggctcaaaatccaaaatattgcccaaagagcactaaaaaaaagccccacatatgaaaaatgtaaaaagagggaaacgagagatagcttagaatcgatgggtggacgtaggaacaatggtgttcttacttcaaagttctcaggaagaagaaaaaagttacacttttattttattttttaaaattcaggttgattagttaattaagtgaaatgaaacagtttccatgactcttagatttgagcattttcattttttttctaaaaaaaaataataaatctgaaaatagtaatttcattttaatgttcta

SEQ ID NO: 63298 - DNA, 2237 bp, Cannabis sativa
  modified_base (1779)..(1783): a, c, t, g, unknown or other
taattaaaaagtaaaattttaattattcacgttttttcaataacctcgttgattagcaacgagctgcacagtacgttgaaaatcacgttaacacgcctatgaattacatgggagctgttagaaaatatccctattgtaaataacgttctaataacaaagctaaaaaaaaccaataactagttactagttatcaaaatttccaacttttctaaataacattccaaagcattctcaaatcattcccactttattttacataatttatatacattgtaaatgctaaaattaaattctcggaaagctatatttgtattataacttttaattttaaaagattaagttgtgtaactactttttatagacttaaataaataatatgaaaattaaaaaatgaaaataactctacctctcttatattacattttatataaatattaactcacaatcatattatatagtaattattacataaaactcttaataatattatatattctactcataataatatatataatatatcataattttaatcttaaatattatattatttaattaataatataacatgaagatctatgtatagataaattgatgaacacaaaaaatacaaacaagaatacagatccgtatagtgcacttacgaattgaagattctaataattggatgagagagatcttgcagatgtacactggcagtgttcatcaaagataagaaggagaagagagagggtacagcttaatcaaatgcgtcaagggaaactgaagttatttatataatatatatgtatgtatatgtttatgcagatcagcccttgattttgatgtgtatatatgatcgaagctgtactctctctcttctcccgttagtcttgatgattataaaacaaaatcaagaactgcaagttagcacgatctattaatgtatatatatggaatatgtatatatatatataatgtatagattgatgtataataagcttgttatatatagagataaggggaacgactttctgatagaatagtgatcaataatagttcatgtactgatcatgttaagcacacttgggccatatggctgttctaatacgacatataaaggtcaataattcaagcacacaagatggactggtatgcaacttgaaccttctcaagggtccccctccctagcctttcatacatgcatttccattttatcagcttcactatcaaaatatatatatacatatatatatatatatttatacatattcaattaatgtgttattcactatctagacacaaaataaaagtactataacaaataccaagaaactgttatatatagtgaaacaatatggatcaactacgggtgtaatttttgtccctatccgttggagcatctatgttcttcgatcatataaaaaatcacaacccaaattatattttgagtaatttatattttgaatatattatgagaatttaatcatcattgtttgatataagtcgcacttgttaaaaatgatttgtcacataatttatgtgtcaagtttttatgtgatttatgtgtgcacatctcattactatatatttaatggaaaaagttttaacggttatatcaaatttacaaccattatgattacatttatttttagttattagatcactattgaataattgtgactaatttaaaaattaaaaataaataaataaataaataaattgtaacgtgataataacctaaaaattatttattttcttataaaatcttaatgaaaattaattatatttaaaattaannnnntaataattattaattaattttttacaatttgttactaaagaataactttttagaaattaactttttggacttaaattattaaaatatttataataaaattccttataatttaaaattattacactcataaccttaattaataacaaatagtaaaaataacattaaatataattctacagtaaatcgtattatcaatactttaagtgtcaaataagtgtgtcagtccaagattggttcaagtgatttaattttttttttatagcgattataaagttaaagataacttttttgccgcacttgatacatctgtacttcattccaccatctgtcatgtaattcttctctctcagagatcaagtcactttatccttcattctttaagttctaaattaatatctatgtatcaattaatcagagtggaattataaaaaaaaaattacaaaagtttaaaaat

SEQ ID NO: 63299 - DNA, 1138 bp, Cannabis sativa
taaatatgtttattttattttgctgttgttgttgtttttgcatttcagttgatttatttttgttggcaaagctcaaatctaaatcttaggtataaaactcaaacttagagttttattatttaacattctcctttggatttggttttctatcttttttcaaatgatctcaacttcgaaatctaatgcttattgatgtccatttatctcacaagctcattaagttattttttttactgagttgtgcatagattctgttgctatatttgatattttttcttaaagaatgcagttctcatatttcttctgcgttgtgctagcattgtttataagttgtttatatattattttctaaatgcttttatttttatgttgttgttttttgctattgcagttgaatgaaagaaatttgatttttagttattttaaacttcaaagttgattagaataagcttgctgtccatttctattctatttgtaagttaaacttttttctttttcagaaatacattattgatttggatatcattttagttgcaaactttgttctgcaatatattataataggagtttggattttttatatatatatacatgtgcatgtatataaaggcacacatgctatgtgttatccgtatttctaagcaagggatacatggaatttaaaagaaagggattagcctcataatttcctaaataaattcccttactgcaatcttgtcgcggagaatcctcacagagcgaggaacaagtttatcttagcttctcggatgtagaaggcgtgttgtctctcccggacctagagaggcccaaagatggaagcctgcgcagctagtacccgggcgggtattcgaagggcctaatgtagatgtcgactgcccaagagtattgcggatgtctacctttgacacaagccaagtcaccaagtgacagttatgctttttctgacacatgattagatcttgtcccctgtgtccaagcatggtagtgtgcacacctccatcacttttttgctagacgaatacaataaaggtgaaggcttttggtgacacgtggcttctacttttaaaggctaaacctttaagcaccacgtgtccacttcgtacaaatggtccctaattgtccagctgcagcatgcacg

SEQ ID NO: 63300 - DNA, 674 bp, Cannabis sativa
gcgctaggccctatttttttacccagagcttgttgtttttcctccagaaggacttgttttcccattttgatgaagatagattcaatgaaaaaaatggatctttgatctgacacttggaagacgcccaagttaacaaatttcaacttcggcactgggtgctcggtgccccgaggccccgggtgctcaaaaaccaacttgcttcgaatttgattcggatgcctcaaacaagtctgcggtatgtctagttgatgtcccaatgcaagttttggccactttgcactaagatggttccaaaaactgaaaccctagttcaagatgtcaacttgggcgttgggtgaaaccctgcccaagttggcttccgagttacaagtttgtgcaattttagctcccagactttgtgttaggttgttccaagtctttatggtacataataataaaagatagtgagtttgattcaagctattgaagcccaaactttcatctcggagatcccagagtcaacctgggcgcagggctaggatcccctgccaagttgactactatgacttgggtctactcaacttcgtgacgttatccttcatgccacatgttaaacattgatgtcgacgccactagagaaagtgtatgagtaaacatttgcaccctaagttaattttacacttgtgtgaagttga

SEQ ID NO: 63301 - DNA, 1462 bp, Cannabis sativa
  modified_base (290)..(296): a, c, t, g, unknown or other
  modified_base (1037)..(1038): a, c, t, g, unknown or other
ttctaagtaaaaaaaatctcttttctctttatttattttttctagaataacataaactttactgggtttttattgttcttactaattatgtttaatttttcttttttagggttatagttagctctggttttgagagtggtttgtatcgtttgatggctcttatgatttatttttttattattttagtgttgttttactgttgttttctttcattttttttttatctcatttttttatagatattattgtactgctctatcttaaatagcaatagggaaataataaaattnnnnnnnaagttattttcttcagtatcatatacttcaatatatgttcagttttgttttgttgtttcactgttgttttttagttgttctccttcttttcatttttgatgtctcctcctgtatgttctcttgttgtgccacaacttcccacatttgctgcaattgttatgttgtttttttttttccaaccaacttccatctttttttttgtcttctagatttcaccacttcaatggaaggtaaatctattactgtccatgattctttcattctggttacctcaaataaatatttagtggttggtttaacatgtgtaatgtaaaaccaatatttgttaaaatacgaaacaattgtagaacaacccaaaaataacattagaaaaaccatgaacgccctaatattaatggttttaatgtttctgcttcatctcaccagatttaatggttatttttttagttgttctggtgttattgtggtggttctatctgtgggtgtagaatatggagatctcgttttttattttcggtatttacagtataaaagaaaaaaaaagtccaaggcagtataaaagttatttttaccgtgtggcagtattttttgtaaaaattgggtcaaaatccagtatttttgaaagtttcctaattttattttagcaacctagtccattttaattatcaaaattaaatggtctccctatatgcatctaggctcaaaacaaacatataggcaaattaaatatctaataagatnnatgatttgaaaataaccaaatagatattttcaatattattttgtaatcttataatttaaaaaaaaaattaaaataacaaaataaaccaatttttaaaataaatatggttaggcaattattattttaagattgaaataataaacaaataataattttccaaattatatgtcaaaatatctcaaattaaaccttttttaaatttctacaaaaatatgtaggttatttaaatacttaaaatactgtttataaatttttgataagtaaaatgatataaaatatcatatttttaacttataattgatgaacaattaaatatttcacaaattaactaattttaaatttgaaaatattatggttagaatatctataaaaaaaatatctaggttaatttcaaaatttataattatttaatatatcctataag

SEQ ID NO: 63302 - DNA, 729 bp, Cannabis sativa
tctattttgacatagaagattttatttttctacttactaataatgcacatataattataaataattattaaattactcataccctgctaatttctatatctaattatgcagtctaattatcttgtgaatttataggcttcttcaatcccaatttaaatttcctcttcaaaatatctcaagcatgaatggatcactaagaaatagagaatttggaaatgattcccacatatattttaaatggaagatgggaaaccagggataactttagtttttggcgcaaattttggaagctcaaagttccttaaaaaaattaagaatttcatgtggagatgacttactcattgtttgcccactactcacaatttgaaagctaaatttgttcctttggaagatgtctgtccaatgtgtggagaggggatggagactaccttccattgcatggttgaatgtccttttaataattattggaaaggtctcggcagtttgttgggcaattcggaaagctagaaatgattgtgtgtgtaatgagaaagagtctgtggttgaaagggtggtcgttaatgcaattactgatctttgatggctggatttttagctcaatcaaatggaatagatctccattccagttcagttttgtcaacttaagcaaatgagcgctggtgtaaacctaaggttggatctgttgggttttatgccctaaataaaactcacttcaatataatcagattt

SEQ ID NO: 63303 - DNA, 601 bp, Cannabis sativa
taaaatggacgaaaatattaaattgctaacagaacacgagtattggaggttttaccgcccaaatttaagttttgggggttaagtggaacaaaaataaaaattttggggggttttgccgccatttacccaataataaaagtaaagagttaaatgttgcaaaatatataaaataaataaatgcataagtaatcgtgtgtttttttttttatgaagtgattagaatcactcatgaatttacggtgcaggttttcgcaaccggcgttggaacctcctccaataggatagctcatcatctaaccgtagagcatgctttgccgggatgtaatcgtgtgttgagaatacatatctacacacaagtaatcgtgtgttgagtatatatctacacataagaaaagatcccaggatgtaaattgtttagggaaatttgactttttatatatttattggattaaaactatttttctaaacctaagttaacttatattggtagaatatactaacatttcataaaacacaattctactcctctcatttcaaatacctatttctctctctttctcccttatctctcttgctctttgaactcactccaagaactcga

SEQ ID NO: 63304 - DNA, 2233 bp, Cannabis sativa
cttgtcatcaagaactgcgattgaatggagcgttatgtcttcaatcgcgaaacgtacattatcaacctcagaaagacacggaaaaagctccatctcgctgccaggattattgttgctattcaagttcccagcgagatgcctcaacgagatacactttgcagcgtatctaaatctacgttagtattgatccagtaaaagcggataaatcacagctgtcacagctgtatgattcacagctgtatgattttcaaataataaccgcatttatttatgtgtatcataattaaggcccacgatttcagggaaatattattgtgggatttgaatttgattgtaattaaatgccaccctatgtcactataaataggggcagaatgtactgaaaaaaaaaaaggaaaaatccttgagaaaaaagaaccctagtttgtatcagaataagattgactcgtggactatgcaatattttaattgcaaaactacgtaaaaagctctatgttatattttcttcttttactttctataatttatgtgcaaaacttatcacaaaaataggcttattatcgttaacaaaaatttgtgttaacaacttggtgcattcattgagagcctaggtgaaaaaggctcagaaaaaaccctcctaaccaaaagaaaaatctttctccatggctaataacgaggaaaatgatgatactcatcctgaagagactactcaccgttctagaaaagagccaatgggctcacagaggcctcccaattcacgggcaacacgatctacacagtccacacattcaagaaagaccaaacgtgaaggtggccaaaatccagaaacagggaatgaagtacccaacacaggtgttggtggtgctcaacccatggatgatggtgcctatgatcccacgagatatgtgctgattgtcgagttagaaaatcgtcatctcaggcgccgcttggaggaggcaaactgacgaaatgctaagttggaacgggagatagccgcagccagggcggcacaagaaaacaacgcacaaacccaacctgatcttggagtgaggagaccacgaggcaaacctcacaactcacgaaccaggaggcaggagatggctcaggatgaccctcaaaacgcgcttgaggcccatggacacgctctaaaacgtctttggtcagcccattgggccaagataattaattctctcacattgggcatgtaggcccaattggcttataattccttataaaagggttgtgctccttattttgcgattaaggcatgagagtggtgtggctatggtgttgagagtggtatcaaaagtagtgttcattacacccaagtttttttagtctttcttcatgtgtgtagatcaaagagatttatgaaatcgacaatggttcatagctcttgaagatataacatcaaagcttaaatgagatatgtttgctaattataaagttttactctaaagctaaatgtttgatcttggctaatatgagcatgaatttattgttgattgttattgttaatagcatgctcaatgtgcagtgacgaagccagaaatttggctgggtgagggcttgaataaatattaagtcaactaataaaaataattgataaatgtatcctttcaaattttcatcttcaacaaaataaaataaaacattgtcataaaaaataaaataaaaattacaatctgcctcgatgactgttcatgttttgaaatcgctgcatgatgacttcattgtcaagactattggagatgtctttctcaatgtccacaagtaaacaatcattcataaattgatctcccattcgattgcgcaatctacttttcaaaattcatagaagaaaatactctttccactgtagcagtaacaataggtagaatcaatgctaatgtaattagtcgatacactagaggataaataatatgcttctttatctcaactattttttcaacgagatcaccaatacttttcaaacccaagaaattttcagtggagcttacatcaagaatgtaagtttcaagtagattatcgagcatgctaagctcaacagtagaaaaatctttggggtaatactcagtaaatcggatcaacttttttttgtcaaaagcttcaaatgaatcactagggcacaaggaagctaaagagggaagtagttcagtgtttacctcgtttgaaacgttcatttagctcttgaagttacatatcaatgacagcataaaagaattccacacga

SEQ ID NO: 63305 - DNA, 753 bp, Cannabis sativa
agggaatgattcttattgagaccttcaaagtgcctgtgatgattgagaagctacccccttcgtggaaggagtacaaaagttatcttaaacgtaagcaaaaatagatgactattgaagagttgattgttagacttcgtatcgaagaaggcaacaagaactctgagaagaaaagttatagttgggaggtggctaaagccaatctaatggagtaaggtcaaaactccaaaaggaagaaaaactttaaacccaataataaaggggtaaagttgggagcaaaaggtggtatcaccaaaggtaagtgctgtaactgcaataagttgggtcacaagtatgtagattgtagactgccaaaaaggaataacaatcctgaagccaatatggtaaaagacaagtcgaaagatgatgatatacatatatcgacaatggtctcagaggtaaacctagtgaagtctaatctaagagaatggttgattgacactggttctactcgccatatatgctcagacaagagtatgttcaaatattttgaacaagtgaataatggagagaaactctttatggaaaactctaccacatctaagataatgggtcaaggtaaagtgatcttgaaaatgacttcttgaaaggaaccgactctcaacaacgtgttatatgtaccagaaatctgtaagaatcttttctctggttcacttttgagtaaacatggatttcgtttggtaattgagtccgaaaaggttgtgctgtccaagagta

SEQ ID NO: 63306 - DNA, 1892 bp, Cannabis sativa
  modified_base (283)..(288): a, c, t, g, unknown or other
  modified_base (395)..(395): a, c, t, g, unknown or other
ataattactttattatataattacgctaagtgcgactacgtttattaatatttaataagagattatatattattaattaattaaaaataaaaaataattacatgtatataataactaatgattcaatcaattaaataataacagaatcactcaaagtgagtacttatagatccttatttgattaagggtaaatatcattttagaccctgtgttttgtaaaagttaccaattggacaatctgttttattaaatgacaaaatggaccctgaactgattttttgtnnnnnnaaaatttaataataatctgatctaaaagtgttatgacaaaactgtttgcattttttgtatctgttcgtatttttaagttgtatatattaaaaaaaaaaagttgtcanaaattaagctcagggtcctatttgtaccattttggaaattacaaggtccattttgtcatttaacaaaacagatggtccaattagtaacttttgtaaaacacagggtccaaaatggtatttaccttttgattaataataactataaagtgaaatacagtaatgatatcaactttaatagccgtgactataaataagctccgacgataaaaattattttgaaaatatttttttgcgtcttttttatataagagagtgtatagatttatttttttttaataaatatatattttttttaaaaaaataatacatgaaagtatatttaaaattattggatataattttattattcaactaatagttatatataattcaacatttatataaataactggatgcaaatttaaaaaactttaaaaaaaaattatgcacgataaattattcaacaaaaaattaaatttttataaggataattttgtaattataataaataccactataaaaaaaaattttaaaaaaatattttaatatatattttcagactaaattgagaaagatattataatatgaaattgtaatttacacttctttttgtaattgaaatttgttcattattattttcttccacaacaaatgatgttataaaaaaaaatgagttacaaaaatggtgtttattccaagtattagtataaatataaaaaaacttacatttttttattaagaaaaaaggaggatcagatggacaaatcatttccccaccctttcagtagctttgacaatctcgagccaaacttaaaattttagttttatttagtatatttatagcttttttataattacattaaacacaacatatatatagtagtcaaataaatcatggagtattactaaaataatgctcaactgtgttttatggggttggtttcatgtgagttttactgctcaatgctggcaaaagatcataccaaattttagaagggggatctaagtgattttcctagcttgttctctagtgttctaaccctttatatcactgaaaagcattgtgaaatagcaatggtgtgttgggcactttggagagcatgtaacaatatcttgtttggcaacaaaaatgtgaccatgttaacgatgttaatgtttcagtattgcagtactttgtgcaatggaagaaagcccaagatgttgctacaattgctcgatttcctactggtatggttggagatggagctgaatcttgggtcaagcctcaagaaaacataatcaaagtctcgattgatgcaactacttttggagaaaattctacttttgaatttggaattgttgtgagagattgccatgggtaccttgttcaagctaggactgtgtattattggggtttggtggcactcgatatgtatggctgaagtattggccatcatcaaagaggctcttagttggatcaagaagtaatcatgaaatttggtagagcttgaatctgattgtctatcggttattcaagac

SEQ ID NO: 63307 - DNA, 1553 bp, Cannabis sativa
catggattcctcccctaatccacaaagagggcagcaagtttccttaatgtggaaccgtctaccaattacagatccaatagggagcgcattagaaaggatgcaccaccataggatcttttgcctttccaaaattttactattccacaatttgttccatagtgacggagctacctcacattgatgagccctagccagggcttgagacagataagccgatttgcttgagaattgtccatttttttccagagtccaaacccatctatcttccccaatgccgaagggtttaccacctttaactattgcagtcaccgtttcgttatcaaacaggccatttagctttgggatctcccaatcaccatttgcaagtagtaggtcagcaacatattgatcattggttattacccctcctttaggtttcggggtaaaaccttttagatgaggaatccaagggtccctccagatgctcatcgccctgccatttgttacaactttacacgcccccccccccataatatagaaacggctttcacgacatttttccagaaccaggaatcggaattcttgtagcgacaattgagaaaatccttctcttttagatatttggcttccaaaattttgctacataacgattgggagccctttaacaaattccaaccccacttagcaaggaatgccagattcatctcctttgttttcctaaatcctagaccacccaaggatttagggaggcacaacttgtcccacactttcaaatgaagaccacgatttcctttttcaaaaccccaccaaaaatccctgactaaaccatctattctagtgaccatacggctcgagagtttggtggtttgcatcgcatagataggcatcgacaatcctacagacttgataagagtagctcgacctgcctttgacaacgttttagccatccaaccctgcaatttagaggtgagattatccaagatgaaattaaagtcagcatccttctgtctagatctgaacaggggtagacccagataatttatagcaccttctggagaatttattcccaatgcttccttaattcctctcctcataccgacaggggtattattactgaagaaaatagacgtttttagtttattcactttctggccagagcaagagcagaacctgtccaagcaattccaaacattgctagcttcatttatgttggccctacccaccaggataaggtcatctgcaaagaaaagatgggtaattatcggcccacccctacacaacttaattccatggatattgcccttcccaagagcctcttccaagagcctcgagaaaatctcagtagcacagataaataagtaaggggagaggcgatctccctgacggagaccacacgacggtatgatttttccaacgaggcccccatcaaacaaatgttgagagtggtagtggagatgcattgcgaaatccaagagcgcaacttctgagggaatcccacacacttcataacatggtcaataaacctccagctaagcctgtcataagctttaacaagatcaatcttaattgcaaaa

SEQ ID NO: 63308 - DNA, 865 bp, Cannabis sativa
ttcaacaagttcttggattggatgttcgataaaatataaaatgatagtgagaatcccctgataggctacaaaaggtattgtctctcttttcattagtctagatttaatctatatacattatgttgagattcttgggcttataattcatattggattaaattaattttaatcaaatatgctttcgcttttctaattcttatatggaccataaacccaacaattagtatcaagaactatcttcataattgtataaattaaatattgtgttgggtaattattatatatatgttgatatttatgaatggatagtgttaacgcagattttcgttagctaaatttaagcttcacggaaataattccacaaaagaaaaaataaaagctaagaaaaataatatatgaacacaagattttttacgtagttttgcagttaaaattctgcatagtccacgagtcaattttattcagatttctgattgtgtttttttttttttggggcctctcttgtagaagatttttttcgtccctttttttagcttgtttgccactatttataattacatagtggacagttaattacaaagttgaccagaatatgtttacaacaatcatccctaaaatcatgggatttgaattacatatcatgtagtgtaaatgcggtttataatttaaaaatcatatagctgtgattttccccgcttttactgggttaagatattcgtgtattaaatacgtctttaattgttgtgtctggagatgtctcgacagaaacttggttatagtgatcccaatagcgagctggggccattctttctttcgaggtcgacgatgtaggtttggtatcgatcgcgattcttacttgcaaata

SEQ ID NO: 63309 - DNA, 640 bp, Cannabis sativa
aaatcaaatcccaaacccagattttgtccaaatcacatccgacgaaaaaataaaaaaaaggttggtgagggtgagatggtgagaaaacaaccgagagagatagaaaaagagagagagttgaggtttgaaaatgagaggggtatttttgggtttattgtaaagtggtcatattttttactttttaaaatgtattagattagggaaaaaaaattaagctattttatgcatattttttcaaatttttcttgtattttcggattttttttatcatgtgcagatttaaattactaaatcacatgattttcattaaaaatattactaaatgaaaattaatgaataattaaataattttttaatattagagaaggaattaattaaatgataatttctaataggtgtccattacaataaataagaaaaatatccctaataacatcttcaactaaatgactcgtgaaacatgaaggtagcatttttgattgaaaatgaaaatggaatgaaatagaaaaaaaaaaacaattttcatttaatgcaatatgagaaaaaatttaataatttttttataaaattcttttaagtttttattcctaccaacgaaacgtcacctaaaagaatgtgaagaatactaaatttctatttg

SEQ ID NO: 63310 - DNA, 918 bp, Cannabis sativa
gatcacaacctttacaactattggctgaagagaaccactttaaaatttcatacttcaatcgaacaaaaatgtcatcatccacacaaattttttggctgaagagaatcgtattaaaaaaaattcatactttaatcaaataaaaaggttattatccacacaaactttttaatttacccatttatttcgtcgatatcaaattttttaaatacaaataataatttttcaaacatggtaacaataataaaacaactcatagatatcccaattatatatataatattagtctaaattaagttcaaattaatacaatgtgtttgaaagggaagttatggttgaaccctaactatatatagccagcccctctttttataatatatgatcattattttctacaactgtactactttttcttttattttctataattctactatatatgattctttgtcaagttttttataagattttttttcatacaaaaatatataagtaccctttttgctttcatttatattcatgtaatcattcattcaatatgtgaagatctttgttccatagagttatatttcgagatattgtttcatataatattctatatattatttgagtggtttatataattatttagttattgtgtgttgattttcatagacttaaaaataatgggattttcatatatagactaattttgtaatattttcaatctatcaaactttgatcaacttctcctattaatatctaaaataaagaattgtgtaattataatttgtatttacactacacaaaatcttatttttagttacaacgaaatttgtgtaaaaaaaaaaaaaaaaaaaattgtgattaattataaattattcctatattgtaaaaagtctgtgactaaatgtattaatcacaaaaatcacaatttgttgt

SEQ ID NO: 63311 - DNA, 707 bp, Cannabis sativa
agtaaatctgcttaccttgctcaagctctggaaagagccagccactgtgaggtggctccttcgctctggaacaaactatggaatagtaaaatccaggagcgacacaagactctttggtggtgcattttctcatcggcgcttcctgtcagagctattattggcaggagattccaaattgaagattccagatgccccttatgtgaacagggggaggaatctattgaacacctttttctaacttgtgatgtggcgttacacttttggcgatcttccccttggggcatatatccacgcagtgacaatggaattcgtgtttgggattgggtgaagtttctctggagtcataaaaacaggggtatccgtgaagaggaggtctttctctatgcatctatagtaactgataacatctggagggcgtgcaatgaaaaagttcacaataacctttccccggatgtttcaaaatgtattgaccttatttacacttcttttgcagatttacatgcttctctagtgccgtcaccgacttcgactctgtcagaaaattggaattctccccctgaggattggatcaaacttaactgtgatgttcgagtgggattggcaagcatgtgcacagctgttgttgctagaaaccacctaggtgaagtgattcggatccacaggactcagttggacttctcagatgctttgtgtggagaagcagcggc

SEQ ID NO: 63312 - DNA, 920 bp, Cannabis sativa
ctggtaaaatatatccaacatgtactggtaaccaagactcataaaaatggcgagtatgtattgatttcaccgacctcaacaaggcgtgcgccaaggactattttccacttccaagaattaagcaacatccgggcacgtaatcttgagctttatggatgcctatttggggtacaatcaaatcagaatgcatccaccagaccaagaacatacaagtttttgaacaaatatgggtctgtactgttacaaggttatgtcgttcggtctaaagaatgttgtagcgacaaaataaaatgtttaaagaacatatcacacaaaatatggaggtatatgtggatgatatgctcgtcaaatcgaagaaggctagggggcacatagaggatcttgatgaatgcttcaaaatccttaaaaaatgtaacatgaaactcaatcgcttaaagtggtcctttgtagttagcttgggtaagtttcttgtttttattgttaatggaaatccagagaaaatactatgcctcctggatatgaaactgccaacaaaaactaaggaagtctaaagcttaacttgtcggatagtcacactcattagatttgtttcgaagtcagcagataagtgtgttcctttcttcaacatccttcgaggtaacaaaaaatttgaatggatggagaaatgtgagaacgctttctaggaattaaaaagacaacttgtaaaacctctcgtactctgaaaacatagacagagaagaattaggaatatacttaactgtcacagaatatgcggtaggcgctgtgctgataagagaagagaacaacgtctagcatctagtctattatatcaacaaaaggctcatggaagaggaaggacggtaacctttaatagagaaactcacttactgcctaatcttagtgttatcccaatttttgca

SEQ ID NO: 63313 - DNA, 1155 bp, Cannabis sativa
atatctatatatttattatcaagcacatctctattctaactagaaaatatgttcttaccaacttttctattttcttttatcttgtgttttgtgcatgtattatggagctatggtcttttacttgcatttagtttatggtatatgggattctttattacgtgtgtattagattaatttaggatttaatttgtaaaaatattttttgaccatttaaatttaattttgttattgacttgtgttcgtgtatgttaggtttttagtacacttttaataaaattaaagtatgtgattacgtgtaagatgcaatgattataacaattttaataaagtacgattgcaaatgaaatacgttgacgataataactttgaataaaatagtaactacaaataaagtacaataataataataattttgaatacaacgacaactacaagtgagatacggtaataataacgatttaaactttttttaatcttttaatttacattactaaaatatattttttgctttaattatattctaactttattaatcatataatatgaattttgtgatttgtgatgtttaacacatatctaatagactaatttaagaattatgactctttgtttttgttaattagacattttttaaaagcaaatataaactaaatatagatttatatatactcaatattgatttaaatttaaacaaatgatttatcttatttttttaatacatataccatataaacaatttgtacctacataatctatttatctacataatctatttatgcaccaaatatcaaattgaatacgtaatatataatcctatacttaaaatatcacaagtatctttcaaataacaaaagcttattatattattaaaaaaattaaaaaattattttaataagcgaaacgcgagttttttactagttgagtagtaaaaataaataaatttgaatattttctttttagggtttaaaataaatttgagtatttgttaaaataaataaataaatttgagcattcagagtataacaataataaatttgagtatttgagttaaccttattatattggaaattttgttttagtggagccacggaaatatttaacggtggagtttagtattttgaaatttcaaggtccctttctcaaaaaaaaaaaaaa

SEQ ID NO: 63314 - DNA, 859 bp, Cannabis sativa
gccccagcacacggaccacacgttgccagaggacccaacccgacgttggtccgagtgcgcggacaacacgctcgaggagaactcagcgtgatagtggcctgaaccctggggtgagggatgaagaactcaatcatggaggtgcccagtcaatgggaaaaggtgcttatgacacagaaagctgctacctgagatgccgtctagaagaggcgtagcgtcagaacgctgaattagagtgtgatacagccttgatcagggtgtcctaggggacgaatgctcaaaatcaacttgaaccatgagtgagaagaccaagaggcaggcctcatggctcacgaaccaggagacaagaaaatgcccaggaagaacagccctggaaaaatgagatactccctgaaaatcagaacaaatagcaagatgggaggcaaccggaaactaatgaacgagaaattcctcatgacaatgaggaggatcttaggactcaactgggttaacgtaggtaacctgcaagaaatcaccagcattcttcccaaacccatagaatgaggactcgtaagaccctaatgggggaaatgcgacaaaccacactcaaggggaaagaacagagtgtgaagaagcaagtgtgacctcgaggcaatcaagaacccacaatctatcaactcgaagaggagaaagtacttaacgagctaatgatcaagaaagtatgggaaccagtaaatctgtgagtcactcaaagacaaagtctatgagtaggatctgatttgtgagtaagacagtgtctgccagcaattactcccaaccggatctgtgagagaacttgaatcagaagaaacctgacctttgccaatagcttggtccaaagcaa

SEQ ID NO: 63315 - DNA, 515 bp, Cannabis sativa
ggtgtttttctagctatatgctctcgagctagaatataaaatatgaaaaacgtgtctttgtaagtgagcataagtcacctattcttagggtttaggtaaaaaaaaattgaaattcaaactccacactctacatgactgttatagagcattagtttagttttaaagtgatgaaagatgattgaagatgtaagagctaccatgcaattggaaccgaggaaaagactttgtagaagtcttaaacgatatcgtggcagagtcagagtcagggtaaacaatataagcccccacacactaagcgatgtatcgcctagcacttagcacctttggtactattttttcagcttttgtgttttggctctccaactttcataaacttttctcataagttttaaactcctcacataaatgagtataaaaaatatagaataattagtaatttttccttctgaacattcgacaatattaattttggtccttaaaatatatggctaatggcttgttaagaatccccctaa

SEQ ID NO: 63316 - DNA, 2668 bp, Cannabis sativa
aatactataactcggcttatgaatgatgtgggtaattgggttacttgggaggatgagttgccgaatgttatggttgattattttactaatttatttacttcaaatgtggttgattactccattgtggtagaggagattattccttcgatcatagtggatcagaatttttctttgcttaggccggtttgggaagaagaagttagaagtgctctgtttaatattcatcctgataagtcccctggtcctgattggttatgaccccagggttttttttccagaaatactgggaaatagtgaagagtgatgttgtgaaccaagtatgccaattctttgcgactagtagtattcttgatggactgaatgatatgaatattgttttgattccgaagaagacgcagcctacttcgatgggggatctgcagcctatatccttgtgcaacgtcttgtataagacagtatctaaggtgctcgcgaatcgtttaaaaaaagtgctgcctcaaatcatttcctcaaatcaatctgctttcatcccgggacgccttattactgataatattatgatagcttttgaggttacgcactatctcaaaagaaagcgtaagggcaaagaaggctatatggcgctcaaattggatcttagtaaagcttatgattgtgtggagtggggctttcttcgagctatgatgaccaaaatgggttttgacttgcgtttcattgatcttgtttttgctatggttagctctgtgaggtataaaataattcatggtggtcatgagcttggtttgattattcctgagaggggtattagacaaggtgatcctctatcaccttacttatttcttatttgtgctgagggcttctcatctttgataaggaagtttgagcgggatggtaggcttaaaggatgcaaggttgctaatggtgctccagttatatctcatatgctctttgcagacaatagttatgtctattatcgtgcaaatgatagagaggcttcaaatatgttacatctgcttcagctatttgagatcgcttctggccaacaagttaattttagtaagtcctctgtcttcttcagtactaatgtgcctaatgctactcgggaccgattgtgtgggcctcttcgaatgagacttgctgatgaacatagtacttaccttggcctcccttgtgtcatgggacgaaataaggatgccatcttggggtttttgaaagacaaaatgcagaagcaccttcaaagctgggagggtcatttcttgtctattgctgggcgtgagattctaataaaaactgtagcgcaagcattgccaagttttgctatgtctgtgttcttattgcctctgaaaactttttcacagttggaaagccttatggctaagtattggtggccttcgagtagtaggaaaggtgtcagctggtttagttggcggaaactttgcaaacataagaaatctggtgggatgggttttcggagtttgcgtgagtataatctttctttgttgggtaagcaaggttggcggttacttctgtacccaaattctcttatgggtcagatatataaggctcgatactttcctaaatgttcattcttggaggccgagttaggtggcaatccgagctttatatggcgtagtgtttttgagtcacaaacgctgattagggatggtgcccgtccaagaataggacctggttcatctactgaggtgttaaacacaccttggcttttgtctgaggctaacccgtgtgtggtatctaatcatccggcattggtcaattgtaaagtgtctcaactcatgcagccaggtagtagacaatgggatctggagcttattgaggacttgtttgattcccgtgatgttgagctcatcaaataggtgcctttgagtgttaatcttgggagtgacagttggttttggaataaggatccaactggttttttcactgtcaaaagtgcctatgctcacttacagtcggtcaatggtagttggaactcatccatggaggaggatgtttggaagatgttgtggaagattaaagtccctcctaaggtttcacattttgctaggaaagctctttcgggatgtttgcctacacgtactcaacttcatagtaaacatgttcctgtggatttacattgtgtgttgtgcaactatatggaagagtcaatttttcatgtgtttgttcaatgctcctttgctcattcttgttggatccgattagcgttaggtgttggccagtctgcagcaaccaattttcttgactggtttatggaagtgttggcagtaggcaatatggaattggttgaagaagctgtcatggttggttgggcaatttggaaggcccagaatgatatgctttggaatggtaaaagttgtagtgctgctgatgttgtttggttggctcgtaccactcttcgacaatggacgtgtgcttaggctaagaggctggactcggtttccctggcttctaatcgttctgacacaagagaacacttgtccaaactggttgttggacagttaaaaattaatgtggatggggcggtttttgaagacacaaatgaggtcgggactggtttattgcacatggctgtgatggccaattaattgaggcgttttcaactatttcttctatcagttgccggcctgaaattgcagaaattctaagtgtc

SEQ ID NO: 63317 - DNA, 1458 bp, Cannabis sativa
  modified_base (239)..(245): a, c, t, g, unknown or other
gatcttctcatattcgttatctttaatgtttattttagaattgtttaactttttaggagtatcgaatcgactaaaacatgcccttaagataaagagtaagtttgattagataaaaataatccttgtaccttttaggtgatgagatttatttgatgtaattaataatgtggtcaatgcatgagagtgagagacttgtgtagtgaaacttcttggaaacttctcatatatatatatatatnnnnnnntatatatatatatatgttgatataatttacagtcatcatccaaacaaaacaatatccttctttccacaactttattggttttttctatatcatcgatttatatatataaatagtgacatgaacacatgctgcctcgacctatatatatatgtatatctatatacatgacttattatcaagtagttgacattttatcgtaaccacactttgacaaaccattcttattatattatcattaattaattaatttcttttttttttttttacttttttatattcacgttcacaatagcggagttagaccgaaatttggcggaaatataaaaaaatatatatttaatttatttccttaattattttttaattttttaaaaaattaggggactgtaagaattaataataataataatcaaaatccaacaaaaaaaaaatcaataataatatgtatatcagccacagagagtactggtcaaataaactgctcgaattgaccaaaatatataaatattattattacacaccaaattatattattttttttattatttttgagagagaaattaataattgaattagataacaataatgttgaagagtatatttagtgtgttcccacctattccttggtactatctagtatatagttagctaaagtacttaattaattattactgatataattatattgtacaacacaaaattaattagcactaaaaatttcaaattgatcccttaattttcactaattagataagcttaattagctatttttaatcatgacattttaaaaatgaaaatttggctgatactccaattctggatatataatatatataatatctctttctcttaatatttaattagtctactactaattggtatatttaatatattaattaaacaaaaaataacatcacgattacgtatatatgtacgtagtatgtataagtaagaatattccaaatctacgcatgaatatactatgtatattataaataaaatatatatatagccgaaattaatgacagctaaataattaattattatataataataaagttttaacaaggtctataataacatgtggaattaaattagaaaaataataagattatttactttcaaaaatttacggccaaactatactttaattaattaattccatacatgttgcaccttattatattatttcaagaataataatatacttcat

SEQ ID NO: 63318 - DNA, 706 bp, Cannabis sativa
tgccagtatcacccaaaataatatcgtttgaaatcgatcccccccgtggagcagataaaagttgttgaattattgttgttctattattttcaagttgctgcacatctgagtgtactgagtcattgtcactttctgtcattatcacattgttgcacactattatttgggtagctgccaaaaatgattatgtttctgtgttgctgaatgtgttcacacacactggataccatgtaaaatcggtttacttagttaatagctttatgtaaaacaacaaatttttgtcatccttgacttggagtggttggcaagcttccttcagttggtattttagttatttttgagttgttttcgaagttgcattgtagttcctccatcattatctgcactagttcagcaaaagtataatcttttgatattaattctctacttcgtaatcaacatagtatttgttgttatcccaattatcattgctctgtaccaaaatttacagagtttccatacctgaaactagtgtatcaattttttaatattgttaagcaaccattttaatacatgagaacaacgtataaataactattcatgacactaatcagtaaatgaccttaaatgtatcactatttttctaaatatgaattatatgtaccaatttattcaaatcaactacttttcagtatgaattttctttgatctactttagaaatattaa

SEQ ID NO: 63319 - DNA, 1003 bp, Cannabis sativa
aatctttaagggtgctagccctctgttttttagggataaggacaatcaaggtggagttaacctcagagaagtcagcctcattgtttaagcaacctaagactgcatgaacaagatcaattccaacgatatcccaattcttttggtagaaataggcattaaggccatcaagacctggagccttatctccagagagctagaaaacagcctgttggacttcatcaaaagtaaaaggctggtctaagaaatcaacctccgaatcctcaagagggggaccgagacaatcaagaatatggttgactacctccgtatcacagccatcacaatggaaaaggtccccaaaataagaagtgataagatcactcaaatcttctaggctactaaagacatcaccattatcatcctgaagaaattgaatagtattatttcgtttcctttgagaggcaaaacgatgaaagaaagtcatgtttctatctctagccctaagccaatgaaccctagccctttgacgccaataaacctcctctttatacaagagagcatcaagttgggactgaagatgtttaacatgtgagagtatgttcctatcactagaaagagtagattgaattctctcaatttcctgttgaagagtagtgatccgagacttgaaactatttctaacaggcttaccccaagatttaagagaagagatacaagctttctgagaataaaggaatctagagtaaacacctaaattggacacatcatgggaattcatatcccaacaactcctaagagtggtgtagaattctggactctcaagccaaatgttctcaaagtggaaacacttattaacagaattaacacaacttttactctactgattaataagaactttaatggctctatggtcagagccataaaatggcaagtaatataaaaccgcataagaaaacaaatctcaccaagaattagacccaatggcccaatcaagtctcttaaaaacagtattatttttccaggt

SEQ ID NO: 63320 - DNA, 887 bp, Cannabis sativa
aaaataaaaactacaaaaggaccaatagttttgccataatgactgatttaaagcatttgtcttatgtttacttctttataacttatgcatagtcaatattattgtcattatattataaaagagagactttgactaaggtttgacttgtgtatatatgtttcttcacaactttgttaaagctagttcattctccaatttagttcttacaaaagaactctgtacttaaaggtttctgactattcaaccatatatacaaattaagataggtttgaatcgtctacatggaaggagggtcaagaggttggttccatcacatgtatgaaaggctacatagctcattcccaagtcctaaaggtatatactataaagcatgcactatacatatgattctattatgttctaattaaatagtaaattgttgtagactctgtataatttattttgaaatgagatagaaaattctgaaatcagatctccttttaggaaatttcaattagtatcttcaataaaatcaaatagtcttactgaagaaggaaagaaagagacatattttaaagcatggagcaagattgctggaagatagaataatttgttgcaaagataaaatgcaaatgtaaccccatcaagaatttttcactgaacaagtcattagagctacaaatcactttaaatccggttgctactcatatagtagacatgaatttaaatggttcaagactattataatggattctctaggcctataataaacaggggcataaagccttcacatatctttttgataaagattatgttcccaagttttctgattttggtttatctataatcatacctgaaggagtaacacatcttcaagatatagtgattgggacattaggatatatatg

SEQ ID NO: 63321 - DNA, 787 bp, Cannabis sativa
atgccgcttacactcaaaactttgggtacttatgccactatttacctttaaaatatttatataggggccttaatttaaattttatcataggtcttatatatttattttacgtgtcaatattattattgatataattaagtattaagtctaataataattttataaaaaaaatcatgcaagataatatgtttaaaaatatatattatacagtccaataacaatgaatatattagtaatgagttggatatgagatagtaactgatcatatatataaatatatatatatatatatacatatttatatcaatgtttttattggaaagaggggatcatcagatatcatcatgattcagaccaattcagtttcagttttgatcattggctctattgatgcacttataataaattactcatctcagtagaaatatatagtaataacatcattataactcatctgctggttgaaaataattagtttatctctattggtttatgtttttgtataggttggtttctagattttaaatttttattattttcacaaattagttttcaaattttattttttttgacaaattaattttccaattttaattttttggcaacacaaactctctaattctgaatatataatggtatttttatttgtttatttatttataatttacattttgaaaattctaatttctccgataactaagtaattgatcttaaatgctaattattgtgaattgaaacagaaaactaaatcaatgaaaaccaaaatttacaagcttcttctgcattg

SEQ ID NO: 63322 - DNA, 1043 bp, Cannabis sativa
atcaatcgaatatatttagataggtgggcatggggtccttcctaccttcacacagttccatttgaggcattcgaaagtgctccgacaagtgtgcctttattattctttttacatgtgattctagatcttcttctttcgaatcaaaggccccactttgctttcgagcaaggcgttccgtgaagttgatcaatttagctatttggtcttctagacgcttagtgttgtcatcttggaattcacgcttacaaactctatcattgatatgatttttgagattatttttgtgaggccttgctttctcccctctatcttgatctttctttgcatttaagcgttcccaaaggtccactattgacatgttgtcttctagaatcaagtgaacttcatctacttccattgctctggttcataaaatcactaaggaattttttccatccctaaatagtaggcctttgtgtccgagcaccaagcctatcatcccacgcaactctgcctcgcgaatcaatcgtgcggccttactctagagcattggcgaccttctttttccatggagattggttgtgtgtgttcatgttgttccatggagcagttggagcagccttttgtccaggtccacccatgacaccctttcctttgtccctcgcgagattagaagtttcaggatctatagaatttgttttcttggtagtattattttcccaaggagcatgctcatcaagaatatttttgtcaggagccacattccctgattcaatactggcctctaatctggctaaagtttcttgcatttgacgtgagaagttttcctctttggccaatttctttttggttcagcaagttctttggccatttgaataacttcgggatctagctcatagtaatgcccttcctcttctttattgtcaccatcatcttcagaatcatcatcttgatcttttgggtcgccttctttgttgattgattcttatcaacatgtttctcattatgttgagtttccttagtaggacagctaattattctgatgtatctcctacaacacctaa

SEQ ID NO: 63323 - DNA, 1527 bp, Cannabis sativa
atataaatacttaattaaattaattcatatatatatatatatatatttacaatttttaattattttttctttatagaaatttcttcttaaaatttacttaaacaattcaggatactgctatctcatgtcattttcaaaataccacattatattaattagttagcctttttttcttgcatttcaaccaaccttgctcaacatcatatctatcatcaaatatatatgcatttaatttttaaaaaatagtatatttgtatacattcccaattagataatatgagatgggtatgtatatataatatacatttatagagtacttgacatgttgtttcaagtcgatgttatccggatatatagatgaatgacttgtcaactttttgtgaacaaatagtatttgatcatatcactattcactattaataattatatatattgtcttaaaggaaattctaaaagaaaaagtggaaggtgtatgtagtaatattattaatttatttgttgagtttggaagctctctctatacatatcatttttcatttattaatttaataaaacaattggctacattaggtcgtagcaaatttacaggtaaaattgtgtgcattaattagagttgtatttatttatttatttattgtagagcaacattattattgtgcatcactagaggtgttattttgtaattgattaaccatacttttaagattatttccaactgcaaataccaaaaatagtaaatataatccaaccgactacatacccaaatttataaatgagattatctatagtgtcccaccaaatttaagaggcactgcaaacatggtaaaatcattttctttagtttttagattaaataatggttgatgaattaagttccttgaatatatatatatatatatattatggttggaatagaaaaaaaattaatgctaaaattataccttttggtgttatggttagaataaaaaatgaatttagtactaaaattatgtctttttgatgttagtttaacactaaatttgaattttaccattggagttgacctaaaaattattacattaaattatatgagtctcgatacttaattgtaccaatagcgatattgacacgtatatataggaaggtgcttgacatgttatcttttagtatttttcattgctattggacactataattagtgtctaacatcttttataggtagtgtcctaagattggacgttagcgatattattaaaaattattattttaagttatatgagactcaatatctaattacactaataataacataatgagatcgagaaaaataataacctttctcttatttttatattattctttttacaaaatcaaaaggttggtgtagtgtgtgactgtctacgcactattaattctttcgtggtcaacgagaagtggaaaaaatgttattaatttttatttatttatttggttattatttatttttatttttatttttgttggcaaagaaatggaataatatttatgcaatttttaatgaccccccta

SEQ ID NO: 63324 - DNA, 717 bp, Cannabis sativa
ccaaagagaaactctgaagaagcagatcagcttgagtagccgagacactcttcccctgcctaataatagattgcatcacatgccttctattttgcattttactaccaagcaacatcttataataatcaagaaacatggcagaaataagctgaggatcatcagtccttaccccttgtacatctgagacagacaggatgcaattctggctccttctagcacgaatactgttatgataaaaagctgagtttgtatccctatctttgagccatgtcacctttgccttctgctgtaaaaaagacatgtatgcatcttgtgtagttgcaaactgttctcgggcttcagcttcatggacttgtaaattttcatcaaaaggttgttgttgcaaggcattttggcgatcttgtaagtggatttttgctctctccgcagcagcaagcaagtcagcaaactgtgttttgttcagctgtttaaacacagctttcaatctcttcaactttgcagcaactttgaacattttggtgccttgcacatcttgattccaactttcagctaccaaattcgcatactcaggatgcttagaccacatcctgaagtatcgaaaaggttttttttcccctgatattgcctctcggatggtgactacaacaggagaatggtcaaaaattccctcgttatggaaacaaacttcagcagcagtaaaggtggtcaaccattctg

SEQ ID NO: 63325 - DNA, 2156 bp, Cannabis sativa
  modified_base (44)..(65): a, c, t, g, unknown or other
tttcgaaaattaaattaaattttattttttatttaattatttannnnnnnnnnnnnnnnnnnnnnattatttaaaattaaataaatcatgacagatgtattagtaatataatactatgaaataatcataacatcatatgtagagatcataactcttatattatactcatagaataactataatattataaaataattatatgttaaccatatcataccatttatcatatcatgaccattacatacataaccgggcatatactagcacaacaataacctttgcacatttagccataccattgctatgaaataaaatatctctacattcaatagcactatcgtcgtatcacaccttaccataaaaatatcatacacaagtaagataaagacatgctagggtatatctacatttaatgaccttatcccgtatcatgccccaccatgagcacccctcatttgtacctgagatattagcatacaacatacaacatacagtatataacataaaacgtacaaaatataccaaccataatatatcgattcacaaactcatattgtgtctatatcacacattctcagtaccatgtacacattcataataattctaatgcctgtattcaaaaaattgctaatcatattaatattgttatattaaatttataaaacctcgtaggtcgggctcctgaattttaaaaccacagttaaaaattacttatagcaagaatatagttacataatatatattttatttttttacaaactacatgaagctaaaaaatataacgcaaaatttagtaagaccgaaaccctctagaatgcactgccgcgatatgtacaatccttgctgagcccctacacagtgctcctccaccttagctttactcttacctacacaaggtagcaaactgatgagtcgaccgactcagtaaaatatgcataaaaaatataaaacaatgcaataccggttttatgcttaagttgtcttgagcccaaatgctaagctcactaaatagttaagaacattctcaacagttggtgctactgaccatgatctcacccactaccaacactatgatcgcactgcgagactcacactatgttcgtaccgctatgatagcaccaatagcacccaaaagtacaattggtcatgatatcactcttaacatgtacggtacctgtatcgccaaactgacacaatggttgtgtcgctataatagcaccaactaatactttttggggtgaagatcactcttaaccagtacggtacctgtactgtcgaattgacacaatggttgtgccgttatgatataacccaaaataaatacaatcacaaataaaccatgcatatataatatattttatgccaatcttatgtcgtttccatgctcaagtgtgccggttagcctcagtggaacaatagctcgatgctttacagggccctaaaccaaaatattcgaaattctgatgagagacactctaaaccacttcctggagacttaaaattaaaactagaaatatccctatcgatggataacatgataataccctaaaaatcacaaaaacgggaaaactagggttcaaaaaattatcccaaccggcagacagttccccaactagaagtgcattcggtggggtttcttggggaccaatcggttgaccaattcctacaggtccccctaaaccggtcgaccggttcctataggtccccctgaaccgtttgactggttcagtccaggaaaacccaaaaatatccccagcactccaattcaaatctaaactttccaataacctccagaacatatgtatataacataatagacccaatttgggcaacaaagttaataataaatttagaatttcaaaacaacattaaaggaccaaactagacttctcaagctccaatttagcacaaacacctcaataatcaaccaataaagcctaaaacaacgcaaataaattcaatctaacaccaaaactcaaaatcaaacaaccctaaaatgcacagaaacttaactcacaaaatcatacactacaacctatcttgagcttaggaagatcaaagaaaagaaagctagagaattataccttgaattgaggcacctaaatcttgaaatcttgaattggaccttgacttctcataaactattgaacctgaaa

SEQ ID NO: 63326 - DNA, 672 bp, Cannabis sativa
atacatttatgtaaaatgccctagattcaatgtaatcaattctaagagaattctcaagacaccatttaagagactattggagagagagagcttccatcaaaagaggagaaaagaccccaattcaaggaaaggacgcagcaataagaataacattgttacagtctctgactataaagtcgagtctcgttttgcaagttttgatatcctgagctgcatcagtatttaatttcaaatgaccagttagtggcggatcccattgcgggtgagaaagactagccagatttgccagtgaagatgcgggggcctggtatgaaactggtattgttgtatgtgattcgttgtctagtgaagaaccatttgtggattggaaactttttgttggtataattgttcattcttgtagtgccacaatttccataacaaataaagaaaaatctaaaaatctctagtagagaaaatgttagaaataagatgtaatataaaaacaatagatagtatttatattaagtagtatattcatagaagggggctagtttccatatcttctagacagttaaacaatcgaaaaagagcatgtgccagggtctcctcagcgcactggcagtggtggcagactagattatggatgattcgttgctattaaagcttagagccagtgggaagtgcatcgtt

SEQ ID NO: 63327 - DNA, 737 bp, Cannabis sativa
  modified_base (577)..(580): a, c, t, g, unknown or other
tgttgaagtgaaggggcttcatgaattcaaagagccgactcagaaggaggcggccaaggcaaagagagatgccctcctagccccagtcacttatcaacactgtaagaagcgcttcgatgatggagtcttcatggcctggcaatccaatggtcagaatcttaacctcaacttttatccgaagcctgaagaggttcttgctcgcttttgggagaagaagaagaggctggatgcagtgttggaggagcgcaggggtcctcgtcttcttcctcgggctgattaaatcatttgtttatctccgttatctttttttatcattttttctttttgttacatatcctgccttcccctcacttttaagacaatttctttctttttcttgaggggagacttttatggcccgtcgccaggccttttctttttaaagttttttctttattcaaacaatctacattatgttcgaatatatttagtttttaacttcttacatttgatctgtttacgtttgtccgtgtgatatgccttagtacccccctaagtgacatgaaaatcaatttttaagtcacttagtcttacaaannnnaattagaggttgcatatatttgtttggtacaaatttcttttacagaacgtaaactttgcttcttgactattggtaatactttcggaggtgatcaacattccaggccctaggcaccatagttccgtccattctatttagcttgtaggtcccggagccg

SEQ ID NO: 63328 - DNA, 592 bp, Cannabis sativa
aagtgacatttcttatagtgattagttttctagattttggttcaaccaacctaacttcccagttaaaaatctgtaatgaacactacaaaaaagaagagaaagagaaagaaaatttcgcgctagtagaaaagtgaagcgaaaacaaattagcattggtacagttatcgatcgacacaaattgtgatgcatgtgatgtctggttttggcatgtaagttatcgatgccgttacatataattcttgaatttgtcatcctactaataatttttcttcatgcttttgatgaaaaagtagtgtaaggaaaaaatcaatttttttcttgtagtgtttagtatgttatttattatatatttggttaggttgtgttacatgagcaggttgacactaattttcaaatgcttacatttatttgattttcaagttaaaaattgtaggataatcgagcttgttactttttctcttttaattaaatagtctgattaatagtgaagcacttaattgtcaactctaacgtacgtaaattgtaagaactcgtaaaactgtaattaataaacatacggagaaatgtgagaaaaaatatcaaaactaaaatt

SEQ ID NO: 63329 - DNA, 2255 bp, Cannabis sativa
accaaaaatattttaaaattcaaatgacaagttaactttcgggatttcattacaatacctagagccgaaaataaagaaataaaaaatatttttgttttgactaatatttacaaaaaataaactattggaaagtttcttttaatttttttgttatattatatatatatatatattactttgctacatgattaaaattaaaatattgctcttacatgatatatatgtatttttaagagacaacgtccacaataaataattaacgtagcaaaatttttttagtatattttgaattatgaccaagctacgttgattgagaaatgttgctcttgtttaatttttttttctttttttttttttttttacaagaggcaaaatgagataagaaaatacagaaaataaatttacaattaggctcaattctaaaaagaaatatatccctctagtaattgtcatattttcaaatttcaaaatttttgattttatcaattcagaagatcaataactgtaaaaaaaatcgttttctcaattctcaattctcacaaaaaataaaaacttttaacttaagattttttttcagttaaatgtgttaaaaataatcatatcacatgtttggtttgtgtaatttttattagaattactatctaagtaactaaatatagtataaactagtttaacacaatattttgtttattcacataattagatgtagaatttgactcaaaaaaattttaaaaagtaagaaatttatcaaacttaacgcaagaatatactcagtacccccaactaaaatgagacagtgtcctcaatgtctaaatatgtatatgataagaacatgatatgagaactgaaaaaatagaaaatatgcagtgatagatagtgattttctaataaaaacaaatgatgaaaattaaactaaaatactaaaaataaagaaagcaattgaagataagataagtagtgaaagaattcactaaccttggtaaattggatcgtgaaggagtgtttcctccacttcaggtggtattaattctaaaaatagtttcaaccattgtccattgacttttaatacattaccagttttagaattttcaatttcaacatctctatgaggaaaaatagtacgaacattaactgaaccagtccatgtaaaacgtaacttactgagataaaaaggaatgttccaatcagaaggtcaaactaaattttgtggtttagggagtgattatgattctaattggataagaggttcaattgattcaactttaattttctgttcttgcgtgttcattaatggcgtaaactgtaacaaagaattcacactatcaaaagaacttttaaaattcataccaaaatgattttcataatttttaaaagaattatctttgtttggaaagaaatcaagtgtaacagaatcaataaacttcatctcatatacatcatcacattcaacagatttattagcaacattgaaaatattcaactcaatagtcatatttccaaatgataatttaagaacacgattacgacagttgatgattgtattagatgtgattaaaaatagtccacccaaaatgataggaatttaggcacttatgtcttcaacaaaatgagtattaagaacaatgaaatcaataggaaaaataaaatttatctacctttatcaaaatattttctatgatacctctagaaatttttacaaactgatcagctaactgaagtgtcatagatgttgactttaattctcctagaccgagttgcttataaacagaataaaacaacaaatttacactagctcctaaatcaaataaagttttattaatcacatgatagcaaataatacatggaattgtgggacaccccgaatctttttatgtaacaagacttttatattgaattatagagctgacttgttctgttaaaaatacctttttcgaaacattggtgtttctttttgcaatacacagatctttcaagaatttagagtaggcaggtatttgtttaatggcatctaagaagggatagttatacttacttgtttgaatacctctaagatgtcaactgtaacgctcgtattttaaatttatcaaactcgaaagattaactttaatatattatatctttataactatatgggtcgggatcccgaataccaaaatacaattgaaaagtattttactaatatatacgtacaattttttttttaaaacttgctagcatgcaacctcaaaatacagactccaaaataataacaaaaa

SEQ ID NO: 63330 - DNA, 1399 bp, Cannabis sativa
aataaacctcatttcaataatttttattttacattaaatatatattttaattatattagtttttttttttaatttttcttccaaattattttcttaaaaaatatatctattacgcaaaaataaattatattataaatattataaaaaaaatatgtgaaatttattagaaaaaaaaatcatacacaatttaaaaaaaaatgaaaataaaattagaagtgttgaaattaacacaaaataatatgagaaaaaaaatataaaaattattaaaagtgatttttttaaaatttatattaaacttaattttttttaaatattaggatatactttttattttgtgaagcgcaaatagaactcccctatctcatatcaggggcgaagctagaaagaaaattgaagtgagacgactacatatttttatagcttgtccagactttaaaatttcaagaagattatagaattagatattataaaatgtatttaattatttaaagtgacttttatagaataacattttatattttcatcttacacagtttctaggtagttcaaatcccaacaataatattttagttattctttaaaaaaagtaatcaaaataaaaataaaaaaattaaggcgtggagtgttgaacttgtgacatttttaacttttaaaaagattcagtactacatcaaacaaccttacttaattttgtttgactagaaatatattagtataaagtcctaaaaaaaaaattatttagacctaacttcagaagactacacctaagccgaaactagcacttgagaaattctaactagacataataataatgaaaaagacaaatcctatataaactactcctatataagagaactttgtgtgtatcaaattaaatgtaggtaaatatgtaaacttcaacttgtataagcgaaagtgtgtttttttattaaataaaataataaataaattatttttatggatcaaaataattttttattttttttaaaaaaatattttaaataacataatataagttattttgtaggaagaaatattattatagattttttttttaaaaaaaattgacagtattaattaattacaaaatgttaattggagagaaatattaagattaacctaaataatagtgtatgtggttgttatttaatatcaagtgaaggttaattatgtaatttacttagtgaagccctaaatatattcccacttttatagtggttataaatatatatttggaggatagggaatttgagcttgggaccttctctttgtttgttaatttgttttggatgtaatggtttctaattgtaatggattttctcatttataaaataataataaaaaaaaaattgaaaacgaaattaaaaaaaaattgaaaaattgaaattcgcgagacctt

SEQ ID NO: 63331 - DNA, 1210 bp, Cannabis sativa
tttttagcttactagtaagctagggatcaatccttaatctctatttttttatttttttttttaaaaaaattatttattgtgtagctatggaagattaaactttagaagagttttctaaagctttaccattacactaaagcattagaactatcattttgataataattaaactctatatatatatttatatatatagagaggtctgaaatttgattttagtttagaccccatatactttttactttagatcccatataccttaagacctgaaagtagcatagcacaaaatgagcattattgaaaacacagattgtgtcaaacaaatggaatacattaacataatttaaagaacataatcatattattaagctatgatcatatttttcaggcatatgtttcagaaatatgtcatacaaaatatgaagccttgggaatgtgtatagtaagaacaagcttgtccctttcttgtttatttgaaatttcaaaatacaatgatataatataagagaaagagtaatttttcagacaagcacagcatgggggatcggattagtgattggtcctgctcttggaggttttctttgccaggtattactttgagcatttatttttgttttaccactgtaacaatttcgagaattaaagtagtcgattttgttacactcaactattattttttactgttaaataattttaagtacttttggtaacattttttaatcaagtttttgtttttgaaattacaaagtaattttttttaaagaaaaaaaaaaatcatgttttataaaatagttttcactttttaagaatcaaaattttaaaaataaataaattttttttaattaatattttaaacttaaataaaattaactaatgaaaataaaaataaaaataaaatttatagaacatagttaaaatatttgtttttaattatagaatgtatttttattttttaaaaatataattttaaaataaaaattgtacttttaattttgtgatttaaaaatttgaaaacaaaatgttaataaagaccatttttttaaaaataatttaaattctataattaaaagtctaatattgtgagtacttggattatttaaattattctatattaggaaatatacttgcgcttaggggtgtttattggatcacatccaatgtttttaggcccatccagatccgatccaatcatatattggatgttagattt

SEQ ID NO: 63332 - DNA, 897 bp, Cannabis sativa
taaataaaactaaaaggagagtagatcaatactcactaaacaaggggaccgaacctctataaatctgtgtctcttttatcatttattgttcttgtttacacgtggtaattgtctatcataaatataatatggctctactactaatttgcaaaattctaagtcaacgctaggtatattttttaagaatatgataagaaagaaaaaaaaaactagtaaaaagtaaagatatatttatataaaataaaaattaataaaatggagtgtacttataattttatggatgcaaataaaacttctctttggtcaattacgaatgattggttgttcaatcgtagaaatagaaattacccttaaatgatgaaggaagagataagaaacatgtaatttttcgctattatgaaatgtttatgagttaccaccccttgatcactacctctgaaataaaatactagcactgaaattgaattatatatccaaaatagccctaagaagacatgatcccaagcacatattgacatgcccctaatctttcctcgaagtcactcccatcttggtagtcattgaagcaatgtccactactgcatctgtaatcccacccatggtttcactagtaaccatgaatcccaaaagcacccaaaggaaaatttgattaaatatgcttatattatcttaaaatttttcctctaaacttatacttaccaatatttctaacatttgacaactttagtgttatccttaaaatatcctgcccatttacttcaactccctctctcttcccattctttcttcttcttcccacccaatctactccaccaccacaacaaatattttgtttttcttctcttcactcatttctgttgggttttatgccctaaagaaaactcatttcaatataat

SEQ ID NO: 63333 - DNA, 1216 bp, Cannabis sativa
aatgctaatttttaacggtaaaaggaatgaaacttaacataaggggcataattatgtaattattatattttaagggaaatttttaaccaatcgtatattttatgggcaaaatcaaatagtaccgaaaattcaagagaaaaaaatactaattattctttttttttgaatgatgtaaattcaatcaaagaaaaactacaaaagtttcggaaagtccgccattatataagcagacgcacaagaagggtaattccccaaccgcaacttattacaattagaagagatagccaatttggccaaagaatgggcaaccaagttgctttgtctactgatgtgagtcacggccaagcagtgattgaattcaggtgagtcacgaacttcttccagcagcgcccccaatcagattttgctttgaaatcgccctttaggtaattaatcacccgaagacagtatgaaagggattgctgcaacttgaacagcaagcaaaattcccattcgaagagctaacgcttcagccaactccaccgagaaagcaccagagtgataatgagtttttgcagcaactacctcgccagaatgagtccttaaaaccactcctagtccaatttgcgcctcagtgtgcagcacacttgcatcacagttaatgcaaaagctctccatagggggtgcctcccagccagtatgcttaattgaaggggtgatcttgcttctatctagagacggaacattgtacatcatgtagtctatttccatttgagcccattttgtccatgactcattcggaagaacatagtggttaagacgtttcttattccttcggttccacaatagccaagacataataaggaaaacaacaaattcctccttaggaacttgctgtttaatatgaatgagtatatcaataatagtacctttgttctgttttattatcctccaaattgaaaaattcttccaaatattcttagaagagggacaaaaccataagcaatgttcaatggtctcttcctcttttccacaccaccagcaaatggagttaatgttcattccccgatgctgcaaaacagtgttaacaaggagccaaccattgcacaaccgccaagtgaaatttttgactttaggaggagcctcgatcttccaaactccggtccaccagttttttgttgttgcttctgaagaagggcctgcaatgaaattgtttgcatcggctatcttatagcca

SEQ ID NO: 63334 - DNA, 777 bp, Cannabis sativa
taattcttattacaatctaatctatattacaaaagtaataaaatgttttaataaaaataaatgccaaaggtctattttactttttctttgattatatttttggttaattaataaacttcttattcaattacattcttacactaaaacaaatacaataattaccattacaatattcattctattattatacaaaaaccaaacacctcttataaggctttggtgtcattaattatgttatttgtaattaaataacgagtcatgaaaacagataataaaacaagaaattaactaattcaagtcggctcttaattttagtggaccttagaaaaatatatatttttaaaattagtaaaaaaatatgtgtatttttaaatagaaaattattttgttcggtctcctaaattaagtgtactttaagagcactcccaataatttctttactttatttttaaaatatattatcaaaattttactttttttattttacaacatacttttacattataccatataccatacaccaatttttttaaaatacattactaaaacttcacatttttaaaattttaatataatatattcattttaaatatataatattaatatatacacatattctcatacaaaaataattattaaaactcaaaataatatatttaaagcaataaataatagtagagcatgaatggtaaattttaaaacaactttaaaataaaaaatgagtttagagtatttactatagtatatttttagtcaatttttttaaaaaaatttaaa

SEQ ID NO: 63335 - DNA, 1864 bp, Cannabis sativa
  modified_base (1177)..(1178): a, c, t, g, unknown or other
tcatccatggctagccatttagacttgtttccacttaaaatttcctcttcgtagcttttagggtcttcaatttcaatttgttgtaccattgccagtgcaaaagtgatcaggtctgctttcgcaaaccttgctggagggtgaatttctcttctggttctatctcgtgccaagtgataaccttccaaacctacctgtctggatcctttcgaaacttctatttggaaaatgttatattctggctctgcaacagcttctgtctgtgcagtatcttccagttccataatagcttctagttgtgaaccttcttttggacgtttcattctgtactccatttctatccgagtagtgttcttatttctagactttcatgcatcgcactgaaacacactacatttcccgactatcaagtggggaaattccaattcattaaaaaccacatttttagtaattacaacctttggtctacccttcttggaaatacttattgtataacccttagtacctaaggcataacctaagaaagttcctttaactgatctaggttccatcttgtcaatggattggatgtacactcaaaggttcttaaatgcattaggtttggggttctgttgtaccacatttcataagagatttttaggcctataactttgtttgggctcttatttttaaggtaggtagcagtagctaaagcttcctccaaaatggtttctctaatctgaaactaaatagtaggatctaactttgtaacagggttcggttcatccttttagcaactccattttgcttcggagtcttcactacgattctatgccaagtgatcccatacccttgaaacaacatgtcaaattcagagttaataaactctaaccctttatacgtcctaaggtttttaacttttagattggtttgattttacacctgagttttccaaattctatactgttctaggcattcattcgtagttgtcaacaaataggtccaaacacacctactaaaattatctactatagaaagaaagtatttcttatcggagtgagtaagcactttgtatggcccccaaagatcaacatgcacatattttagtatcttctttgttgtatgccttgctggtgtgaatttcaacttaagatgtttccctaaaacacaagcttcacaaaatggtaaggcacaagaattnnaattttcaattataccttgtttgtgtagttatttgaggccttgttcactgatatgcccaagtctgtgattccacaactgcatatccgattcttgcccctttagcgcacttagtgatatgaggtttcgtcttaactctggaatgtgtctaacattttttagcacctttactctgccatcacactgctggatggcaatcttgttccaatgaccctgcatgaatagtaattttccattagaactttacctccatcagatgatttatatcaaaaaatgattctcgactcggacacatgtgataagtgcatcgggagtcaagaatccactcccttttcaatgaggattctgagatggagaacaattttccatctgttgagcagtcatcactatcctccacgatcgtaactgaatctttcttacggtggtgatgcctatagtccttcctatctccattgtgagatttgttgaagccttgctactccttgtacttcttgcaaaatctttgcaagtgtctgaacctttcacagaagtaacactttcgaaattccttctctctagacttcaatctttgttgagagtattggtgtttactcttaaaaatttctttcttaggtgatctccctcttgccaaatacacttttttcttcttggattccttctccaattgcaaatcaaaatccttggagtt

SEQ ID NO: 63336 - DNA, 760 bp, Cannabis sativa
gtaagaattcccttgttcctcattctaaatgcatcattaacacatgtgctactcaccatgtgtgcaatgatatttcattactcaaagatattcactatgatcaatctataccttctatcaaatcgtctaatagaaattttgctaaggttgccagtattggtactgtcaacatttcacaaagtctttcactatctaatgttctttatgtaccaaagtttcattgcaatccactttttgtttctgctttgactaaccttgggaattattctttctattttcatcctaagtttctagccattgtaaaatacatgacaatttgaagaacaaatgattgggatgggtgaaagaataggaaaattatactatttgatttctggtgtaaaacgtgatgttctttttgctttatctgctatttcagattcaataataagatatgacacagtctggcattacagacttggacactcttcttatatcaaaaatcactcattgaataaagctttacattttcacttaagctcttccaatggtttccattactctgtctgtcattatgccaaatagaaaaagttgccatttgtttcgaatcataacatgtctactgcaccatttgatttaattcatgtagacatatagagtccttttaatgccctaaccatagatggttgcaagtactgttgtgttttgtgccctaaataaaactcattttaataaaatcagatttactaattaatataagatcagaaatcacttttatgtt

SEQ ID NO: 63337 - DNA, 890 bp, Cannabis sativa
accctgaggacgaagacccactccacccaccacgaagacgaacaaccaccaatgacgatttccctctattgtattttgaatgtttttcttattgatttagggttaaaatattatttattgatagatttagggtctgatatgagcgttttggattagatttagggttagatttgaatctgtaatttctgggttagaaaatgcattttctaggcaggcctgatgcgggtccaatgcatccccgatgtaagcccgatgcatagtgatgaaaaaattggatttgggttgaagacaaaggcctgatatagggcctgatgactagtctgatggccaatcaatttttccaaaaaatactgactgactgggtccgatatagggcctgataggtccgatagcaacaagacaatatcagacccatcaggccctatatggagcccatcggagcaatcgggctatcttcttcaaccttcaaccccgtcaacattaaactaccatcgggccctatatcgggcttacatcagacctgcatcggagcctaaagacctcaaaaatcacatattcttcactaaaaacacagacctaaccctaaatctaattgctttaaccttaaatcatgacaaaattaaggattacctttgacgaagacattgtcggtgttgggtggtggttgcagtggtccggtcgcggtggttcgtgggtcgtgtgggtcgtgtggtcgcaaagtcgaggtggttcgtgagttgtgagtcgtgtgggtggtccgattgtgtgctcctccgtggtgtgtttacagagagcgagagagagaaggaggaaagagagagaaagggttgttcaaatgggaggggtagaatggggttttaggaaaaaaattacctattctaccaatattg

SEQ ID NO: 63338 - DNA, 980 bp, Cannabis sativa
aatttcataattaaacataattaactgttaatttccaatttaaactaagcggtctttacaagatgtcaaaacggagatctccctttaagtaattgaagttatatttggggttttccaaccaaaattcatagaagacctcaaaagtagttatttcataatcctcaacctctttttggtgcgcctcccgcttagtagccaaagtctcttctaaataagttttctcctttagcaaagtttcttccttttgctaaagaagatcagtcaattctttgaccttgtcctctgggtatttaaagagtgtacagaatctttccctttcgtcgattaaatcacgcaccttcttggattctagctctaggtctgttttaagcttggcagtggaagacatgtcttctcttttctgctttaaatcgtcaataaacttattcgcagtaactagttttttgttcacttcgtccagctgctaatctttcagatcaaccactttcttggccttctcaaagccttcttcaaatattcagtggttgtattggtttggagagtggaggatttggctaaaaaataagtataagatagtttcaagttagcctacaaagacaaacaagcaactaaaatatttgtgcaacaaactcgtacaaagaactctggaataaaggttgatcatggtaatttcttttacaactctgctgaccaggagttttacaagcatatcctccacctgagtaagttgctcgttgatctcagccactaagcgatcttggcagaaactaagcatttcattagacttctttctttttggctcaatggtggacgtagtagcatttagttttgacaatttgggccactcagtattggcccccttagaacttttggctggagtgactggtggttgagttttcaaagtcttcttgaatgggggaatgaaagcagaaacatccacaaggacagttggtgatatcctcttaacttctacttggggc

SEQ ID NO: 63339 - DNA, 768 bp, Cannabis sativa
ggttgaaaagttaaaaacactagcaaccaattgaaaatagtataatccaagacaaaaaatgctttaatttccaattgaaattttgataaacaaaataaatatattgtaatagattggacattcaacaaaaaaatgctatttctttagtgaaaaaattgcaaattttgaagtattgaatcgaaaaaccaaaagagtgttaattacaatttctacatcccaaatcatatgttgttttttttttcataacaattttcgttataattacaatattatccttataattttttaaaaattccaaagagtttacagtacaaaaaatagagtttctaatattcaaatttaccacgcgtattcaaataacttcaaacattttttcggtaccttaaattattcgaaaattttcaaaaattacgaacactgccataaaaaaaatattctagtatgtgttttcaaacacggaggttattgtaataagaagttgacagtaataaattggtacatttctgttccaaacactcttaattggatgaatcatttaacaatattaataccacaaataacaaatttcttattctcttaaaaaaaaaaacatgaacaaagcaaatggtgctaaacacctaatatcatcactttatattttatactaaaatccaatagaactagaattaaaaaaaaaagaactacattggagttgataatgtcaaactcaagtgttgtttgccaataaatgaggcaaaaaaaaattcacaaacaagattataaaacatt

SEQ ID NO: 63340 - DNA, 650 bp, Cannabis sativa
  modified_base (65)..(88): a, c, t, g, unknown or other
tattcttgaaacttctaatgactactactctctatgattctagaaaattctataatattaccaannnnnnnnnnnnnnnnnnnnnnnntgtagagtaggtgttgatctttaacataattgtgggtttggagttgtttggctggaaggagccgtgagtggctttgttttctgtttgtgtttgtatttagttctatcgagtaatgaagtgttttattcttgataaaaaaaatgcaatatttagttttattatcattttaaagaaaataagagaatgatatctattgataatacttggtgtttaaaatattataagtaatatatttttgtaaatcatttgtttaggcctttattagatgatctaagtgcaaagtgctattcaagccaaacaaaaaagaaagggtgcataaagtagtactcgtgaactgtttttaaaactgatgattaaatacaaaaccaagtacaataacaaaaataaatttcatgtccttactctcttttaatagagagctaaaagaggtactgaacataatgtctcttataagaaagacttcagtgacccaaaaaaaattgactcaaaatgaccccaattgcatgtcatatattatttgcaaccccaattattctataaggaaatgggcttaaatagcccc

SEQ ID NO: 63341 - DNA, 958 bp, Cannabis sativa
ctaatattttttatttgtgttatggtggtataggttcttagagatggtgaatggagtgtggaaggaatctactattttagttccaagagacatcattaacatcaaatgagaagatttaattcaagctaacgttccatcctttatgaaaatgattttttaaagatttctttcattgaagaatcacttcttggaccgagaaatgttagagatgattttttttttatttcaacatgcaaacaagattttatatattaaagtaatattttcacctagtaataaaagacaacatatcttgttgataaccttttagaacttattaaaaataatttaaaaaatatatttccttttattttgtggttccattgccaatagaaattacaattaacaattttatatttaaaactttagacaataattttttaataaaaatttacttttatatattcatttcaaattcgatattaaacattcttaggacgcatttggaaatctaagagggaaatggatttagtgtaatggaaagtaattacacagttttgtgtgtttgtttgatcatgtaattacactgtactgtataatttgaggtaattgagaaatttcaattacactctccaattctcatgccccatgtgtgtaattacactatgtaattactaaaaaaaaatcattttaaatattttgtactaaaaattattatttttcagtgtagtaattactaaccattttgtcaaataagaaattaaaaattcataagtaattactatctgaacgtatcaaaataaatcaggtgagtgaaaaataaaagaaaaaatttacacattaagtgaagaaaaaaataagaaagagtaaaattgaattaattaattaagaataatgaagaagagtggctaacaaaataaaattaagtacagagtggctaacaaaataaaaagcgtataagaaaatagcaagtgtaaga

SEQ ID NO: 63342 - DNA, 764 bp, Cannabis sativa
  modified_base (194)..(195): a, c, t, g, unknown or other
atatcgatattagtataattaagtattaagtcttatattatttaatattataaattttaggaagtattactaactaattataaagtgacatatctaaaagatattaaacaccacatggtgcctaatagcaattataattaggctaattaagattttcgccccctaatgtaccaaatcaagccccttgaactttnntggccgttaaaaattccccttaaactattgagattgttagatttaaggatttttgtctaatttcattcaattttataatttcagttatcgtttatgtactaaaccatgctcccaaaactttgatatctaccaaattatgccccttgaactttgacatgtactaaatcattccctttgaattttcatccatgttagatttttttaataattaaaatgagacaaaagtctttaagtctaacaatctcaatagttgagagtgcatttttaacgatcttaaaagtttaaacatgatttggtatatgtcaaagttcagggggcaaaattaaatctaaattagccttataattatgaacaaaatatgaaaaaaaatgttatcggtattagtacaattaagtatcaaatatcagaatttatacaattatttttaaaaagtaactaaccaatcacaaaaaaatacatttaaaaaggtttagtggccaatagagtaactttcatttcatgtataggtttcggcatagtgtattggtattagacactagtggatagcgattggctagcgatacttccta

SEQ ID NO: 63343 - DNA, 781 bp, Cannabis sativa
tggaaaaaggcatcgtagtttgatggtggcaccgaaaagtcactgcagtagctgtcggtgctagaaaagtcaccgaagtttgctgtcggtaccagaaaagtcaccggagtagctatcggtgccaaaaaagtcaccggagttgctattgatgctggaaaattcgtcagaattggcattgtcgctggaaaaattaccaagaaactggtttattcatcaataaagttgaaaaaacaagtttccttgtgattttttcggtgacaatgccaatttcgacgacttttctggagtttgttgtcggtgccgaaaaaatcgtcagagtagttgccggtgttgggaaagtcaccggagttgctgctagcaccagaaaaatcgtcgaaattggcgttgtcgccgaaaaaatcaccaaaaaatcagtttcttggtgattttttctgctataatgccaattccgacgattttttcagagtttgatgtttgtgccagaaaagtcatcgaagtaactgctggtgttgaaaaaattgtccgagttgttgccggtgcgggaaaagtcatcaaaattgacattgccatcgaaaaaatcaccaagaaaatagtttattcctcaagaaaccattttcttgatgattttttcggtgattttttcggcgacaatgccagttccaatgacttttctggcgttgacagaaactccgcaactttttcgccaccagcagctacttcaacaacttttctggcgtcgacaacaaactccggcgactttttcgacatcaatgacaaataa

SEQ ID NO: 63344 - DNA, 930 bp, Cannabis sativa
tttgatcgagcttgctccaaatttccatagtagtcttctctccaataacttatcccaacatattgtctgcaaggttcattattagtgtagattgagcctgcttcatcacagtatcgatttccttcttcttggctgaaacaacttccttctctgatttctcaacactttctttaagcgccgaatcaagtttctggtaatatcaatatggccacaatcttctccttccataggctaaagtatcatgatccatcaaaactttcaagatcaaatcttacagaagatgaagccatgtttgagtggttcttgaatcttaacaacttgttaagattgagttttcctcctcaaagttcctagctctgataccactgttgtaatcatacatcacagaactccaaccaaagaacattcaaacaagttgaaaccaatcacaacaagattaacaaatatgcaatcaaaactagaaatcaaaacaaagattaaaatgcagaaaatgaaataatgagacacaagaattttatacaggtttagctaaacaaatgaccaactttctattactcttctgagttatcttctcaattaatgtgatgaattataagtttaagttgttaagtgcatccagaaataacatctgcaaaagggagaatcataagtgaaatttttgtgttccgagatttcttttgtttggaaataataaatccagttcctttgagatagtaggacttgttgatgaaaataacttttggaaattattattaaaataccgatatccaatcttttattcggccagctaccatcagagttttttatgcctctcatatttgattttccctccttcgtataatagtaggagcatgattctcaagttgaagttaagattctctaaatttttgatgccataatttttcttgattttcccaaaggatctatagt

SEQ ID NO: 63345 - DNA, 1189 bp, Cannabis sativa
tactgctagtctcatctagtgacttgttagaagttgcaagtctgtcaagttagctcccgagttagttatttcagtttactaacttgggtactcctcattttgagttgtttatataagactttgagtattacttctttaggtgaagttttagagagaaatttagatgataattacttttgtaatgagtgaggagggttgttaaaagagaatgtgtgtgtttgataacatctctctcaagtgaattgatttgtaaaatgcaagacaccattagtgaggtgcaagataccattgttgatgagctcaactcttctatgctcctttgtattcctccattattaaagatcgaataatgtatggcaaaatggcagatcctcctagggattaatcaccacaaaaagggtgatgaacctcattaaaatttatctctatttcatttagtttattccgcatttattttctagtttatgtcattgattgattctgtcattctagttctttagttcttgttctatttgattcttgataggtgttaattcaccacaaatgatatcagagctatatggttagatcaatgattcaagaatcaggttttggagtttcaagaactcatcaaaatttaagaactcatcaagaatagctactgccaaatatgaaatagacaagttcacaggtctgaatgactttgggttatggaggattaagatgaaagcgctccttgtgcaccaaggacttgcggatgcaatttttgctactgattctaaggaagaagaagatgtgaagatggtttctcaagagatcaaggtgaaaacacatagtgctattcttttgagtttaggagatgaagtccttagagaagttcttgatgaagaatcttccctagaattatggaacaagcttagatttatttacatgaagaaatttttggccaataagctctatttgaagaaacgtctttataggatgaagatggatgaaactaaagagctacgaaggcatctaaatgatttcaacaagttaattctagacgtgaatagtattgaggctagaattaaagaagaagatcaagcaatacttctacctaggtcactccataaggtatatgaatactttgttaatgttatactttatgggaaagatacactaactatgtctgaggttaaatcagccttgaatttgaaggaaattcaaa

SEQ ID NO: 63346 - DNA, 2483 bp, Cannabis sativa
aaggaccaaaagatgaacaacttttgttcctatggtatgtgagagatatgcgccactaaagattggctgcaaaatatttcgtggatgatgtggcattgattatctataacgaaggaattatcatttgtgagcactgatggggtagttcctatagctgggcccatatctcgagcaaagcacaccttcccttgaagcttatttcgtggagttaattgtgcaaattgggaaagctcctttctagttgatagctttggcttatgagctctttgtcaaatggtaatgttttttcaaaatccacaagtttgagcttcccactctggaggagattctatacttttatggcatgaagcctaaaccaatgagaataaagtataaaaaggttgggttctacaagtttgagaggtactctaatgctgacttttccactagtcatgttcaacattcacatgacctaaaggagtagtggttcttccccactggtaccaggaaagaaggtgcctactctccaacttaacattcaaaatcttccttgtttttgtttaagtgttaattaggcttccatacttcattgttactttgacagagcctatgccttggagcactgaaattgtgaaaatttccaagaaggtagtccattacaaggccttcactaaagcaaaagtcaaagttaaaggcttagttaccacaacactgctatgcgagcatgggctcatttctagtttctaaacatcaataacgttagtggttggggcaaaattcaggcttcaaaagaggccaaggtggtgatagctcgtgatttggcaaagattatgaaagagatagccaaagaggataagctcctagaagctagttagatgctctgccacccaattcccatgacagatgaagaggaaattttagagagatatgttgcagtgtagccgaaaaatgagggtgccttaggagccaaaactttttgaacggtaacagacccttctgtgtgttccatacccctagcctccatcacatatcccaaatggatcaaagtggattcgacaaatatttcttaaacatagatcgctttaagtattgcatgaaggatttcatagacatggtagatgagatcattaggagtcctagtaacccaaagatgtctccagatacaattagagtggaccctttcgtgaccatgtctttttgcaactccaaagaatgtggcaacttcattggttgggatcacatagtcttctttgcctgtggggaaccctatagcaggtcaatgaatggttgcacccactgatacatattacaagactatttgtagtgagttatccttattttaactttgctactttggaaattagtggctaatgttgtcattgttacgttggtagatactctagaagccaagatgatgaggtcttggagctacaagatcaccaagtctcttgccaagtcagaggcctccaactacttcctcttccttagggttttaagaaatctcccctcctatgaaggtactcgcaaaggcttctttttcctagggtcccagtgggatagagaaaactcttattgctactggggaggcctcctacgaaatggttgtgttttggagtggctcagttcacgcatgccatcctaatataaagccttggaagaggcttcacctacgtactttggtcatggagggcgctgtctaggggaattcagtgaccatctccatcatggatgacagtttcgatgggcccatctttcctaagaaaggtgtttttgggaaacctatgtgtaaaactcctcaaccataatctgaaaggaaggctaagaagacaaagcttgcttcactcactcagtgttctacaagaagatagggggatcacagaagatccaccactcctctgccaccaaatctatcacaattggctctactccaacaataataatagcaatagcaacaacaatagcaacaacaatagtaataataacaacaacaacaacaataatagcacccacaacaacaacaaaaattacagccacagctaccaaaaatatcactccccaatccgctcaaggtcaccacttcttaaacagagcctatcaggccttcgaaaggaaagcagtcctcctccaaccaacaataagggcatcaaattgttactaccttgctaaagattctacttttgaattttaggtttcctttgaagcgtagaattcttagccacaaaatcttgaaaagaatgggagaggcagagcataccataatgcaacaccatgagaaggagcatatagtgttcgcaaaaagagttgacaacctttcctccatgaagagggcaaagatctctcggagagtctgaacttctccccgaaaagaccactgattaacatggaaactcttagccaatggatgggtcataaagtggaaagtgattttgcgacttcttctacagagcttttagatggattggcaggaagcatttgttatataactttaaagaattaggcaattt

SEQ ID NO: 63347 - DNA, 778 bp, Cannabis sativa
tacaacactacgtaacttttttttaacaaatctataaagacaaattaattaacgatatatttttgagattttttcatttttacatttcaaaataattattttttgcacttttacggaattttacaaggaaatcccttttgcaactagcgttgcaacctaaattacaataaaaaatcgtataaaaacccttattgcaactagcactacaaccactttagaaactcaaaccgtaaatttgaagaaaaaattaaaaaaaaaaaatagtatataagggtaattaaagggaaaaaagtgaaggaattatttgatattaatatttgaaagtgaaggaattaaagggaaaaaaaaaagttcaacataaaattctgattggatttgatattaaggccaattgtttggcacatataattgtagttgtagcatgaagagaaaccctataaatcaactaaaaaaaattgtcataaatatttgataaatcataaattttaaaatgctataaattattaagattatattatacaaaatttttattgtttatatctatattatttttaaaaaaaatatataaatttacatgtatttaataaaaaataattttaaaaaaatttattttatcacatgcaaatgtatatacatgcatatatataatattaggtagaagttacgtgcattatttatttaaagtttagttatttattttaatttagatttctttaactaaaagaataattatgtgaatgatttgttttattatagtaatatttgtgttattatattt

SEQ ID NO: 63348 - DNA, 659 bp, Cannabis sativa
tatgttttatgtttttcttattaaatctatcgactcacagatgttatgttatgtgcagataaacgcaaagccgttgttgaacgatagtgaatttagagttggatgaagattgtacatatcgagatagtttgacctggactattgaatcttcgagacaactaggactcacgattttgtagtcaccgtgcgacatcttttaattatgtacaataaaatgtagatacgaaatcccaaattttataaacgtaatgcagtttatgtatttattaaagtttaaattaatttatgtttcattaaactcttattagcaaaataactttacaaaattttttattagtaaaaataattttctttggtcgtaaaaatgactatgaattgcattgtgcgaccataaacgactattatggtaaaaagactataaatttacattgtgtgactgtgatggttgcttagattaaatatttgaaggctcgtttggtacgccgtataagggtcgtattatattaaataattattatattaaataataaagaatattatgtttggataaagccatatattgtattaatattacaaccaaaatttttaatacaatgtatattgtattatttaatacataacaaatggtccgtattagcttgtattataacatttacaaa

SEQ ID NO: 63349 - DNA, 957 bp, Cannabis sativa
ctcacatgtttattgcagtattgagctaccttttgctgatgatccattagctttaggtttgttgaagctcttttttctttgatgtcatcaagtgatttcgccaggagggcatgattagtcgtttagtcgtaagttaatcttttgtgagatatgggttctaattccacatgtagcattgcctcataaccataggccatggcaaaaatcgtctgcccaattactgttcttttagttgttctatacgaccacaatacctctggtaattcctctggccatttccctttagcttactcgagccattttttcatggtgtcttttagtgtcttgttgatcgctttgacttgcctcttttttggggggtgtgccactattgagaaactcttgatgattccatgtgttgtatagaaatctgtgaatatctggctattgaattactttccattgtctgagacaattttttgtggaagtcagtaccaatatatgatgtttttcactacaaaatccaatactttcatggatgttatggttgccagaggtttgacttttgtccaattggtaaagtaatctgctgctaccactgcgttttgtacttcacttttacctttgggcaactgtccgatcaagtctattctccatagcaaagggccatggactttgcatctgtattggctcatttggtgatgcttgggggatcttgaaaaatctttggcatttgtcgcactttttcacatgggcctttgaatcttcaatcattgtaggccagaaatacccttgccataatatttttttaaattgactttgctcctggcatgattactacaaaaacctttgtgtaccttaagtaggactggtgcagcatcttcattcgttacacaccttaactgtggcatggagaaacctcttctatacattacaccttccacaatgatgtactgtgcagcttttctcatcattttt

SEQ ID NO: 63350 - DNA, 1170 bp, Cannabis sativa
ttaacaaaagatattcaagaaaaacagatttaaaattgattttttttgtttgaaaattctataacgcacatggagtctttactactatatttttttatttattttggcattccaaaaattcaaaataattttttagtttaaattttttttataattatttacgttatagttattttaaatattctataaaattttaaaaattttaaaaaatttaacacgttaaaaataaattcaagcagtttatatattttctaagatttttcaaattttttaaaattttgctaaatatattaaataactattaggtaaatgattatgaaaaaattagttggaatgctatggattgactcattttaggggtattgtagaagcacaccccatataaaaatagaatgtgttgtattttgttataattaaaaaaaaaaaaaggcgcgaaagatgaaaatggaaacaaattttggtatgaaatgaaaagcaagacataattacttactgtttttgttgttgttgtttttggaggaagatgttgaggttgttttggttagctttgggcctcggtgattaaggcccatacaacaagaggagcattccattattcttggttttgtggttgtggtttagaagaaagacaatgaatgaattgtattatgaaattatgaatttaggatccaaacaaagaggaggacgaggaagattgagttgaacaagttaatgttattccataaatgatagaaagaaatgtaagaagttgtaacaaagtatctctattctctactctcattctcattctcattctcatcattgcttctttccttcaacacctcacaaaacacattctccaccccattcaatcaaccccactttggctactcctttgccttctttacaaatcccactttacatttttcttaagttttttcactccatcattccactaacttaaaatcatttgtaatgtatgcacttaattgttttggttgccctaagctttaaatttttgtttttggattctcaaaatgttggaaaattgttgtgcagaataactaaaacaaaatacaattcatgccaaataatataaaggacaaaataagattattcaatgaaagacttaaaaattgtgatatatttgatataaagaaaatttttatgatatatttatattaattttta

SEQ ID NO: 63351 - DNA, 747 bp, Cannabis sativa
ttgttagtggccaccaacagcaccgtggctgagccatctctctttctctgttcttctatatattttttttttgatgaatctctattcgtctatattaaaactaataataataacttcaaataagtaacagttatgaagttcgtaaaaacaaaatacaaaaaagaagaaaaaacaaaagcttcttacccataatgttaaagtgaagtatccattatttttaaataaatatgtatattgagtaattatatgtgggcgcacatggcctgtagggatatttataatctgaataaaataatactttggttctaataaaaaaaaaactatggtttttttttcgcaaagtttacaaaattattattattattattattattattttcatgagtaaattattatgattttttaaaaaaagttattttgtggaaaaaaaaacccagaaagaaaaatatatagaaaaaaagtttaggataatcaattattttataggttgttagagggataattctagttacttctttaaggtaattaggaaccttatactatttttttttaatatgtgtatatatttttttaaaaaatatagttttacagtgtatatataaaactctacaaaatatgtaattttcactaaatttttattaaaaaagagggaaaataacgtatattgctataagaagcgccctatggttatgtatatattatataatatatatgtacgatgggaccaatatggaaaatggtggaggc

SEQ ID NO: 63352 - DNA, 1002 bp, Cannabis sativa
gatttgaagaaaaaaatatgagaataattcgtcaatccttatggattttcgaagatgctcacaaaagattgcgaaaaccccatgccccttatgtgttgactggcaatgataagcaagtgttttgtaaatttttgaaggaagttaaatttccagatggattttgtttgaacttgaagaagaaagtaactaatgacaatattgttggattgaaatcccatgattgtcatgtcataatgcaaaggttacttccagtttgtattggcaagtttttgtcgaaggaagtatcaagcaccataatagaattgtgcaattttttcaaaattttatgttcaaggacattgaatgtaaaagacgtggagaaggtccaaggagaccttattgacattttgtgcaaagtagagaagatttatcctccagcgttttttgatacataatacatttggtgatacatttacttgaggaagccatattgggcgggctagtttttatgagatggatgtacccttttgagaggtacatgaaaaatgttgaaaaattatgttaggaacaaagcaaggccggaaggatctattgctgaaggatacgttatagatgagactttaacattttgttccatgtacttcaaaggtgtgcatacaaaattcaactgtcctgagtgcaatgaagatgctcttattctatctcaatatataacaatttttaaatctcaatgtcgtccacttggtaagcaaacaataacaactctcaatgagaagactcacaaaagagctgagtgatacatattacagaattgtatcaagatcgacccttcatcaaaatgtaagttaatgtaagaaaattattcacaacttctaaatttattcaacagtctaagaaaaactctctcaatcagtaaaatatgaaatactcttcaacacaagggtcgatgactacagctgcgactcttcatcaaaatgtaagttaatatattaaatttatattttatgaagtttactttaaata

SEQ ID NO: 63353 - DNA, 3249 bp, Cannabis sativa
  modified_base (889)..(923): a, c, t, g, unknown or other
  modified_base (1937)..(1942): a, c, t, g, unknown or other
atatatcattactctaaattatatataatatttaccagataaagcaacaagatcagttcgatcaagaccaaatctgtcaaagagattaagaagagtagtgatgtttgatcctccggaaggcaagtcccttgaagcctctgaggccacgctcactcttccatctctccttcctgtgaacaccttccatagcgacttttcgttctgcaattaattacaacgtaaaaatatggcttaatatatatatatgtatgtttaattaaattattaaaaagaatattaatttgcgtactgttagggcagtgacagcatctcgagctgataaggcaagaatatcagcacaagaaacatcagttttagggcattgtgtcttaagagtttctttaatttcatcaatcacttcgtatccagctacagatcgattcggaggtgcattcttctctgttgtgttattaccatttactggatcgatcaatatcgatgcatcacaaccctgcacatatataaatatatatatatatatataattcaatacgtactttaattataattattaattaatgcaacacaagaaaaacaatatatacgtaccctgacgaaacaatcgtgataatgtagccttaggagcttaggacccaaggttggatcagcttgaacctttttggatgtaatatcacgtacaattttctcaagtgatttgcaacttttaccataaaagttatcctgaagccctcctccttttttgttattattttgaccaacgacactactaatagtcactgcgagtaaagaaacaagcagaagaatggtagtgatgttacctctcattttcatcttaattcttattagtacttaattataagtacgtactctaataataataataataatnnnnnnnnnnnnnnnnnnnnnnnnnnnnnnnnnnntaataataatgatgatgatgatcaaacaacactttagagagagagagagataaatgtttgattggttttgatgaagttaaagctagcatggacggctttatatatagcaatggattatggagataagaattttttaatttcatatttataaattatttatatttaagaaaagccagcaaattaacaatgatttcttaatagggcaagttggataatatatgatcgatccatgaattcatgggccaaaatttcctggtatgtgaataagataattgaagattttctttgtttattaatataatatttagtcaaacaaattaatcaaattactcgagtcaacgacttttaaaaatatatgtaattatgtatgtatacatatttgatacaaatttatgagcattcttttttgggcactagtagttcttagaatattgaggtggtgctcttctaattatatatagcgatattttttaaaattattatattaaattatataagactcgatatcgatacttaattattttttagttacaacaaaacttgtaattagaagtaaaaaaaattatgattaattataaatcattattgttatgttctgattaaaagttagtgactaaaggtattagtcacagaaatcataatttattgtgattaaatgtgttttagtcttattacctactgtgattaaaattaaattattataacagtacacaaataatttttttatatttagctaaaaaaattttatgtaataattaaaaattggctaattagcaattttttttctcgaatttcgacatataccaaatcatgccccctgaatttttttagccgttaaaaattcttcctgaactattgaaattgttagatttaaggacttttgtctaatttcatttaattttattgtttcagtgattgtttatgtactaaactatgctcctcagacttcgatatcgtgccctaaactttgatatgtactaaataatgcttcatgaactttcatccatgttagannnnnnttattaaaattagacaaaagtccttaaatctatcaatcttaatagtttaggggaaatttttaacggcaaaaaaaattcaagaggtatgatttattacatgttaaaattcagaaagtaaattactaattagccttaaaaatttattactaaaattattttttttaatagtaatatgacaacgagatggtaggcagcaccttttagcatttctctaactttatatatgcgcctcaaacaatgtaatcgatggagtttgtttggcttgaattttgagtaatttgagcacagaaagaggagaacaacacggggaattgtgggagaggcaaccctaaattataaaataacatattttatatacaatattaatttatgataaggacagaactttgacaattacgtccaatattccaaaatgtatatattaaatgtggcacacttgcaatttatatttaccaaaacaaatgtgcttaattattttcctaatcttgatctttcatatagtataatctcaactcactactactaatattttaattaatgttgaatgtcggtgatcataacataatattttagttataattagaaaacgttgggatcgaattaacaaatattaatttaatagagaaaaataaatagaaggaaaaagttctatcatatttttcttatttattatttttggttttatatatatattcaaagataatccaattatatcttaattgtaaacctcattaagacatggtattaagaacccaactatatgaaatggcctagctaaaataaatatagagaaatttacataaaatattatttttagcaaattttttatattttacatttaaatatatatatataataattttctatatatatatttttaccggtttttataataataccaaaacaacaagaaaatcatatgaaagtaacataaataatatacaaataaccaaaaagtaacaataagataacaacacaataacaagagtaaataatatgaagaaagcctgtattttttatataaataaaattataaaaattataaaaatatttaaaatattatacaattatatttttataatttttcttaagtatgtatgaaattatcttataaataaatagggagattgagttttttttttaattaagaataatatcgatctacttatatattttgctaaagaataataagctaattaataagcaagcttttttttcttaaatgatgttcaatgttttttttttttaatgaaatgttcaatttacttaattatttcaagcacaatactgatttttttttttttttt

SEQ ID NO: 63354 - DNA, 2797 bp, Cannabis sativa
ttgaaaagttgtatatgaacaaggatgaaatcctgttgtccagaataattggtccttaaattccttttagttggaaagttcaacgataactttgcgatgacgtgtaaattctgaggtagagaaagcctccagaataattcttcctcgcgggagtcgctttaagggtatacatacaagtgatctcatagggttcgaaaccatcccatcccaacatgtgatatcaggatctaatagaagccaaaaccatatatccattaaggattagctagaatgaggcaaatctaccataatcccaatagtctttgaagtatcttttcagagaaagaatcgctccagcacgtatgtgtttagcactccaagtcccgattttacagaaccgctcatactatactctaagtcatttgtaaggcgaccaggtggaaagcaacttgtaatattctggaaaccaaattatgaataattaagatttattatacattatggaatgattaggtagtatgcgaaggattatgatcccgctaacctaatttagcataaattataaatttttgaaatatgtggatataatgtaagttaattgtgagacaaaaatatttttagtttcggcgatcctggagactcaattggaggccaaaaatatcacaacgatattagttatcaatattgttgggattattgagacaagcagattttaaaattatcgaagtattttggggtactcggagttaaccaaatgtcttagaattagagatttcttagtggctaagaaataataagataaatattaataataaagtttttattaatattatattattatattattattactattatatcttttttaaattgataaaatttattagtttatatatattaagttcataaacagtacgtacgaacgaaaccctcctcaaccattcgaatgaaaccctcatccccttctattcatatttttttgatttttgacccgaaacctagtaattcaagcttaagtagtagcaggatagtaaattattgaagaggaagagcttaaagtaaggattggtttcgttttaaattaaatacgattggttttatatagtgactttgtgatttagaattcatacgaagattttgattttatagaattgttctttggtagccatgggactagcttcgatgtttacttattgaatttgaggtgattttgagttagaaatcgagtttagaattttctaaagcttaagtttgaatgttaattgagtttttcattgaagggctcaattttaatttttgtaacataagggtggtagtatttatgatatatatgtgccctgtgaagtttggagtgatttgaacaggtttcggtagtatttcggtgagtgcaaaacttaaaaatcgtgactcttagccacatgccaaactggtccactggttgtgaaccaattaactggttatggtggaagcggttaacctcccaacccgttaactgtttctaggcagtctcgggaaattagaaatcgtattttcgccataacttttcacttgagtgtccgttttagacattctatacgaagcttgccataatctcaaccatatggtgtatgttttagagccaaactataagttttattttagtgtatttatactatggttttggtaggaaaccctaagttgtcctttgtaactgttaattagtattttaggataaacacttattggtttaccattgttgtgacataggaccaagaccatcggggatatttctccacttgggttggccgacatgcatggatttggatcaaaggtaagaaaagtataatgtatcacatgacatgacaagtttcgtaattatcgatcgtctgattaggcaatgaaaatttgaatgcgacaagctcacctgattaggtgaagggatatatgaatgtcaaactatggcatgagtttgcctaattgtgcaatgtggcataagaatgccaaattttggtatgcgtttgcctgattgtgtgcgacataagaatgatagactaagacatgggcttgcctaattaggaaatgtgatatacaagtggacttgattaggtgatgtgatatgtggatgccaagttatgccatagactgaaaccattgttaggtttcttcctggcagcgtacatgattaagtacgtgcagtaatgacatatgagtgccaggctatgggatagaccaaaaccattgttaggttttttcctgacggcgtaccttattaggtacgggtggcagtgacatgttaatgtcagattatggcatagactaaaaccgttgttacgtctcttcctggcggtgtaccttattaggtacgaatggcagtgacatgtgagtactaggctatggtacgggcttgtctggttacgcgatacgatatattagtaccaggttgaggcacagacttgtctggttagacgaagcgatacattagtgctagattatggcacgagctcatctgattagttgatacatcgacattatatataatgccaaattatgatatggaatttcttgattagacaatgcaatatatgattacttttatttccatgcatatgattgattatgatatccacttttgaatgttattactaaatccttccatattagtgagataaataattggttattccatgtgtttactgagtttttcggaaactaaataattataacttaagagcgctaaagatattaaataatagacaagaaaatattttttacgtggttcaaacgttaatgatccttgtccacgagtcaacagtactagcctctttgggcgtgtgttttg

SEQ ID NO: 63355 - DNA, 965 bp, Cannabis sativa
aataaatattaccaacaggtttgtctgttggtaatataacgggtaatggtccccatttgcatcgtatcttttcactcttgtatccccatcagcaagagaaaaagttttagagaaaggtttcgatgcaaatgggaagatcataccaatcaaggtcattacaaaattgattatatggattctggtacgcttctactaatctatattctattatttgattctcttgaattaattagggctaaattaagttttacagtattcctaacaaaatattgttgtaaattttattctgattaatgatcacccaaatagtgactgcttagaatatggtttacaaagtttgaaacaatggtagaagctcataaaataagaatgatcatgactctcgcataaacggggcaatgttggattcttattttgatcaaataaaaggttactaaaatagtgtcaattttagatgagctgactactctattcaatagatgatatttttgactctctcctaaatgagacattttattttaatttaatttattgaaaacgttggaaaataatttaaatatgttttctgaatatgtgtataaatttatattgaaccaagtaattaacttctgtttatttatatttgtagttgtcaaactattgtttaatgatcctcaccccaattctcttttacttaacgcatttgcaaatgaactcgaaagtacaaagatgactcctggtcagagtatcactagaatataactatgttgggaattttgttgtcaaaagaaaaaatagttcaatttgttctcaacagtttatcttcagagtatagcccatttgttgtatccttcatgatcaacaatttgatctcatctgacatagacaagcttaacactgaattgttttttatgaaaagacaatgtcgaatgcaaggagatcattctctagcacttcatgttggcaattattttaccaggatctta

SEQ ID NO: 63356 - DNA, 640 bp, Cannabis sativa
ccttaaaagagtggctctccaagaggctgaaaatcaaaaccaggaagaccttatgcccatagacatggctaaacatgaccttaatgaagctctcctccgggaagagatccattggaagcagaagtctagggtccaatggctacaagagggggacatgtgcacaaaattctttatggcatccacagccataaggaggagaagaaattacattcagtgcattaaaaggagtgaagacggtatttgggtaagagagccaaaggacatagccaaagtatttatagacaacttcacccagctgttcaattcaaccgcccccacctgtatgccaccgtcgaatagaatcttcaatccctgcctctcaactcaagactgctgtgaactctcctctatcccttcggctgaggaaattgcattagcactaaatgagatgggcaaggataaagctccaggcccggatggcctcccaccaagcttttattcgcaccattgggaagttgtgaaagaggacctgatagagatggtgacttattttttcaaccatggatctttgccacattacatcaatgacacatcctttgtgctcattcctaagaaagatggccctgcctacaccaaagactatagaccaatagcgttatgc

SEQ ID NO: 63357 - DNA, 518 bp, Cannabis sativa
ggttaagctctgcacatctttgtgtttcttgggggaaggcatggttaggagagcttggattttctctggattcgcctctatcccccgctgactgacgatgaagcccagaaactttcttgatttgaccccgaaagtgcacttcttcgggttgagtttcatcccgtatctccggaccacttcaaaacattcttctatgtcatccgcgtggctagcgcatgccttcgacttgaccagcatgttgattaaggctcatgtttgtacattttaagtccttagttttgtatgaaaaatcaatttaaatatttattttcgtgatcttaattggaaaattattttgattgaaaatatttaattaattttgattttatgttctttctcagatttggattaccaattgtaagtgattgaaaataatgaagaaagaagcccaattagaggaagcccaatatgagaaaaaatgacttgttgtattgtctacattgatttccaagctcaagcccaactccatatatcccatt

SEQ ID NO: 63358 - DNA, 1967 bp, Cannabis sativa
agtacgtttaaaaatcacataatatgcctacggtagttagggtgttacacatatattctagagtaataactctagacaacataatggctaacttaaggtattaacccaagtcttgacttttggcataattattcaaataacatacatgagcgccattgcgctaaattctatgtgatagtttactgtcttacctagtaatctatgtatttggagattctaaatccctgggagtagtcacacgttcttgggatttcacaaatagggttaatcctaaattgaatttcacataaacacataatttgcattctatttacaaattaacatgtagagcttgagacgcgctttccaaaggtactaagaatttccaaaatagagttcagaataaaaagttctggtcaaaacaactaaacccaaaaccccggagaaaatagccccaaaaattcccaatttttcatcctcacaaaaatttaccacatttatatcaaatttcatccaaaattatgccaaaactaaaattttaaataatactaacccaattaagcattgatatgaaattgagcttggcaggaagctccaaaaacacccaaaatcaccattaaggcataaaatcatgaaactatgcaaaaacccaattttcaagcttgaaactcaaaaattcaaaataaacccaaaaatttcaagataaaacccagaatttacatatcaaaaccaaactaaaaacatctccaaatatcaagatgattctagcatagatctaacaacaaaaccatacaataaacactacaatttcccccatttacaaaaacatgcactcataatattcaaaaacaccaagaacaccattaataacctcttaaatctagaaattcaaacaaggaaaagagatttaaacaactacctcaagttcctcaagtaagagcatgcacataaatacaccaaatccaagctttttcttccgaaatttcaacatgaaatcacaaaattaaaagggagagagagagagaggcgggtgaggtttgttagactcagaaaaattaattttaaaatgataaaacctgattttgtggaatataacccttattggccgaaagaccaaaatgcccccaaggcacacatatattaccttatacacataaacaaagccaaccatgacattccactcacacacatatatcacatacttcacatgaatcatatatttctcatttaacacataaattatatagttaaaccccgaaaatatattttaggccccgaacccggttcgatccaaaataccgagttgtgactatgccgcgttgagttgtcaaaaaacacatgtagaaagacagaataaacatactatataataatatagttcataagcacaatataccataacatcacaaatttttaccctgctcgagttaaaacttaccaaaatgcccctgacacaccaatggagtcttaaaatgcaataaactagaataattttacatattaaattatataataatataattcctcattaatacataattaatctagttaggattgctaatttgattaataaacctgagggtattacaaagcatggatgatgggcgatactcaagtgaagctcagttcctatggctcgttgcaaggtcttcccaaacaatgatgtaaattgaggttctgtatgtgaaataatgcttgaagccactctaggtagtaagactatattgtctgcataaagtcaagctagcctagtaagcttgtaaccgtttctgtttctgatttgattggaattggaataaaatgagcagacttagtcaaacagtcaacaatcacccaaatgacgtcatgcttcataggtgtcaatggaaatctagtaacaaagtccattgtgatattggcccacttcaactctagtgtaggcaaaggttgaagtaaacttgaaggtcgttgatgttgagcaataacctattgacaaactgcattcctag

SEQ ID NO: 63359 - DNA, 661 bp, Cannabis sativa
tcaactaagcatgcattgataattgattataataacaaaaagttagcgaatagatatacctattgcaaatccgatcaacaccgaaatatgtcgactgattaagacttaaatatatacattttaagtcttcatttatgcatattaaattaatataaattaaatatttcatattattaatggtaaatttattttagttgaaaatatgtaattaattttgattttgtgttatttttcagatttgagtttgtaaaatattagtatgtttggagcttggaaacccaactcaatagttggtatttttgtaaaaatgagcaatagcccaaaatcccaatttgatcactccaagttttgaaattattgtccaagccgcatgtgtttttctcaacaatgcaatgtactctcttcaaatgggccaaagtgaatatcaaaatctaagtagaagccaatggaaataatatccatcagccaaccaaaataaatcttagaagaccattttactatattttctccaaaaataggcctaagcccaattgccaagttgtaactcatgccattgggttggctaatttaatggaagtttcactctccaattaattgacactaagctagcctagagcattgctattaggcaccagtggtgcctagcactttctcgatatgt

SEQ ID NO: 63360 - DNA, 748 bp, Cannabis sativa
ttcgagcatttcagtagtacctaacatcttctagacatattgcactgtcattagctaataatactttttaaaaattattatattaaattatatgagactcgatatttagttggaccaataacagtattaacacataaagtcaccattgatatcctttaacatttctcatagtatatagcagactgtcacataagtacaaattaaccctcttcaaagatttaatttgtgtattaattaattttaagtaatcacggatcaatttaaaacagtcacggattaattctctatatatattattattttcttaaataattaaaattaaaaaaagaaaaaatcacaggtgggaatcatactcccaatatatctctctataaaaattttacataataaaaaaataaattattggtaaagacagaaatatattcctagatgatttaacagcaaaatcattggatttaatgttaagaaaaaaaaaaaaaaaacacagatgacaattattttctacttatttttattcaaaacaactaataaaaatacacatagtcctggctaacaaattaaggcaaataagaatatgcatgtatttcccccttttttttttaataataaaaatttggttggtaataacaagtattaaatgttagttttttttaatttttcttttataaaagtatagagaaatgaaaaaaaaaaaaaaaaaagtattattattttttttttgaagattattattatttatttatttttt

SEQ ID NO: 63361 - DNA, 1600 bp, Cannabis sativa
aaatttgtttagtaactatttatgggtaatacccattaagaagtgttccatatacatatatggaacacttcttaactcccatcccattaagagtgtatacatatatataatatataacattttctatatatatatatatatgattgagggcttaagcctacactatggcctaagtcactccatccctaacttaaatatctacacatttagtccatgacactttaatacccaatgatccacgattactaaaatgatcactttatttgagtcaaacttcaaatagcaatacgcacaaatacatataagcctacattagagattttaatcgagcaccaccctgtcaagcagagtttgttccccaaattccagaattccatagctagctcttcattctcctcccatttttcctcattctcaactcccagcttactagtcatattcaccaaatcctcaacttcacaagaggaactcatgttaaccatgaagcccaataataccaaaatatcaatcattgtgcagaagcaatgtcccagagacaaaaacaatattctaatgacttttttataaagttaataatatagttccattttctacatttgattatactaaacatttatttcaaggaagctaccactattacttcaaccattgaagatggtatataatagaattatgtgtacaccattaataaactaatataaatgtccgtttaaaaaactctgatttaataactaagtttaattttataattccggtataatttatctagtaattaattctgatcaattttaacttcatgctcttgtttcttttgtaacatttcattatcataagttatgaatacagtaatgggtcaaaaataaaaaggaaatgactactaaagtaacattaatcaaacatgtgcctctcaacgtgaatatttgaatacgatggaagttataactaaaaaatttaagcactaaaaataaaaaggacataagagtagtcaatgacaatatttagaggattagttttaaacaaaaaaacaacaataataataataataagtggattttgtcatctcaaaaaaaaaaaaaaaaagtggattttgtatctcatatgttatgttcggaagtatccttgctaaagggaatacatttccacttgcgttgccggcttttgaatttgttaggatttattactccaacccaacccaaccctataaactatttaaaaagtctccatctcatttgaatggccggcttttcaccaaaaaaaataaaaagtaggagttacaattcaggtcatcatacgacaatactacacgaatacaatacgaattaatacgggttaaagtcataaaaattagatgtggattgaacttaaatgacaagattattgttttggttaggttagagtcaacgcatgacatgaaatcgacacgtattgactcatttacatccaatatattattgaaattattaatttatagttaaattattatttattttgatataaaaatatataaattagaaaaaaaaaattacttataagaatataaaatagataatttatatttgatatcaagaattttaggtattattgttgcccttaatttcgc

SEQ ID NO: 63362 - DNA, 945 bp, Cannabis sativa
  modified_base (190)..(190): a, c, t, g, unknown or other
gatagtaatggggctacgtctacctggaatttttatttctcgcgaaatcatgattacatcaagtctttaagtatcagattctccaaactctagagagagaaagtctaaagagagaagctctgaccatgtgggtaattttctaaacgtaaaaaatgaactaagggagctctccttttataggtgaagtagncccacaaaaataggagataaaatacaaatatagtgttttgcaccactaatgttgatttaacggtaaaaattagcttgtggtggtgatggctaattttttatgcttagcgggtcccactgtgagttactcgaagcttatttttataactcccttggggtaaatatagacgatgatagcttcaaatttttgactgaggtgtgaaaataacttgatagagggcttaaatagcttcaaaacacaagttgaatcatgtcaatcggataaaaattgagtgagttatgactattttactaaaatcagttcaggttccagcgcccagggtgacatcaagcgcccagactgacattccagtgcccaggttgacatttgacgtcaacctgaacgatgtgtaagtgtagaaatgtccaaaaaaaagtcctttgagatgcctaagtgatggtttgacacctcttagtctttttataggttttggtgaagctggtcacatattctcgaagatgttactgttttgcaaaaacagaagactcaaaactttcagctttcgaatgagccaaaattgaagttatgaatttgactgatctaacctcatggattattgcacttgtgaaaaacttgactaatggtcgaaacgacataagcagaacccaacaaaccatgccatttgttgacctgggcgttggggcctttaaaccgagcacttgagattttatttttaatacttccaaggcttctgaacttgaggatagggtctcctc

SEQ ID NO: 63363 - DNA, 1034 bp, Cannabis sativa
ttacttccatgtttaaagaaaataagtgttacatagggtattgtggataaattccacccctaagtatatagagatttactagttaataaagatcagaaaatattcaaatctgtcgtatcatctgatacgtttggttgtctctctattttttgagagtttgttgtgagttttattgtttttgtttggttccgtttggcgtctaagttctacgatggcttccagtagcagtgaggagagagctttagaggcagggcaagaaaccattcctctggatgaggaagagacagaagtcttatgcctccaaggtatcaatgcagaagaagtatcgattgacaccagatggtgtctagtgggcaagctcttaactggtagagtctcagattttaatgtgtttcaaaacatgatggctttcctttggcagccggggatgggaatgtacgtcaaggaacttaacccgaacttgtttctttttcaattctatcatgcaattgatatacaaagggtaattgatgggagtccgtggacatacgatcgtacacctttcattttcactaggttgaaggaaggagataacccaaggctggtcgaaataaacaatcttgatatgtgggtgcaaatacataacttacaaatgggaaatatgactcttagtgttgtgatggctctgggaaactttattggtacgttcactgaatcggatcctaataattttgtgggagtttggcgggattatcttcgcgtgagagtccgactgaatgttaataaacctatcaaacgacgaatgaagataagtatcgacaacctttcttggtattgggctaatttcaagtatgaaaaaatcccaactttttgtttcatatgcgggataatcgggcactcggagaagttctgtcccaggttgttcttgaagccgttacacctgcatgagaagccttacggattggagcagaaggctcagacgcagaggagacagtcgacctttggagcacagtggctcaggtctggtgcggcggtgcgtgaaactcagggaagca

SEQ ID NO: 63364 - DNA, 904 bp, Cannabis sativa
gttagtcaagacacaatgccttaatatagggagcattaggtaataaatactttttcttaagagggattttagttgcattacatgcattttgcattttaattataacttgggaattaaggcgtggagtagtgatattttggtactattgagatagaatggtgacctattgctgcctctgcattaggtgttgcatggtcaagttgaattttagagtgtttacaaagtaaaagaatattttcccagaaatattatcaaaattaattaaattaattttattatgattctacaattccctctttatttttaatttattaatagtagttgggggcaagtttaatcacctagcgaaaagacaaaattatgaatatatatgtcaagtgtcaacaattaattgctcttctataatagattgcgctaataatattgcaatatatatgtagttaaaaagtcaattagtcattgcttggagtactctttactaaccctattaattaaactgatcatgataatcatcatcattatatcacaagttcatttagtacgtaatatttagtacttctggacgttgttttgatacttttaattctactccaaaatctcatggccacacaagcaatatatttgttatatatatatataaacatatttgtattattttcttaaaatataggatatcaacaacaaaattgtcacatctattgatgcatattttcttcctgctactattttatttatttatttatttttgtggcggaaccaattaatcgaagacaaagtgcatatatacagaagactagaccagagtatgacacacaattagctaacactatcattattttaaaccctaattaaagaattaactgttaattaatatttcatgatatgataatggcaacttcaagaa

SEQ ID NO: 63365 - DNA, 3279 bp, Cannabis sativa
tgggagagacaatctttcttccataattctttatcaggtcttggaaaatcaaaatattatgagcaattgatctcttctttataaaagcccctggttttggtgaaccaaccacaggagaacttcagagagtcttttgctcataagctttgtgatgcacttgtacaaagtagagcatgaagctattggtctataatctattgctctcatgggattctccaccttaggaataagggaaatgacagtttcattaaattgggcaaggatcttacccatactaaaaaactctttaatcgcacagcacacttcagctccaacatcagtccacataaccttgaagaattcagagttatagccatcaggacctggactcttcgacctagggatactaaacaaagcttccttaatctccttattagtgaaagggtgaattagcctcagctgctggtttaaattcaaccggtttccattctccaaacagtcactgtcaagacgtctattaacggagctgcaactacccatgtagctcttgaaatggtcaatataatgcttcaccacatcggggtaattatcaactattgttccatgattattaacatagctagctatcctattttcctcccttcttttcttgataaaagcatagaaataagttgtgttaccatctccttgatttagccacgttatcttactcctttggacaaggaaactttttagcattctttcatggtgaagataactctctgcagctattttttcttcaaaaagaaacatctcaactctagggttattttgagcttgcaatctagcttcaaggaacctttctttagctctctgatagcccatctccacattgcccatccttgtatgattaaaagccttcaatacatgcttcagccaagacaatttgaaccagatccccaataaactagtagaacgaaccgatttatgccaactttccaaaaccaggtttttaaagtctctatgctcagaccagtaattaaaaaatttgaacgacttcacccctatctccaccataacagtcgacgatatgactattgcacaatgttctgaaacctcttcccaactaaaggaagcagccgaattcgaaaataagtccaaccaatcctcgtttttaaaagcatggtctattctagattagattctgtcctgacttccttgattgttagaccaaatgaaataggatccctgcctcttcaaagagtccaccagacccaaacttagccaattgttaaaatcctcaacctcaacccttgagagcggtttacccgctactctgtctccataattaattagggagttaaagtcacctaggagaatccaaggcttaacttggaacctaagattagctaggcccttccaaaacatcttccggtcttcaatgccattcatcccatatacaaaagtcacacaaaaagccttagtatgactagcaagtttcacatagtaatggacatattggctattctcttccaatcaccctagaaaaagtttgcttccaaattaacaacaatctaccctcaatatttgggctagtatagctatcccaaccaacaaaattttttgacatcaaatccttcaccttctttcctttcaatttagttccaccaaagctccaactccaatcttctttatatgacaaatgttaatcacaacctcttgctttttctctttattaaggcctctaacattccaacacaaattattacaacaattcatgatgatgaaaaaaaaaaagcacagtccccctgtgccccactctccttattttgcaacatctcaaaagtattcttttctttatgataagtcccctgctccctaactgtcaacttagacttgagcaaatgagctctcttaggggtttcccaattccttactaaaccgtccgcccttgttgtagcaattaaaccagtcggcttaaccccctgtttagaattacccgctgcctcacaagtacttgaaccccagaattccctaaggtatcaccaccttgtatcctaaattcattccccattctaacctcttccttatccttttcatcagctcccataactttagccccttttgtctttgtctgatcaacaatatcccatgtcttctcctgtctcgaaccacctcttttcacttcttttttaacccattgtttagcctcacccttcctacactcagccatgatatgcccaaaaccccccacagctcttacacttcactagcaaccattcataatcaaccccctgctccactgatctccctttctcattgatgtaatggataactctcagaggtgtttctgttatatccatttccaccaaaacatgggcaaatttgaccatgcacctttccttcgtaactttgtctaccataatcgggttcccaatagtactaactaaagcactcaaacaatttttcccccaatattgcagccccaaatcatgtaaatgaatccataatgtcacagatttaacaagtttcacagcatctaaatcagtagtccaaggtctagtaattaccgattttcgatcgaatggaattactctgtgttccagcacatgatctctagtggcgtcatcattgaacttgactatggtgaaccctccattcatacgcacgatctgagcaatctctagttttccccacatcctttgtataaagccttcaaaaacagcaaacagaggatttgctcccaacaccatacaaatgacagcagaactccaattagctacctgcgttttcacctcctctgcatcaatttgggcaattttaatgccttccttgatcaaaggctcctcactgtagcttaattgcagaaaactttctccaatgactctgagaaagagtctggtgatcttcatttcccacaatgtcagcccaggtctgctcttcgacattctccttctcatcacctagatcagactctgctatttccattttagtctcactttcttccacaattgcatctgtaaccacttcagcatcctaagaatatcgagcctcttcctgattagcctcctcctcactccttgctccagattctacactcaattctctggtaattggctttcggatcgctcttcgcttcttcgccagggaagagagtaagagagaacacgcacgcccttttagggttatttttattttttttttttgttatgaatgtaatactaaaagttgatgtaaacatattatattattttttttgtcaaatagtataatttttatatttctagtaaatgatctagttgattatattctttttaataa

SEQ ID NO: 63366 - DNA, 1370 bp, Cannabis sativa
  modified_base (355)..(355): a, c, t, g, unknown or other
atatgatccctcatatagttagtattacagaagaagtgatcattgagcataactacaaatttatcaagattacagatttgaccactatcgtaaagtatcacaaaagtagacaaaaattattgtgtaaaacatgctaatctcataattaagtcgacttgattggaagagtattggaggatcaggaactagaggagagattagcaaagaagatacaatagagtaatacaagaatcaagagactgaaaaaaaaaaaaaagaatcaaagactatactatacgagaaatagaaggaaggacaagtgcaatgaatatatgactaagtgaaactaaaaagcgagctcatactgagtggtggntgaatggatcattaaaattgtataaggaattataaagggcctgagtgctttttctcagtgttacgggaacaagtatctataactgataaagtaacaactatgaaactatgaaactatgaaactatggtgggaattaataagtagaaaattaagcttctcgtatgtagtaacattcaaaggaagagtatgaatagtaaagagaaattagcataaggttttctaccctacaatatattgtatgttatttttgtattgtataacgtattctcaagtgacgtgtaaggatgttcataagacaataaatagtttgtctcttaatggcatgtaaggatgttcataagagaataaatagtttgtctcttaatggcatgtaaggatgttcataagagaataaatagttttactcttaagggcatttaaggatgttcataaaagaagaaaaaaacttttatattattacgggcatgatattgcaaaacttatgtaaagaatatatttataaattaccattatttaaattatgatagattatgttttgttattaaagtaatgtatagaggaataacaatatttaaattaagttgtatatgttatagatgttatggtttgaccggtaaggaaagattaaatacttgtctttgggtccacacggtagataggaaggcaacatgttagtaaatgacgtaaaggcctaatactctcagtgtttgaaaagtaaaattcgaggacgaaatttcttttaaggagggtagaatgtaatacttagtttgagtatgttatgaattgataaattgtgtgtgtgatataactaattttatttgtctagatgagatttattatttatagatattatgtatatatttatatttgttccatgcatatgatttgtgaagtttgaatatacaaatttaaaatcttttagtgtatacatatttgaaggagtattgatgtgatttagaaataatataagtacattttactatatgaatgtaattgaggtttttttttttttttt

SEQ ID NO: 63367 - DNA, 869 bp, Cannabis sativa
  modified_base (26)..(35): a, c, t, g, unknown or other
aaaggattcttgaaattgtttcagtnnnnnnnnnntatatataaatatatatatttagtgtattatgaccttgaaataactcaagaacttcaataaatacttaccttgaagcttgggcaaagactcgtgctgataacgtcttataaaataatatagaataatataatgggctgaactcctatttatacaaaaatatgactaaaagaatggaaaactaaatgaatgtaataaagaaaaatacaaccaagcattaatggtgataattaatttagtgatttggacatcaataaataatatttcataataataatgaatatttaatgttaattaaataatgttttcttgtgtgtatattcgatttcacaactgacctttttcatttagaatagttttcaaaaaaagagaatgaattctttttatggaaaatttgattaaattagttatatttggaaaaattatctgtcccttttgttagttgctcttttcggttttgctatgaatataacagatcatataatctttatatggctagaattaaagttcaaatcgtgatcttggacttatttagaatgtttcccgatttggcctaatctactattgttgagtgcgattttatcgttgcaaatcagggtttagtttaggaaaattttgtacaactgtgtaaacgtgtttgtggctgtctctaggatttctatgttctataaataagacctagccaaacgttctcatctcttctagttttattttgggtttttttcgattatacctttattacatctaaactttacttttttatctccaggtacaaaaataaacaaaaatagaaaagtaaactttcttttttcaaaaatacggtctctacatgagac

SEQ ID NO: 63368 - DNA, 759 bp, Cannabis sativa
ggatgcatctggaaaagagctttttgaacctcctcagcttcaaccggaataacaagagtctcattcatagcaatcgacacccgactatgcacacaagtcgtgaccttttcccaatcaatttccaaagcgatgaacaactctctaaaataatcttcaacgacaacaggtaaaccattttcccaatccacccaaattccacttctatttttcagtgacaaaatataattatttttttgttggggacttgcacaagcatggaaatacttagtgttttggtcactcgattgcaaccacaatagcttggattgctgtttccaaaaaatctccttctgagcaaggacttcaaataaacggttttgagtctccttgtatctattaactaaatcaacatcccttctatttttcagcagcttcaaataatttatttcgaggttatagtgtttttattttttgaaaattgtttttatttggatgtgttacgtaaaaaaattccttatttcaaatctatttatttatttttgtgtggagtcgtaattatgcaaattttgtggtgtgacaaaaaagttcaacccatccagcactagcacaaaatatgaatatctagtgtgtcaccctaaaacttctagtttattcctggcattctccacctggagtcttcttggtcttttttatcacgatctgattggcctgatggccgagttcaagattgtgtatcgagttatgacacagaggattgaattgtttcgaaaatcagttgat

SEQ ID NO: 63369 - DNA, 1564 bp, Cannabis sativa
attcaataactataataatgagtgataataaatcaaataatcaaatacttactatttatatatattgtataataaattgaaaataattttcttcataataaacaaaatgtcaaaatgtatgattatatgaaaataaattattatgcacgtatattgtaataaaattatataatgtatatattagtgtaaattgcccatataaataaggaacacatttgttttaaaaaaaaaatgaagaaggaacattgttaagaacaaactattaaattccctacaaggtgaaataatacttttccagactttctctctctcgactcttcagtatgaacaagggttcatcttcttcccctgcatgttcacactggttttctgaatgtttccacaaggtgaaacccatgcccagctccagatcgctcgatcatggtagctccgactcctcctctactgagacacaacacagctcgactcactcgagccaagcaagccgtcttcctctgtagatacccaactactctagtcgcgtcaccattaactccggccctctcccttttccttcaaatcgtaccgtgtttaatgagcctcttagaggtattgatttcctcttacatttctccctattcactgtcaaatcgtttcagaggaaatggttttttattgaacaatacagatatatgtttggtttgcctattaaattttaccctgaaatttgtactttacaaaggatttggggtaatgggaactctcccaaatctgtcgacagaaggtacttaattccctttgctatttagagtttgaatcccccatttaatgtggtctgcaaatgtgttctgtctagtgccatattccaatactttgtgcagcaaatctacccagtattaaatactttcgatttgactgatactgcttcgtatcactcctctaccgtgagtgtttgtctatttatagttaagcctaggagtagttttgctttgtgcgaatcagtcatttctctcttaccctctctgcaaagctcattgttcatcaggttttgttctaataatagtactgtgtcttctagttatcctccccacccgtggtctcttaatacaagtttggttttattttcttttcataagttgttatatcatcagagtagtatatcgggcaggttctttttctgtgtgtgtgttatttttggaagtgttacttggtttagtcttattttcttccttgaagtcgtggttccccttcacaccttttcccttcccagtaatttcacttccttgaacaaccgggctgtcataacctttttcccatacaaacctttgtgtcttttaacccccattcagtcaccctctatctttcacaatctgccaggtcctttattgtttgaggtttcttactacttttagcttcctatcctatggatgatctaacaaattctctctctgttgctctcaacctcacagaaaccgagtgcactattcaaacactccatgaactcactcctgctactacacctgaaaccgagacacaacaagccccccttttccttgtagccaaagtgcacactgtcaagtctttc

SEQ ID NO: 63370 - DNA, 1286 bp, Cannabis sativa
atatatatatatatataaaaaggcatatattactggagaattaggtaatacagccaatataggaaaagaacaaaagagttatggaaagcttgtgggaacatcatgtacttattggaaaataatatttcatcagccaaatccattatgttggagaccatccaagactatttatattttcaaattaaaataacatgaatataaattcatcatctaaaaaacctaaacagagaaatgaaaataaataataattcatatgaaagtgaaaaaataattaagaaagaaaaataataataccttgttaataatcttcagccttaatgcccacattcttgtttggaaaattattcttgcattttcataattaggactattttaattttctgggtttttcttttctccttttttattatttatttaacagagaaaaaattatcaagctagctttttatactaaattgatctctgtttgttagtgtgtgtgtatatatatatgcattacagttaaagtcttaaattggtaaattaactaagagctatttttgtaagtattaagttatatgtatataattggggtttaattctgttataatttgaagccgactagtttgaacctccttgacatttttactgaatagaaatataatgttgaacaaagcacccaatattgaaatctggtatagagactattcctattaattctaacttttttactttttacaattttaatattaaaataataaaacttccttctagctacccaccaccaatatcaataaatatgttatttatatcagcaacttggaaatactataagaacctctctaatccataaatttttatgctaaatttagcttaaaatataaattatatttaccctatattttttaactatacttcaatacactaaaagtaaaagaaattttattttataaaaagattttaaaaaaatcaataaaatattaaatttttattaaagttgtatataaaaattatattaaatatataaataaaaatattaaaagttattaattaagtgttaaaacagtaaattacaaaaaatatatgtattgtccggtaaaatttggtctaattattttatattaaatttcacataattttaaatttaaatcatattatacactaccataaagttcaattttatgaacatgcacagactaaaagatatagagagaattatacgatatacttacttttcattttttattttaatttttatctttcttttattactctttaatttatactcaattttataagtcatattt

SEQ ID NO: 63371 - DNA, 982 bp, Cannabis sativa
gtttacactatatactatacttctagtgttgtagttttaattcgaatcatatatgtagatggacatgtagtaaatatattgtgtataattatattatgcatgactggatcgatatgtaataaacatatttcattaacttatcgtttaccatgaaaagaattacttatattacaaagatgatcattagtagatcggcctaaatcttaagtatacatgaactcctgtttatgttcattaagttctttgattcactcgttaaagtttcttagagaagattcttacaacttctatttttgaaacttaataacatgagtggctgggaacatgttatacaatcgtagaatctaagctttcctaacgtatcaaatattagttcccttatagtgtaaatcctgagagtgctaacagttggatccaaatctataataagttatatattaactgttcacattgaattaatggtacataagaaatcaagagataattagaagggtcaaacgatattttgaccaaatctaattataaattagtaattagagggtgaactacttatattaattatattaatggacaataagtaaaaattctataaatataactctatattgtcaaagagtgcacttctatatttatactggactaataatagaattcataaactagattattctattgatgagattgataataatcttgagtttattagagctttgaaatataagtctatggttctcgagtcacctttatacaacactgtacaggagaagattttatttgatgaatgaattttgagtaagaattaatttctatggaaataatttcttaagggcaaaatagtaatttgtaaaattatcgttttgattaatcatgataattatgaattatataattaatagtatttaactatttagttttattggataaaattatattaattagttaaatataatattattcctatataatattaaagagagaaatg

SEQ ID NO: 63372 - DNA, 1882 bp, Cannabis sativa
atgtaacactatgtaacataaccatcattttgactaaatgagtatataatcttgtcctcaggtttttcatcgaactttttttcttcaacttctctgatgaactttgattctataattgggcattttgaaaaactacaaatatttaataaatcaatacattgctcaattaaattcttatcgcaaatttgagaaaatatttcacatgtataacatattgagatatgtaaaaaataccaaaacaaacatatccatgtattctaaggttaattttctatatatttttcagataaccccttgttgctacaattttaactttgggttgtttcataataataatagtaatagtaataacaacaataataataataggccaaaaaaagtttctagtagtgacaaagtttggtttgactcattgtaaatagtatagtattttaaggtcctctattttttagttgaggatgcttgtagagttgtacaaattgattgttggagtaatgaaattcatcttattcattaaataataataataataaattgtatgatgtagttataaattttttatatattcatgatctattaataataacagttattgccatgcatggaagaactttgatagtgttgtctaatttattttgtgtgttattttgtgcttttttttgttggtttgttttgtgcctttagttggtttatttatgccatttcgtagtccaaataaggtagcattataagaaaaatacttggaaaatctaagacatatcatttttttaaaatttatcctttaatatattcaaaagattttgaataaagtaattaataaaatcaagaagcagtaaaatatacttcaacatgtatagtactatatatttgttatttatatagtattgtttgtttgccgaaacagccaagcgcgacaaaagcttcaccgcccttcttccagctcgagctcacagacctcttagagtcgattctaaatagaactaagaaaaagattactccttttgaatgatttagtgctctttcaaccaacgcgtttggccttatcagtgctttcaaaaactatataaattattagtttatctcggttcaagcaacgatagagtaaccctattgactgagaatctactactagtttttgttgaagaatcatgagtagctatttgaaaagtaaaaataggttgtttaggttgaggttgatcaaatacttggttgcttaacatggaagctacattagccatagagggtctatctgaagcaaggtcttgaacacatagtagcccaatatgtatgcatttcatcacttgtgatttatcatatgattcacccaataatttttcatccaccaactctaaacctctatcttcactccacaattgccatgcctgatgatcattttaataactcaaattagttttcacaacaaaaatatacaatttgcatcgaatgaattagttgtgcatgcaaacttacatatgcaataaggctctcgtattggtctccatataggaagctagaattcttttttccacttattatttccagtatcaacacgccatagctaaaaacatcagatttttcagaaaatattcctctcattccatactctggagacatataacctctgcaatatattgttgataataaccattaataaatagctcaaatgcatttatgtaattagggacaaagaaacaaaataaagtaattacatattatactatttcagatttgttaatatgaaacttaaagtaattcatataattgtcttaaaatgactttcagtaacaacattatacttctttctttcactacccaaaaaaaattatctttaattagtgaaaactttttaatcacaatataaaagttacttatgactaaaaca

SEQ ID NO: 63373 - DNA, 1484 bp, Cannabis sativa
gtagaataaaagtgatacacatcaaaagtaaatgctttacatctaaatgaaaaaactctttacacgacatccaattccattcaaagagttcatgacttaagcacatggttaaaattccaatctattgcacaagtaaacaacaatagttcaatcaatattccagctcagataccaacacatgacactaacaataacaaagactaactagaaaaaaaaaaatgaaaaactgaaaaaaattaaatctctcccctcccaaactaaagatacacattgtccccaatgtgagaaaataaaattgcagttgagagagacttacctgagccccatcagaaggggtttggtggaggtggctggtcataaggattgaaacggggcggcattgccaagtaattgggctctttaactctgacattcattcttatgatcagcaaattcaattgttgcacaattctcatcaaaaaggctcctctgcaccatataattctgagtgtgcatgttctgctgaataagataattcagttgatcatgcgtgtactgcatggctaggtcgagaggcctagcgatatgttgcagtacattttcttcacgctcttcttgttgttccgcaggaggatctcttcgagcaggcggttgaccatggggatgcggtggtttaaatctaaacaccgtggccatgtcaatactgcgttgtagtgcagcctttgtatcataggagtattgtggtactccatgcgcctcacacaaagtggggataatgtcagcaagcctgagtccacccccacaagatccctcaaccatagtatcaaaactctgtctaattatatcccccacattcaggttgaagcccttcatgatggaatagatgaatttcaacatgtctatttgagcatcagaatagtgcttattgggtaccaacctagcagttacaaaatatagccatgccttggccaccgggtttaattcacgcctaaacaactggtaaggttctccatcgtattcatgaaacctgaggcttgggtaacctaaagtttcagctatttcatcataattcaacctcttttcttgaataagctttttcagtggttgttcttcccaagtgaaggttggtaagtcatatacggcatggatagctgctgtggaaaccgacactttaacccccctaacttttactttttcatcctctctttctggctaatgagcaaaaaattctaaagctagagtttggttatttcgttcagtaatatccacaaattttgtccaacccctattgattacttgctctctaatgggctcaaatacagaaggaatgatcattctagggtgtctaaggtcaccaatttccatgcccctatcttctatgaatggcctatccttgagttgtagaaagcgctctaatgcctcgggactaagaaatctagccctatctgttggaaatattttaccaggatctagatttactagcatgtatgtttcattaacatcct

SEQ ID NO: 63374 - DNA, 726 bp, Cannabis sativa
gctaagttgacctatgatctgccagtttgaaatacatgatatgttattatttttttggaagagagatatgttgttgaatagaggggttttttctataataggcaattaaggacattaatttatgtttttaccctaaaaagaaaaataaacaaaagtagaaaagaaaatcacgggaacagatccttcttctttgtgatctagtcgaaccacacccatctcaaatctccacgattttcattcaaaacccagaaaattcaactccaacaaaatgtagatttcaactaaaaaataatctaatcccaataaatccaaatacaaaaggtaaaacaaaaaaacacagagatttctacctccattgataaaaaaaatacaaaaacaacctaaaatcaaaaattcaaattgtattcatcaaagaatttaaatacaatgagatcagataaacttcgaaacttacccaaaaatgaatccgagaacaaatacaaggtacaaaaatttctaatgattttcttcctaattaagttattttaaaaaaaaaatcttcatggttatagattttttttagattatagaaatcagataaataattaatgatataaaaaatttgttgatcttaataaataaatgaaattagattacaactaaaaaaatactaatgcatacaaatataattaactattttttatctggaaataattgtatatatgttgttttggaggattataatag

SEQ ID NO: 63375 - DNA, 674 bp, Cannabis sativa
aaaaaaaataaaaaagcaataaaaaaagattttatttgacaaacttttttttcttttttatctcagaatatatatatatggcaagattatggtaggaccgagcgaagttctttaccagtagagaattttttttaacattaatttgaaatcatgtagttattataatgtaattggtgtatacttttacgataaaactgcttgtataaagttttcctacaagttaggtctttttagcatcccttgggcgattattgttattgcagtgttcataaatgtgaggcgcattattatgaacacacatggactgactcctagaataagatcagtattgcaaagctcattgtcctctgttgttgcacatgatggggatcaagcaacagttgctcaaaatatggctcagagaatggtgtcaagattgtgtttgacctttacacttagctatcatcttgagcgggttagcgccttggaagtgctttttgttttgtctcacgaggttcttgcctttgatgaacatggttgtcgcgaggaacggtgagctgcttgtgctctctagttgcttgagcatgtggtgtgttactacgagaattggattgtctaggtgtttgtaatgtggtactagctgacggattcgagtgccttataggtgaaggtggagccctaacttgagaaggtaa

SEQ ID NO: 63376 - DNA, 1137 bp, Cannabis sativa
ttggattttatcttatgaacaatgcgtaacggtttgattctgattgtgtataaatgataatattcgaataataaactatatgcttattattattgattttcttcttgagtccttgtgactcacaggtgctatgtggtgcaggtaatggcaaggaaaagttagagttgccatgaggtgactaccttctcctgaaatgtatatattgacctcatcggcatgcgtgctgagttgacaggagttgttttggactggttgtatctgctgtccattttgattttgtgtttaaatgattatcgtatatatttctttagtaaacctttttataacaaggatccctagaacacgctttgtatgccgttataatgttcgtttttagtatttaatttttgtcaattttataatattatcatgtttcttaataattaattattttattagtaataaactagtttataaaatcacacacgtggcatattagggtgttacatttgtggtggtattcattaatgatatcttggtgtttctaagaaacgtgaggatcatgctgaacggttgacaatactattacaaacattgagagatcatcgattatatgctaagaaagagaagtgtgacttttggatggctgaagtcaaattcttagaccatgtaatttcttaagatggtatcactattgatcttctgaagatagattctattctacagtgggaaagaccaaagaatattactgaagtttgaagttttcttgggttagcaggctactatcatcgctttctgaaaaaaatttcttggattgctatgcctttgacaaagttaataagaaaggaagtaaagtttgtgtggagtgatagttgtgaagaagctttcagagaattaaaggaaagattaacttcgtgtctgttctcactattcctaatagtgaggaaccattatgtggtattcactgatgcttcaggtactggcttaggaggtgcactcatgcaaaatggcaaggtggctgcctatgcttctcgataattgaaaccacatgagaagaattaccctacacatgacctagaacttgtcgttgtagtctttatcttgaaaatttggagatgatatttgtatggcattaagtttgagttatacccagatcat

SEQ ID NO: 63377 - DNA, 649 bp, Cannabis sativa
ctttcgggcttcttccttctggacaaacacctgagccctctcgttgaactcagtgatgcttcttacgggacgtccttgtaaatcatcccacaattcgccctcgacggttaatggattagtggagatccccgcctgatgggctgtaagttgcatgctgtcatccaaatttctaaccttagcggcagccaagctaaaaatacttaagtacgccttaagcattttgccaggctgctgctttatattagttagcaaggtcgcttcgggttgcctatccctagcggcctataattgcttcttaaaatccctggacaactgctcccacgaagttattgaatgacgagtcaacttgttaaaccagctactcgctgctccaacaagcgaggtggggaacaaaatacagcgtaaattgttcgtcacgttactcgctcacattaacgtgttaaagttattcagatacgagaccatttgaatcccgaagcaaaaagggtattcataatatctgggtgatacggctcaagctcctcgttaaagtcgtatccagataatttccccaattcccccacttgatatctcctgaacttgtcctccagcttgtttatctacaattggattagattccttgctttggaccaagctgttggcaaaggtc

SEQ ID NO: 63378 - DNA, 2220 bp, Cannabis sativa
aaattaaaaaattcttttgaatgctgaaacaagtaaaaggtgcattaatacatctctttaaaaaagggataatatttagtcataactcaatatcttaaataactataacatactatgtatattttgtgtgtgcgcgcgctcatgcattgatttgaaattttgtgtttatttctaaagaacaattagcaccctcccacccatttgggctactatatatatgtatgtatatatattaatggaatatgaagagatttttaactgcttcttttgttgattaatttttggttaaaaggccgttactctctagtactccaattttcttgaaaagatagaaagaaaaaaaaaatccaaaagttcatttaattaaatctttatttagtgatataacattgttgagaatcatagggttccatcttgaatcaccaatcatgaatcattcaaaaacttgctaggaatatgaatcaacttatcacaatagataagtgtggatcgaaagcctactaagaatatggctctaataccatgttgagaatcatgtggttttatctcaaaattaattggtaataaatggagtaactcatgtttttatatatgactcaatacttttacatttaatattcatgtgagataattttttccaataaacattataattaactttatatatgtagacaagccaaattggatatgatgatgatatgaattaatgtatatattatcaatgaatgaaatcaaatgaatatatatgtgggtgtgtagggatttaagaaagttgatccagatagatgggagtttgcaaatgaaggttttctaagaggacaaaagcatcttctaaagaagattagaagaaggaaaggagctcatcaagtaccaccacctcatcatcaatactcacatcaaccagcttcttcttcttcttcttgttctaatttggaccctccttgtgttgaagttggaagatttggtttggatggtgaagtggatcgattaaagcgtgacaaacaggtgttaatggtggaacttgtcaaacttagacaacaacaacaaaacactaagacttatcttcaaacaatggaagacagactgaagaggactgagcgtaaacaacaacaaatggtgagtttcttggccaaagcaatgaagaatcctgaatttgtacaacagttgattcaacacaaggacaagagaaagaagctcgaggaggcgattcgaactaaaagaaggcgccatattgccatggaacaaggccaccaagtacagcttgatgatcatgattatatagctaaaagtggaatttttgtgaaaatggaaccacgccatgatgaagattatagcatcaataacaatatcatgttgtcagctgatgagtcttttgaagttgttgaggatgatcagttgggtgatgatgatcatgatgagcttgctattgacatgatgactactagtactactgctgctgctgatgatggggttataagttttcaaaacatggtaattgatgatagtactagtaatgatcagattgatgagttacaaggaataagcagtagtgctgatcatgatcataataataaagagctgttaattgatgaaggtttttggataaatttattgaatgagagcatggaagaagcagggaatataaatgataatgttttgagtgtagaagaagatgaggaagatgtagatgtattggttgagcagcttggtaattacttggcctctagcccaaagtaattaaacaaatagtattaaccagtaaccaatcatcaatgatatcatggctagctagtagcttagttttcatttgagaaatgttaaagggtactaatggtgactagcaccctcttatgtgttaatatagctattggtccaactaagtatagggtcctatataatttaatataatagtttttagggagtatcgctagccaatcgcaacgcgacatatcgagaaggtgctagacagcacagatgcctaataacaatgctctattatcatttcataacatttatatgggaactaattaatttttatatatgttttatctgacgactgatatctgttatacatatattatttgatctgtagagctagctatctgggtagctaaataggaggtgagcaacttctttggcttcttgaacagtttccttatatatctggttattaatcaatgagccaatatgcaagtgcattaaagttacaccaatgatgtg

SEQ ID NO: 63379 - DNA, 897 bp, Cannabis sativa
gacaagctacaagatcgttgtattacgaccaactacaaggttcttgttgtgagatgttgaatgtttctcaaaataacatctcgacaatgctgaaataccttacgtcatgaaccttgtgatccttatttagatgaggtcatctcacaagttgagtcccgatttttttttaacatgttgcacaatgtatttgttgcgagaatttattatttaggtcacatgacatacaatttgacttttcatgaaatagtccaaaaaaataggtataaaaataacataaaatatttttttaactttgcaattcaaatttaaactcattgcacatatctaaatatatatatttttattatcattttttcacacaatccacatatctaaaaaatgtatctttctattattattttcttttaaaactacaaaatagaaaaaatatttatgtttcttaaggaattgttgttacctattgcagttatcaaaaaaaatatcttcctattattatttaaaaaaaaattaaaaaaaaaagtgtatgatattttaggaaaataaaaaatattaccgttaaactaaaataataattaacaaaaaattttaaatatcattatttttttatatatataaatagcactcaaaataaattaaaaatgtgttgtttattgaataacataaaaaaaaattatacaactaaaaatacagataataaaaataaaacttaagaatataattaaatgtacatgcattacagataatattaacctagttttatatatataatcattcttatgattttcctcataattttttttaataaaaattgaatgctttaaaggttgtattattaaaagtcaatagcgaaattaattttaaagatataatatttgtataatgtatattataaatatg

SEQ ID NO: 63380 - DNA, 946 bp, Cannabis sativa
atcaaatatgatgtaaagagtagaggataatgttactgtcaacctcctattatcttttacaagttaattttcgtgcccaaaaatatatgtcagaatatattttttaaaattttttcatggccgtgttcgttatacttataacatcatccctgtaaatttttgaaaattttcgaataatttacagtacggaaaatacgttttaaattttttgaatgtgcgtgttaaactggaatatcaggaactctgttttcggcattgtaaattattcaaaaaatttcaaaaatttacagaaatgatactgtaactataacgaataccgttattaaaaaatttgaaaaaataatattctgccatgtgatttcaaacgtagaagttgactaaaaattacaataagaagttgtaattagcaatcctcaaaaatagaattaaaaatattatgccaaaaaaagttgcaaaccgaattagtgtggttagagcatgtaaggtttgaaaaaaaatcaggtgatgtacttgagcttggttcttttaattagaaaattttacacaatatacttaaaaatagatttcgttttgatatttttacgaactttttttagtttatatttttacagttttatattgtttcaacgttatttttatgttatcgtaacattatactatatttttgtaacatgtaaataacatttttttaaacaaaaaaacatataaataacagtatgtattaaaaaaaattcgtaaaatataaaaaaaataaactcaaaatctcataaaaatgtaaatttttaattatttttgaatatttctaaaataatcccttcataatgtttataatttgggcttttatattgggcctctgaattgagcttcaagccattgttttcgaattgagaaaattacactctatactctttttatattgtcattttttatttttaccttctttttt

SEQ ID NO: 63381 - DNA, 1003 bp, Cannabis sativa
atagctaaaatttaatccaactcaatttgcaaaagtacgaataagatcgcttatttgaattaattactttttaatattaaattagtgtttattaaaaactatttttttttcacattactaacaacaaaataaaataaattattattattttatgtctcgaataacaaattaaaataaataaaattaaaaaaaataaattcatagaaagaaaaaaaaattatatgtagaacgaaatgtttaatttttgttaaaattgtatgttcaaaaaaataaggggttttttcatttttacacttcaaaacagtttttttttttaaaaacatttttacggaattctacatagaaatcttttttgcaagtagtgctgcaacattaattgcaacaaaaaatcgtatagaatcccttattgcaactagcgctgcaactactttaaaaacccaaatcataaatttgaaaaaaaaatttagaaaaacactatatggggtaattcccctaaaaataaattatatatagagtaaatattaaaactatttttttagagattttttataaaagcattttttttgagagatattaaaacttgacacttacatacataaataaaaattgataaagcccaaaaaatctcattatttttttaacaataaaaaatatctagttgctgacggttgacgctgcggtcacgccaggtagggggttcgttgggtttggtgggattattcgtgggggtgggggtgtagtgtgggcggcctgggcagtgggtggtgttggggatttttcaggttgtggtggcggagctccttgctatgcgtatggatctgatgtgggctgccagattggggttgaagttggtgcgggttgagatggattcttctgttgttagctcttggataaattatcctgattctattattatgtttaaaccaattgttgaggagattaattctcttttagctgttgttggtggtggttcttgttgtgccatttcgcgtgttacgaatgg

SEQ ID NO: 63382 - DNA, 598 bp, Cannabis sativa
ttcatattaggatgttaaacaacatacatgatagaaaatctaaatcctggtaaaataattccaacactatcacctatggagctaatatgtgcatcaatgggagctcttggtgcctcatcatagggatcatactcgttgggaaagatgaatccatctttctgggaggtggtggggtcctgcatttgttgatggctttagtgttggatctgccactagcctactctacaacatattcaagatggatctacgatgctccataatgagattttggccaccattcagttctacatgagtagtctgacatgcctccttcgattcggcttgacaagtgtaagacccttttgctcaacctcaatcttgtccaacctctccaccaaatcattgtacttagcaccaccaaggcccgaagatgatgcagtgtattaaggctatgatgtaatgggttgagggtctggatcggggataagagcatttttgacatgttccgctgcttttttttttgcttggctttttgaaaataacagggtcttgggtgtcatcctcagtctgtgtgccatccaaaccaaattcaataaagatctccacatcatcataagtg

SEQ ID NO: 63383 - DNA, 1288 bp, Cannabis sativa
tgggtttcagacttggaatcgagcaagttcttgtgaagaacttgctctgctagggtttcgaatcagagaggctgtgtgtgagttgtgtttggtgtttaaggtttctagactcttctactgagtctttaaaccaaagctttgaacgacacagaatttggtgtcgtgtgctttaaacactgccgttttagtctaagtttaaattagactggtaaaggtcgattttgacctttgatactgatattaatattcttgttggtgtagggtaaattggtaaaaacctacagtttcctttatcatttgaacttggagaccaattatgggcatttgaagattttgaaaaaccttcctaattgtgtatttaaaggggctgagagtactattcgaaaattaagagaaattatgagtgtagaagaagagcaaggagagcagaagacatcattagaggactccaaatattaatctatcttccattctctatattttgtgtttgtaattaaatttctatttttttagaatgacttttattagctaattttatttttaaggattattatatgaaccacttgaatttattttatggaataatgtaattgttttatttcttcttcttcatttaattcaattccatataatctattttaattctacaattatttactggtcatcaataattgttatgtatgaattcgaattataattctggaaggtgagatttgaatatgctctgattgtttgaatgcaaattgatttaggacgaaagtacctaagttatttgtatgattttattaattgttttgtttaatgctatcattgtgatcaaactttaacataggaatatagggagtttttttcacctatattggatttataagtcttaactagattataaactgcttaactcaacttgtcaattgaataggaagaagagaaataaggtaactacattaggaagtaaaataaaagatagttgtgaatcataataatctttatctttattatttttatttctttaaatttaaatcattgtctttttttatttacttttctctaataatttttatgaatcatatagaactaatgaattaattaattggtaattaataataaattctcgtgagaaagatactttatttattattatattacttatttcgattgcgtatgtggtgaatcctcaccctcaaaacaagtttttacatcaataacaatgtccaagaaacacaaataaaaactaaaaccaatcacaaaaccaaaacttgaacttaattgaaacaagacaaagaaaact

SEQ ID NO: 63384 - DNA, 1106 bp, Cannabis sativa
gatgtcaagtggctacccctgcttgcctactgaagtagaggccactattgaagaacagtgggagaccacgcccaagaagggtcgtgggtgctagagcgttttgtactctaatgttgagtagatagaaccgatactttggagtagttttgtaagctggttattggtagtatttacaaaggtgttctccattccagtatcttagtaggagaacgagcttcgtattctcgttctaccttcccagcttgtaggcttccttactagttatttctataacttgataagggacttctcagttaggtccaaaaactcttgttgatgagtctttagtgtttagggacgaacactctttagagcaccatgtctcatatgaagaattttctactcttgacgtgtttgttgaagtgtcttgctaccttttgctggtagggctgcaactttaggttggtttgttctcttctttcttctacttcgtcgagggactttgccagtagggtgttgtttgtttgttggtcataggttgttcttctgtgagatgatggcactagctctacaggcaacatcctctcgtacccataagctagagcaaatggagtttgcccagtgtccgccttcttagttatcctatgcaactagagaacctctgggagcagttcatgctagttgccttttgcttcctcaaggcacttcagggtgtccttgagggttttcttgatagcttctacctgcccatttgcttgaggatgggccatgatagagaagcttttgatgatgccatgtctgttgcaaaaatcagtgaacatgtcactgtcaaactatttgccgttgtttgacacaatctcctagggaaggctgaaccgacatatgatgttcttgaaaatgaaggtaaggaccttcttagaggtgattgtcgccaagggttcaacttctgtccatttggtgaagtagtctacaacgacgacatcaaactatacccctccttttccctttagaagttgaccaattaggtatatcccccacacggggccaagaagactgcatcatcgttagctcattgggtggagctcttggtatctttgaaaatctttggcacttgtcacattttttga

SEQ ID NO: 63385 - DNA, 850 bp, Cannabis sativa
aattttcatttcatctacataatagttcactctctaattcatgtattgaaaagtctctcatgatatattaagcaagctcttagctggtatatgagttcatacatataaatacatagctggtatatatatatttgtggatttttgtgtaaaagtttttagtatactttgtgtgagagagaattaatatagttattgttgataggattcatacaagatttaacattggagaagctattatgtattgttttgtgtatatgagatacaaatcaatatcatttattttattgaattgtagatttattactttgatttttttttttttttttgctaatttgaatgtatatttgcattgcagataaaatctttcaacataaatatgagaatgaggggagttttcatagttgctattgtattgtgtaaacttttatgttattgcgaatctcaagaacaatcagcaaaattatcaagagatgagtttctagaaatagagaatcaacttgagcgactgaacaaatcatcaatcaaaactataaaagtattttttttttctttcattattattatttttatcttcatctcctattatctaacttattttttgtgttatgtacagacacaacatggagatatttatgattgtattgatttttacgagcaaccagcatttgatcatcctttgttgaagaatcacaaatatgattttcaagtatgtttttctcaaataattacttctctaatagctcattatttttaatttttctaaaaccatattgaataagcatgagtatttgtggtatagatgagaccttcttctcatcccaatccaatggttagggaaaacaaacctcca

SEQ ID NO: 63386 - DNA, 825 bp, Cannabis sativa
aataaattagatcaataaaattagactagttaggatttttatccccaaactttgatatgtaccaaatgatatccccagaatttttaaggtcgttaaaaatactacctgaactattgaaattgttggatttaaagacttttatccaaatttagtaaaaaaaaaatctaacatggatgaaagtttaaggaacaaaatttagtacatgtcaaagttcaagagacacgatttggtaaatatcaatgtcttgggagcatggtttagtacataaacaatcattgaaataataaaattgaatagaattaaataaaagtttttaaatctaacaatctcaatagttcagaaaaaaaaatttaacaactaaaaaatttcaaaatgtatgatttagtccgtattaaagtttagataacaaaaatcctaataaaccacataataataatactaaatactagtgtcttttagtatatttctctcatatatatttgtaaataattaataatgattgtgtggaaatttgtggtgagattaattagagcgtgagtttggacttggtcaatacctcatgacctgccaactcaatccccaaagttgttgtctaaattataagccgagtctcctagacatatgccgtacagtagggatcccaactactttaagtttttactttgattggagagacatcatatactataaatttctctaaaataagaaaatcaatatcaatattaatattaatattagacatcatatactatcaatttctctagaaccacaacactcgatgcacatataaaaaaacaacaatcaactagtttataaattaataag

SEQ ID NO: 63387 - DNA, 1131 bp, Cannabis sativa
  modified_base (821)..(821): a, c, t, g, unknown or other
tatttattttgttattgtataaatttaatgtattttaaagttagttgttattttaatttaggtaaaattataaaactaatgcaggaaaaaaaaggggagaaaatacagatttttctgccattaatcccgatgatttaaaactgtcaacgtataggcaacggttttaaaccgtcgggaagtccacattagcgatagtttttaaccgtcgcctattttgcatgttttacgacgatcgtataggcgacagttatagaaacggacgataatactttaaatgtctgtttaaaaacatcgggaaaaaccatttttgtagcagtgcaaaaggctgtaacatcataatccattggtcgtttgaagtttaggccatgagtgatagtaccactgaggtatctaagtattctcttcactgcattccagtggtatgcagaggattggccatgaattgacatactttattcacactgaaggagatctcaagtcttgtgatggtcaagtattgaagagcacctactatagaccagtataattgtggattgtccactggatctccatcaaaagcagaaagctataaaccacttgtcatgggagttggtgttggtttggcatccatcatttgagctctaccgagtaaatctctcacatatttctctcgggatagatggagacgttccttagtgtgatgaacctcaatacctagtaaatagtgaagttttccaagatttttgagagaaaatttggagtccaagtcttttatcagagttgaaatgatttcaaaatcattaccattgatgattatatcatcaacatacacaagtatgagngtgatagacttggaagtgtgctgtacgaagagactgtgatctaacttagaggaaacaaagccaaaagctgtcaaacaatgttgcagtttctcaaaccaagctcttggtgcttgtttgagtccataaatggatttattaagtctgcaaactaggtgaggagcatctggtaaatcaaacccaggaggttgagtcatataaacttcttcctttaattctctatgtagaaaagcattattcacatcgagttattgaaagcaccatccttatgcaagagccagagaaagcacaactctgattatgacaaacttga

SEQ ID NO: 63388 - DNA, 2888 bp, Cannabis sativa
gcttgctaaagagaaatatcagtcggattattagccaaattcttttgagctagtaagagtttctcgttagctaaatcataactagaaataatgcccctcaactcccaatgattgaacttcttaagcacatgtttgactcttttcaacctaccaataactctagaaagagtactcctactagtgatccataaggactagttctgaagtattgttaccttgtacatgctatgttccatccattactccttagtattatggaagcactcccaccacttctcattaataaacactctattcaacttagagtatatacgatcactatgttcatgtttattagaccaaaagatagtcaccctcaaatctatcctcatagtggaacatgacattaaagtcaccaagattcaaccaaggatgataactgaacataccagctaaggacgaccacaaatctcttctattagctatagagttttccccataaacagcaatgacatatgatatgtgtcgtaagccgtattagatttactaaataattttattccaatacttataattattttagtataaaaacaagtacaagtcgatcccacgagaattatgtttactttattatttaaaattaaacaataataaaaaaggggatttttttttttttttacatttctcttagaataaaattaacaaataaattgggaaaataaaaaattaacaaataaatgtgatactacgatatttaagaaatagttaaaggttaatcccaccctcaacaatcatccttaattaattcctaataatgaatgttatttcaatttttcaatcaaattattaatcccatagataacgctaaagcagacaattatctcaatctctatattgcaagtaataaaggcgttacactcaataaattaatctaggttcaatgaagatagattaatctaggcaataaattaatgaaacatataatttatttaacataggttctattattcattacaattaaaaatacttttgacagtattaaatattacaatttatcacaaactcttagaaccctagactattaggtgaataacattcttaggataataataatagattaaagtaaaatctaatttagtgatcatctaaacaagataaaagcaataatcatggcattaaaaatagaagaatagaaacaattcaataatggaaactaagaaaataattaacattcatcatgaaaattaagaattcatgttttgagttttgaaataaatcttaactaaaaagaaactattctgaacttgtcattataatgaaaattatagtaaaaagtacgagattaaggagaagaaattaaaagaaacactgatgatgaacaattgatgtcgcaatctcctttttcttctctttctctcttaaaacgtacgcagttcaaaagtccatgaaaacgaatcctaaaagtcctatttataccccataaaattcatttgatttaaaagaaagataaaattttaaaaaaatcctgaaatctcgctctcacaacggcaaagctttaggctccctgcagccacaacacgctcattgcggcaagagcctcatgctgaaaaatttctgttgcgtgtttatattagtattttggccataacttttttaatacaactcgaacttggatgattcaagatggtctgaaaaatctgagaacgagatctataactttaatgtttagctctaagtccaattttgcttctaaggtcgtcaaaaatcacaattacgttccgttttgtctgagctcgcttgcttccattattttccaccaaaatatactaaaatccttttaaataactccaaatgcataattagtctttaaaatagcttaacaaattataatcacacgaatcagtaatttaaataatcaatttacgaatattaatacataaattagtcatatttataagataaaatatcaacttattaacataaatttaaaatttaaactagaaattttctacttacaacaaacaagttgtggatgctcaaagggcaccgagacttggactaaactcctctgccaaataatgagaattcgaccttcaatactcaaactagagtaataatctcatttgggagaattattttgtatcatataagtcataattaacctgttcactttggttttaaacaaagcaccaaatcaacctgaagatttttaacctttccttattacccttattcatcacaacaattagcattgaataattaaagtgcacactataagcttggtgttgaatattattgtatgatgcaattatatatgaactaactcattttattttaaattaaaataaataacgtttattatatattgtgttcataaatgacaatactaattagagaaatgaaatggagtagaatgaaaaagaattaatttcattttaatactttattagtttacattttcaaatattgaaatatgattatcatgaaatggcttttaaacaatttggtggaataaaatatactattataataaacttatttaccaagctactatgcaattaatgttttagtgtatatttgttagaacatatcattactcataattaattaactaaacaaaagagaaattcgatatctgtcgtcatcacatattagtttcataattgatgtgccaaaaataatcacggattcgatacaacaaaagacaaatatatttatacaatataaaaacaattcttagtgacaaaataataataataataataataatgggccaaatgaacatcgactatgatttatcacaaacaaatgagaagagaaagaagaagacgattgtggtgattattattaccccatgatttgcaatataatgtatttgtctcaactctcattatcatgttgactattca

SEQ ID NO: 63389 - DNA, 2653 bp, Cannabis sativa
gtcaagaaattgagaaagcatctaattaacagaatcattcttgatctaaataatcttaggatgaaatttgattatgaagaccaagttatattaatcttgttgagttcacttcccaagatgtatgaatactttgttgatataatcttgtatggcaaagaaactctgaccatgatagaagttaaggctgcactgaattccaaagaaattcagataaagggagatgagaaaggagagaccaacggggaaggattactcattgtcagtggtaaaattcctaaaagagaattcaagggaaaacagaatttgaatggctgcaaaggtaacttatcaagatccacttcaaggtactccaaaggaggacatagccctaatggagttgtaggaaaacaatgttactattgcaagaaaaaaggtcatttcaaagatgagtgtttggcatttaaggccaaactgaagagatacaatcaccacaagtccaagaagcatggagttgctgatgttgcagatgactatgagtcatcaaatgcacttatggtgtctagttcgaggaagatgaaatggtcattcaagaagtgcatgatcagtagagatgttgtcttcaagaaagatgaaatggccatgaaaaccaagagcacttccaaagacaatgaacatgtatcagatgagaatgtctagattgaggtgcagcaaactgctcctccaacaccaactaacgttgtttaagatagaactgaggtaacagaagaagaagcaaatgaaggtcgccaaggattgagcagctatcaattagctagagatagagaaagaagacagagaaaagccttcacatatttggttatgctaaattcatgacatatgcacttatgattgcagaagaggttgacaattctgaacccactagttttcatgaagttatgagaagtaaagatgttgcaacatagttgcaggtcattcaagaagagatgtagtctctcaaaaagaatagaaaatggataattgtaaagaaaccagagttctacaagctagtaggatgtaaatggcttttcaagtacaaggaaggttcaaggaataaacctgttagattcaaggcaaggttagttttcgaggcgttccctcagaaggaaggcataaattataatgagcttttttctctagtggtcaaggaagcttcaatcaaagatatgatggcaaaggcagctagcatggacttggagattgaacagatggatgtaagaacaatttttttacatggggaattagaggaggaaatctatatgccacagcctgaggactttgacaatgggaacccatatgaggtatgcctactcaagagtctcgttatggcctcaagcaggcccccaagcaatggaatctcatgtttgacactcgtatgcagaatgctagatacactaaaagcaagcatgactcatgtgtgtattttgataatcgaacatatttactactctatgtggatgatatactaatctttagcaaagcaaggtcagaaattgacaagcttaaaaggaaactcagtgatgagtttgagatgaaagattgggataaagcgaagagaatccttgggatagacataaagaaacctaagttggcatgataatactttctcaagcttcctatgtacaaaaagtattgaataaatttagcatgatcaagtgcaaaccatttgtaacaccccttgctcaacatttcaagttgtctgcatctcagttaccaaaaacatgtgcagattgagccaagatgagcaaggtttcctatgcaagttgtgttaagagtctcatgtactccatggtgtgttcaagaggtgatctagctcatgagtgtggtgagcaagtacatttcagacccatgcactaaacattaggaagcattgaaatggactatgaggtacctgcaacgtactctaaatactggtgtttagtaaagagaactagttcaaggaagaaataattgattgtgtgggctcaaattttgcaacaaacctagacattagaaggcacctaacaagttttatgtttactactctcgagggctacattagctaaaaagctaaccaacaaaaagtagtagccttgtcatcaacagaagttgaatacatggttgtgcctacaaaaaccatcaaaaaggctatacaactccaccaacacctataaatattgtttactataaataatatttgtctcaactctcttgtaattgttcgatgtattaagttgtattcttagacttatttaattatgtactactaactattcttatcaataaagattcatgattcattcattcttaaataagttttattcttgcctagtttttaattaaggtggtgtttgttttgatgcaatgtaatgtattgggaatggtaattgtaatgtgaatggtaatggaataagaattgtaataagaatggtattataatgtttggtttaactcagtaatgaacattgtaatcaaataaataaattgtatattgacaaacatacccttagttttattatttttaatatttaaaatttttttaaaaaaaagtaataaaaaaaaggacaaaagagatattttctaacaatgtaatcatcattgcattgattttatgatgtaatggggattacaataaatagtgtaatgaccattacaatgt

SEQ ID NO: 63390 - DNA, 1504 bp, Cannabis sativa
gttaagttttcattgttgttctagagatgttttttatccactgctgttgttaattgttctgttttgttttcttaccattgttttataaaaagatggtatttttgtaataaaattcgtatagcaataaaattataaattttactcaaaatctagtatttttgtaaaaactctttttctcttcgctcattttataaatcggcccgtaatggaattgggcccatttggaacctctcattcgggccacatattttacgggcttaaatttgagctttcagttggcccattttagtataaaatcagaaaatatattgtgttctttccacagtaaaggttctgattatgatttttctctttaatcagtgtcttcttctactttacggattgccatgttcagtgttgattatggatattttttcttaatttccacaaagacaatttggtgaatttacatttaaatggttactaaaatttgctgagttaggtaacagaagcttgcatgtaaatatgcccaactgtttactcaaagagtacctagccatgaagaaaaggaaatgatcaatagcaagaaattaataagacttgcctgattcgaaaccaataaactgaaatgtaatggaccacaagctcaacttaaactcatattaattaaatactgttaccacaaaaaataataaatatatcatatactattatagaaatgctcaaacacactggtggtgtctagttattaattattatctttcaaatagttaatcattattaatacaattaagtatcggatcttatataatttaataaaataacttttaagctatctttaaaagttaatttttaataaggaaaggaaaatgtagcaaaaaaaaaaataaaaaatagtgaaaaacaaaaaaataaatctaacttttcaaatttaatatggaaaatttgttgaattgaaagtttttatatatgtattttctttttgtacagaatttattatttattatttattatttttttctttatttatttttttttcttcactaaaattcaacttccaaacataaatttagaaaatttcgctaaacaatcgtaaaacgtctcatttatgtggtgtgaggtactattagtgttcaataataatatattatttttcatttttcttctctgtattttctttattttttttcctcaccaaaatccaacttctaagcatagacttagagaatttcattaaacaatcgtaaaatgtctcctttatgtggtgttaggtactattaatgttaataacaatatattattatgtaacatcatgtatatagtttagtgaagaaaaataggaattgatttttttttttcaatcaaatgtgtaaaaccaatatactccaagaaaaaaaaatatttagttttggatcatttattaatatttaaaaaaaaaatccagcaaaaaaaaaacttcatttcaatattttttttcattatttttagttaagctaagctcgaaaaataaacttggccggctaaa

SEQ ID NO: 63391 - DNA, 1087 bp, Cannabis sativa
ttgaggtgtcccagtcatacaagagggtggagctactacaaaagataatgaagaaattttgtgaggcaagaaaagaagcatgtcctgatggaattgatacattagatgaagctactatgatcacaaaattaagagattacttacgagacaaaagttatctagtcatttttgacgatgtttggcgtactcgtttttgggatgagatgcaaagtgctttatcaggtgataatgaaagaaatgggagagtagttatcacaacaagacatgtggaagttgctaatttttgcaaagcatcatcgaatgttcatatccataatttacaaccccttccaccagagaaagcatgggaactcttttgcaacaaggcttttcgaaatgagcttgctggaaattgtccacgtcacttggagaagttgtctcgcgagattgttgatagatgccaaggattgccacttgcagtggtagttatagcaggtcttttatcaactaaacccaaggttgttgatgaatggaagaaactacttacaagcctaagttcagagttggaaagcaatgaattagacttttgtcaagttttttctggaaatgattcaaattgcagaatattaagtcgacgcatatcaagtgtcaatggcggatgttacgaatctattcaaaacagtgctttcgaacttacccaagtgcgatctctttttgtttttggtgaagaaggattgcctcataatgtggtacgtgctatctccatcaattatctcattttcagttattgaacttactgaaaggctttcaagatgactcatcttctgaacacagtcacaaaattctttattattttcacttctcaacatagtgatgcctaacgatctcatctcggtcaactttttcaactcttcaaatatgttaaatcccacaacattcacctcaattaaatataacttttgcaaagcttttagctctccaattcctttctgtacttttcctccttctgtaattttacgaacagaaagatgtcgcaactttttaagcttcttaatctcaatcggtaactcaaccacaagtgactgcttcagatccaaagtctctaaat

SEQ ID NO: 63392 - DNA, 973 bp, Cannabis sativa
atttgaataaacctaatataccagttaattttatgggttactattatacttaaaattaattttatttacaaaactccaaaggtattataaaagaaatttgtgagaatataatttactattaaataacttttttttttgaaacgggaatcttatataaaagaacaaacattacacaggattcggctcataaaacaaaactacttgacgagcacaaggaggtataaccccaattcacatggcactaactttgtgaaccaaagcataattggctaaagcatgagcaactcgattggcctctcggaatacaaaagagataccaacaaaactatcttattatcataagaaatcaaagctctaatttgatttagcaatccatcaatgtcacggcagccatcctccttattttggattaaatttgaaaaaaaaatagtaaaggataaatttagttgttatattgaatcttatttaattaaattttagttaactagagagggtataatggtaatttcatggttgacactagtaaaattgtgatgaggtggaagtgagaagtgtgtgttatgtataagctacaaaattaaaataatgacacacaagcagcccacatgcatgagtggacgtttacttaaaaaaaatggttctgacacacaaagaaaaggaaacaaaagaataattaaaatgtgtaacaaaacaattggtatacgtgtcaattttttttaaaaagtaagtgatatatgctatattattataaacggagctaaaactgcaaataaaatcaaattaacgccatttggcataaatttttctaaaaaaaattacacaaataccacttacacacacctttaactcaggatccatacttcctagacaactatcgcgcaaccatcgtgcaactacttagcaacccaatacaaccgaaatgaaaaattcaatcagaaagagaaccaccattaattccagcgacttcacctga

SEQ ID NO: 63393 - DNA, 536 bp, Cannabis sativa
tagtatttatagataaagggatatatggatcccaaaatcggtggttgctatagctaaattattaagtcagttatgacttaacaaacgtaacaaactcctcgtaaaaatatctccttcaactcaagttaaagcttttctgtatgagagacacgcgcttccggacaaaggacaaaagcgaactctgaagggacttctcgaataggaggaacgacagttggagactattcggaattcccttccaagtagctagccattcggataatcactactacaaaaatagtttttctcgacgtttttaagcagtcatttaaattattcccgtcggtttctataaccgccgcctatacaatcgtcgcaaaacgggtaaaataggcaacagttaaaaaccgtggctaatgtagacttcctgacagtttaaaaccgtcgagaatgtaaaaaaaagaaatatttttctgccactaatggcagaaaaataacaataacaactaactttaaacacattaaatttatacaataacaaaataaatatatataat

SEQ ID NO: 63394 - DNA, 584 bp, Cannabis sativa
ttatgaacaaaaaacatagttttagattaccaaatgtaattgggacaaacctttgtatggttccacgaccatggcttccaataaccaataattggatattgaacttgtccacagcttcacatattttttcttttggatcaccaacttctgttaatgtctctgcctcaatctgtaatagatcaaattaaaccaaaactaccttaattggattctttaatttcataaaccaatatctcagacatgtcacttgcttaaaatacttactaacaaaatgcataatccattatctttttttagtaatccaaattgaagaacattccattttgaagttaatcaaatcaaagaaaaaaaaaacttcaaaataaaaaggctagtaaggactgcaaatacattcaaaatatcaacattatctattgtttaaattctcacttgtccatatatttccttgtcattcatgttgatcatgtttgctaatccataataaaaagtaaggaaattacaaagacaaaaagaaagggattatttcacaaatacataaaaaaaacaaaaaaaatttaaaaaatatggtttcacggaattttaaa

SEQ ID NO: 63395 - DNA, 748 bp, Cannabis sativa
ccgtcgactttttccggtaccgtcgacaaactctgacgcctattccagtaccggtgacaactccggcgattactgtagtttcatttgttttatatattttttaaaatatatatataaagagaattttaatattttttaggatttttttcataaatgtacaacaaaaacaacttattacaaaaaaaaatgtgcaaaaaaaaattattttaaaaacctatacactttgaaaacatattacatgaaacagtaaattttaattattaaataatataaattaataattaaactaattactataaaaatataattaatatttgtaatattattttgtaatattttatttattatattagtattttaaaaattattaatcataaaatatatttattgacacttaaaataaacaatttcgtaaaataaatcaaataaatcataaacagttttataaaataaagaaactaaatattttaattaatgtttataaaaacaaaaaataaataattttgtgaaatttatataaatataaatattaaaaggttttattattaaaaaacaaaagcccataattttttattaagaaataaatatttattattcattttattttaaataattataatttaattattttttaattaaaatataatattaaaattataaatattaatgtatataaattttaaaagggtgtttatttatagttagaaaaaaaaaaaataataagatgtgtattatatattattgtgat

SEQ ID NO: 63396 - DNA, 1141 bp, Cannabis sativa
  modified_base (1103)..(1116): a, c, t, g, unknown or other
ttttcttatagctcttacagcagtatctctgaatgagaattcttagataatatctttagggtaaagtctcgactaaactgtttgcgacccccttggctagtgaacatacatcactatttatagggctgtgaacttggagaggaagtttttcccctctcgttacaatggatataaacagaaagatcatgggataaatgcagaattacaaagatcgtggggtagatgcagaatacactgattgtgggattgtgggtatgccatatctctgtaatctgatccccaagttatatggatttcgttgataactcataatacgaaaactggattcgctaagtgttggttgctctgcgcagatcgctgatcgctttgctttgggtatgccaacgaggcatcctattcgaactgtattctctaagcatatactcaaagttgattccgcgtgtcaccatcgtgtgataccacaacagagtgcaaaaattgggataacactatataattataccaaaagtgtgggtaattaaatttttgataattaaagccaagcatataaaaacttctttatagtaaaagataagtaatgagaactacggggaccccctgttgtaaaaatattacaaactagtttattagtgcttttacaacatgaactttgcaatccaaaaatactatcaaaacggagaatcctgttcactgggccaagccactacaactgatatgtacattgctgctacgacctcgaactaatggctgctcaacctttgctttccccttacctacaccatgaagcacctgtgagtcacagagactcagcaagaaaagtgaataaaataataactagttatattcagcagttcaatctcaaattaacttgcatgcaacatttacttaatattatacacaattctggtactttataaagtgcccctttaccactcgttaatcatgagttgaatatgtcactatcattgcctgataaagcaaacgataagtaagaaacctaaccgcggtttcaagagtaattactcgtaacagtattaatcgtttccaaccataagtcataacctaggctcaacaaatgtctaatcaaagtcttgataataatnnnnnnnnnnnnnnttcaaccattaatatttagccacat

SEQ ID NO: 63397 - DNA, 643 bp, Cannabis sativa
caatataactgtactgattgattcatatatttttgtcttcattctattacagatctggtcctggagctctaacatggtgcagtgcaagaaaagttaaccactacatcgtgagagcttgattgatgaaaaaaaaaatcatgcgtgtaaaagtatatgtatattgtttagaatattttgctgtccctattatgagtatgtgtgaggttgagtgaaagagattaataaatagaggtagtgctgctcctctagtcctcttattaaagatagatactgctgctaagagtggtcatgtaatagtgttgggtatattatttatatatcccttcttttagtcgagatgcactcaaattatccgagcataatttggatatgaactttcaaagtcatctatggacatttatggatcacttatatttattggattttcccactcttatatttattaatttgatacactttctttattgcttcatttggtttacgtaataagtgcaataaatttttttggccgaaagctttaacgagctctgctccgcgtataaataataatattaccttgtaaatgtctggtagatacaactttttatatttaaaacaaatattatatccacctatatgtatgaatctaaataagtggtggtgt

SEQ ID NO: 63398 - DNA, 1225 bp, Cannabis sativa
tgcaacataaaatgatttctgatttttattaataagtaaatatgattatattaaaatgagttttatttagggcacaaaactcaattgagttttccttaataatgggcttggattgtaagaaatcctatgatgtttatcttttcaaatcaaataagttacttggtttcaaggaggttttttttttgtatgcatgggattactgagaaggttactgtgagggatgttgctagtattttcttcagcgatgcattgaaagatgatgaagattatgtgaagatagctcttgtctacttctattttaggtatttgtatggttatccccaaggcaaaaagattgacaactttatttttgctatggttgatgaggatgattatattgaagtgttgaatcggtttggatggggaaagttattgtgggaaaagactttttatcacctcaagattgcattgaaggatggtaacgatacttttgaacagcttgctaaaaaaaggaagattgagaagggttacaagcttaaaggatttcatattgcctttctaatttggctgtacgagatcatttcatctttgtcacctcggttttgcaaaagaatcggcaacaagagtcctcatgttttgaattgggagaataaccctacctcggaatttagtgagttgattcagaatgtgtttaacaatccgaaggtaattttttttattcaaattttattttttttggttattgtttgttttatttttctttggtttttttaatttgttttgtatttttatcttttcagattgttataaaggattttgttactttgcgtggtgaaaagtctcaaagtcttttttctaaatttaagtttgatccccaatacattcctaagaggattggtgatgttgtgtgttctgatgaagttaatgatgaggtcaaggtattttttttgtctaatattcaggtttctcatgaaaagttggaccatatttgtgtagatctgaattctatcaaagagtgtcaacaacaaattaaggatgaaatttctagtttgaggattgagtttttgggcgagtttgctaaattaggagaaattctcaatggattgaagaagaagagtgatggaaattctaaggattctgaatttttttcatcccctgtaagagaggtaactagtttcttcgtttagtgttatttgattataggtttgttatttttggtgtaattatagttatttatcaattagtt

SEQ ID NO: 63399 - DNA, 781 bp, Cannabis sativa
cccattcaaaaaccctaattcacccacaaaaacatttatgtagaaaatggagcaagaggaatccgaaactcacctagaaaatcttcgattgagctccaattactagaaaaatgaaaagcccagaaaaaaaaaaataaagaaaaaagaatcagaagagggagaaagaaataagaagggtcttcctttttcctttttagagagagagagaaaagagagacccctattacacaatggtcggctccaaacgatgggaacagatataatctatatctctcttcggtgacaaagtcgtacacgttactgtttcttaaagagatttttctttttctttttctttttttaatttttagagtttacaaaaattgttgattgaaaatgatggagatttttttttttctttttttaaatcatatgatggagattcgaacaaaaaataactcgagttttaatagtttttttttttttttgcttaataagaattttaatagctgaatgagtaaaataattgatttggacgtgttttcgcgtgtgtaggctaaaattaacaagaacattgcatgcattggattaggttagtttttagcatagcctcacttgttgtcattcaatttaattaccttttctatattagtgatctgtgttggtatgagactacagagttgaaaaagacttaaatagattgattgttactatatatatcaacaaggtgtattttatttttcggtagcccatcatgaaagtgcaagtgaggacaaaacatgttagaaacactcgtgttggt

SEQ ID NO: 63400 - DNA, 734 bp, Cannabis sativa
acaaatatttatacataaataagtgtatagtcactctcttttgatcatttttgtatgtgtttcagcattttagagaattttttagtttaattttttaaaaaatattatattatatactcattttactttattttcataatttttaaaatatactcacttttatagatgatatctctattataccttttaagttaatataaattatgtgctatatttaagtggaaagtgagggtatattaggcaacccactcataaaagtaattatattttaatgaaatttaatatgaggttatttttgactaatggatctaaaaaagatgaatttatcaacttattccaaatctttttcatgaccgcatacatgtaattatttaggactatttgtaaatttttagaaaattctaagtaatttacagtgtcgaatgagatttatattttttattgcacgagtgactttttcttaattataagtgcggtaagtaactatttaaattttatttccgatattgtaaattattcaaaaaaaaaaattaaaaatttataagtagtcttaaataactataacatatacgattatgaaaaaaaaattaaaaattctcttaagtaccaaaacagataagtgatctactgaaacgactctatggcgtaaaatttccaatataaataatataaattagcataaagtgtattaatttgttagttggtcatactataaaatgtaatatggtcaagct

SEQ ID NO: 63401 - DNA, 530 bp, Cannabis sativa
aactgtatttttattatttttgtatatttatgaaataattcctataggcatattttttttttctttttaaatgtaagggcatgtttttagggttaaaggaaaatttatatattctccgaatttgtttatatgatataagtgcatgtatatattgtaattattttggtcattccacaaatttttttaaatttttaaataatttataatacctaaaaatagttcaaaataatcagtttaagtgcgtataaaacaacttgctttcatatatttttagcacatgatcatcagagtcggtcttaaaatttagtgaattatatagtaaacaaaaaaatatttttagactcttatttagaaagaaattattttttaaaattagtaaaaatatgtacatttttaaaatagaataattttttcgggaccttaaactaggtgggccctagacatacaaatctaactcatctatattatcaaacttgcacgtgatgaatagattatgatctatttttttttttttgctaattagtaatttt

SEQ ID NO: 63402 - DNA, 3764 bp, Cannabis sativa
tattaacttttatggacacctaaacatataatattagtataaattaaaatttaatataatattatataaatatataatatataatctaattaaatatgggaaacttacaaaatactacaattttgattaacttttacaaaaatactgttacacgcaaatcttttcaaaaatactatatttttataaaacactagtagaacacaaaacagaataactaaaaacaacagtgcaaacttaaccagtaaaaaaaaaaataccgcctaacagtatttttgtaaaaaatgataaatttagtataacatgttcccttaaatataatacaatacaatatgacctcgaacaaccttccaaaagcccttacaaaagtcatatactaaataaaaactctatataagagcatttccctccaataacgggtaactagtaataatagtcagatagataggctaatgtaatgttcaagccaaagaattcgggggagtacgaaatgaatatgattgtatgcgtggactcaattttactacattacgtagcaaacatccaatgccaataattattaaatgatcaattagttattaaacaatttcttgataaaaactgatataagaacatgaatacaagataaccccaaaagaaaagggaaaaaaagagaaaaaaacaagtcaaatacaaatccaaagaaagtaactttgatttactcacttacaaatatcagttctcctttgattgggcaacttaacccatcttgttgacaattgagcattaaataaaattacatctaaccacacaaatgtctcccccaataggttacatagcaagattcccattaaaaaaaatatatgaaaagaaaaaatataagagctaagaatatactaaccacaacaaaagtgtatcccccatcgaaatgggatctaaaatccaaatttaggaaaggttgtgaagcagcccctccaataaatttcaatatccaataatctttatcaccacacctgccaccccatcccttagacatctaccagtatccgagtggcactatatatggcttgaccttgacctcgaccatgagttttctcagaaaaggaaacaagattctacctggtcaaaccaaaagataatacaattcattaacatagcatgttagaaaaataaaaagacttttcatttattgaaattttaacatatccaactccaatatgaaagtaataccactttcatatgccaagatacaaaaacttgtatcttgttagtttatgtccatatcaactaatttaccaaaataaagtgacgagcaatgtgagagaaaacactataatcaagtagattacaggtttgaagagaaggaacgccgctatccttcagtattttaaaaaaaaaatactgaaattctcagattcagaatagtcaaacgtatattcttccagcagcaaaaacaattacatatttggaaagtatctaaatagaagatgtaatacagatggatcaccacaaaggacaaaatgggataacagcctaataataaataaaataaacgacaaacaagtcaaaaacagcatgtaactactcaacagcaaatttaaaaaataaatgaccattaacgcccagcatcataaagtctgcacaatttcaatagaaacagatcattcaaaaattctagtatatataaccacattaattatcctactacactaacctcagagaaaccctccccctgtccatgtggcatcagactttccattctgaccagccggtttagtatcagattcactctgatagaaactatcatacccatcttctttcggatcatcccatccagcccaatcatcattgttgtgagacgatttaccctttgttgattcttccttcctgttgtctttttggtcccaatcatcccaagaagttgagttaaaagaattaacatgaccagccgaagaggactgcccaccagaggaagaattaaattctttgttctgcttaaactcttgatagtatccattttgttcactatcattacgctgccagttgtcagccgtccaggtacttccttcttttgcatactcttcaaccttctgtgaagctattgccatgacccctttcataatcccccatgtcctctgtccaatctcagaagtctttgcagttacaacattaacagtttcattcaccttgtaatcataaccaccttctttgacctgcagtaaaaataaaccatgagcctagcttaagaaaagagtacctttactttaaccttcacaccagtaaagtaaaatatgaagaccttcttgtaaatagaatatgtaaaaatgctcgcttcatagatcgggcagagaaatgccaagcttgggaataatacaacagcataataagtgctaatttcacatagtttctcctaattgcaaaagaataatcaagaggctattcacttaagaatcgcattgcaaaatactagccacactgagagcgtaaacaaagtccaattttctttttcaaataccaatgatccatgatctacaaagaaattttggaaagaaactcgtacgttgacaccttactaaacaaaactcaaactccctataaacattccacagattgacaaccttggcacagctgagtagattaggttaattaactgtaacacaccatccttctccgagttatgatagggaatggaggacaaaaagggacagtacaaagtgggatatcatcgcataaactcacaacaatttcagccaccacaaaatagcattgagcacaacaagtaaacaattatttctactttgttttaagcaaatatttctattaatcaaataagaaaaaactctagtcgttattattattaaaaaaaaggaacataaaactctgagcttaagtctttccataagcataaatgcacaagtaataaagcacaaagagaaatagaattaatcagaggatctcgttcatctcatcaactgcaaaaaagaatatgatcaaataccttagaagttatctcttttgtgccagcttgaacaacacttgcagccgattgagcagcggatgcggcaacaagtgataatctaccaaatccctaaacaagaacaataaaagataaaacaaaaaagaaaaatgtacgcttgctcatgcttaatattatactaagaagaaaactttaaaataaaaaatcaaaagaagacattgcagcagaattacctgagaaacaacagacaatacatcgccttgggcgctgttattcctctgagaaggaggagccgggctcgatccaaaacccacgtacttgccaccttgcgacggaggaagtccctccgggcgagaatcgttttctgccaacttacgttggaaaaagctgtccttaccggcagcagaggcttccaattgcgccctcgtgtatatatcctccgtagatttcgaccgagacggcatgcccccgtgaccatccccagctcctctaacattgcccgttgattgatttcgcctaatgtcattcgaagaagaaggagatctaaatccatcgtcgttatcccaagtatcccaaccgctgttgccattcctagcaccgccttgagctaaaggcggcttcttagagccagcaccgacattctcctttgcaacgggagggtcccgccacgaacggccttcggccaaggcttgaatccgatcccgatatacactggcagcgttggtattgtacttagtgacaatatccgtctccttagggataccatactgagagaagaatgcattgaggcggtcgttgccaccggcttcca

SEQ ID NO: 63403 - DNA, 1171 bp, Cannabis sativa
tttgaacgcgtttaagttgtttcggagatcaaaggaggttgtgtttaagtttatgggaccccaaagatcagttttaacgtgaataatcgaagctttaaggtttgaaacgaaatttgccatttttggactccattaacaacagtacaccggagttggagaagatgactccgatttgacgttttggggttgttatcttgggtagttcttgatcgttttgaggtcctaagcactgtggaaagcttccctaatcgaaaggacgtgccaagagcaatcagggacaaagttacactttgtcggcgacaaaatcgacatgaacggcggcatctgcgttctgggcagttctgaggtatttttcccatctttttttgtagatttcgattctacatattattttaggatgttttcttgtaattatttgatttattattaattatttagtttatttgctcaattaattaggaaaaatacttagattactcaaaaaattctaagtttattttatatgattagttatgagatataaactgttataaaattggtagatttgaatttcagccacttttgtatttttcatgaattatctatgttatttcttaatttaattatgcaaaatacttaggttgctaaagaaaaatctaagtttattttctatgattggttatggattttaaactgttagaaaattgatagattagatttttgatcgattttgtatttttcatgaattatttgtgttttctaaatttaattatgaaaaatacctaggttgttcaaaaaaaaatcaaagtaaattatttggggtttggtacagaatataaactgtgttagaatggttagatttagttttcgatcattttttgtatttttcatgaatttatttagttaatacttgaattatttatagaaaatacttaggtgatgctaaaatagtaaaatgtatttttgtaatgctatttactatctatggtacgaaataaaaagatttttataatttattagttgttgtaggtatttattacacttatttgtgactaattagctatttaattgagtttgaaatagagtaatatttaaaattgtgttcactgtttgggaactgtcaatatgatgttacaatataattctagtctatgaaataaatttaagactaggttgagatgttttgttattt

SEQ ID NO: 63404 - DNA, 723 bp, Cannabis sativa
gcccctaaaatgagagtataggtcctaggcgcgcgagcctagcccgtctatgcttagggctgaccttgcttatgaattgtgtatgaatttatattagaccttcaatttattttctgttattaattattgtagtttcaattttgaatcttcattgttggtctaacttgacttgttatttttaatggaacaaatctcgaaaattgtcatccattagacaacataacagtgttagatatcgacagataaatttttgtaaatgcgacatctagctgtctcatccaaagaggaaactaagactagtgtttacaatatgaaacaatgaagaagtttataaaataagagtaactttgactcttacctaaaagggacattgttggtatcttattttaatcaaaattattctttatttttcctcttagctttttcattaagaaactgcttagatagcacatgattggataacaaaaattataaatcatctgtttttgatgtcactctattttttttctataagtataagtggcacagatgactagattctaaacattctatcctgaaatgatataaattctcgatcttaaagaatctcctacttgtatatgcttactataggtgacttaaaattagagtaaaaatagtagtggtggtccaagctagaataattactcaaggaatatttggtattaatttaagtctctaactttatattttagattccaaata

SEQ ID NO: 63405 - DNA, 806 bp, Cannabis sativa
  modified_base (193)..(193): a, c, t, g, unknown or other
aattgataaataaatggtaaaagagaccttaagtggccgaccataggatgtgggcccaccactcgcaattttaccattttcaactatttatcctatatttttacaaaggccatattttctaattcaacttgatatgaatgggcatgtactctatcactaaagggttcaaaatttatgaagagaaagagagganaattcgaaatctatagaaggaggctctgaatttctagttgtctaacagagttacaaaactaggttatgaaatattggattagaatgagaaccatcttattccttatatagggttagatttaaattatatagaattcaaaaggatgaaaaatggctaaaaatacacttaagtggtcgaccatataatgggctccagcagttacaattttgccattttattcaacaatttagcttttctttcactaatgtcatattttccattttcaatcctttaaatgtcaaaactatttatttaataattataattgtaacgtccctacttcaagcctccattaggcccttacaccatcacaatgatggctcttattcacgagtacattactctggctgctccttggaatgatgactgaccctgcagaccagtacgagtgtttctagcgtgctttgtcctcacttgcacacatcctaggaaaacttcccaagagatcacccatcatgaaattgcccaaggtagagcacgcttaaccatggagttttttttgtgatggtctaccgaaaaataagatgcaccttgttgacataggtagtaccaatcaatccatttaagctctctt

SEQ ID NO: 63406 - DNA, 1136 bp, Cannabis sativa
aagattccaacggaataactatcactctaatacttctctaagtcgggacagaatttaagaaacaagggacgaccaatttcaaaaaaaaaaatatatatatataattcacaaataatatcttgtattctctattcactatacactttgtaaaatttcaaaaataaaatagactcgtagagtgtgaaaaattaatttcaaaatcacgttaaaaaatcttcttgctatttatatcaattattattattatttataaatatcctaaagtttatttattacataaaaatttatttattggttaataaaaatttgtattaattaagtaaataacaaaaccaagtaatagtgagtgagtctccgagatgggatctcggttccttttttaacaagaatttagtagggtctgttgactattctttgttggtctttttttaagataaaaacttgtcccactcctaaaatttaataaatttcattgatatatttaattaaaaatacaaaattaatgtagtaaatcatcattggattcaaaattatgtagtaatttttatgttttgtcaaagtcaactattgtaaaagatttttattttctttttgaagaaaaaaagaattatttattttaaaagtgatgacataactatgacagtatataatttatatttttgtcatttataataactaataattaattaaaaaattaaaaaaagcaccaataattcgcggacatatatgatatatatacaaatatatatattaaatatggtgcttattaccaaaatagagaagagtctaatttttatcattttgacataaaaaataaaataatttttttgttataattatttataatattttataaaattttgagaaaataagactaatttacaatatagaaaacgttgttctaacaatttattttacatgtgacacatgcagcagactatttgaattttattttcggagtgttaatttttgctgaattttttaaaaattttcaaatttttttataaataattataacatacacaatcataaaaaaaaaatagattaaaaaattttcatgaatgccaaattaaataaaaatgcattgttgcacccttttagtagatgaatatataatataattttcctataaaaca

SEQ ID NO: 63407 - DNA, 707 bp, Cannabis sativa
gcgagattcttttacttaatattgcgaggtcccttttaatgccgcgagttttctttagtgttgttctcgcgagagtaacagggaactaatatgctaatttgatgaatgtctcctcatctctcaatatgtatgcattggattttctattcagaagttattaatctaaatcaaatgcatacattaatacataccaaattataaattgaaaagatcaaattaaattaggctaaaaaaaataaaatagaaaatgacataagtactaatacaattatttcaaataatattgagaaaggtagtgaataataagggtgctgaagtgccaatgcagatttatgacagagctatttcatgcatgtaaataaaattgaataaatacaaatgaaattttgtcatcatataaccaaatatgaaaatttactaaattgaaagccacatgccctttcactcaaaaaaattgacaatatgtgtagaaaaaaataaggggcttaattataatatgcatgcaaagtgaagagttgtctatagattccttaccccaaaacgccatacgtgtcttttcaactcttctttctcttcacctataaaaccaaacacaaatttcactcatcaaaaccaccacaaactaaactaatatagtaactaaaatggcttcaacacctcttttgctctctctttccctttgttttctcgtcttgtttcatggctgg

SEQ ID NO: 63408 - DNA, 898 bp, Cannabis sativa
cgaatcttttcaatagcctcactcgttctttggacagcctcgagtccaagatacctacgttcaccggcatcctcccagtgaatgggcaaacgaaacttccttccataaagcatttcatatggagtcatgccaatagtactctgataactattgttataagaaaacttgatcaaagaaagatacttgttccaagaaccttcaaaatccattacacacgctctcagcatatccataagtatctgagtagttctctcaaactaaccgtcaatttgagaatagaaggttgtactaaactttaacttggtacccattgctcgctgtaagctttcccaaaacttggacataaactttggatctcgatctgaaactatcgactccgaggcaccatgaagctgaaccatctccttgatgtataaatcaacatactaatccattgtacgccagagtattgagtgcatgttgtattatggctggttgaacttatagtatggattgatgctactaatatgtactagtatgactagagtagtgagtgtgtgtggtattatgttcaatcgtactacggtcaataacatttgagactcaattatgcatgtttaacatggtttatgacttgttgataggtgtatggggcgcttagctacaagtcggttatatgttatgttttatgcttttcttactgagtctatcgactcacaaaggatatgttatgtgcaggtaaaggcaaagtttttgttgaatggtagtgattttggagttgaatgaagattgtacatattgagacagtttgacctggagtgttagatctttgggacagctaggactcacaattttgtagtcgttgtgtgacatcttttgatgattatgtgcaattaaaaatgtagatacgggatcccaa

SEQ ID NO: 63409 - DNA, 803 bp, Cannabis sativa
tatctctcttattgcattattaccaaacaaaaggtatattgtcattcttagatttttaataagattattttctacaatcttaaggtgagaattttgtgtaactcaaatacatttttttaatatgtgttcttcaagttttatcttctgattaaattgttgggaagtgaataatttaattgtgttatatgtgtgaatcaaaatccaaataaatgagccaaacatataggtgattcttgaaaccttataatttttgtaattataattttccaccaattttatctactttaattttactattgatattttctcaaaaacccattgacttatttacttttaatgcttaaaattattctaatcactttttgattaagatatctctctgtggactcgatcgctcatactacactacaacgatcgctttgtgaagacaagtttgggcgtaatcaccatgaaaaaagccatggagacgggagggattcacatacaccctaaggccatcctagcaggactcgaagaaacattggaagagtcctcaccgagcactcagaaacccaagaccagggaaccaagccctatacggtacccttccgaggaaaaccatgggaaaaatcccacttcaatccctgggagaaagaagaaggtgcaggatccgtagaaagtccgctcagatttcctaaaagggaaaggtccgcagaggggcaagctccctcgaacgagtcttggccctcaggatcgacaggatcgaaaaagtgtatccgtgcaccaggagcccgaagactgaggaaggaaaaaccggagatacc

SEQ ID NO: 63410 - DNA, 706 bp, Cannabis sativa
tcacatgctcataactcaatttagggttaaattattttaaagaacatgctcataagtcataataatttttttttttttttaaaaaaaagaatgaaaataatttgagtttaatacattagcgataaaaaaagatgagaaattatccatttaaattactttttcatccattttaagtgtacaaactgctaattaaattagaaatatcttaaaaaaattagataacaaactaaaaatatcattcaagaaagatacaaataacaaaaaagatctcataagccatatctcaataacggccatagatctagaatatattatataatactattttatttcaccttcgtgtgcattttttctaaaagtttttatatatataaattttactaaaaattgttatgttagtgataattttttaatctttaacatatattattttttatgattaaatatctttataatgataattatatagagataaattgttgtagttaatttaattttaataactgttgggctaaaaatacattttttttttgaatggctaaaaatacatttaatgataagaaagtgtaataaatttgtgactaatttttttaataatggacaatggaatgatatataatttatatttaattataattttcttagttttagttaatatactatacaaatattaattgtgaaaaaaaaaagacttttatctacttat

SEQ ID NO: 63411 - DNA, 1105 bp, Cannabis sativa
tatatacattattaaaaggatgtagtaatataaatgaaaaatgtaattagaaccgaagagactcttccctttagctaacataactttattatatcataaaaaatatatatattaaagttaatatcacatgctaaggtacttactttttaagttaaattcttgtattagaacagtaatatttagaaaaatataatgtataaatatttgtcacatgtaattgaatttttgcttcttgaatgaaatgaaatgaatcttctttggactcaaatattccactactattttttcttaataatttgattataatttagtacataacctttggtccataaattgaaaaaactacttgtggagttattggacaaaaataatatttactattcaaaagtaggatatgtagtctctttcatcaaaatcaatttcattgattatatatatgtcttacactacattaatttttattataatataaatatctattaatattttatttaggggcaaatactatgattttttaatttttttattatttcaaaatattattattttttcaagagaaaatattattttaagtttaagaaagttcataaataaattccctttgcaacttatatacgttatcccaccaaaataagaattaaacaataataacagaaagatttaggcttactgtaaagataattatgttgattttagaacaagcaattacaacttgtcaaaacaaaaaccaatattttttaagtaaggtcaaacatgtaaattccacataatacacaattctttcttttcttaaactattccaactcttctaccttttatttatttaaagcaaaaattaaattaatgccataaagtattcactaaaatagttcagatattactattaaattactagcatgaaaatattattaattattataagttagagtagaagggcaataaagtaatttcaatttaaattattagtgtttggcgccttgaagactcatcatcattatgattccttgctttggtcaatacataatgcctctcttctttttattcaaacttaacttttttattaattaaaaattaattaattttaattaattattatttttagttt

SEQ ID NO: 63412 - DNA, 1463 bp, Cannabis sativa
gattatgagatttggagaatagatgtcaagacaactttccttaatagaattcttgacgagataatctatatggagcaaccagaaggttataaactttcaggacaaaaagagaaagtttgcaagataaataggtccatttatggacttaagcatgcttctcactcttgtaacaagaggtttgatcaaataatcaaaacctatggctttcacaaaaaatgaagatgaaccttgtgtttaccaactcaagaataatcaagtggtagtattatttatcctttatgttgataacattttagtcataaacaaaacgtcaagaagatgattgacgtaaatgagtggtttagcacctagttcaaaatgaaagacttgggtgaagctaattatgttcttggaatccaaattattagagactagaagaacatatcacttgctctatcgcaagcagcttacattaataaggtgttagagcatttctcaatgaccaataccaaagggaaattatgccttctagacatggtttgtgactatctaaggaacaatctcctactgatccccaagagataaaagacatgagaaaaaatcattatgcttcagtagttggaagtctgatgtatgctatgcacttgaccagacatttgctatgcagggggaattgtgagtaggtatcagtccaacccaagaaaggaacattagacagttgttaagcatattctaaaatacttaaagaggacaaggaactatgtgttagtctacaagggtggtgttttgaatcccttaggctataccgactcaaatttctaggcttgtcttgatgacaagaagttaacatctgagatggttttcactcttgggggtggagcagttgtttggataagtgtcaagcaatcagtaatttcatgagtctaccatggaggccgaatacatagttgctgctgaggcggctaaagaactggtctggctaagaaagttcttcacagagcttaatgttattccaagtatggaaaaaactactagtgttactttgtgacaacactggtgcaatcgccaacagtaaagagcctcgaagccacaagaggggtaaacactttgagaggaaatgtcatatcattagagaatatgtggcaagaggagacgtgctgctagaaaaggttgatactgaagacaacctagctgactcattcaccaagacattgacagagactgcatttgaaaaatacagagaaaatctaggatcagttgaaatgtactaattatttttatgttcgtacaagtgagagtttgttgaattttatgtcataatctcagtattaaaatttatgacgagtcggacctgctcagatagatcaataatggggttgggccgccgagatagaccttttcttttgttgcgataaccattactaaggaataaacttgaacacttcttggacattattgcagtttaagaggcagccaatcccttc

SEQ ID NO: 63413 - DNA, 858 bp, Cannabis sativa
gtacaaattaaaagaattattattattattatttacagatacctgaaaataatatttataaaccaatttggtatatactatgggaaaaattatgcggcaatattcgatgttggaattgcgtaagtaatattttttttatatattttaaaaaaataaaaaattaaaaaattatgatataaaatgttataatatattttaatgtatagaaatgttattgaaatacagaatgcaaatataacaatttctggatatgatcacaaccaatatattgataatttgggagacttgatgactagtcaatttgaaaatattactgaaacttttactgctcgaccaacttctaagggcttaatattcataaggtataaataatattttctattgtgctatttttatattgtcttcttaaattatttagagatttttacaccacatacaagttttcaacttttttacctttttattgtgggacagaatttttttcaaaaataatgtataatttttttactgtttactgtgttaatttttcattgttattcggttgttttttagttattttactgttgttttaattattcagttttattgttttacggttgttttataaaaaaaaaatatttttgtaagaaattttatgtgacagtaaaattataaatttttatcaaaaattctatatttttgtaaaaatcttattatttatttaattagtaattgcacactatgaaatttaagagcattggcataaatatacaatattttaggtttatatatatactaattatatatttttttcagcagctaatatacttaatatcaatttttgtctatttttgttattacttattactatacaatatg

SEQ ID NO: 63414 - DNA, 842 bp, Cannabis sativa
tcaagttgaggtgttaacatgagaacctcggtttgatcctgtcacacagaaaaccttactacaattgggataggttcaccctcgacagatatggttgtgcttgcaagggggtcttcgtttaaatccatggctatgaaggaaaaggaaattcctttgaaacaatgaatgggtgaagacgggctttctttcacacacactatcctgttatacagcaggcaaacaatcctagccctaacgcaagcaagaacctccttgccctaaacgtgaaaggccaaaaaattcaaatagggggttaatgcacttacttgtcgaattagaagggataagtggcgtgtccataaagcctgcttgaaagctctagagccagtcgatgcaacgataaaaattaaatgttccccttgaggaagaacttctctggtccagtcgaagaggagcgatgtctaagaagagtttcttgtggaaaacgagtaatcgttggatcagatcttctaattcttcttgcatgcaaaagatgacagaaaagggaaaaaagaagttgtagagcatgtagttttgaataaaaagagtaaaaaatgccaccccaaaggcggtttagatttcaaaaagaagacaagactatgaaagatcaacacttcaaaatgtttgcaacaaatccaatgactggggaggtgaagctcctgtacgattggcctagggcccaccaaaatgtcaaggtccctttctgcatataactcaggtgccactccaccttttttgttcagcgcaccttgccacacacaaaaaggggaaagaaatacttcgtgacatggcgcgttgttaccacgcaaaaggaagcaaatgtc

SEQ ID NO: 63415 - DNA, 1002 bp, Cannabis sativa
cataaatagactccctcttattgtatgtcgcaagcttgatgtattccaccttctaattgaatcttgttgaaactttaagtactcgaactctcttcaatctccttgaagagtgcttgcttccttctgaggcaagacttaataagcaatctcccaaaagcttgtagaactttctttcaaaggtaccactgctgttcttctttttttgcagacttgaatacagactcaagacaatacaaaatgcatataaacagagtaagagacgaacactcccttctctacaaaataaagatacttttttcttaagatatgaatacaattcaaagtgtatgaaagagatacatgacctaactgctataaggtgtattataatcaatatacaccttattgacaactcacacacggtctgaacaagaccacaactcactaaataattccctaaaatagatcttcattcacctcaagaatttccgtttccgtacctacagaatcgtgatcagtaagtgcgactttccttttatagaaaaggaaaaatcttactagacatattagaaaactaacacaagatcaaatatatacagctagttagatagagaaagtatgagtcatcaaacttaccatttataccttattttccataaatacaaaagttaaacgattttccttccaaatataaatcaataatacaaaaatatgaaagtcaaacaaacaaaaatatggaaaccaaataagtacctcagccgaaattaaataataaacaataaaatatttttggcaaattaaagatgtcaaaagtgtaaacatctctctacttttttgttaagtagtaatttttcgtttatttctagagattgtaattttgatactcataacgtagctaaatgggtatttgctaacaatgttactggcatggttaattcctcttctatatcaggaactatcatttgtaatgacaatgaagtctaatttttattttatatataaacgttgattttcaaaataaaa

SEQ ID NO: 63416 - DNA, 513 bp, Cannabis sativa
agagatgttcatacaatcagggagagagggacttaagccattgtgatttgttttactataaacatatattaaatcatcactcaatttgttcatacccaattctaaaggcaagcacaataaattaaatcactaaaatttcaaccatatttaaaaaaataataatatcttttaacaaaaaaaaaaacaattctattaaaatgcacaaagcttgaaatgtctcaaattacaaaaagagctcaaaagattaaaaaactaaatttataaagagactcgatcaccaaatatgggactcatctaaaacaaaagctcgctttgctaaaaaattaataataatattcttagaccttttacaatgcgacaagaatatactatgaaaggatttccaaacatgaaaaatatcatgaagtaaaatactaaactcattgtgtcgagtgtctttactattcacaacaagcaccaagcgaagacaattagagaaaacaataatagtcttataccccaaccgaaggcaaa

SEQ ID NO: 63417 - DNA, 786 bp, Cannabis sativa
ttccctattcccaccctgtgccaccaataatgtcaaaccatttcatcaaagtagttaacagattccattaattcttttttaatgttaactttcatccattaacaatttattcaattctctctccaactaattaataccattttatctctctaataaaaataataataaattaataaccaaaatattattctctccaactatataactttatattttttttaacaaactttgtattcttaatttaacattaatatcaattattagccttttatatttctttttaaactgacattttttttttctattcctttgttcaaataaaaaaaaaaaccaagtgtacttatataattatatattgaataaattaaaattatatacgtttccagaatatagttattttttattaattttttttagtaaaacaattaaatttcacaactaatttactgtataatgataccattaatgattattctctctccaattatattaatagtcatttcatttatatataaaatatctcaaatactttgattaaatgactggtaggcaagcttctatcagacaaaacaataaaaagtatacaagcgtattaagtgtatcatttcatagcaataccaatttgtatatcaacattgctattagacactaaatagtgtctaacaccttttaaacatatccgccatacgattaacaagcaatacttcctaaaaattattacattaaattatataaaatccgatacttagttggaccaataacaatattagcatgtaaaaaagtact

SEQ ID NO: 63418 - DNA, 945 bp, Cannabis sativa
gtgggtttacaagaacaaaagaggagctagaggcgaagtcgaaactttgatagctagacttgtagccaagggttatatccaaagagaaggcagatgcaaaagtatctgaaggtcccgtaattgatgatttcccattggaacaaattttttgagttgtagccttcttggctcttgccaaaatatcggaagaggacgacattatgaaagacctccttttaatgtactagtctgcaagaatccgttcttcctctgttaaatgagtaagaatagaaaatttggcaccagtcaacccaaaagctcgcttgaataagaaaacagacattcgaccactcggtcgaataaggaaattaccttctgtacgccccacaactttcctccaaagaaaacttgaagccaaatctttctcgttcaacaatttttttcaccacctatccatctgagacattgcaaaaatcacatacaaaatgcaagatgccagaaaatatagtggcctaatgtgtggcacccacctaacaccctccaactagtagggaagctatcggctccaggtgtgaacattttttctccatggaagaaacaataaaattctttccaatcctggcccgtggattttggtttccaaatcaaaaactggtcctcatttcgacttacaaaactatacctccccttttctttatcatgttattttacagttttacagtgtagagagcacgaaatactacgaaatcaacacttatctcaattaccttagagaacctctcaatacttaaaagcaacctccaagaaataggtatctgttggctaggagcaatctgataccaattcaagatcgatgaaacaaaaggtggaaaaagaaacctgaagcctcgaaaaaaggtataccaatacataccacattgttgggttttatgccctaaataaagctcatttcaatataatcagatt

SEQ ID NO: 63419 - DNA, 1194 bp, Cannabis sativa
ttaaatacaggttgtatagtttaaagaataggaagatttatcaagctgaaaaaggcatgtttttacgccttctgttgtagtggctgcttcttgcagctggtggtggttggggtcggttaggtgtggccttgttgtagcttgttttggtctttgattaatgaaattttccagttagtcaaaaaaaaaaatacaaatttattaacaaaattatatgaagattagttgagacaaacccccaactaaatcgacaatttcaaaaagaataaataacatgagccaaacaattggtctccttattcgtcaatcgtttaacaaaaataatagaggcattgtttaataaaaaattaaacgtttataatcagaaataattagctcatatggagaagatatttagagagtgtgatagattgcttaagcaactacttgacaatcaatttcaattacaattttaaaaagacttttatgtttaatccagctaagaacctctttgactctcatagcttttgccatagtcagctatacacagggtcggagccagggtaaaaatttaggaggggccaaactatattatatattaagcgacaaatagtttaaaatatattattaaaattaaaatatagcatgtctctcttgcatttcacgaaagtcatctataattgaatctatgctaaattttttagcaatttttttttaatacacactagctaacaattacttaaaaatttatcttgtatcttgttgcaaagtgtagtcttcactatatttatagttgaaaaagatcattttgtagtagttatgaaaactggaagtgtaagaataagagttaccactttatatacatatagaaatgtaagccacctaattccttcaattgaactatttttaacaatttcttgtgatgtgaaatttgcaaactttcttgcaataagtgttgattggttcatgagatatgcaactggtttctcagcctttcaatgaggtgaattgatattgttttcaatatgtgctaaaaaagacaaattttttctctcacctttttctataattgaaatctattaataataaatgcatccaatctagggtctagttaacaaatagagtaaattaatatttattatggaatataaataaatgctttaaaagaaaaatgaaacttataatttctttttttcttaaaattaataataattgtat

SEQ ID NO: 63420 - DNA, 1805 bp, Cannabis sativa
aatttagaggaatagaaagaatagggagaaatagagaagacaaatcctaaaaataagagtgaaagggcctcttttgtccttctctttctacacttcagtccccctttttctccttcctttttagtactttttcttctctgcaattaattctcttctaaaaatggcagctctaccttttgtttgatgatggtggttgtacttagttagtttgctaggttattagggtaaaatgtattaccctaaaatgaaagcccatttctttccattcttggcccaataggttttgtctcctctctccaaaacagccagctggtgtgtatttaagtggctgccacatggatgttgattcagctgaagaaaattctggtacactttgtccacgtcactgcctagaatgttgaatttgttacagcaattgctcaacaattcagcccagtttcagcttctatgcccatttgtcctcgcatcctttccttttccctatcactttaactcttctttcccaacaacaaacaagcaatatttaattaaataaacataactaaaataataatttctacaagacttaaaagctagcttactaaatagaaaatgaagataaaggttgtcctaacttttctttgcccttacctgcaccacagagcacccgtaattcacatagactcagcaaaaaaagtaataaagaatgatacattcaatagctaattatacatttcatcattataaatgattaaaccataacattcaacagtaggtaatataatcagtcatatgcatataaataaatatgatcacatatttgctttgcctaatcaggcaagcccgtgtcataatgcaatatcatatatgatatcattgcaccacctaatcaggtgagctacaataacttggcactagtatatcgcttcgtctaatcagacgagcccgtacctatgcccggtacttattatatgtcactgatgaccgtcccaatacgtcgccaggaagaaacctaataattgttttgatctatgccataactaagtattttcatatcactgatgcccgtacctacgctcgatacatcgccgctcgatacatcgccagaaatatcgtcgccagaaatatcgcatcacctaatcaggtgagcccatgccacaacttggcactagtatatcgcatcgtctaatcacatgagcccgtacctacacctgatacttatcatatgccactgacgcctgtacttatgcctgatacattgcaaggaagaaacccaataatggtttcgatatatgccataattaggcattttcatatcactgatgcccgtacctacgctcaatacgttgctaggaatatcacatcacctaatcaggtgagcccgtccctacgcttggtactcatcatatgttattgacgcccgtacctacgcccaatacgtcgccaggtatattgcatcacctagtcaggtgagcccctatattatatccatagtattatcatattatcattgcctaatcagacaatcgataatttcagaacttgtcatgcaatgtggtacattatacttttttgacctcaagtcctggtccaggtatgttggctgacctgcttagagaacgatcgataatcttgggccttctgccataacaatgataaaccaataagtgtttatcccaaaacactactttacattcgcgttagacaatctagggttttctaccaaatctcacagtataaatatactaaaataaaacttatattttggctctaaaacatacaccttatcatagagcttatcggaagcttcgaaatagtatatagaa

SEQ ID NO: 63421 - DNA, 1095 bp, Cannabis sativa
tttttttttttgttatttattttacagtaactgcatagtcttgtatacgaaaattaaaatgatttattctattattagtcacataaaataagaataaaattttctctattagataaatattgatttaatgtggtaagtgatggtagctgtgggtatgttagggcttaggggcttgggttcgattggggtttgtgttggtggattcgatccgcccttccttcttttggtgatggtttagagaggtctatccttgtctgagtatggagttcgggtggcgcttattttcttttctttttttattttttttacatttggtcctggtggttctttttggcgttctagtgcactggggctaccttgagctcaaggagtgttgacattgagagggggatatgggatattcccaagttcgccgttcggtcataggtataagtagactaggcctgtccctagagcccatctagccaaaatgctcaaaaaaatatcgtatttgaataatacacattattttttattaattttaaaaaatatcgcatttttgtttttcaaaacaagagtacaaaaatattttgttcttattgtccactaaatttcatagctagccctgaattttccaaagaacgtgcatccattgtcttgttgttggtgccccttcacaccatcttgaactcattttggtgtttcttgagcttttattggttgtgttccttagtccaaattcgactggattttgacaagtgttgaagctctctcaaatctctagtcgagagttaggaactttgggttggctcgggggtgtgtatctttagttttttttttccataataatagtcttttataccctatatcctttgtgatgatggcttcatgccgttttgtgaggtttgtccctattagtcaattttttttttaagattttactcctttataattaatgtattttattgtgtattcaacttatttttcttgtgagatttgtgcaactttatttttattttattttttcaacttcgtccctatttaacccaaataaaattcagaaaaattataaaaaaaaaaaaaacaaaaaaatcaataattattcccaaagatgct

SEQ ID NO: 63422 - DNA, 1014 bp, Cannabis sativa
ctctctctctctctctccttcgaagcatcaagaacccagcttagggttggattttgtttgcgtaattctatgatttccagcagtattgaagagctttgattcaaggtagtaccccctagcttctttctttttgatttttgaagcttaagttagaagtaagtgcatgaatagttgatttatggtactgtggtgataattgttgtttgggtttaagttttgagctttatttgaggttgtttatgtggatttgagtgggttttgttgattgtattgaggtttggctaaggtttgagtttaagaacttaagccttgccctttaatggtgaaatgagattttgtgtgaattgttgagttcttttgcttgaattgggtctattatagtgtatacagagcttttgagtgagtttggggttgttttgtggtgtttgggacatttttgaggttcccagcactgaatcggtcgaccggttcagggggacctgtagcaactggttgaccggttgattcccagggaaccagactttcggttggaaatcggtctaccggttgggccatttttcaaaaacctaactttccttgtttttgtgttatttggggtattgccatgttattcatcgatagagttattcttagttttgattttaagtccccgataagtattttagcgtgtctctcatcagaatttcggatattgtggtttagggccctgtaaatcgttgagctgcagttccactcaggctgaccggcacacctaaacacggaaacgagataagatagcataaagtatatatatatatgtgaatgaatgtttgttattatccgattacactactagcactgtcgaatgtatagttataagggtgttagtacaagtagagttttagggtagttataatgttaccatgcacaagtacctaggggtacgtcgtgcatgtggtacaacactcaataactcccggaagtacaataatggccctaccaacacgagtacaaggtcagtactttattgcatat

SEQ ID NO: 63423 - DNA, 1216 bp, Cannabis sativa
tatatatatataacactttaatggtgtaaacaaaagaatttgagttataatataaggtaaaaattaataataataataataacacattttgaagaataaaatagaaaaattattgggatggaatgttaaatattggtaagagattttcagtcatgcaagttcagccatacattttcttatatatgcttctggtccacccaatgaagccaatgaggggaacccaattcatgcatgcatttgggcaatcaatctcttttgtgaaaaatggtcaaccttttctaattaataaccgttatgttgaagaggctgagagtttctctcaaccagcaggctcagaagaaagcttttttcgaagctctgctcttgatatataaacctcctcaaccaacccaagattcaaaagtttccaactttgaagctattagctgttgttgatgaactgggacaacgaaatcttgtactagttaatggtaaatgggcattgtccaaagatccaaacttttgacagtagaaaagtagtggttgaagtttcaagcaatgttgaaaatcaagaagaggaaaaagtgaaagagttgaatgtaacagcaaagatggaaaaatccatatcaaagcctgatgaacaagaagtttccaagaacaaaataactctttcttcttcaaaatcttcagctttcacaataagattatggaccaaatctgtagtttctactatactgccactccattatattgaataaaagactagtaattgagcaggctgataagaagagatcaccatcaactccaaaatcccttcacaatgctataaatttcacacccattaattattagctagagagcttaatagaataacctcatcagtcatccttagaaagattgagaattctagaatgggtgccacttcttccaagaacttcaaacatgctccctacagattgttcaaagtttttgaatggtacgtagcagaaacaaaacaagatctccattttcatccactcttttcagcttgaggactgaaagaaagagctgcaaaaagacacaggagaagctacaaacaaaagtcaaagccaggccattgcctccaaagttgagaagacaacttctcaaactcccaataggccaccactgaagaccaatggttctaaacagattcagggaaagaatgctcctactccaacttattctcttattcttttgttcaattgtcttttgatac

SEQ ID NO: 63424 - DNA, 802 bp, Cannabis sativa
atatataattttttatagaacctaagtccacaaaaatcctctgataaaacgtctaagtctacattcttccccccttttctttttcttctttcttctcctgttcttcccatgttcttctttcttctccttttctttactataacagtgaagctttctcctttattctccttactccattttgataaaaaaaaaaaaaggaatcagctcaaaggtgaaacctttaattaaggaaaagaaaagaaacaactttacttggcttctaaggtaatcttttctctcttctttgtaataagttttcaatatacctttactgtcaatttaaaaaaatatagctttacgtatgtccactatgttatgaatttatatacattaaaaatatagtttttaatagaacctatgtccacaaaaatcctctgataatacatttaagtctacattcttccccattttcttttcttcttttttctcctgttcttcccctattcttctttcttctccttttctttactataatagtgaagtcttctcctttcttctccttacacccttctgataaaaaaaataaaggaatcagctcaaatgtgaaacctttagggaaggaaaaggaaagaaacaactttttttggctttcaaggaaatcttttctcacttctttgtaataaattttgtaatatagctttactgtttattcaaaaaaatatagttttttttttatgtccactctgttatgaatttatatatattaaaaatatagtttttaatagaacctacgtctacaaaaattctctggtaaaacgtctaa

SEQ ID NO: 63425 - DNA, 765 bp, Cannabis sativa
  modified_base (34)..(46): a, c, t, g, unknown or other
aaataattttcataattaaatcataattaactgnnnnnnnnnnnnntaaactaagtggtctttacagtttcagctaggaagactagtgactttgcagtggatgatacgggaattctacgatttatgaatcgtgtttatgtgcctatgaatgatatagtattaaaagagagattatgaatgagtctcatacgaattcttactcagttcatccagggtcaacaaagatatatcaagacctcaaggccatgttctgttggccaagcatgacaaatgacattcctgaatatgttgttaagtgtcttacttgtcagcaagtgaaggctgaacatcagaagcctgcagggttgttgtagccattgaatatcctgtagtggaaatgggaagacattgctatggacttcgtggttggcttgcctagaaccacaggacagtacgactctgtgtgggtcatagtggacaggtttacaaaatcagtgcacttcttacctgtttagacgaacttctacattgatcagtatgctgagttatatgttatagaaattgttcgtctttatggtgtcccaaattccattgtttcggatagagatatgaagtttacatcaagattctaagagagtctatatcgagctatggatacttagttaaagtttagcacatcatttcatcctcacacggatggacaatccgagcgaactatgcagattttagaagacatgcttcgggcatgtgtgcttgactttgaaggatcatgggtaaagtaccttc

SEQ ID NO: 63426 - DNA, 762 bp, Cannabis sativa
attttaaataaaataattaagcaaaccaaaaaatatatatgtacaaggtgccttgcatgtagttgtcgcctagtatatatatataaaagaaaagaatgagacagtgacgtgacaacccaaaattagttcaaataggtctatgtattctctccttaattcttgattcttgtgacctccattaaaaaaaatctatgagggacgatttctttaaaggttagtcgacactttgagtccatctttgcgttctttgtctgttgagattaacaaaaaaggagagtagtaagtttcaatttttggtttgtgtgtttaactctggacccttttttcatgggaacttaagtttggtttatgtgttaaacttttgttaaaattagcattgtattttgtgttaatgatgtgcttttcaagaggggtttatttctgtgattttgctaactttgtgttgcatgtatttgaaaattaaaaaatattttaattttctaaagtgccaaagggggagattgtattgttaggccatttttttggtaatttagttgtcaaaatattatttaatttatttgtgaattaaaatgtttatcttgtgttaatttcgtggctttgattgctctttttctttgaaacttttatttacaattgttattttttgtttagcaaacatgtcatacaagagaagaaaatctctttatgaaaagttgtctatttttagaaaaattgacttttgctttctctaattgttagtctcattttcgctatgtatatagt

SEQ ID NO: 63427 - DNA, 852 bp, Cannabis sativa
aaatgtacttatattatacatttttgatgatgtgctgctttatattaacattcttttattttgaataaaataatatcgttttgagtcttttgacagtaacagaactacataaaaaaataagacttaatttattcaaaaacgatttatttagtcatttttaaatgttattttttgtactgttctgttttgatgttgatttatttagaatgaaataacgccgacgccggtaattacataaatacataatagtgagaggcaattttaagaaaaataatgattattgattatgtactcgtaatttgttaaaaattacttataattatagcaatttttttttttctaatcaacatataattatagatttttgatgaaatccttctattctgattgaaacaacagagaatacagataccagtaaagatgaaactacataacaaaattaaatactcttatgttattcaaaaataacttaatcatttttaggtatcattttttttttttttagctttcttaaaatttatttttaccttcttcatccatccatgtcggagctacattacatccgtccctataataaatccttaaaaataaaaaagacattatccaatttttattttaagaatatgaggcgccgtgatgacatgttagacacaaaaagtcacaacgatcacaaaatatttggagctttttgtttttcaaattcccaatttttattatttttaatttaattatttatattaaaattcaaagacaaagagaaagagagagagaaagctttgatagtttcaaatctcacaaacaaaacgccttcttcttcttcttccctcctctccacacttccgcccgccattt

SEQ ID NO: 63428 - DNA, 7996 bp, Cannabis sativa
aatagcaaaatttacttttttttttaatagcataatttagtgttcttctatgaatcacaagttaaaaatactcttaagtaccagaatttttgaaatattttaaacaccgataatagattatcttgtttcttatccacacataccaaacgacaagttaaaaaaaaaaataaacaccaaattcagaagcaaacgaatatgtatttattaacattcggaaaaagcagttatggtttggagaaagtgtgagcaaaaatatacctcctcttgaagatacaatttcagctttacagacttcaacttgaaaaagctctcacaaaggatcttcagcttgccaacctaatttaatcaaataatttagtttagccatttagaaagactgagaagacttttctgtccagacaagcgacttccccttatagcccctcaaaaaataaactcaatagaacagaaaagcaaccaaaattcaaaacaagaggattgggattagaccgttgtggtgcctggtagcttctttgtaagtaggggcttctctccaatagatgctccaacacattttagaatgatggctgcacaaatgttagactgaatttagtattcattttttaactgaacaaaattgattttaaaatctaaaaaactcgtacatagaagcccggatgccattttctgagggcctgtgcccccactcgagggtttttcatcttcaattccatgagaacttttaagctcaagaaacctgtaatgaagatcgaccaacagtaaggacaacatcacacattgattcaaaactaagaatcctcatcacttttttagtgaagcctagtaaaatttaatccttaaaccacgataccaaaggaacttgaatatcatactttaggaggtattgttctctcttagggaaacaagtgaaaagacaatggatcccttatttcactatgaatttttcttttttacaggtctatggtttgtccgagcacgctacaccatgcacaagtttctctagcatttaaattatgtgtcataaattctgctagaaatgtattcgcactgcaaaggtttctcaaaaggtctaggaatcctgtttaaatgctcttaaatcttcttacacttaacttatctgcagtttgttgttttgcatttaaaattgtaaaagaaacaattaggtaatgcactactcatcatcttagttcaccatacaccatattttccatcattgtgcttgtgtccctaaggtactatggatatggaaatgagtcaataactatacctctacaggagctgagaagataagcaccactcgtacttagctcaagtgtgaagattcactaaattgtcggagggagcaatggactaaggttcttgataaatatggaagaaggtatgaattggtagccattcaagtcctagttttgagtctttgtaaaaaccttttattataatggattacatttgttggccatacccatgatttttccttcaagacttttagattagtttaaccaatatttgcagttctgatttacatttacataaactttaatataatctatttatgggatatagattggtattatttatcacattcatcccccagtctgatacttccaccagaatttggtccttacacactctttcaagtttcaccaattatctataccactattataatcaagaaaaccatgcagttggcagactcttgcaggaaaaatattttgacagcaatgttacctagggtggagccgctggatatcttctgtactgccttgcatctttgacatcactaagcgaatataccttcatgaaaaaaaaaattgttcaatagtacctcataatcccaaacaattaactgtaagaagattaatgcagataccattcagaacatgtcattacttgcaaaatctcagtgataaaaattgttgcatataaaaactaaaaattcctaagaattaagagtgcacataccacaattttgtgactaatcacctaatattaatagcaccgaaatgctactttaccagtaaaacttcctaagccttcttacattattcaagggtacatgtttagaaaaaatttaattatcatttattattatttttttatgagcacaacatgaggcgttgaccatgttttccatgagccaaaataaacaaaaagaaaaacccaaataaagttgcttcactttctttctctaaaccggaaagacacatgctcatcttaaagataaaagcataggccagtaccctatggagccaactcaggaaatttttgttagagaaaccaatacgaacaactcagccggacaatgttaggccttaaggtattaaataatgagggtaaagaggtcattgtattaaggtagtgagttagtatatataagagtgtattttttttgaaaaagagtatatataagagtgtattaaaaagggttggggtgtgaatgattttagttaagtgagcttttagctcttgggagagagctgggtctctcgaatacccagcaacttgttctcttttctttccctaataattatatcagctctattatctctattttgctactgtttgtatcgaaatgataggaaattcctatcagacagcatagaaactataattaaataaattctagcaggaatgaggaattaatgtaaaaattctgcatattataggagcagttaaatgtatgagcaagcgataaactataaaaaaacatatttatagttaaagagatcaactgatagattaagtcaaaacagaaaaactaaccgaatctcagactcttttctttcacgaggcctaacctgaaaagatcataagtttaggccatcaaatttctgatattgctgaaacaatgtggctgtggaatacatagaatactaaattttacctcactcccattcagaacttcaacctttgccaaacgcgcaatcaaaacaaaccttggtattccaccccttccaggatcagctactggattatcagagagccgtatatcctttaatacacaaaatgggcaattcaagggccatcaacaaccacatattgaatgttattcaactaaatatgttttggctcatcaataatctctttctcgaagtgtcttgctaatgtaaaatacaaattgtttcaaacattaaatgcaagcatggttatttcaaattttgctagtcatcttgctgaatgcagcatcagtaaggctactattattcaaggtatcaaatttcctagatttatttatatttacttctccttcctattgaaaaataaagacccaaaacatataatcctaacaaaactacagaatcaacatatacaacataataatagcagatagtttgattcatatagtgacagccactggttgaatttggattgaataattgcagcatttgaatgcatctctccctgaaactatgtttttctaataacaaaaataagagggttcatattaaagattcttaccactagttttggaaataagttcagtgcatcaattgaagccagatcttcaagattgttgtttcctacagcatgtaatagctaagatatgcattacaataactaagataaacgacaaaatacaagtcaaagtatcatataaaaagttccgaaaatttaccgagaagaaggcaacgcaaattttgaaatggcttgtgagtttgttcatctaacatatcatgatctgggtacgagatacagctcaaattgttcttgttcaaatgaagctgctccaagctacatgcaggaaccccaacgtaaaagacatcaagaaaaatcagcaacagtacaagaatttagtgaaaaaacaaccatagaaaatctaaagagctatccattcaatttttttatcagttttcaaacctattgttcaatagcaaatgactaaagaatagaaacttgatatgatgaactgttatactctttcttttttatcagtagcctttgaaccagactcataaacctcctattgttcactggcataaggactcaagaatggaaatttgtttcaaccttctcagcagcgaaagtttcataatttctttccaatcagctatactattgtcttccaaattcagaagccgcagagaatcaaatccctgaactgcacaggaagcaggaggctggaagacaaaagaaaaaagagaagaaaagctttgcagtcaaaattcaggatgcttcagaaatttgagcaaataaaaaaaaaaccaaagaaatattcaggaagaaccaagataaaaaaagaaactttttttttctgttaaaatgaattactagttttgaaatcaccaagtagcatgttttggattccatgcaatggtaaatgttactgatatccttgtgagagtacttttatacttctttcatattgtacacaaacaccaacatgctaaaggttctattgacgagaataatttcagtttaataaatgttgtatttggatcttaagggtctagctttcacattatcagagttacttcttttttttctttcttaaaaaatatcccattcacctgaggttctaatgtaaagttaatatattcacaaagccataacattgaatggcaaaaaaagttgtaatgtttagtttcaagataacaataacatgcgttaatctagataaacaaatgccaatgatactttttatttttattatttataatatgaaagaatattgatcaggaagaatgtaagatgcatacatctattgtgcttatgctatttcccattagatgcaactcttcaattgctggcagtgaagtttttaaaatttcaacctgcaacattaagtaacaattagtaagaagataacataaacaaggaaaattcgtaacaaaaaaaatatatgtagcaaataaatagaagaaaataagggaaaaaagatttgcaagaaaagactgtaattttgcagagttcaagagaaagaaaaaaaaatgattaggttgagagctgtcagaattcagcttatattaaaaacattattaatatttgtttggtaaaacaagaggtgctttggcctttcttatcaagtccaagcatagttgcttagccactccagattcttttctccacactaattttctaagagtcctcaagaagccaaaaataaaaggcgaaatctagtagaaagaatacctttgtccagtttacaccagtatgattcagaactaaaatgcgtatgttttttagttgtggcagcccaacaatgtctggcgccattaaattgtaggacaaattgagggcttgaagcattggtaactctttacagatagtgccaacatcctgcaagaaaatatcaattcagatttggagaacagttaatcaattccaatcaatgatgtataaagttggagaataaccaatgcaatataagcaaagaatagttttgtgaaatcgcaaagaaatgtaaacactcaagtgaggatgaaaacaagacaaaatgagtgaggtccacaaccagtttgataaaactaacagaaaaaatgctaaatggtagcacattcagaaaacataaatgctaagaacaccaaacttttatgatatgagattgatgggggaaccatatactaaatctgtgaagtaaaatgaaggagttactaaaggaccaattgattttatagtccctattgttcttagaaggattgaacaaaaatgaaaaggaatcttttttaatatgccaacagtgatcaagttttaagaaaagaaaactactagtctacaaatttgacaaaatccttttcttatgtatctattacataggcaaggtgaaaaagctaaatccctgctgccattttttcttcttttctactactttttcaccacttaaattagtgatcaaaattaccaatatgctacatcatggaagcaggtattctaataactttagatgaattttctgtttaaaaaaaatgtattcaagaaatccctaaaagcaattgtgcagactgtagataaccttacaatgaatttaattataaaaaccctgcctttttatttttatatttctaaaaaagcaatagtaaattatgatataaaaattactattttgtagggcagaaatgtaagttcaaatgagtacagcaatttgagaaatattttaagaggcactgagtacatgcaaaacaagaatatttataaaagaaagattaacatggtaatttcagtacagaccttccagtctgatagcagatttccagtcaaatcaagctcctttaaatctgcaaaaacagcaatacagatttattgaatggcattgggcacattaaagagtatagcaaaacaaagcacacataaaaacaccgtgactccataaagccatcatcagattctagaaatctccttccatgcaaacaggtacaaaaggccaaagttcaaattttaaatcgaagagagatgcaagaaatacaaagaaccttattttctgtggcttttgaaaaaaaaaaaagtatctatataagcctactctaaaggatcatcatgaagatacagctcaaacaacataaaacattgtttattagtaagttgcaagaattttgaaaggacaattccacaatcagaacaaaaaatttcggtctgactacaaaaaagaacaaaacacaaaattaggtagaatggaggggaataaggcagtatgtataaagataactattccaaacactttcttgtaagataagctttacaaaatccaaaagaacttctcagccaaaaatcaggactagcaactatattgtatatacttaaaccaatgcttaaacttgtgaacaacaaataaaataccatcacatttcaacttattgctgaattgaatagtcatccataagttcctactcaaggaattccatcaaaatgtaaatcgaaattctcaataaaaaaagtatttttctttccaacttacttggcaggagactaccagtatcaccagagaatccaggtgagctaacacccaagaaagaaagcgatgctccagtcagctcctcgaatcgacttagtttatcttgaattttttctttaccaagtagctgaatagaaacccgtttattactcgctgaaagaacatacatttcatctgcaatatcaccaacgacaaagcacaaaattgagagaccgtttaactaattttcttaattttactcaaattccaacattacttactatcatcaacccaaacgttttctacggtctgctacgtccaaattatcataaggaaactaataactcgaaatcagaactggcattgctaaaaataatataacacattacacacatttcctcgacaaccaaataagcaatggaaaatgataacacatacatacatacaatacatacatacataccttcttcttcttcagtcgtttcaccttggtatctgagccggagagcttcaatcaacgaaatgccggaactcagattatgggtccgaacaaaagagccggatcgttcagacttggcctggaaatatcggaccccattgatggaaccatcgtgcttggcgtcctcactgtcccagtccactccgacccagctgccggaatagccttggacgggtccaaggtaccgcaccgttccgattcgccagggatctccagctgagtgaactcgctggccgagcctgaactcgttctcttgcatcctctgctctgttctgtgcttgcctcagttgtcacttgtcggttgtcagtaccataattttttctactgaatataacttgaccattctacggggcaccaatgtcttgcacctatgaggtgtacggtgtacctttataatataatatgttttttttttttaaaaaaaaaaaaatgaaatatcaacttcattaaaactaacattttgaatacatctcccatgaaggtcagccagaacattatcctcaagaatgtacgatcacagtagaatcgagaacgtctagccacaaaatggaccactcgatttgctgatcgtttaataaaacgtaaactagtattaggtgaagaagacaataaaattttacaatcattagta

SEQ ID NO: 63429 - DNA, 649 bp, Cannabis sativa
tatgttggagaagatcagaagaagcgtcatgtagtgcctctttcgtatctaaatgagccttcatttcaagacttgcttagtatggctgaagaagaatttggatatgagcatcccatgggcggactcacaattccttgcagtgaagacatcttcattgatatcacatctcagttgaactgatgatgtaatttatagtactgacatagctagatttatagaaaacaattttgtagattacatacttttaccctttttcttagaaaaagaaagggaatttttttgactagttgtgaaacttgttcatttcatctgaattctattttccttgctgctatatcattttctaatcaatgtcactctttgccaacttcaaagctcattagcctatatttgagaagaattatccaaaacaataatattactcaaaccaaaacatcactattaacatttcttataaatatacatttataactgagattaataagtgcttccaaaatgaagaaaaagtgataatcactacttgatgcactaactctatattataaaccacttagagttaaattttcattgcaggtacttaactgagaaaaattgacatataatccttaaaagaacatacaattatacattaatattagatactaatccc

SEQ ID NO: 63430 - DNA, 816 bp, Cannabis sativa
ttccttacaaatttttgtaggaattcgatagcgagccatggcatatgatgggatagcttgaaggacagccttaatcagagtttctttcccagccctagaaaataatttatgattccaggaatgaagaatattggctactttatccttaaggaaggtaaaggcatgatatttaacacgcgagagacactgcggaagccctaaatatttggtaatgaaagccctatcctccaactgaaaagtttggaaaaagagactcctaaccttagccctggtattaggagagaataaaatagaggatttagcaaaattaaccatctgacctgacgctatagaatagatagatagagcatgatgtagggtttcacaagaacgcttgtcagcagtgcaaaaagaaaactgccatcagcgaacaacaagtgagtaatagaaggcgcctgcctagaaattgcaatacccctcagaagctccctattttgaaaattttgaaggatagcagagagaccttcaaagcaaaggataaaaagataaggtgaaatgggatcaccctgtcgaaggccacgagtgggcttaagggacccatgaacttgaccatttatagagaaagaaatggaagcagtggtcaagcacctgaaaaacgagggaaacaaaatgaacaggaaaattaaaatggaacacaaggtgtctcaaaaaatctcattcaacacggtcaaaagccttagccatgtctaactttaaagcagcccatccctgcttacccacagtctgacttttaacagcatgcacaagctcatatgcaataagaatattatcttggat

SEQ ID NO: 63431 - DNA, 787 bp, Cannabis sativa
gggactgagtgcgagtatatgctccgcgaagtgcatggtggaatctgcggcaaccattatgggggtaattcccttactttaaaaataatgaggcaaggatactactggccgacatagcgagcagatgtgtctagttttgctaaaaaatgcgaaaaatgtcagcagatagctacatatgtaaacaaaccaccaagccagctaaattctatcacaagtcccggacctttcgcggtctggggcatagatttgactggagaattaccgaaagggaaaggaggagtaaaatacgccatagtcgttgtcgattacttcacgaaatgggatgaagccaagcctttgggatgcgcgaggacgcatggtactaagtcgcaacaaattcaacctcatgaatgtatggaggtgtccgagatttggggtaactcgcgagaccaggtcctcacatgaaaaaggttcgttcagctaggcattgtcaactgaatcgctctcgcttccctcgacattctcttcttcccctgactcgcgatcaggaacctcccaatcttcccccatctcctcgacttcgatgtcaggggcatgcctcaaatgagtaagaggctctcgggcggacaccgtggattcactatcgcaaatctcgattgtccctgtttagcgagttcctaaaccattctctctatctcgtcagaagatagtgaacctagacctgcagctctggcaacaggaacctcctcctcagagattgaggctggtatgaagttgtcgcttttattctgttcgtcagtgaaagccc

SEQ ID NO: 63432 - DNA, 682 bp, Cannabis sativa
ttgtgtgttgtggttgatttgaaagatcaaggtgtacatttcatttctgtttctttgatacaacttacgaaaagataacgaggacacttgatagttcatcaagagataaatatttttctactcatatttttattttctgatttaatatatatacagatggaaattctacagtgtgatacgacgataatcattaaaatacttccactgcacacttgatttagtaccacaaaaaccaacacacatggcattggaacagtgcaaggcgagcactgacattcccaagaggtcagttttcgcccctagggtttagtcctatggtttatctctttagcaatccaaggtagggttgttataaaacctaatgtgaggagaaatttaacaagtacttaacttgttgaggtacaagaataccaagacttgagaataaagtcaaaatttcacaagaaataatgcccaagggtgttacacgaacactgccataatggtgtggcactgttagcacaaacccacaaacactgtcacaccactatgacagttttcgcccaaggagaatgcaaaggagagaagtggataaattgtattttccgacatcaaagatcacttgacaaatgagagaagccaccaaaaggtggaacacgaccactgccatccctgtatgacagtgctcttgtagagtgtacaa

SEQ ID NO: 63433 - DNA, 905 bp, Cannabis sativa
ctccaccattttgcccttgcgcttccgatccagcggagccacgatctcgccttcctcctcctcctcggcctctccctcctcgtcgattaagacgattgtgcctaaaggagcactagaagatgacctccccggggtcaccatctgggcaggcgccagaggaagggaggggtctgggctgtaggtttcggcaagagtcgccaagagctcttccattggcctggctgcttcaaaaagaaataaaaaaaagtgtcagaatgactgtaagaaagcatgcacaggaaagcaaaacagtaaagctagtcctaccctgactatctaactcagccctagcaaagtcttgaactacaatgcttgcttcatcatccccaagaaagttgtccgaggggagaaaccagctagaagatagataagctgagtgatccagagggatgggtgcagggggtccgaaacccatccgggactggcctaaaaaatgacctaagtgggaaaaataaaaggccttggcatgatcccaccaccaagtggggggcatcctaaatttaagaagacgctcgtcgaattctatgggcctacaccgtgaatattctttgacagaaggaacatggtgaactgttaaaggagacttaccgaaaccgaatgtgctggcatcgggagccccagtattaggaaccaggaccagcgatttaggcctggaaggcatccgatctgtgatcgcctccagacgaagggtcctcccggcggcggcctgagccttgatgtaggccaaatcctgttccctcctaaataggtacttctggtaccggtcctctgccgaggctatgatgtccacccgaagcgctttatcctcagcgggagtatgaatatttgggcagagaaccttcgaaagattgaagtcatccactgac

SEQ ID NO: 63434 - DNA, 703 bp, Cannabis sativa
ttgattaacaaacaagagcgtgatttgtagaacaaaataggtcaaatcagatcgtttaacaaacttaccatacaatattattgagcgtagctttgtgagaagtgaaagatctgtgtcaggcggcgtttgatggaaaatctgtgccacttctagttctacctctaaaaatgtcaaggagaaaacaataataaaataagaataattagtatttttgtgaattttcgggactactgggagtttgcctcctaatagttggttaaaaattctctaaaatataacagttattagttctgtttcttttacagtaaaaaaatagtatttttatcgcttaactttcaccaatacaaaattttatctttttttattaaaaaaattaattttaaaaattataatattatattaattttgaaaaaatattaaaaagcttcataaaaatattaaattaattacaatatattaattttgtttaaaaaaaacttaaattattcctaaaacaaaaatttcaaactttattttatttataaacacaatcttaaaaaattaaaccaaaattattaagaatctaataaataatttaaataaacaaaaaaaattttgaagaaaaaatcaaatttttttatatttataaactcatatcctaacaaatagagaaaaataattaaaattcaataaaaatataaaattattttgaaaaaaaaaatta

SEQ ID NO: 63435 - DNA, 1049 bp, Cannabis sativa
ccctaaaacaaaatgcctcttcgttatccacttcttcttcctactagcatgttcatacctttgaaaaaaaattcatcaaacccatgttcatatacatgtataagagtaatacatgctcatatacattcatatacatcaaaccatgttcactctctctccatctctttctcggcttctcttttctcagagtcgaacgtagcatctcgatggagatctaggagaggcttcgatgggacacctggtgaagatcgagtcttgatagagatctgggcaacaccgtcattctcggcacggtgaagaccgaatgaagataatcgattcgggggtagtttttgagttgattgaactcgagttgacggaactagaaaggcacacaaccgagatgatcatcaatctttggcccccttgtgctcttgtgccgatgggagagcgaagctcctccagcacgactgcgacacaaaaatggtgtcgaaaaagattcttagggttttagaggcaacaaccgagcaattcacattctttgtttggagtttttttttttaattttctacaatttagatacacataggaaatggaagaagaaaaagagattaaaagagggaggttggatcgtggtgtaatagagttgatttgatgatgatcgtgagaaggaagaacaagatgatgaataggaaaaagagaaaaaaaaatataggaaagatgtaaacgtagggatttaggttttgagttaaatattatctttaatgatttgtttttaataattaataaaattatataatatgggtttactcttttttgtttaataattttgtaattttttttaattttcaaaaattttttatttaatttttaaatttttaaatgatttttttaaataaaaaataattaataaatgatctggaccaatgagatgttgccacgtagatactgatttggcacctaacggtcgggtacctacggaagttcgagaagtgtgacggaaggtatttttaccgccaaaaatacgacttaggtatttatttgctactcgacataaaacttaggtattt

SEQ ID NO: 63436 - DNA, 1083 bp, Cannabis sativa
ttcatcatacttacccagtttgtaagcccctgattctagaacttcgaccacctaatatggcccttcccaattcggtctgagcacacctgctgtgctgtctttgatatttaggaatactcttctaatgaacatatctcccacaacaaacttccatccctttacttgcttattgaaataccgagccaccttttgttgatgggccaccaactttaggtttgctgcagcttgtttttcttcgatttcgtcaagtgattctgctaggagtgcatggttagcttcttggtcgtaggttaatcttctattggacgaaggttctaattctacaggcagcatagcttcataaccatatgccatagaacacagagtctatccgatcgctgttttctcgttgtgcaataagaccataatacttctgggtgttctttcggccagttccctttagcatctccaagtcgtttctttaaagtgtcgttaagtgtcttgttgactgcttcgacttgactgtttgcttggggatgtgatactacggagaaactctttatgattccatggtttgcacaaaaatcagtgaacagttggctatcaaactgtgtaccattgtctaaaactatctcgtacgatagtttgaactgaaatattatgttcatcaccacaaagtcaagtacttttttggatgtaattgtcgccaatggctcgacttccttccatttagtaaaatagtctactgcgaccactgcgtactgcactccacctttacctttaggcaattgtccgattaggccaaggactttgcatctgagttagtttgttgggcagtgcacggggtatctttgagaatctttagaatttgtcacatttcttaacataggcctttgaatcttcaatcatggttggctaaaaatatccttgccttagtattttctttgatagactttgcctggctgcgtggttgccacagaatccattgtgtacctcagacaaaagccgtgtaacttcttcttgggtaacacatctaagtaatggcatggagaatccccttctatacatgactccttctatgatgatgtaccatgcaacctttct

SEQ ID NO: 63437 - DNA, 616 bp, Cannabis sativa
atcgactctactttagcttttcgatctatagactgctttgttattaagtagcttttcatacaaatttggctatttaaacgtgggaatggatgaacatgtgttctagctttgcagaaagtggttcttctagattttatgatattgtcttcttttgtgttatatccattcctgtcgttttctaattttatttaggaattttctttaggaaaagtatggtgagatggtattggagttttatatttaaatgaattagtgatgaattgagtagtttatatattattattaatttattaggatggtcactatttggaatttaccaattcacaaggagtatagagaaatgttaaaatgtattattggtgtctagtattttttgatattgctattaatgctagtcttatataattagtctataaattattgttaagatggtgaccattttggtttaccatttcacaaggagtataattagtctatatattattgttaagatggtcaccatctcattactattggtgcaagttttctataatttgatttaatttttagagtcattaactaattatagggcaacatttctagatggtactaaatatcattaatatctaataacaat

SEQ ID NO: 63438 - DNA, 987 bp, Cannabis sativa
tttttatatataatcccatatctagattttaggtatcaattttttttttttttttcattattgaaaatattaaaattgtaattaattgggtgggttattggataattttgtagtataatcctcttaatatggttgttttggtataatttttttatctattttggtattttaggagatttatttagttttttttatgattatgtatattgtaattgtttagagaatctgtagtttttcggaaaattttaagattttatttagaaattaaattttaatcgggaaagaaaaagataaaaaaaatcatcgtcggaaataaaaaaaaaaaatcaactttttcatcttccatgtgaaaattattgtgtgtattgtaaatgtttagaaaatctgtaatttttaggaaaattttaaggctatatttggaaattagattttaattgggaaagaaaaagataaaaaaaaattgtagaaaataaaaaaaaaatcactttttcatgttccatatgaaaattattgtgtgtattataaatgtttagaaaatctgtaacttttagaaaattttaaagtaatatttgtaaattagattctaatggggaaagaaaatgataaaaaaaaattataaaaaaaaaaatcagcttttcatgtttcaataagaaaattatattgaatcaatttttttttatacaatttattacatgctaattattttgaaattgatttttttatatttttcctattttttctttctttatcaaaactcaacttttaaatatagcctaaataatttaggggcttttttatttttacaattcaaaacaattttctttacatttttacgaaattctacatagaaacatctattgtaactagcgctgcaacctaaattacaacaaaaagatggtatagaaatccctattgcaactagcgctgcaactactttagaaactcaaaccgtaaatttgaaaagaaaaaaaagttaaaaaaatagta

SEQ ID NO: 63439 - DNA, 899 bp, Cannabis sativa
tcagaacacacctgaaaaagacataccgcgtgtacaagagtgtacacataaatagtccatggtggcaattcaaattttttatcacccaaatttcatagtttatgcttataatgactatctacagggtatttcgaccctaatcaatggtctaatcgcaattcaaaatattctaagatcaacaattacactaatcagtagtgttcttgttgactacaaaatattagcacgtgagtctataatatttactctggatataaattattactcattatataaatgctccatatatatacaagttagtttccttaatatattgctacaaagttcccatttattgtatgcatatattattctctatatatacaagtcagttcctcggtataaattattacttattggatgcatatattactccatatgtatacaagttaattcctaaaaaattatattaagtttacattttagatcctacacaaatatcataattttactaaattgctcattcattaaataatattaaactttggagctaatattttgtggaataaatcggttgtagaaagtaggggtgttcatcaaaccgcccgcaccgcaccacatttatgtgtatgcagtgcagtcgcggtttgaatttttcataaacagcgcagtgcggtgcagtgcgatttgcagttttgaattgttaatacgcggttcaaaccgcaccgcactgcatattataaaaatactaattttttatatttatttaggtcacatatgtgatggcccaacctaagtgtaacaccctaacatttagggacgctacccaagatgattaagaaaccctaatcttccaaacgggattactaataaaataagcgtagaaattaaacttttaacgaaaacggaatgaaaataaa

SEQ ID NO: 63440 - DNA, 5240 bp, Cannabis sativa
aaagtacctggggatgtcggtagtggaactccaatatgctgctagcatgcagcagctagtgggcactcaatcaaagcatgagaagtgttttcgggttggccatcacacatgggacaaaggacagagacattcacatgtttgatgacaaggtttaggcatgtggggaggcagtttgtgatggcacgccacaacatattcttaacctttggaggtattttcagctgccacaactctttccaaaatccaaagttgttagccgctggccgagggtgcttactttgctgcaaaagagagtacgcactgctaacactaaaactcccatttgattcgcctgtccaataccaacagtcatcgtcaagattactagaactcagcgggggaccgaggatcaatggagcatctcgatggttaaacatatcagtgacaagatcatgatcccagctgcaggaatcaatcgataaaagagcagaaactgactggtttgagagcccagaattggttgttgtgacatacagattgtccttgtcggggagccatggatggtcaaggatgctagtgtgtataccagttcggatagtgcgtcgagctcctaatttgatgagcttttgggcgctccagatactgcgccaaataaagctggggttggatccaagatccgctcgtaggaagtcggaattagggaaatattttgctttataaacccggctagcaagagagtttgggttacataagagtctccacccttgtttagcaagcatagcaaggttgaagtcacttaaatgtcgaaagcccattcccccattgtgtttgtgagtagccattctctcccatgacatccatataattccattccatttgcttgagcttgttttccaccagaaccgagccataagtttttcaatctcatcaatagtaccactaggaattagaaacacgctcatggcataagtagggagagattgaattaccgttttgagaagaatttccttgcccgctctagaaagaaacttgtcgtgccaagtgttcagccgattgataaccttatttttgaggaaccccataatagcatttttatttcggccaatgatattgaaaaggcctaaataatggctaccttcagaagcttcaaccatgcccagaatgctacagatactatcacgaacagaggagcttgtatttggactgaagaagatgttagactttgatgcattgattttctgaccagaagcaatctcaaagaagtggagtagatggagaagagtgttggctgcctcatttgtagcttggcaaaacaaataactatcgtcagcaaaaagcatgtgagtaatgggaggagcacgatgagcaacacgaataccacgcagactgccattagtttcggattgttgaatcagagaggagaacccttctgcacaaatgataaagagataggtggagagagggtccccttgacgaattccacgggtaggagcaataggtctaatagtgcgaccgctgtggacaatggtatatctgactgaagacacacattgcatgatcagatttatccatctatcagcaaagcccattctagccattatagcatgaagataaccccattcagcacgatcataggctttgctcatgtctagtttaagagccatgtagccttttttccctttcatttttcttttcaagtaatgcataatttcaaaagccaccatgacattgtcagaaataagacgcccaggaatgaaagcactttgtgtatcggagattaccttatcaataatatgtcgcatcctattagcaagaaccttagccgccactttgtaaagaacattacataacgcaatagggcgaagatcagacatagaagagaaattcttcttcttcgggattaaaacaagattagtttcattgatcccagagggaaagttgcctgagatgaaaaagtcattaacaaacttaataacatccttaccaactatagcccaatgagtttgatagaaacccggacccatgccatcaggacctggcgctttgtcaggatgcatttgaaacaatgcttgcttgacctcctcgtcttggatgggctgtaaaagatcattattctgggccatatcaaccgaactgttaacaccattaacaaccaaaaaaatgttgagtagcattggccgtatagagttcagaaaagtaatctgaaattacagtttctagcccagaatcccagtccttcataacaccacgactatcttgcaaagaatggatttgattattacgtttccggttgctagcataggcatgaaaatatttgctatttttatctcctccatgtaaccaatgttgcttagacttttgcttccaataaagctcttgttgtgctagaatttcaaaatagttagtctgctcagtaataaagttttgcacatcagtagcatcagtactacctttcaaaagagataatttctacttacttttagagaggcgcttcttgaaattaccggtaagagtgcggccccatgaatccaaagcaacgctgcaggctttgattctttcagcaagagtgagcatagcattatttttcaagcaatcttcaacaagctgagagcaaagaggctctcggctccaacaattttcataccgaaaaaaatattttttagttggcagccaaggtggttttggttcaagaaagatgggggtgtgatccgaagatgaaaaatccccattagtgagcgtagcttgtggaaaagattgaagccaaacatgagaaacaagagctttatcaagactaatttcaacactattagaagtacctttgctacgttcccaagtaaaaggatgtccctggagttcaagatcgatcaaatcacagctctgtaagacttcttggaacccaaaaatgagggcggccggatagggtcggcctcctttcttttcggattggcttccaatattgttaaggtctccaattaagcaccatggaagttgagagagagtagtaagatcatgaataagcttccatgtgttgaaccgcaagctcctatttggctcaccgtagataccagtaagacgccatggagttgaatgttgctgaataatttcagcatcaatgaagttgtgaccgtactggagaagccgaacctcctcttggactttccaaagtaaagcaatgccagctttatgaccttgggcctcaacacaaaaacaaccttcaaaacttaattgggcttttattctttctaccacttcctttttacaaaaagtttcacacaaaaaaatgaaattgggtttcttttgaacaacaatgtcttttaggaattgacaggcccgtgggttcccaagcccgcggcaattccaactgatacaactcataattcttggtgggcttgggaaccaagacccaccacattcacattttttgactcaatattctcattaacatcaattgggcccatattatcttcactgccacttgatgaaatctcaattccatgtccacgtatcaagttttgacccaatataacaggattgcttttgtcaatagcaaaacgtttccttttaagttcagcatttatcaattcttcatcctcttcttgattgtcataaatcacaattcccttttgttttggatgtgattttgcaagattaaatgctggatttgatttgggagtcgttgctgatttggtggcaaaatcatctccacgatttgagggattgacttctgggacgaaatcagtggtggctctgcctgaacggaggaaaggagatgaagcaacctgctgatgccgtcgtggtgtagccttcatgccgatgccgtatggtttcacgagagaactggccggagtatcgaacaaccgtgggcagtatctttctgaagtcccatgtggccacagataaagcaaaaaactggtacatactcgtatttgaacacagcataaaaactttcgccatcgcgttttcggaacttcattcttctcttcaatggcttgtccaacgataaggtcacccgtacctaaaggtattcccgccaaacgccaacaaagttattgggatcagattcgatgaatgtccctacatagttcccgacatcacgtacaactttcatagtgaagaaaccggattgcagatcgtgaacttgcacccataaatcgattgtatttagactgagagttctggggttgtcgccatcctttaaccgagcaatgacaatttgtttgcgatcgtaagtccatggactacccgtgataactcgatgaatgtccacctcgtgataaaactgaaataggaatcagttttgatcaagttgttttttgtacattcctctccctggtttccacaaatccgccataacgttttgaaaaacacgaaaatcagagactttcccagtgagtaacctccctactaaacaccatctggtatctattgattcctcagcaacatcctcttcaatattatctccgtaaaaaacttcatcgtcctcctcttctgcaagctgtatattcttccatcgttcttcaatttcttcaacatggctgcttgaagccataaccaaagcactaacggatcaacacgggctatagtgaaggattacacaaacaaaatcaggccaaatcgggcaaacacaaataaaaaacagcatacaaacgaaccactcaaaagagagcaactgatggttgacgacagtatttggtactagtggtatctaacgttttctagatgtgttgttttgtgattgattagattagcgacgcttctttaaaattattatatttaaacggtataagagcaagtacttaattatactaattgtgatattagcttgtagaaagatattagacttttaccgtctcattctcatatagttgtgtatatatagcagtaacaccaaaaagaatgatttgatgatttgtccaaatatgctatctaattaaagtggctaattttgtaaagagcattgttattagatactagtggtatctaataccttttaaacatgtcgcgttattattggttaacgatatttcttaacagttattatattaaattatatgatacccgatacttaattgaacaaataactatattgacacgtagaaaaatattagatacgactaatacattatttgtctttttttaaaccatacgagttatgggaactgttttctattagtttaatatagccataaatttgtatgcagactcaataattgttttaggatttctcttgaggaaacttaaatgaaattagacaaaaatcc

SEQ ID NO: 63441 - DNA, 702 bp, Cannabis sativa
ggtaaaataacttccaacacaaaatacttcctagggacttctacaccattatcaaaacccaaagcaactttaactctatcaacaaccttcataggcaaacgagtttccatcaaaaaaatcacatcagggcaattttccttaaccaaaagggagtgcctcctgaatgcacgtgtaatcccttatccacgtgcattccaactcaatatactcttttttatgggcgggtgtgttaagcatcacccgcttgttccaaatcagtagcttcaagaaaagaatcgtcttctctctctccaaaacgagcacacttaagttgggacctcacagaaccaccaaccacaacctgttggggttggaaagaaggtcgtttgacaccagaagccaaaaccaaacctttcctatgaacagtagaatcaggctaacccctagaagggttagtttccatagaagagtcaccaacaggagggaactaccataactagccacaaaaaaagtaggggtagaggaaagagtttccatttggctagcagggctatcagcaacaattaatgaatcagtagaataggaggtaaatgcatatgggcgcaaagagatatcaaagttgggcctattgaaagagggggtaatatttgaagtgttggggttcaagggtgtgggcatcatcataacagatgtggattgtgggggagcaaatgggccagtaaa

SEQ ID NO: 63442 - DNA, 1138 bp, Cannabis sativa
ctcctttgcgggacgagctcaactaatccactcggttttgcttgggataaggaattactggatgggaatttttatcataccctttaagataacagcagctattgacaagagttgtcgagactttttgtggggatccttggggaatagaagtaaacttcatcgagcttcttgggaaaaggtgtgtcttcccaaaaaccttggtggaattggatttcgagaggggaaaaagtggaataaagcccttttggctaaaaatttgtgggctctcgcaagtaaacaagattgtctttgggttaaatggattaattcaatttatctgaggactcaggacatatggagctacaccatgaagtatgatgattgttggtacttcaagaagattttgaacataagagataacatggatgaagctagactttgtcaagcagtcaaaggaggtaagttcagtgccaaaaggttctataatttgtctattgaagtggctaaggctgaatatgctaaagctagctgggataaactcatagtgccgaaacatagatttgttttttggcaaattttgaactcccaattgctgacccgggattatcttggttgtttcatttcaattcaaaatgacctctgtcctgtttgtgaagctaaagttgagatgcacgaacacctatttttcaactgtattttcactaaacaggttataggtgctgtcatggagtggttgggctgcttctcttggcctagatcaaacttggagcttctgaactggtgcaaaaatctgaaccagcagcctcaattgcgggtgctaaatactgtcatagcagcgacaatgtactcaatttggaagaatagaaacagctgtattttttatctttgttgtgccacccctagaagagttagtttagatgttcgtaaaactgttcagttgaggttattgggtaagggtccgtttgaggattatagaaagaatatgtattttttaaatgtaattaaaagttggtagtttgggtggctgctacctcttttctggttcggcagcttcaggttttctgtttggcttttagcctttgtgtgtattgctagtctttttgaataaagtttcccctttttcaaaaaaaaaaaaaaaacaatggagatcgaatatctt

SEQ ID NO: 63443 - DNA, 2728 bp, Cannabis sativa
tcctacataaaattctatgttactgtgcttcggatctgcataactcttttgcctactctgagaggcaagcattcttgcattgatcttttctatagcctcattggtccgttgcacttattctagacataagtattttctttctccagtctcatcccaaagaattggagatctgcacttcttgccatacaacatctcataaggagccatatctatggtactctgatagctattgttgtatgaaattctatcaatggtagatacttactccaggagtcttcaaaatcaattacacaagctcgcaccatatctttaagtatctgtattatcctctcggattgtccatcagtctgagggtgaaaagttgtactaaacttctactttgtacccatggctcgttggagacttaatttgccaaaattttgaggtaaactttggatccctatccactataattgacttcggagccccatgtgacctcattatttctttcatgtattattctgtgtactgatccacttgtagaaagttgtggacttagtaaattaatccaccacaacccaaatagaatcgtacatccatgtggttctaggtagcccaaccacaaaatcaaaagtgacaccttccctcttccactcaagaagagtcagaggttgcaacgactttgcaggtctctggtgttcaaccttaatccactggcaagttaagcaccgggatacaaattctaccacatcctacttcatcccgaaccaccagtagaagggttttaaatcctgatacattttggtagtgccaggatgcaatgaataaggagtggtatgagcttctttgagaatctcatttctaagttacttgcctaggacctttcctactaagggcatctgccaccacattggccttcctgggatggtaaagaattttgcaatcgtattgcttggccaattccaaccattgcctctatctcatattcaaatctttctgggtaaagaaatatttgaggctcttatgatcggtggaaatctcataattttcttcgtagagataatgccgccaaatattcaaagcaaaaactatcgcgacaagttctaaatcgtgagtcatgtatcactgttcatattcctttaactgaagggaggcataagcgatgacccgatcagcttgcatcaaaacacatcccaatcctatttggatgcatcacactaaaccacgaacttctctttatcagatggtagggctaacaccagagctgtaatcaacctctgttttaattccaagaagcttgtttcacacttgtctgtccacaaaaactgcttattctttttagtgagtttggttaaaggtgtcgagatcttagaaaatccctcaacaaaccgacgacaatatcagccaaaccagaaaacttttgacttctataactatctttggtctcgaccaatccctaacggactcaatctttcttggattgacgttgatcccatccttactgataatgtgaccaagaaaagacacttgggatagccaaaatttacactttttaaacttggcatacagtttatgtttccgtaatcgctgcagaaccatccagaggtgttgttcctgttctgcttctaatatgagagtacacaaggatgtcatcgataaatactataacacatatatcgagaaaatccttaaataccctattcatcagatccataaaagctaccggagtgttggttagtccaaaagacataaaaaaatattcatagtggccatacctagtgggaagagtaatctttggaatgtcctcctcttagattcttaactgatggtagcctcatcaaagattaatcttagaaaagactgtcttttcctaaagttgatccaacagatcgttgatcctaggcaaaggatacttattcctgatatttaatttatttaattctcggtagtcaatggacatgcatagggatccatctttctttttaacaaatagcatgggagctccccaaggtgacacattagatcgtgaaaaccctaggtcaagcatcccctgaagctgaatctttaattctttaagctctgtcagagccattctataaggtgccttagaaactggttctactcccggtgctaagtcaataacaaaatctatttctctctacagtggtaaactcgaaagttcatcaagaaatacatctaaaaattcctgaaccactctgatgtcctctggccgaattgattcaggctgtctggtatccaatacaactgccaaaaaccctaggcatccatcttgtaacaaatctttagctttcaatactgagatcactggaatgtaagatccctaaaatgatcccacaaatacaaatggttcctcgctctcgggttggaagatcaccatctttcgcttacagtcaatactagcagagtacttccacaagaaatccattccaagtatgatatcaaaatttgctaaacccaattccactaaattagcactcaactctctatcctcacttttgatcgacatagacctaatcttccttttagagataaataattctccgccaggcagtagcgttccaaaccccttatcataactatcaaacgatctacccaatctataaacaaatttggccgtcacataagaatgagtggcccttgaatcaaaaaatacaaagaaataagagttattcaccaagagatgatctgtaacaactgaagggctagcttctgttggaatttattttac

SEQ ID NO: 63444 - DNA, 978 bp, Cannabis sativa
agtaatatttgagggtattttttttgaaagttttacattcgtatttttgtattaatattttcaagcagtaatatttgagggtatttttttaaaaaaaaaatatttattaaattattattttatttaattaatttttttaaacctatttaattaattgagaaactcagaattttaactttttaatagattagattatctctcgcgcgaatcacttgttaaaaagttaacaagtggagtctcctaaaactgtattaaactaatatagtttgacatttcaattaattttttatttattaaaaaattaaacttttaactgattcaacaaataaatagttagtatatttagtttaacaggaatcttgactcgtgcgatctctatataacgcaagaggaccaactggaaaaagaattttttctttttgagaacagacatctcttttttctcgtaaacaattttacattcgtattaatttcgatcaacagtaatatttgaaggtgtattaattcaattaatggttttctacaaatcttcagcaatgtcgccattagcatatataaagataattagataactatatataattgttattgcatgacaccattgttataactataggtttgggccaacctattgagcctaaacatctaattttcctttattagggtataatctagcccatcattcctaaatacttctcttgttgctcgtgtgattgtggagaattcggaagtatctcaacttcaactattcgaagtatgttcctattattattagaccccaaatcatacattaataatttaaaataataagaaagagtttatcaatatatgtgttcgaaattcttgaatgtagtataatgaaggtagacaatgataactcaaattattaaactttttgtgagacagttcttatatatatatatacacggacaaaattaatcatgttaagtattcgttaaaaattaataaattttaact

SEQ ID NO: 63445 - DNA, 2094 bp, Cannabis sativa
tattctactgaaatattccatacctagaacaaaaagcaaaggggacatcggatcaccctgtcttagtcctctcttaacttcaaagaaaccatgcatggttccattgaacataagagaaaaccttggtgttcttacacatgtcatgaccaagttaatgaatttctcaggaaattgcaaagcttccatcatttcctcaagaaaatcccaatctagtgtatcataggcattttacaagtcaagtttgatcatgcaattggccttagctgcctttcttccatagttactgattaagtcctgaaaaatcatgatattgtgtgctatatactgacccttaataaagcctccttgattaagagaaactaaatcagggaggacgttcttaagcttagaacatattaatttggtagcaatcttatatagcacattacaacatgagataggcctaaaatcactcaccaagttaggactcttgacctttggaatgagggtgattattgttgaattgatttcccttagaagattgcctgactggagaaaagatctaatagcatctcacacatcctggccaatcaaatcccaattatcttggaaaaagaaactctcatacccatcaggaccaggactctttattccagaaacatcaaaaaccgcttgcttaatctcttcactggtgtattctgctagcaatgcttcagcttgttccttggacacaacatgtccttctgcaatgatagcaagctttacttttttcctttgttgcaattttgatcctagtagctgcttgtgatattccataaaggcctctgttacctcctctactttttcaactctatcacctctagtattaataatagaaataattctattttgagctctcatatctcttaaactagagtgatagaaggtcatatttgcatccccatctttaatccaattaactttggatttctgctgcataaaagagacatatgctttatgaattttttgataattcaatctgacatcctgctccttctactgcaaagccagatcattagggttcttttgcacagcttcttgacattccaccaggttagatttagccttcaaatccgaagcctgaatatctgagaacccctgctggttaattcctttgaaaacctgctttaaagccttcatctttgtcactacttgatacatattagtcccatggatattaaccctccatgcctcttcaacaaactacttgaataaaggatgattagaacacatcctaaaatacttgaacgggttcctaccacttgggattatatgtaacactgttaataaagcaggggtgtgatcaaatagctactcactaaggaacaaggcttcagcattcgtgaatttacccatccaactctgatttgtcatgacccgatctatttttgagtaaactctatcttcccctttttgcttattgttctaggtgaagaaactgccactttgctttacatcttcaagctgacactccaaaacacagtccttaaacttggaatggtagtaaagctctcttttcccaattctctcccccttctccagtatgtcattaaagtcccctaggcctatccatggttcatacaccttctgatctattaattctttccttagtaaacttcttccatcttcactattaaagtcatagacaaaagaaacatagaaactatctcttttatctaaggttgtaacctgaagatgaatcaactgacttgagaaaaatagaatatattcacaatgaaattcctggatattccaagccacaattatccttccccccttagcccatgcattttttgcagtgaagcaccaattagaaaacatcttaaaatataaggctccaagctttggagccttaactctcgtcttgaggagaccaaccagccccaccttgtgcttctcaatgaatttcttgacttcctactgcttttgttggttgttgatttcccggacgttccaacttagtatcttatccattgtgaagaggaatatctccccctcctcttgtgtctccaattttgggtcattcttcttgattaatctctctctgctatcgtatatgacctgctatttcctcta

SEQ ID NO: 63446 - DNA, 704 bp, Cannabis sativa
ttctctaattttcttacagctctataatcttataatattttattggttgcagaaaacctcggtcaacatatacagacataaaaaacaatgtaaatatacttaattaaactacaattaattaattgatttaaaaagttaacctgtaattaattaatttaatagtaattaaaaacatttagaaagtttaatattcacattcactcgataaaaattaactaactttaagatttcaaaaaaaaaaaaaaaaactcaaaaatcaaaattactttaattaattgcattggtttttttttttttttttgtcgtaattataatttagattcgtatttatatatttttaagaaaatatatacaaaagcttaaaaaaaagtactaaataataaattagactaaaactattactatgaatatctaaaccaggggcagacccacattaaggcaagatggagcagtcgccccctgaaaaaaaaatcaaaaaaaaaatgtacatgcattttagttagtgaaaatatatatttctgttataaatattaataattatgtagatgtctaaatcttttatttattaccattaattgtaatcaacattcatctttttcttagtttcttaaaatttactcttgtatttgtataaatagaggttcaccccattggaataaacaactgagaaattctcattcactttctctttctctcttcttctt

SEQ ID NO: 63447 - DNA, 965 bp, Cannabis sativa
ttataaaattgttttaacagaattgaaatttattctattagaaactgaacctcatagatcaaaattataatgtagaaagtaataaattgtagaaaataaaatgacacatgatattttgtacgtaatatcagcaatcattataaattactattagtacacgaggctacgctcaaagataatcagtcaaattttaacaagtacaaagtaattgacttaaacaaaatatagacataatgattttcccgcaagcttaatgtactcctatttactacataaatctccttaagacaccaaagtttgaactccctccaaattacttaatgaatatttgcttcctttgatgtaagacttgtagatatcttctcacgaagatagtgatacttgcttcctcccgatacaagacttgtaaaaatcttctctcaaagatagcggtgcttccttcttcttgaagtaagactttgtagaaatattctcccgaaaatagcaacgcgtgcttcctcccgaagcaagacttggatgaaccttctcctgaaggttgttctttatgttcttcacttcggaagttacttcacataaaagtaattacaaagacacacaaactcactaaggaacagcaaaacaactatttattacaaaaaaaaaaaatactcttctaaaaatatatgaaattaagaagtagaagaattttaacttttgttgctgatttatgtggtatttatagggatagatgacttttgaaatcgaacctcaaatatttgaatacaaagagaaaatattaattagtttctttacaaaaattcattaaataacgaaattctgtttgaacatatatgaaaagtttgtagacgaaatcatgattgtctagtcagcattatgaatctagattccatcaaagctaaattcatccttattaattttttttcgacatcacacaacttagctggagagattaatgtaaatcatat

SEQ ID NO: 63448 - DNA, 976 bp, Cannabis sativa
  modified_base (789)..(791): a, c, t, g, unknown or other
gcccgtgcctatggctcacacttttcggaggcccaaaataaaaaaaaattattacgcttttatttaagtaaaatttaagtatattataagcaacaaatattcatagcttagttggttgaggtggatggcataatttctaagcttatgggttcaaatcccataacacttttctttgatattctttttaatatattttttaaggccccaaaatttaatttgtcttgggcctatatattttcaggaccggccctgttcacagggcacatatataccacgaatactaccatttttacgtaacagaaattaaaatcgacccctcaaacaaaaaacgccattaacactcgagctaagctttaaaaagttccaaactaaattttaacccaaaattacctcaatttcagcaagaaaatatcggaactagtcccatgactacccgataacaatcctataaggtcagaaccttcataactattctaattcacaaaacccctatacaaaaccaatttttattaaacttaaaacgatattaaacattagcttaagcttccctgctctgagaattcgctattctactacttttggagcttagatcgctaggtttcagattaaaaatctaagaaaatggatataggaggcgaaagttttatcgaaagaaaatgaacgagggtttcgttcattctttttctgtttcagacttatataatataacttatatataatatatataaatacttcacattcacgatcaacttttccttttttaaaagaatattataataataataatannnataatattaatattaataaaaactttattattaataattattttatcatttcttagttactaaaaaacttctacttctagggtgcttcctaaaatctcatatactcttaattatcttaatacttacattatcaacttatcacaatattcccattaattctatcaattaagcccgttatgacattt

SEQ ID NO: 63449 - DNA, 727 bp, Cannabis sativa
gagaacacgaactcgcatgaaaggtgtgacagaatcatagagtgaaatgagatggacctcaatgaggtcaccaatagcatcggcaacaaattgagccagaccgtaggatctggacccaaaggggatgaaatgaacctgaacccagagcgggatgtaacgcagttgggaggggaggatggtgtcaaagccatcggggatggcgaaaatcataagagatcgatcaaaatgccatggctggccttccatgacccttcgacgatcaccttcacagccaaactggacaaggaaaagcccagaatggtattcagagaacgtgaaggggcatcgggccacccaggcttcattcatggccttctgaatccaatcgattttcagggtttttggggacaatatcttaacgaccaagcaataggaatgggtttggggttctgggtgaagagaaacatggtcaaagtcgtggacaagggcttcttctggggttagctgagtggactgggaagtgggtaggtgagccatgggtaggtacaaaagcaagaaatttaagagagcaaaaatggtaaaaagtacagacggaggatgatcagaagacaaaaagcaggtctttaaatagaaaaagggaagaaagatatacctgaggaaagtagagcctggaagatgaggaggtgtgtgcgccattcgaactgctggaggtctagatcctcgcctgcccagccatagggcaatgatt

SEQ ID NO: 63450 - DNA, 1182 bp, Cannabis sativa
attctatttgaaaaaatgattagattttttatacatttacagttttatgtataaaaatgattcatttatcttggtgtaaattatatgtatactttaaaatgtatatgacaatgttataccaaatttaaaaataaaactggaacaaattaccgatagaagattctggttgagtcgcggacaatgtccctttttttaagacgtttctcggatctactcgaagtgtgcacaacaatctagcaactacgacgttctcatgataaaacagcctttatatacgatatattttacaccgacattcgattacaccttaaattattgctctgagtataaaatcctaaagaaagaagacaattttgtgtttttgttgaaaggatgtattcttacgttgttataatatgacttatatagagaagtcgatctaagattaaacggtaatataatcgtggaggagttggatcatgacagtaaaaagcgaatcattgattgattactttttactacttcatttaatgttaaaataattaattaataaatacatatttatttaattaaataatttttctttgaaaaataagtgactcctcactcgccaccccggcacgtgtgtggtggtccagtatgtgagttctcacctatttgcacaaaattgggtactccttggggcccaaacccaaatctcaaatttgcacattatatgcacttctaatgaagtatttctatcccatgtgagactccattcactcactcatacacttcactttttattttttttatatacaatttcacaaagttccaacagacaaattaaaaaataataaaattgtcaactatttttttttttaataaatcatgtatatagcaattagctaaaatgatagcatacaatttattcggggtatcatcccgttagagacacaaccatgattaaagttagacaaacaagctaaataatcaaccatttaattccagatcgtttgacaaaaaataaaaataaaacaatgaaaaagattgcaacaattaactttaagtatacctatattcagattcatttatcgcttaaaagacacaacattagaaattgctgcaataagattatttaacctcgtaactagagatgtacatttcctccacggggatgggactccgcggggacccgcccctaatggggcggggattccccat

SEQ ID NO: 63451 - DNA, 722 bp, Cannabis sativa
gtttggttataaccaagctctacaagctcgccctatggtctagttaattgattagggtccattttctctcaaatagccctaaaatcaacaaccccggcgagtcaagtaccaaatccacatttacacacttattgccttaaccctaacttattcttactatttctttaatcactaatcatgtttttcatataaaatttcattctaaatgctcatatactgcctaaattggaaagcggtaaataaataatcacattagtagttaagcatttagtctcaacacttactgcaccacgagtcgatcttgtttgatgatgattgtacatgtccagccggtctacaagaagtttaaaaaccttggtgaccctaaaaattaggcacgctatgatttcctgataaacttaacctaatcccactaaactgggattactagaaataatagcagaatttaaactttaaattatttacgaattgaaaacataacttataactatttaaattttacaaaccattccaaaatattacacacgttttgagatctcgtaaaaaatttcacaaaacattacaagttagttttatatgccaacctaaacggcaaaacccgagaattcaaagtacatcaactggtagacccaatctgcatggtctagtatggcctaaacatatacaatccaccatcaagcccttgatctcatggctgatcacaaactaatttaccctttcct

SEQ ID NO: 63452 - DNA, 534 bp, Cannabis sativa
  modified_base (458)..(460): a, c, t, g, unknown or other
tactaaggtaacattctaacctggcatcagaaggaacagaaagatctgcagttccatggtaaaggataataggaggcaatagcgaaattgcatttttaatacttgggtccagtattctaacttcaggagaatattgtttcaaggattcttcaccttccataacgctagaatgacgaaacaaacaaagctctatcaaaagatggaaacagagcgctatcatagatagtacagtaatcaggtagcaaattaaacaacatgttgattcttatgtacctcaagaaaatagatcgatagagtcctcgtttatggaagtgatcaactaaattaggtaaattatacctgcagccatatatacatcaaaggaagctcattagtttaagaggctaacttagtaattagtagaattcattcataataaactatgataaagtaacagaaatttaccctccagataaacnnnaataagctttcaagtcagaaacttttacggaggcattctctcctttcacagattcttgaattgccaactccaag

SEQ ID NO: 63453 - DNA, 1036 bp, Cannabis sativa
gcaatatgtcttctgtccttccactctttgccatctttatccttcaaatcccatatgttatttcttcttttccgtatgaccgtagcagcgtgaaaaaacttggtatttcgatctcccaatgccaaccaagtctccctagacttttgtctccacatactttcgagctttgaccaagcgactgtcagattttcttgaatactcagttcttcaattctaaaatcatctggccgagcttgactttggatccattctaacctgctttccatttccttgatatctccttcaagggctcctttgtgattctttttccaggcttgtaaagccttcttggccttgttaatgttatgaataaaagtcacagtagcactatccccgcaagaggaccaagctttgacaattacctccttacaggtcctctcccaagaccaagcttcaaagaatcggaacggaatgaaccccttagcagcgaacaagtgagaatcgaagataataggagcatgatccgaaattgcaataggtaagtttctgactccagcagaaggatattccagtaaccaatccggagagcataaagctctatcaagcctctctctgataagaccactcgaaaaccggttgttctgccatgtgaacttattgcctatgaattggagatcgattcccccagaagtatccataaaactttttagccatttagtatccacattagagactttacggcctcccaccttttcctcttggctataaatacaattcaagtctccaattatcatccacgggtattggcaattagagaattccacttccatactcttccaaaaggcttcttttacactcaaataaggagttccatagaccgcatacaatttccagtgattatgattttgaaagtcctatacagtagcatcaaaaaaaccttcagcaaagtaattaactaccaaatttaaattgttattccacatgaagcaagagcctccagccaacccaaccgcaccaacactaactatatttgtaaatcccagttttctagctactt

SEQ ID NO: 63454 - DNA, 943 bp, Cannabis sativa
  modified_base (901)..(909): a, c, t, g, unknown or other
ttttagcttctcgagactaatattgtcttaatcatgatggttatactctctggggtcgagaagatcttcctcgcatgcaaaacatcttttcgcgagataatcgtctcgctgtctgttatcttggttcgccatactatctatacttagtttgtatattgcataatatacgctaagtatttttagtgtcatcgctttctctttcacgtaacgaggttgaggcctcgtcatgagtgtatgcactaacatggtttctcgtcaatacataaattggcaaattgtatgtttctgtctcgctgaaggctattcagcagaacgagttataaacatatcctgcaaattatatttccaacgagttgttccatgctaagcatacttgtcgtttgtgtgtttgagttcttcccagctcgacaggtgtcctcctctcatgtgcttaccgaacttcgggtataacaattacctcttaaaaagagctttttaatgattaccaagggtattttcatcacactcctttatttttgaaaagacgcattccctctgattttggcggttgtgcggtttcgaggtacatcagaattaaatgaccatcttttccactttcagttcaaatcacgtccattggatcaaatcttttttgaaatcattatcatgagtataaaataaggaaaaggaactacctttgcaccattttagaaagtttgagaaatacccttaacttcttcgttaaggatcaccattaaacccgtctgaagatttgcatgccctccttgtctttgacctttttcctgcctgtttcctccgattttattttttcaaggcgatccttgcttcgttcgaaggtttacagatggatttcccaggcatttccccaagcccttgttgggtttcgtgccctaaataaaannnnnnnnnatataatcagatttactaattattaaagatcaga

SEQ ID NO: 63455 - DNA, 1869 bp, Cannabis sativa
tatcacttagttgatcttaggttaattgatctcaatattgaaatgaatttgttctaacttaattgtactatacgagttctttgacttgtttgtgacctgcttacctataggactagcccatacttacatcttaaaaattcgataatgcaattgagtgggagtgttaatcatagatataaaatctatagcttctataactatttaaaagtgaaatgatagtttcctttgagcttggctaaatgatagagcgctcattttaacaattatattagtttactgaaatattatttacaagtagttaagtattttaaggataaaatatattaaaaggtaaaacgataaatttgtccttagtcgatataaattgtctatagaggatcaatgattgtttagattgtaacaatggataattcataacatatctataattagtatatagagtgttttacgtaattaagaatacaattctatatttatagtggggtcagaagaaattaataatctaaggaatttactaagtaaattttagatctacttactaagagcttggtaacataggcccatgattctcacattgtttgagataatattatcttgtagactcaattaattgatttaataagtcaattagaattcgaaaatagactatgtcttatttgataattttcaccaagtttgggagattttgagaagaaaaagataaatagaggtttatttgttaattaagacactgtgtgggtccaattaataaatgtatctaaattttattgaatttaataattatttataattattaaattaaaattggtctttaaataattatatgagataattggtaaaataataataaaaaaaaaaaggcacactatttcatttaaatgaaatagcgtggcgaaaatctaactctatggcccttaagtggaatttgaccctataatgaatttaagcccatctaacctagtcctaattgaatgcctacataaaaaaaaagagaagaagatagaaaacactaatgtctaatcttccttttctctttcattcacaaaattttgaattcaccatgtcaccatagaatttgaactctcactcacaaaagtatgttctaaatatgagttgagtattagcccacactattcaaggtaatactcagacctttatggaagattattaaaaactttcactttttaggttaaagaacgagatccaggttcagtacttgttaacccagaaattttccgtggtgacgtggacatcaatatttaacacctggcatgaaggatgacattacggagttgagtagactaagtcatagcaatcgacctgggaggggaccctagtcctacacccaagatgacttcgggatcttcgggatggaagtttagactttaataacttatttccaacttactatcttttagtattttataccatgaagacatggagcaatctaatccaagcttcgggagctaaaattacacaaacctacaacccagaagccaacctggacacctagggtttcacttggcacccgtatccaactagggtttcagtttttagaccgtcttagtccaaaagagtcaaaactttcattggcacatcaactaggcaaaccacagacatatttgaggtatcagaattagaatcggagcaagctcatttttgagcacctagagccccagggcccgagcacccatcacccaggttgataatatatcaatctgagcaccttgcaagtatcagatcagatatccgacttttgcatcttcttcatcttcatcaaaaatagggaaatatgcctttcgaagaagaaataacacttccttggtgcaaaaaatagggctcaatgtccaagttgacacctagggctgg

SEQ ID NO: 63456 - DNA, 1337 bp, Cannabis sativa
ggggcattccgagaatcgaactcgggacctctcgcacccaaagcgagaatcataccactagaccaaatgccctgctgatattaaattacatcgtatagatatattacctactaattctttcaaaggaaagtactgcagaacccatgactttacatatccaaattactcactctggttgatggttatgaaagtagggatcctaaagtaaaaattagggtagtgactactgactagtgaattagaatgagtgagcttgttctattttcagtatttcgaaggatccaaataacagactatcatatatctgttgctattgggtgtcttgtcttgactttctctctcttcttgttatatattatatgctgagagagagagagagagaaagagtgggtttttattacgtcgtccatccgaagaggcctctctctctttctctgcgaataagaaataatgctgagtgttaaattattaaggtgcgaaaaagcgagttctcttcgcaactcttcttaatttgattacatctcatacttgtttttcagttctcctaactcctaactttagtgattgtttaaaacaggaaaaacgtcttttctccggcctgctttatcaggggattatcttctcagactcgaaatggaaggttactcattgatcaatctcttctttagtctcttaattgttcttcaatttggttttcattgccttgttagttgtttactcaaaatgaattgaggttgagacttgagacgaataccaaaacgtctttttttggatctacggaaatacaatagttttctatttttaaacgtaaacataaactttattttttattttttttctgaatctctcatttattgctggtccctgttgaagccttttaaatatatattatatattttttaatattatatccattgtcgtactgcatttgggtttactgttgttttcatatgcattgtcgtttggtcctttttttcctttttcttcttaataggaaagtcgtcgtccatccaagaatttacagttttacatggttgataaaatttagtaaaatttgctgaactaaaatgaaatattaaaatttacaaaataatttcacttaatttattctatttatatgggtcgaacataataattgtttataatcatacattataattcatggttatttctactacttacaagtaaaacatttcatatttttgaaaaacactctaaaatttacttaaaaagaaacgttaataaatgttcatttttcttcacaaaacgtttaatcataaaattggcatcgtttttttttctttccaatcatgttccttgaaaattgattctgtagc

SEQ ID NO: 63457 - DNA, 807 bp, Cannabis sativa
tatttaaggtacgtaattattatttttttttaatcaaggtacgtaattattaatatattattattattattattattagtatttttaataaactgtacctaaatttgtacgaacgttgcgatcaagaactcatattgtgattaaaagaaaaacgttaggtttaggagttgagttgtatagataaacattattaggtaattctctatagtacaccttgagaaaattttagcataaaaaaataattaaattttctttttatgattatatatattgtaaatatttaatttgaataatttacagtgtttaaaataaattttaaatattttgttgtttgaaattttattttaattactctaaattattcaaaatttttaaaaaatttaaaaatattgttaataagcataatgtatactattatgaagaaaaaaaaataatagaatataaaactctattagatgctaaaataaataagaagcatactagattggccctgaaattgggcaggtcttaaaaaaaataaaaattattgatcctttattaaaaatatatatagtttatttgaaaaaatattaaaaaaaaacatgtatattttagaaaaaaaaaatattgttgttgggatattaactgaatgggtcctaaacgcaaatgtgacttgaaagtatacgaaaactgctatcttggaaggtatactatagatttttttccgaaaaatttacacaaagtactatatttagtaaaaagaaattatacttttacgttcatatatatatatatattacatttttacggtatatttcataaaaataa

SEQ ID NO: 63458 - DNA, 1016 bp, Cannabis sativa
tttggttccgtgtaataagttgattactatattataagggactagggtctctcgacaagttacccatccctatttttttttaaatttcaaagttcgaattaatctacattagaaaactcaatcacgacaataataaaatttttgagtacttcaataaatctacagacaatgtgagagtgagacaactacatcacttgtaacgccgtgatctataaagacgttatgtctgtaattttataaactagtttaatattaataaaataattaattgttaagaatcatgataatactaaaaacttgactaacatgaaacattaaaaacggacatcataatagtagtaaaaaaatgtttccggaaatcactgttataaaaagttttacaaaagaactatatataatgacacctcaaaaacataaaaccaaaacacatgatagatacaacccaaaataactcttgacaacccaacacgcaggtcagtgatgtcaatatgtacattgctgaaagagactgtcttctcatagctgctctaactttctcttccccttacctacaccacagagcactggtgagtcacataaactcagcaagaaaagtaatgaagaggggtatattaaataacatattatacatttcattatcataaaatgattataccataacatttaacaataggtaatataaccagcaatatgcataaaaatagatatgctcatatatttgtattgcctaattaggaaatctcgtgtcataatgcaatatcatatataataccattgcaccacctaatcaggtgagctcgtgccacaacttggcaccaatatattgtctcgcctaatcagacgagctcgtaccaaagcctggtactcatatgtcactgccgctcgtacctaattaggtacgccactaggaggaaacccaacaacggtttcgatctatgccataacctgacattcatatatcattaccgcccgtacctaataaggtacgccgtaaggaatatcgcatcacctaatca

SEQ ID NO: 63459 - DNA, 705 bp, Cannabis sativa
tgctgtgtatggttctaattctgctacggtaaggaatatgctctaagaaaagttggctagttttaggtgtttgagtcatccttggcttgtttttggcaatttcaacgctatgttcagcaataatgatagagttgggggaagacagatcacgactaatgacattctggatgcttaaaattggttggctcaaggtcaagtggaagagcttaagtgctccaattttagcttcacctggaccaacaaatatgaaatgggaaataggatctattctaagttagacagagtttttatgaatgagctctggtgtgatcgtttccccaatacaaaggctatttacaagtaggatgatatttttgaccacagttacttcattataaaaaaataatgatgtttttattgttggtgtcaaactttaggttttataattggtggatgcttaacagtaactacaaagccaacgttttagagaaatggtacttacctatggataaaaaaggtcttggaggcatcatatacatattatacaagctgaaacatgctcttaaggataattttcaaaaggttttggggaaaattcttgctatgtttcaagaggccaaagagaatcttagcttggcttaaggaaatcttgctaataacccttcttgtttgctgctgcaacatgaggaaaggttaaagcatcatgagtttaatctagccaaattg

SEQ ID NO: 63460 - DNA, 863 bp, Cannabis sativa
aggctataactctgttagcttgcaccagaacacatcccagaccctgtgtggatgcatcacaatagaccacgaatgtttctcgatctgacggtgggctaacacaagagttgtgatcaatcgttgcttcaactcttaaaacttgtttcacactcgtctatccatataaatcattgattcttcttagttagctttgttaaggacattaagatcttagaaaatccttctacaaattgatggtagtatttatatatttggcccatccatgacgaattcaatctttcccaaattaaccatgatcccatctttactaacaatgtgcccaagaatgatacttggaataactaaaactcacacttcttaaatttgacataaagtttatgttcccgtagttggtgtaaaactatccacagatgtaacaccctactgcttagacatgctacattgactttctaattactgtgcacacctttgtcaatgaaagggtttctcaaaaaatgtgttaaattaaaattttaaataaaactttaaactttataaatataaacatccatacaaaaattcgagatcccgttactaaaatttatattcaaattacactttacaaacatgtctcacaacgattacaaaataaggtctaagtcgtctcgagaccaaactctccaagtccaataatcctaatgtgtacaatcacccttgagctctggagtcacttgtgtttagccttagcttttcctttacctacacatgtaaataatatatgtgagtcgacaaacacagtaagaaaagcatataacataatatatatcagcaacttgtatttagatgctcatacacctatttacaaggcttcagatgcatcaaga

SEQ ID NO: 63461 - DNA, 800 bp, Cannabis sativa
cgtcaaaaaagactagacaaactatacatacagtcttaacagtagactataatgaaaaagtgggaaataacaaaccaaaaaatggtggcaagatgaatctgtaagaggaactccaatcatcatcgtcaagatgagaatagaataggagtgaagaagaaccatcaacaatggaagcctccacaaacagatagaacgattatcagaatcagtgcgattaagattcccaaaacaattagctttatcttcatgttctgcaaccacatcttcctccttacttgggtcccctgctgcctgaaatcttgcgcctgcataccgaggtttgattaaatgggaagttaaatttaatgcaaccaagaaatgagacaaaaagcatacaattgaaatatgaattatattcattccaaaaccataaatctaaacacccaaaaaaaacacttccagtcatcaatattcattatggcaaaaaaaaaaaaaaggttcaataatacttttagataatagaactcaatggcagtaattaagttatatcgaaaagctgacctgagagcgtaagttctctgttttatcaaccagaagttcgattttctctccccggtcaaggacctgcaccgaacaaagattttttcttaacagtcctgatttttaaaagttatgagcaaccacgacaacttaaacctctgtccaccctaaccaccaaaagggcagggagaagactacaggtaatttatagaaatatagcaaagaaggaagaaggaagagcagggccttgccttttcaatattttccatcataacaccttt

SEQ ID NO: 63462 - DNA, 2515 bp, Cannabis sativa
ttcctattccattcctattcctattcccattctcatattctcattcttacattcttattcgtatatttttatattttcattcctcctaaccaaacgtctccttaatgttcaggtgcctacagagttccaaaatataacttagatattattaccgctaaaaattaaacttgagtatttatttgcaactgagagttaaacttagtatttatgccataaattacccaattttattttgcatgttaaaaagctacaattagatcgcctaacttatataattattttaggtaatattattaattaattttaaggtgtcacttataaaaaaaaatactatgtattactgttggctaataacaaatagcaatactctttaaaaaaataataccatataaaagaaatttaaactctcaattaatttatacaaaataattcttttgtttatatatttgttctatttttttttttttgaatgaatatttgctctattttatttttagctaattaaaaaaaaaaactaaactaatcacacactccctttctattagctctctctatcacttggttctctctttatcactcgactctctctctctctaatactctctatctcaactagctctttctcaatctctttgctccctgtctctcgacctatctcggtgaatggtcagaccttatcatcgaaaagaatcatacacattcacatgaataatgggtaagtgttgttcaaagaatttcttaaacgtttagattagtatgtagtttattttcgatatatctgtgtggttgttctttatcttggtgttatttttctgatttttctttggaatggcgagatctagttttctcgccaaactgaattttttttaacaaattatcgatactttttcgattatatattgatatcttctcgataattaaagaaagaaagtaagggatgacaattttaataatttttcgatggtatatcgacactatttcaatctaggacaaaatgtaacaaaaaatagcaaaattaatcatacaatgcagatcatcgataaataatcaatatactattgataaaccatcgataatcaactaaaataccaagcaaaaaaaatgtcaacctaccatcgatatactaacgataaactatcatcattattatcgatgatttatcgatagtacatcgatggtttatcgatgatcgatggtttatcgatgatcgatggtttatcgatgattctgccttgtgtgattaattttgttaattttgttggatcattggtattagtttaaagaaaatccagagatgtatagtgttaaaagcacttaccaacttctttaagtgcttcatgaaaggtgatcgaaaaataataattctaggctttggagagacttatggaatctcgaaattccccctacggttaaagacttgttatggagggcatgttccgattgtctaccaactttaactcaattaaaaggatgacattttgacatctctgttgtttgttcgatgtttcaaggaatggaagaatcaattctccacattttagtcgaatgtcccttaaccaaagcatgttggtagtgggttgatgtggttctttgcaacctctcggccacagattttacttgttggtttcaacagcttgcgacaagcttctcaaagacgaaggtgtgtcatgttgccataatttgttggtctctctagcgtgctagatatgacctggtttggcaaagtaaaagttctgttacaaatagtgtagtgtctgctgtattgtcttactttaatcaatggaaaatgctcgtaaaaattcatcaaatacaatggctcctagccagtgacagacccagaaatttttctttgtgggggctttttattattaaaaaatatttatgcatatattataatcatttttactagatttatttaattttgtgggggcttttctactattttagtctataattatcaaattaaaaaaaaaaattaactttttaaaaggtaatatttttgttagtaggggccattaaaacaattgggtccgttcctgattgcttatacactgacaacttctattattagaataagagagcatagacgaatgtttattcttgttttttaagttcttctataatagttgattcgatttaataaaatttggtactttttttaataataataatattttttttacccaaacattattttaattctaaaagcaaattacaataagactagtcaaacaagatgaaaagtcttgattaggtatacttttcatttttggaagtttctcaaatacttatataagttagggttgtacataaatttttgtaaaccctccaacccgaataacctgtccaaaccaaatcgaggtaactcgacgaaaaatgcaaataaaaaaatccgacgaaaatataacccgcccaatctttatattgggtatgttgaaaataatatcaacccgcccaatcaacccgaactgatcggatcaacccgattaagagaattttttttttttatatatat

SEQ ID NO: 63463 - DNA, 820 bp, Cannabis sativa
tttctgtaaaaaaaaacatcttcagatcttttttatttattttagtgttttatttttttaaaaaaggaaaaaaaaataaaaaaaaaacacaaatttaaagttttatggcatttcccatgattttttcccatatttgtaagttttttttaaaaaatgccatatttagtgtaattaagtttttatgccatatatatcaaaacttatattcattttcccatatttttgtaaatagcccaaaaaagaaaaatagtttagggtaatcccttaggtaaccaatgactttttgaaggtaactaattactttatactgtttcttttttcataaaataattttttttttttaaaaaaaaagtcatatatttgcacacattaaataaaacttactttttcacattttttaatggtatttaaaagaaaaaagagaattattaattatgtggcttttacattactttttccaaaacttactattttttaaaaaaaattaacatttatggagaaatataagtaactttaaaatataatttatatataaaaaaaaacatggcttcaactaaattttgtacaaaaacatgaaaaattaaaactcatcttaacaatttcaataaaaaaaaaatcataaataattgcttattttagaaagaaaatccataatttttgcacactttataaagaagccataaaatcttaattttctccttgttgtccgtgttggacaggttcaacgagaatgtacaacttgggcaaagcccgatagggttatttaaagcttaacatgatgcttccatcaactaattagcaatttttcctcccgaacttt

SEQ ID NO: 63464 - DNA, 1134 bp, Cannabis sativa
agccttggctctttgagagaaactgggactctcgaattttgtagaattatcaataatcatcactctcttttctgtaataatcatattggggtgtatcaaagttacatgtccaagtagcattcaaagcaatctccaagagcactgaccaaatttcgatgccctcagtttcgaaataagctcaatatgacatgactgatctcaagtagatgtatcaaagttgtttgtagcctcctcaagctcttcttccaaagaaaagtttcgataaccaggaaggtcgagctttcttgacttcattgtatgagatatgtagccttaatgcaaacacaagaacagaagactcagttatagcaaaaatttactaaaatcagaaaatttcgcttctcactctgaaatgtcatgctcctttctctccaatagatagcaataacataacaattcatttgttattaggaaaagtttgttttcatcatgtcaatatacagctcaatataatgttatggatcttgttggagattgtgctctcattttcgtttaaactgcatactaccggccagcgattgaggtggaatactctcatgtctcgcaagctggttcttgatgtcatcaatttgattcctttgagtttctttaagtattttgcttgtggttggagggtctctaagttggaaataaatatttttgttgttgtaatggcatgatcacgatcatcgtttttttcccatgctcgtattgagttcacaacaacttttttttttttaccttaacaaattgtttgtaatttgacataggttttctctttaaactctacctgtagtatgtagcagctatgatcaatctctttggacaagctacagataagctttgtcagaagctagatgctgctgcaaatgacggggaagatgttgagatggaatcgctcttttctcgtttgacattggatatcatcggcaaggcactctttaattatgatttcgattctttgactaatgataccgggatagttgaggtatcattgttcccctttatgtttgatcttgttttagcatcatcatatcgaacactttcacatgtttgtttgtttatttgtttgtcaggctgtttataccgtcttgagagaagcagaggatcgaagta

SEQ ID NO: 63465 - DNA, 2664 bp, Cannabis sativa
tgccactaccgaggttgtttagttacagtcattacttgaagaaattggtttggctaaactaccagttcctacaatatggtgtgataatcaaagtacagttctcatgtatgctaaccctgtgcttcactcacgaaccaaactcatcgaattggatctttattttgttcgtgaaagaattctgcagcagcaacttcatgtgaagcataaccctggtcaagaccaagttgcagacatactaactaaggctcattctgcatctcgattcaaactgttgcaagacaaactaagcccgacttccttatcccagctcaatttgaggggggcgttaagtagttagttaaagttaggtattttgatatattacttagttgttatgttagttaaacttcttgaaatgtacttgtatataaagagctctgctcttctaaattaatacaatgaattcttttctttcactatttcatattcaacaaatatcagttaaataaataatataaaaatagaataaatttaataaatgaaagtattaatcagattggaccaataagcctaaaaccaaaatcattgaattgtattcaatgaacacaactcaaattgcttatgaaacttaaaccgaaaaatttaacaataaaaaaaactgaaaatagaacaaattatttgacgaacaacaaaatctgaaagtaagaacaaaaattatttgtattaaaagcaggcaattgacttctttcttggtaagacagtaatataaacttatggtgctttttccagtccttttgggacagataatacgcaactaaatatcatttttaagaaaaataattatagtctcttccataataagattcattcatctggaagatattaaattgactttgctagatgtcgacaaaaataatataaaaacctgtttttttaggttaattattattagctagccacaccacacacaccaccatttcaaatcaagcaaaacaaaagttaatggtttttggaatccaatgtagaatcacacaccaaatagcagtttgggccaatgacacaaaaagcactaaagagagttgtaatgattgttttaactttaagcgttatgtgtatatataaaagaaaaggttcaccatctcatctcttctcatctcatcattatgatcatatagaattgtattgacaaagaaagaaaagtaataagcattacgtaaagccacttttattctcatgtacaggttgacattgactctagctactaacattaattcatgaaatcaggtagtatagccttttttttttggccatatacaaacatatatgtatgtatttatatatatgtacgtacgcatgtctctgcattttcaaagctagctccaatgtaatttttctgcccaccagcaagaaaatattgctatctctccacttaatattcctgatcaccataagtaataattacaatatataacaacatatgcatgatatataatttaggaacgaaacaaaacgagaagaatttttgagagctctgtaactgctgcaatcaagttattaatgtttttctgggtattaattttgaaaacatgaataaacaataacctgtaaataatacaaccaaaaaaaaaaaaaaactaaccgaattgtgaagcataattaaaacccattttttgagtcagattgatatcaaaattagtaaatatggacacacacacacaaagttcccacagattaattatacaataaaaagttagggataatagctgcaaagaaaaattacagaaatgtgatccctatcttttggtctggccaaatatgatcgatatgttaatggttaacaaaggattcatagcataatatatatcgattgtttcatcataagactgcattgtcagaattcacaaatttaacagcacattttaatattcttcgatttgcagtaaactgatgaactacaaaataaaattaaaatctgtagtaggtacatatatcatatcatatacatagacaatctacaaatgaaaattaaaaaaaaataacaaataatatcagagcacaaaaatgtgtataatatatgataaatgtatattaattattgtttgttcaacaagtttctcagagagaaatttacagactcagtttgtcatactggccgcctccaatgcgatcaaacactaaaaagaaaaattgagatggaggcggacagaatgccaaactggatctgcaacaaggcctctgagaaaccctagagtgaaagagagagagagactgagctagatgacataatattgatgaatgaggtatgtatattcatgtttatatttataacaatattaggactttaaattaacacaacaccggtttgaagaagaaaagggcatatattgtagtatttgggaataagtacataatggcttttgaaataagattgctggcttttgtggaaagcgggtgcatgagcgtgcatgctgttgtacgacttgtggggttgtatatttatatggttgacacttatatattataaaaatataaatatatatatttaaatacatacatgaaatgaaagcatgaaaagtattggacaatatttcatgtgaatcaaatgtaaaactatcgagtgatatataagaatgtgggttactccacttattattaattagttttgagatgcaaacctatgaatct

SEQ ID NO: 63466 - DNA, 1325 bp, Cannabis sativa
tccaacgtcggccaatattttcaacggcttgtagtaacagtagtagtagtaataatagtaataacgagtatttggaaattgtgctcaaagttcgcgattacgagctcgatcagtatggtgtcgtaaacaatgctatttactcaagttattgccaacatggtaattaatattattaattaattaattactatttatataatttattttaaattttatttatttattaattaaatttatatttatataattaataggtagtcatgagttcatggacagtattggtgtaaattgtgatgcaattgctcgtacaggaaatgcattagcaactgcagaagcgtcaatcaaattcatttcacctttaagagtatgagatttatataatttgctaattaattatgttctatactaattatgtcttctttattaagcagggtgggccctaagcgcgacctacaagaaatccaaatagagaaaaaattattttaaaaaataattattaaaaatagtatttattcttataatgaagactctaaaaaatttatttttcttaagacccaatacaacttaaggtcgtgattaagatacgatacaatattgaactagtcaataaactaaacataactcgtttagttattaggtgatatatgatatgacatgcttaacctgttgaataattagatattcgcgctgtgttattcaaacatgcatgtgattgacacgattagcttattatatatattttatttatataattttttcttatttgattcatataatttgttaatttattatattctatactaattatgtcgatttttttttattgatgcggactataggctgcgcctagggcccacccagcccaagaacccaaacaaagaaaaaatatcatctattcttatattaagggctttaaaaaatttatttttcgtaaggtcgaatacaacttaaggctgcaattgaacgtattaataaacctaaatataaatcgtttagttaacatgccatatatgaaaccacatgtttaccttgttgaataattagattgctgttttattcaaacatgttattgacacgattagcttattatatatttaattttccttgaaaatattcaatgtagcataaaattaaaattaaatgtttacttaaattaattagataagtcaatcaagctcttttttggtgttacttccaaacctaaataaaatgcataaatataacatatatatttctttgtaaaatttatacaaaatatttaaaattgatttttttaaggattttttctcacagttgttcttctacttacattttttttttttttt

SEQ ID NO: 63467 - DNA, 996 bp, Cannabis sativa
attaattgtataaaggaaaatataaaaaatcttacctatttaatattttttttctaatttttttctacattttttatattttcttatagaaaataaaaacataagctaaaaaaattatcaaaactttgaatattctataattaattttatgtattttttgtgagccaaaaaatttagttattttttattaaaaaaaaaagttatttttataatatatataaaaaaagttcaaaaaaaatgtatgtgacattctataattttttctttcaacttttactattttatgaggcttccttttataattttttaatagaaaaaaactaaacacaaatttatattataattatctctactaaaagacttataaaacattaagcacttatataaaaaaaaaaatattatataccgtttgtgcaaaaaataacaattattctagaaaaaaaatctcattaaaaagtttaattaagtagcattctctacattttttattctatcctttctaatttttctagagcttaacattttctccaataaaaaagcatgttttgtattaattttattttcattctcataactcctacctatttggccaatccattttattattataatatgataattaaataaattaatttaaacttattgataaattcataatattcaaacttaatataaattgtcaaatctatcagaaaatgaaaaggcataaaaaatatacttttacaaaaataatatattattagtattattaattatttagtaataaacatataataaaaactgaaaagagagacaaaagatattctattagtattattaattatttcggaataaacatatgataaaaaagaaagagaaaatgaaaagacacacaaaaagtatattattacaaaaataatatattattagtattattaatcatttagtgataaacgtataataaaaaaaaaaagacaaaagatatacagataaaaaaataaggggtttttttatttt

SEQ ID NO: 63468 - DNA, 691 bp, Cannabis sativa
ggaggctttgagttggataaagcataaacaatggggttcggttgaggttgagactaattctttggttgttgttcaggcaattcgaggctcggtgaatattccttctctttttggccaacatgtggctgcttgtcgttcattattggcctttttacctttagtcatgattaattttattaaacgttctgtaaacaaagttgtacattatcttgctcgtagctcttgtttgtatccagatcgtatattcagcgagagtactgctctgctgatcttctttctattgtaatagttgaagtttcatcttaaataaagttaccatttctcttcaaaaaaaagtctaacacaatgatgagtataattattaattctccaaaaataactagatccctttggagcattataacatttttggatgatcattttatgatcacaaaccaagtgtttaatatctttctcggtattatattgttattggtataattaaatattgagtcttatataatttaagaaaataacttttaaaaaatatcactaacttttcgtgtgatgccacctatagaaggtgttgtgcaccactgttgcttaatagcaatgctattaaagttagtctcacattgctaatgtgtggaaataaattaccatatataagatgaataagctactcctcatattgtcaattagttttgagatg

SEQ ID NO: 63469 - DNA, 651 bp, Cannabis sativa
gcagccaaacaaatcctaggaatgaaaataattcttgataggccttctaaaaaattatgcttttcacaggagaactatgttcagtgaatacttgagaggttcaacatgaaaggtgcaaagctagtttcttcacaacttggtggccatttcaaactcatcaagagtcaggtccttcctttgaagaagaaaagaggaaattgttggttattccttactcttcaccgattggaagcctgatgtacacaatggtttgtatgagatcgaatattacttatgcagtgggagtcataagttattttcttgtaaattcaggcaaactactttgggaaactataaaatagattttcaaatatctcagagggacataaaatatatttttgagcttcgagaaaggagaacaaatcttggaaggttatgcagatgcacatatggccaatgatcttgacggtaaaaagtatacatcttgatatatgttcacttttctagggggagtttgatcatggaagtcaaagttgcaaaagtgtatttgctttatcttccacagaaggagagtatattgctctagaagaatttggaaaagaaatgttatggctaaagaattttctccaagaattgggtttgaaagaagaaaggtatgtgattcattgcgac

SEQ ID NO: 63470 - DNA, 826 bp, Cannabis sativa
  modified_base (779)..(781): a, c, t, g, unknown or other
ccgttcgatggtggctgatcacaactgtcttcacacatgttctggcctataaaagtcaaccttcttgcctcatttggttactttcagcattttaccaaaattttctcaaagtttcctagagaaaagaaacctcaaacatcatagatttcctgctcttattcctttgccgttgccagttaaccttttaccggcgatcaacaccaacgtctagcttccacactttatgtaagcttttcgtatcttgtatactagttcactgtttgttcacatatcatgctttacttgttcatttactttttctgggttggatgttgaatttctgggaatttttgttttgagtttctgcacaacgcgttagattccttctcttttgcgtttagtttacttcttttcaccatgtttttgtcgaggaatcatcttcgtcccacgtaatgacactttagggtttagggcagacttcttcttctcgatcttacctttttttccttttctctcgttatttttttgtaatgtcactatctgtaggattcttgcacccgactcttgtcaaggaaaaccttttgagggtttctcttttgacaagtgtctggagggggcttctttccagcggttaagggacccccattccctttttgaattagggtctggtttggggcctgactgctggattttttcaatctttttcaaaaccaaaaatgtctacttctgcattctgttctaagtcttcgaaaaagggagaaaaacgcttgaccaccctggaggaggtcatgaagggcccnnnggcccaagaagggcacaagttccgcgccaatgggtgggaagcggc

SEQ ID NO: 63471 - DNA, 1034 bp, Cannabis sativa
acaacatacttgtgagtagatataggatcctggtaaaataaattccaacagtttggtgggatgttggaaagagagagcgaggaagagcgagagacagagagagggagagataatcaaatgaggaggatattttttgtatttatggagaatactaatattttttgtacaaattagttggaggtttattatttgttataggggtatcatttaaatatacataatgatcattaaatatattgtaatacatagaagataatactcgccataaaaaaaaaaaaaaaatctattgtcatgattcatatatttattatttaacaaggataattgttgagcttaagtgatatacattaattcaaatatcgaccaagttggagaatgttaaaatatacaatcggtattattatttgattatattataattaatatatttatttgattataattgacttaatgttatagttaatatttggttcactgacaaaatattttaataatggtcaacattatttttgttaccaatttcatttatgttatctaattttattatttgattaattatcaaaatattttgtttcaaagattttgatagaaaacatcgcttatataaatataggatattgttccctaagctatctagttatatttattctatcaaattactatcagaaaactatagtataagagcttgaaagatttatgtaccctactaattcctttctctcttattttttgaaatttgaatatctatatacatgctagtgggaattcacatgtattaatggctagaaattaaaaatttggatcctcttttgccatatgtataatgcatgtagtcatttaatctcactcggccatatataagccacttgtgccctccatcatctctcctatagggctcagaattattgggcttgaaacatggacctatgttcaagcccactacgtcatgtcgggctccggcatttaactctccaaatggagcctttgtacttctatgttagactcgaattgtgatcctattttggagagaaaat

SEQ ID NO: 63472 - DNA, 1969 bp, Cannabis sativa
gttgagaataaattgaacccattgttctcttgataagacaattcccagcatagttgctttttagaatttcaagttcatcaaaagcaagtgtgaagtaatactctaactaggagtcatcttcacactttggagttcatttgcaagggcatatactagttgagaatatgggtgaggattgttaaagttcattttgacactacatatatcaataaatagaaataaattacttagttcaaataaatttatacacatatttataaaataacaagtatagaaaatatgtttgcaaaaatatcaaaaataaaacatattcaattattttccaaggtttctaaataactgatgcagtgtcttgttaggcgagagtcaaagatatcattcattgaatagagtagtcatctcatctaaaatggacaccattctagtaacattttattcgatcgaaaagagaatctgacgttgtcccatttaggcgagagtcaaggtcattcctattgcatgagctttttactattgtttcatgcttagtaagccctactcttaacattcgctattggggtgatcgttactaaaaataaaagacttacggtaatacttatctttcgagattctacggtgttagattgctaatgaatgaacatctattagggatgagtctcattaaaataagaactttgtagaaccaacaatagagatcgaatgtccttatatttaaaactcattatttaaaaaataatgtatttttatttaaccatttattttaatctatatattttaataaggataattacttaatttaaataataaattaattttcaactttaattcaattttcaagttaaattcaaaattctttatataaaatattatatataattttgaaattacttaaaataaaataaaataaatacatacaaatatctaatttaagctgttctaaaataaataaattttcaaattaaataattttcagaatttttattaaataataaataaagtatcttgaactaatcattttaatttagaaaatatcacaatttaagctgatctaaaattaactaatttttaacttaaatatatttcaaaaaaaattctacttaattattaatttcaaaaatattctaatttaagttgatccaaaattaatttaaaaattttaaattaatttttcaatttaaatatattttctaaaaaaattcatataattaagtatctagaaaaatctaattagttataacttcttcatttaattaaatatcagaaaaatacatacagtttatcttaaattaatttcattatactttgtgtaattttcttaaattaatttcaaactaatctgataaaaaataaatttcatatattttaaaaattaattatattgctaatcaattttaattaggttaaattaatataattaacctagtacaattatttaaataaagcaaatggactttcacagttggggtcgttcatatgtgagagaggattgggttccgattgtcatactcattactaatgggcccctaactctcacacaaggcctaaaagagagtaatttaatcttaattaaagaattgttattaattaaataagcataatactactaattgagtctaaataaaaattatcaaagtggtattttatttaagcaacctagtccattttaattatcaaattaaatggactccctatatgcatcttggcccaaaagtagatatacaggctcaagtaaacacaatgatttggatggatcctgtcatgttactaagtttatacacagatgaaagaaaattacaaaatttacctgttacaaattatttatttgatctattgccgattggactatgattaaaatcatttgtcaataaattaaccatagcaattttaatcaaacaataatatgttttagaaaacaagtttgaataaacaataaacaaacaaacatataacaacattggatagttggtta

SEQ ID NO: 63473 - DNA, 768 bp, Cannabis sativa
taagtcaccacctcctccttcaccgtcaccaccaccaccatacgtttacaagtcacctccaccaccctcaccgtccccaccaccaccatatgtccataagtcaccaccacctccttcaccgtcacctccaccaccatacgtttacaagtcacctccaccgccttcaccatcaccaccaccaccgtatgtttacaaatccccaccaccaccttctccatcaccgccaccttattacatctacaagtcttcttcacctcctgctccacgttactactacaggtctccaccaccaccaaagggctactaataatcaaatcattaccagatagaatatccaactactccaagttatactacaataagaggatccagaagtactcctcaatacattcaaattacatcaattgatttgttttaattttctttttaaattagttgaattaatgctgctgattcatattaattgacgtctattataaaagacgtaatattatgtaataaattatatataatacttcatcaataaactcaattatacacaagaaattattgtccatctctatctttatatttttttttatgagaaatgctaaaagtaccagtggtgtcaagtacattcctacgtgtcagtatcgctattgatctaattatgtatggggtcccatagagtttaatataataatttttagggaatatcgctagccaatcgcaaggcgacacgtcttaagggtgctaggaactactggtggtgcccaataacaatgctct

SEQ ID NO: 63474 - DNA, 1003 bp, Cannabis sativa
ctctctctctctctctctctcgggaagccttgaaatttagtagaccataaaaaaaaattacttttgagcaattttttagaaaaaaatgtgttattttttaaaattagttaaaaaaatatgtatttttaaaagtaaaattaattagatcctgggttaggtcggccctagacacaagcctagctcgtctatgcccaaggttgtgtatgatgtggtaaactaatattatgggtattactatactaggggtattcatccaatccaatccgcactattttgctcatagtgcatattttggatccaattcaatccgcacaataactcaactccaatccaatttaatcacaaaagtacagatttgatcagttattttagattggttacttttcaatataattatttaatatttatgagaagatatttttttcacataactagcaataaaataaaacaaattattgttattttatgtattcaacaacaaataaaataaaataaaataacaaataacaaattcaaaggaagaaaaaaattgtatgtataaaagatgtttaattttattttaaattgtatgtagaaaaaaaattatatataagaatgaaatatacatttgatctattaagttttaaaataaatgtgtattatatgtattagatttttaaattactattttttatattaaaatttttaattatatatataattttttaatatttttaataaatatgtgtggattggtgtgtgttgcctttaacttcgcccaaaatacgtggaccaatatgacaacgacacgtgggtctgagaagcacgactattagataaatcgactaagtcttgtggcatcaggagtgtcaacgagaatatgctcgccagaggagaggtgaaggctccacacactcttggagaccaggggaacgctaaggtatctccgggaggaacaagaccttatttgaacagtcacctctcatttaatgccgcatgggagaaaatgtattggaactgccat

SEQ ID NO: 63475 - DNA, 1509 bp, Cannabis sativa
actgtagcgtgccttagcattagggcgttacacttcttaaagtggtgtttcggtagatcgaccccctatttattttggcttttactaaagctgattaatccatctttttttcatgatcgtatacattatagttatttaggatcacctgtaagtttttagaaaattccgagtagtttacaattaatgccaaaaataagatttaaatattttgttgcacgtgcggatattattttttacacacattgtaagtaactgtttgaaccttagttttggcattgtaaactattcagaatattttaaaaatttataggtgatcccaaatagctataacatagaaggtctaccaaaacccttttaggaaaggtgcactacagaaatttctaatagaattcatcatatcaaattaacacagaaaaagagaaaagaaaaatattttgaaatatttgtagtacaccctccttaaaatattatttcggtagactccattatctgtttcgatatccagaagaattttttttttcatgatcatgtacattgtagttatttaagaccacctataatttttcataaaattctaaataatttatagtgtcgaaaataaaatctaaacagttatttatcacgcgtataagaaaaaatagtcacacatgcaacaaaattagaaatatttttttaggtattgaaacaaataggtcataaggatgatcaataatagatcgacctaaatcctaagtaatcacgaactcatattcatgttattagtttctatgatttactcgttaaagtttttcaaagaagatgattcttacaacttctattttagaaatctaataatatggatggttgagaacctgttctacaattataaaatcctgactttcctaatagattgaatattggttccctttacatgttaattgaaaagttgtgtacaaatttagattgaatctatattatactttcactattgaattaaagatactaaaggataaataagtaattataagggtaaaacagtaatttgacaaaaactaactacgaaccaacacaaagagggttaatcactacagttgattatatcaatggacactacagtaaaactcggtaaatataattctataattactaagagtccaatttcatatttattgtggagtaattatggaattaataaatatgattatttgattgatgagattcaataaataatcaagtttattggagtttaggtttataggtccatggtccctgaatcgccaccttgaaacactgttaagggaatagataaaagttttatattaatgttaaaaaaattatttttatttgtcaaaatagtaaattatttatgcgatctgaggaggacgctgctgagtgagtgtcatgacacgatgtgggcaggttatcaagggtggcataggacacatgcccttttaaagcatgggtactattggccacagatgtggaaggatgtggtgggctacacaaggacctgtctcgtctaccagtaag

SEQ ID NO: 63476 - DNA, 793 bp, Cannabis sativa
ttgtattctgatttcttctatcactgattaaatttttcgtaatgaccgtgaggtctaactatttctaatattttatccatgaatgttttacttaaaaagaatactaagaaaaataatatagacaacactatatacagtggtggacttagggcataattttagggtgagcgttaactaaaatttatactaaaatataaaataatatatttttaaatatatatatttattaaatttttttacttaaaatttagataaagttattatgtagattagaacaaattttgacatctaaataataatatgatattttataattcttattttatttttttatttggaaacttctgttaattgttgattaaatgtaattcaaaataatttattaatataataagttttttttccaacaaaaaaaaaattatttgtaatttgaatgttctatgttaatactttgtaattttttttaaaggagtagatttatatatatgaataaaaaataaaagatagagttgagagaatcagattcaaaaccaagtctaccaagtaatgaacaaacacttacatcaattatgttgtctaataattatgtattatttttttcataaaaaaacaattatgtattatttctatctttaattttatataatttgttatgaaatttgagggtgggcttaagccttctctaggctctatgtatgtccgcctatgactatatatatttatttttaaaaatgttaaaagataaagtgatgtttcgtattttccatattgttatattgttattggtgcaatt

SEQ ID NO: 63477 - DNA, 5170 bp, Cannabis sativa
gatgatgaaactactagtttgccagaggatttagacaatgatgcaaaaggtaaaacctaaggattttaataagaaaaatacaaagacacaactctattatggtcaataccacgttaacctttcttattgaaatgtagtctatgaattaggaagaaaagaggtttcgtgttattattttattggcggtggggtgggtgtgatatgttgtatattagacaagtaattgaatgaagtacataagacatttaaacttcaatttcagggctaaaaaaatagcgcgagtactttaataattgaactctattgtaaatggtccaggcatttttgcttgtatgagttgtagaagcaatccatcatcaaaatgtttccatggtttggttagtgggtaatttttatttttttacttatgttttaattctttggttacactactggggggctttgagacttcagaaagccaactaattttgtaccatctgtttaaagtataattgctgacaagaactacaaaatggaacttcattagtagtctagtagttgcaagttctaagttgagataaggaatacctaactatgaattttattttgtttctcatgtttaaattatctgcggtagaatgactttatagacagaattgtttatatctattatgtttgtgagttttaagttagttttaaatgtgcgattcctgtctagtaattttgtttgctgctttcatactttactgtttctagaaatcgacgactctctgaaaggtgacaaacaaactgaagatgagatggagacctctggttcagatgaggaacatgactcgggaattgatgatgaatctgctgttgaggcaacaaggagtgacaggtatttttacgtcacattttatttaggttttctcttatggtgtcattaaaaatctgttgaattattttattcattcatatctgtgaattttatgccccgcagttcatttagtagacacgtgggacacattttgtcaaaagtagaggttgataacctgtcaacaatgaaatggaaatataaatgggaggttcctgctgttgggatgtcaaattgtcggtgggtaggaacaggagagtgtttcctaaaggtacaactatcttttttattcatctatgtaaattttctgatgtccgtggatttcttcttttttgcaaaatattttgcattctgcaactttgacagttgcccagaagtactcacctctgtctccaggcaacacctttccaatttcttgttacttgcacatatctttctcgtgcctttttagtaatagaaattattttataatgttgcaaaatactcgcttattttactctatagtattcttgtagatgaaagattctttgtggttattattattattattatatttttgtaatttgttttaatacaaaactactataacaataagaaaagcaaaatacagccaaagaaagagtttgagaacacgactcgcaaaacaaccccagaaccccgtgataaaaggtgaacaaacaataaaagacaggaagaccacacagataaaaatattgacccaaagcaacttagaaatagtaaagcctcttactttctttaggatggaagataaggcctaacttttcactttagtgtttgtttttgggggacgattattggtcctctcgtttggattattacttgtttttgcatcattttgattcaaagataaggaaaggaaatagagaattggggaaagagtcaagctgtgggttgctatatggttaaagagttaggtttcttctatttttgtcttctaatttgtaagaggacagggaatgtttgatataagtttttctgtttatgactgatgggtttttacgtttttggtttatgggcttgttttattaggcattgtcttgtgtgattccaattattgcttagggtgtccttatgtactaagttcacaaacaaaagctggtttgttacaaaataaatctactttgttttgtttgaaacagtatattcatatttttttttcttttcttaatgcttttatttattgttttgtgtgtgtgtgagaggaaatttttgctgaaatatgtatatatatatatgtatttttttatcattttcttttcaggatcttgataccaatgtgcatgttgattatgatatgaagcttaaactatataaacactggctagatatatacaagacctctgggaaaaatgattttcattcttccaaacaaagattgttcttcactctatgtaagtgaagtgagcctcattagttcttttattttcctttatatcaagcataaccaactctgataataaattttccatggtttatatatatttttttgtgtaattttttccattgcactaatatattcacatgattatgttggcatagcttgctcccacttatgctttttctcgtgttttcctctctttctaatgtctttccttcgctctaggcaacagttatcgggatatattgcattgcaataaaaagcccttttacctcaaaggcttggaagatgactcgagcatcatggatggatacataatgcataccgtgagtgtgaaacttgttccttttcattgaaatggactggcgtttagagtattgtatggggctcaagtggggtggtggggcggggcggggtggttttggtgtttgcaatagcatttaatcctttagaatgattgacgaagattttttatgcagttaaatcacgtcttcaaaactagagatattgtgacaaagaatgattctaaagcggccaagcaccaagagaaatccaaggataatttacttaatgatgatagtttccttgatcagggatttactcgtcccaaggtagtatttattgtattattgcattttcttgttagactatggattgggtggggacaacacaacatgacaatgacacaatttattgcaatttttggtattcaaaacagcccaaaaaatacttctaccaaaattatggtgattttataatgctctttaagcttagtgactaaacattttttttatcatgatttctaggttctgattctgttgccgctggcaagcaatgcgcttcgagttgttaagaggcttatccaactgaccccttcatctcacaaggtaattggctttcattgaattgtgaagaaatgaatgtacttatgattttatctttaataatttaatatgtagtctggtgtttcagcttgctttcttttttgcttatagaaggatagctgtgatttttaatctattttatttctcaattttatgagaaatctttattttgtatttagaatagatgttcgcattggcttgctatagtagtagactaagtctgcaatacaagtgttaaacctcaaaacctgaatatttatagttttctttgagcttctacattatgattttttcagaaccatagttatttgtcactaatgattttaggttgctatttggtctttcacattaaatgttctagatttttgctttcagattggtgtacagagttgttatttctaagataatttcttgctgttaaaaagtgtaccaaaagaaaaagcatcaaatgttatgtgtctgttttgtcaggctactgtggagcacatggaccgattctataaggagtttgataatgaagatgtggaagacagtgaggatgaaaacaaagaatctggaagtggccaggattttggaaatttaaattctcaaaagtcttcaaaaccttccgactttgaatcactttttggtgggattaacaatgatcattttgtatttggtataaagttcactaggtaatctcttttacatttagtgagctcgaatagcttctaggtggttttctcattttccactagtaaaaaggaaatgcatcctaagagggatagcttaaatggtcaggcatgtttactctcacaaggtccggagttcgagtctctctggggtgcctatatagcaattgctatagttttctagctcccaaatattgtagggttagtggggatcttagctttaagaaactagtaaaaaggagccatatagtttttattctgatgatcatgtgagcaagtggagaggcttagtgttttttttaacaaattaccaatcaagttttagttgtggcaagtagcttcacatccttgaaatcatggagttgggtatgaaatatgaacaaaagtttaactatatgaactttatgttttctggcatctgcatggtgctttggatttctctcttttctctctgcttgtgttctgtgtgaaatttctgttgatatggtggcaatgcagagtaaaatgagtgtatagataggttttctaactcatttcgtgctgtattttttcgttcttgtttgtcaggcggagcataaaactgtacagtgatttttattcctcggatattatagttgcttctgctcttggtttgcttacagtaagtgattttactttttctgttgtttaaagtttttttaagcttcttactatcaatcatttgaaccatataatgtatggggacatgcacacactctagctataaaaatgaaggcatgtaagccacaaaagttgaaaaacaggggaaaagaagaagcaaaagctaatacatattttataagcaaaacatatccctacattataattttataagcaaaaccatgagacttaaataccccaggggaagttgcattataaataagtttgttatgaatacagctgttttatatttcttctacatcttttaatttgatagtaaaagatagatttgtcattgcgcttggtcttggtaaacaaacttgttgaaatgagttaatgtacgaaagctatccatagatcataatgagctctggcatctgagagacattaattttagacttattttaatccactgtaaccaatatggaagtattaatgaacactgttcttgccagaaaatggggcaggcagaaaaagacaaggacaaagatgttgactatctttcttctatagaggtattttgttaatcatgttgattttactgtgttttcttggtttgtctgttcttgttttatgcttttgtagtttcctttctttaatgatagggtgtttttctgatgagcaggttctcattattgattatgcggaggtcatcactatgcaggtaaatgaacagttaatttagtttccataattatatgta

SEQ ID NO: 63478 - DNA, 730 bp, Cannabis sativa
  modified_base (342)..(349): a, c, t, g, unknown or other
atttatatatattaatatatataaataactatcaatataaactatactataacttgattgccacttcaattgaaacagttttaatttataacaggttttatatggtttgagttgttgagtaatgatatgtagaacacctatgtgttattaattttcttttatgtgaatgtgttaaggtatttttgttttgataagtgatattctgaagaaaaaaaaatgagtaataaaattacttgtcagtgtcacgtaaatgtattaaatttgtaattaatatatatgtaccacgtattattactttttggattaataacttgctatttttttttatcattattattattnnnnnnnntattattattattattattttgcactaaattttttgctaaattgttgaaactaaacttcatacaaaaacataagaaattgttggaattttatcaaataacaatcctacgttcttttttcttatctaatttcatatagatcattgtgtgtttaataaaaaaatgtgtaatgttttcttaaaggtattaaatatatacaattttaaaatataaagtactaaataagcgtattgttgaaaatataaaataataaatgagtataggaaaaaaaaaatgagggtgtataatttttagatagataatgatcaaccatcatgaagtatatataggttcggtcttcttatgtttgtatacagttaaattacatatatgcactaatgtaa

SEQ ID NO: 63479 - DNA, 957 bp, Cannabis sativa
  modified_base (318)..(324): a, c, t, g, unknown or other
aatatatatatcatttcacttatcaaaaattcataaataatattatatatatattcaaataatctatatatttttgtagaaatctaaaaaggcttaccacgaaatattttaacatataattttgaaaattatcatttacttattatcactccaatagtgactgctaagagtagggcttacaaagtatgaaccaatggtagaagctcatgaaatagaatgaccttgactctcgcctaaatgggacaacgtcagattctcatttcgatcgaaaaaaaggttgctaaagtggtgtctattttagatgagttgacaactctnnnnnnngaatgatatctttgactcttgccttaactgaacactgatatcaatttgttggaaaccttaaaaattatttaagatatgattattttgtatttttacatgtctttattacttgttaaatgcttgctaatttctgaattctgtatgaatttataatgaacctaattgttttatgttattagtcatgtagtataaattttgagtcttcattgtttgtctaacttagtttgttatttttaataggacaatccccaaaagattgtcatccgttagacaaacataatagtgttagatctcgacagataagtatttgtaaatgtaacatctagttgaatcatccctaaagatgataacttaaaatagtgtttacaatatgaaacaatgaagaagtttataaaataagaatgactttgactctcgcctaaacgagacattgttggattcttgttttaatcaaaattatcctttaattttcctctttgctttttcaagaaattgcttagatagtataacattggacaaaaggtttatatatcatctgcttatgatgtcactttattttcttctataaaaatgagtggcgtagatgattacattctagatattctatcccgaaatgatataaatcttcgatct

SEQ ID NO: 63480 - DNA, 1377 bp, Cannabis sativa
ggactccaccaatcaccagctccatagacggctcattgtccgccccagacaactaatcgctcacctcaggaagtgagcatcaaggtagtactggagcatgtcctggcccttcttggccttctagttcagcaccacgacagttgaggaggccttggttggaccggacgtctaagctcccccctttggaactcttgggcttatatactttctggatgggaggctccacggcaggcaccacctcaaaaaggtcgatcacttctccgactagcaccttctccttagacgaagcctcatcacctcacgatcatttgggtaggggagtctggcccgaactatcacttgtcctcttcttaagagcttggagcactttctgagacatgactgcatataaacatacaagaaagttagaggaaaaaaataatataaagcatgtcatggaacaaataaatacaagctaaaaataccctgcacgttggcagaagcattctctcgaacaagtaaagacggtgcctcgtcgtcagaagagtcttcctggtactactttgtcaggacggcctttcctttgccctccactggggcagaggccggacaggctatcaggttccctaatcgtgatagcacgctcaactggtgcctagtcactcggaggggccttcttccccttttttctcagtttttcttgctcagttccctcgtcctggtctagcttttccttctttgccttcttcacgggccttggcagaaaatattctagtaaaagtttgtacttgacataattggcctaagtggctaggagagtaatgttccgagcatcatctggcagttggagaatcctttgtgccctcttcttgagccccaatgtgaagggagggcggcagtacaactgtatctgctggaactgagtgtggacggtgtccatcccctagacgaagtagtactcatccacaaagttccctatcttgctcactttgaagtccacgttgcccgtcaaccacttctcctaaatctgagaaaagtagaaataccccgacctactctgcttgggagttgatttcaattcaaagagccagttggtgtcatgcggggatagctcaccccatccttgtaaggcataaaggatgaacagggcacataagtacttgatgcccttcagagtaaactgggtcgggcaaagatggtagtaatccgcaattctctggaagtacggaagcaagggcagcatagcaccctgcttagtgtgagtgcccgaacaagcgcagtacccctctcttggattggtcgccagttgggttggagagggaaggaagaatttgacatcccctaggtaaccgtgcttctgcaaattcttcattcttccctagttactgttgggtttta

SEQ ID NO: 63481 - DNA, 1392 bp, Cannabis sativa
  modified_base (1084)..(1088): a, c, t, g, unknown or other
tgtttgtgataattaaatagtgttgatgaataatcatatatatatttatatataaatataaatatatataaagaaaaatcctacaaaaaactaaatttataaagtagtacccaccacccagcagtactacatggggaaaatattgaggaaagatttcattgtacaaaagacgtacaattctagatttaccaaaagttaagataaaacatgtggagttgagatttttataacggctgatattgatatatatatatgacatgtgtatgacttttttttcttttttttttttaatattttaatttcattaaatgttacaatctctatataatttctagtcaaatgtaactcaatagaagtcttgtggaacctttaaatgagattgtagatgagattgtaagaaatttagctttcatatattggaattaatttttgtaattctagcttcaagatcacacttaaacaaacaaaagttatatcagaacaaacaaatcaagaacaaaaaccagcaaacacaaaaccagaaaaatataatacagatgaatctaaatgactgtcagacacaataacacagagatttatactggttccgatcctaagttcaatgtgaacttggtcatactccagtttgaaagcattgccaccaatctttattgatgatgagaagaagagatatcaatctcaggagctacaagaaaataatcacagcaagtcatgtatggtgtaatccctcaacacacattaactcactaacccgagccaacataatcaacaatgttgctcaatacaatttcccaatcccaaccctctctctctctctcaaatatctctccatttctcactctaacttctctctctttctgctgtattgtatctcactctctcttgtgtttgacttcaccttttttcttttgtttttttcacttatgaaatgagaggagtagttctctttatataggccaagggacccaatatgcaagttgtcctttttgatagttaagttagttaaagactaactaaccgaatcttggttgggggttcaaggaataataccacaaatttcaccttatttcttcaagccccaacnnnnnaagcatatctgtccaatggaggtggtactttcatgtgtagctacttagcaactaaggttgagtaagtccaagcaatgcttgaacttactaacaggtaacatcttagtgccaatatcagtagcgttctcttctgacttcactttctccaactcgattacttcttcttcgatctcctcccttattcaaaacaaccaaatatcaatgtgttttgtcttctcgtgataaactggattcctgcacaaattcgaggattggctgtcagaatatacccttgcctttccaactagaagtttcaactgttggg

SEQ ID NO: 63482 - DNA, 762 bp, Cannabis sativa
taaaataattccaacactttcctccttgtagcattaagcctggaagcttcaactcaccgactacgcttgcttttcctttctaggcctattccttgaactgtcagggtttggtggcacaaatggtggaaggcactgcaccagagatggtcctttcgatatttgaatacttctatcgatggggttagccaccaatgtcattatcgagtaacatagtgctctgggccttttttgagaatttgtgtagttgtccacattttggttactctccctctggccctctctagcaactagaggttggtattttcttactgtgatggtcaactagttttcacctgagtgaacccattttctcgaagacaatgggaatttcttggcatcttgaagattatagtgaatggtttaggaactaacatagctagagcttgtcgttcccacatatagcttaaaattattgatggtaagaacttgtcaacaaaataacaagaacttaagttgatgtttcaagatcttaatagaagaatactcaaatattactctcttcactatttagaaaaactatagttttattaatactttttctaccaaagagtccccattacaatgattttaagagatttatttatagtgagcccttcacactttacaaccttaccagaccccaaaatcacaggatgtaaagtcactttcatacctaataatatagtatctcaggtagtctgatgtatcacacattctaagtttaactaaaattgcctattttac

SEQ ID NO: 63483 - DNA, 2433 bp, Cannabis sativa
aatcatatctctatatatatatatatatatatataaaatagcagcatatttcagaaagtgtcatttttgatcaaagaaattatcaaaagcacattttcatctttatttattttattaataacaaacattacataaatactattagagacttttctggtaccattcttaatagataattatgatttttgttctctaaattttaatatatgtcttaaagtatattttttgaattttttaaggtgataaaatttttgatcgaattattaaaattgttaaatttaaagatttctgtttaattttactaacaaaaatttaaagtggatataaacgatttaattcatattaaaatttaggagactagaacagtggcggagccatccgcttatcttaagggggcaacaaattttttcttctttgaaataggatatgaacaaatatttttaatttttttggtaaaagtttataaattttatagatataaaaataattatatatgagggaaaaaaatacatatatatttattatgaggataaacatgaacaacatgtaacaataaaaatataaagtataaatttataggggcaaagatataaaaagagataatttttagggggcaaaattaaaattatttaaaaatttctatacaaaaatgcaatttagtaaaaattaagtggggtcggggtcatatgtcctcactgggcataatttagtacatggacaatcattgcatttgtaaaattaaatagaatcggagagaagtctttaaattcaacaatctcaatagtttgatgaaagtttttaaggacttaaaaatttctgaagatataatttgatatatgtaaaaattatgggaacaaaaatactaattaaccattattaaaaaatgtttatggtgcatcctctttcgattaggctcataaaaataaaattgtaattttaacttattcatacgatagttttattatagttatttaggactatttgtaaatttcaaaaaatttagagcaacgtagagtgtcaaactcagagtttaaataatttattgcacatataattttttttttgaatattggcagtttaactacaggaactatacatgttgtaacacttaaccccacaaactaattttttgatagtaaaaccctctagctaccgaaatttttagaaactaaatattttaaatagataagcttaagaaagatatacattaaaggagaaggaaaccagatttttatgtggtttgagtgttaatcaactctagtctacgagtcaatgttattaagctaaaaatccaaagtatttcttacaagtgtatattagttgaagaatcctaattcttagttcttcttcccaaaaatcaatctctcactcccctcacatgaagaagtaatgttctatttataggaaagaactgggtatgggcatactcggaccaagtaggattttaaggtatcaaatagatcatcttatggggtaaaatacaatgtttattgactttgggccaattgaatgaggcccgattcatgaggtgaagattgtctgtacaagcagggaccattcaaaggtgttcgatgtcatgcgatgttgtttttgtactaagaatgttagagattatgacgttggacaaaaatgtgacctctttttagtagtgtacacactccgccaccctgatgtagaggacaaaatctgacacggtagggccctgcgtttgaaggattttgagttagtttgagatctggtctaacgccctattacttaagcatgctacaataattttcttttattgtgcacgccattactagtcgaagagtttttcaaaaaatcgtgtcaaatttaaatttttaactaaatttgaaacttttataaatacataatcgtgcataaaagctggaatcccgactaaactgtgtacaattttattcaaaatacattttataaacatgtcactacgggactaccaaaataaaggcccaaatcggtctccgagatcgaactctctaggtctaaccatcataatagggacaaccattctcaagcttcggacttgctggtgctcagcctctgcctttccttaacatacacatgcaaacatatttgtgagtcaataaactcagtaagaaaagcacaaaacatataacatcatatcatcttgtatctagatatctatacacctatttataaggctttagatgcatcaagaacgttcttaacagaagtacgacccatgtactacatgcactaagtacttgtctcgtactactgttggtagaattgaactacaccttgagtaccactaaatgttgtaccacatgcactacatactcgtcccatactagtattggtaatactgtatcgtacactatgaatattatatactgtactaatacactttgtaccgcaactgtactagtgttagtagtatccaaatcacat

SEQ ID NO: 63484 - DNA, 2714 bp, Cannabis sativa
cttccacttgccctaaaagcaaatcaatctcccttaatcccatattagttatatgacctataaaagattttgctggtagtgtctttgtgaatagatctaccaggttatgttttgaggcaatcgccaagactgtcacatttcttagtagatgatacttcctctcaatgtgcttgctttttttatggcttcttggttccttggacttggccaccgctctattgttgtcatagtagaccaccagtagtttttctacctctggaactacttccaaatcaatgtagaatttcttcaaccaaactgcttccttagcttcttcacaagctgttacatatcggcttttatggttgaatctgtaatactggttttcttaatgcttctccagactacagctcctccaccaagagtgaatactggcccaaatgtcgacttttgactatttttttcttattgaaaattagaattagtatgtccagtaggattcaactctccactggaatatacaagtatgagatctctcgttctctgaagatacttgagaatgtgttttacagctatcatcaagttttccaaacctgaatttagattggtaacgactaacaatccttacaacatagcatatgtcaagccttgtacacaacattgcatacatcaagctcccaactgctgatgcataaggatagtttcccatgttctccatctcctgaggagtctttggacattgatccttacatagagtaattccatgtctagacggtaactgtcctttcatggaattcttcattgagaatattttgagcaccttattaatataagttgcttatgaaagcgctaatgttcttcgctttctatctctataaattttgatgacgagaatataactaggaataccactacattacatttaatgtatttgtatgcatagacttcatcttcgtgttgttcgaagccatactttttaatagtcttattaaaggtgatattccaagatctaaaggcttgtttcaatccataaatggatttaagccacctacacaccttttgaccttcccttagtagcacatacatttctggttgttccatataaataacttcatcaagatcatcatttagaaaagcagtctcaacgtccattttcatatctcgtagtcataagtggcagctatggaaagaagaatctgaatggatttaagcatttccataggagagaaggcttcatcatagtcgacgccttcttgctgtgtgtagcctttggctacaagtctagctttaaaggtctctaccttcccttcaacatttctcttcttcttgaaaatccacttacatcttatgggtgtaatgacctcaggtggagtttcctgtttccaaactttattggtgcgcatggaatctatttcttgatccatggcattgttctatttgtctgaataagggtcttccatagcttgctagtaagttaatggatcatccttgtctatgccaaagataagaaaatgtgctttatgttcagagcggacaagttgtctcacaatcctcccactacgacgatgtactagggtctcctttttctagaattgtggtaactgcttccagtcgttcaactaaaggtgctaaaattgatggtttaaaaatctacttatttctaatttccttaataaccacttgactgcgtggtttgtgatttgataatagtcatgttcaagaaaagtagcatttgttgatacaaatactttattgtcttgatgactataaaaattagaacctcgagtatcctctgaatatcctacaaacatacacacttcagttttggaagcaagtttctaagtcttgggtttaagaacatgagcaggacaaccccaaatataaaaatatttcaaactggattttgtccccttccataattccattggagtgttgcttatgctcttcgagggtactacatttaaaatgtaggtagccgaaatggcagtgctgagtatcacatcattgattcgaccatgtctaacaagatttgatttcttgtctttttaatatcgttttgctgaggtgtttcaggtggtgtaagttgggataagatctcttcttccagcaagtagtctttgaattcaaaatctaaatagtcaccaccacaatctgatcgaagtatctttaatgatttagcgaattgcttttcagtcatagctttgaagtctttaaactttctaaaagtttaagacttcttggccattaggtaagtatgactgcatcttgagtaatcgttaataaaagtaataaagtattcataaccacctcgacttgaatattgataggtccgcacacattagtgtgaataagctcaagttgttctttggctctattgtcttttgtagaaaaagatcttttagccatctttccttctagacaagatttgcatactgaaagagttcccacttttagttctctcaaaggaccatcctttgttaaatagttaattctatttatgacaatatggcctaaaagtagataccatagatacatttcatcatcatttgaaaccttttgcctcttattttttttgaggcaatgctactctatataattcattatttaaaattaattgctcacttgaattaagcacataaaggttgttactctgttttgcagaacaaatagttgtaccattcttagaaataataatcccattatgaataaaaccaatgttaaataattgtccatgc

SEQ ID NO: 63485 - DNA, 1395 bp, Cannabis sativa
tagcatatatttaatcaatctcttattttagtccttgtattattttacaatagagttgtaataaatcttgattttcttccattgttataaaatctctaacaatagaattatcccaaaattaaacagagtaggaacaaataccatacaaatgggattcacattaaataaacagattttttttttatagaacaaaaattatgaaaatttctttagccttgaccattattatgtttcaaatagaaaaagattgagaacaaagtctatgaaccatccaaattagaaaaaaatctcgtagagaattgtatgagacagttcctaatataaggattgtacacacatagttgaagtgtaaaggactactatgagtattactactaagaagatactagaacatctagtaacgattcaaattaaaactactaaacactataaactaattatgacaaacaaacctaactcttacaaaaataaaaaaaaaacaaaagaaaagagaaatagataatagccaaatcatatccctgtggaatggctatgtagaacaaatttataccaacaaacaaagagagagaatcatttgagaaaactcaaacaactagacaaaatttccatcgtctctctgtgtgtaattaatcataaggaaacaagcacaaaacactaattcaaatatgttgcctctataccaagcacaaaaagggcatatagttatagcatattacgtgttgatacatgcatataatctacaagcttctgatcacctattgttaaaagtataactcattcgatcatatcacatacgactatatctcatagaaccatactaattcagcacataagttatatttttattttgattttagctagtaaattcgtaactataaagtataatgactatatgaactaaatcaaaatcaaagacgatttttactcttatgatcataaatggcatcatcttatataacatgatcaaaaaatacactgtcataaaaattcatgtgatcaatgtccgtgttacatagaacttaactgtaacccttaaaagaagtccataaatcctaaactaaaaaaaactctaacaccatgcataaaataattaccaactaataaaatttcaatctaagaaaacaaaaacaaaacccaaaagtaaaactttgaaacagaaaaccagattaagcaataagaaaaatcttaactgataacagaattttaataaatataaataaataccagcatgaaaattgactagtaccaagaactgaaacgagaagaataatgagattactcaccaacgaatgaaaaatcaaaagggcaaacaacccaagtattctggaaaagccctgtgaggggagcggtcgacgatggagaatcaacaacggagaggaagagaggggagcagag

SEQ ID NO: 63486 - DNA, 1771 bp, Cannabis sativa
tttatcttctttttactttactggtttctatggcgcgcctaactcaattaataagtccttttcttggcaagtccttcacagaattggttcaaatattcctcaggccccctggctcataatgggtgactttaatgactttcttaatttggaagacaaaattgggggtgatacttctcgaaacccgtccactcattttagaaactttctggatacttatactctccatgctctccctgtcaaaagtaattttttcacctggacaaacaagcaacaccccaatactcacactcaggaacgcctcgattgggccattaccaattctgaatgggaatctctctttccaaataacaacctccttcatggtgactttttcggatctgaccatcgacccctcattttaaatttacaccaccaagtccaagcaccatcctctaagacgcgatttatctttgacagactttggttagatgaggatggctttcatgactgtctccgcaaatcttggacaatgacactccctcagtctgaatgtgacccaattctcaatatcaaaaaaagactggatcaatgctctactcaccttcgccagtggaaaacgacacttggtccgcccttgaaatccaaaataagggacactcagttacgcctcaaatctgtgcaaaattgcccccatccgactgaggcacagcttttgcttgcgaggaaactggagaatgaacttgatcaactcttatacaaagaagaagagtattggaaacaacgatcccgagtgaattggctaaaacttggtgacaagaataccaagtattttcaccaatttgcttcctcaagaagagcaacaaataaaattcattccctgctccatcctgatggttctttagctatggataatgactcttttatcttcattattgaacaatacttctcccagctctttaccagtcagaatcctagtgttgaactcattgatcgcatcttaacaggcatcactgagcatatatcagattcggaaactgaatcccttaatagtacttatacggatgaggaaattcaaagggctgttttccaattggctagtgataaagctccgggttcagatggtttcactggcactttctttcaaaaaaactggcacgttattggtcaggatgtcctccaggcggctaaaggttttcttaatgggaacgcaaacattggagctataaataacacagtcattgtgctcatcccgaaacgttcccaccctcaacaaatcactgattacagacccattagcctatgctcgaccctttataaagtcatttctagggtgttagtgaaccgtctcaaacctattcttagtcgtatcatctcccctacccaaagtgcttttcttcctggtagactcatttcagataatattatcattgcacaagaggttacccatgccttagctcatcggaaaacgggtcgaactggatggatgggactcaagctggacatggcaaaagcctttgatagagttgaatggggattccttcaaaaagtcatggaaaaatttaaatttccccatcgctttatcaacctcgtgatgtcatgcatttctacggttagcttctcattttccattaaccagcaaattttgggatcagttacgccttcccggggtatccgtcagggggacccactctccccttacctctttctactttgctctgaaggtttatctgccctcattgcccaatacactttgacctctcggacccataaccaaggacttggcctaaaaatt

SEQ ID NO: 63487 - DNA, 1194 bp, Cannabis sativa
acttgagtttagggagttttaccgcaaaaattttaaaattggaggttagttgcaaaaatctccctactttagggggttttgccgcaaataacccttatatgataatagttatcaatttggtagcaaattattcactgagttctgtaaaataaataaaataattaagagcttttcgtcaatatcgaaccaaaacttcataaaatttcaattgtttggaaaacaaaactggccctatttgactgccatattcatgtccttcatagattttccaacaaaaagttcatcactctcaagtaaaagaaaatatattattaagttttaaaagatagaatataatggatggccaagaagtacaatagattagacaaaaaaaatcatcgaaatcaaaattagaaagtccaacaaatttccttgacagaaaagtatttagtcggttcaacatcacccactttgtcagaataagataaattcaattcttcccaattttgtgatgcacgaggtaattaaaggtgcaaatgtcaatatcaaaaacaacatcaatactacaaattattattattataattattactttaagttaaaagtattatttattttcataaaaaaaatatgcaagttaaagaatattgcttacaacaatatataccaatggtttaaatactagacataaacaacatcaaaaccacacacaatatgagtcgtttggttgatggtaatgggctagaccgaaataaaatggaatactaataggcatgatttttttatttggttagaaataacaattttagaaaagaatttcattgtaatgcttatttcccaaactaacataattgtttttctattttttatttggtggaattataattccgtttcactactcattaattcatagcctaattacccttcttttttgtttgacagatcaacaattttttttttcttttactctagtcatgggccaagcccaacaaaccctaactttagaaaactgaagattaacctcgcatcgatcataccattttgacggtctttttctcaaactcacaccgcaagtgccaggtaaatttctctatttgctattcttagtgttaaattagatctcactgtaacatttattattacagttttacaagatgaagtgaaaatacaaataaaatacaacagaatacaaaatcagatcctatgtggctttgc

SEQ ID NO: 63488 - DNA, 741 bp, Cannabis sativa
ttgttaaataatgtttcacttttagtatccaatttccttggggcatagatctctcacatttatagatctgctaataatgcagctcacctgttagccaaatttgctctttcggtggattctaattgtacatggtgggaagaattacctcccccaattatgcctcttgtattctaactttattatcaatatattggcattttatcgaaaaaaaaatacacatgattttaaaaattttgcctattaattggtaatttttttaataatatgtcttattttaattattcgtcaaagccatgcttcgctcttcctgagtgtatattgttcattttttatgtgaagcaattcaagaggacaaaaaaaaggtatagatagattgtgttataagtacaaacatgaactccaactaaagcacaattcacaaaccaatttatcataggaaaaaaaaaggtttgtcttgataaaaagaaaaaaagcttgtagtgcagatacagagttttatttttatttttactgttttggaggacggaagcagatgcagaggtggtcttgcaagagtcaaaaagggtaggaataaaaagcagaatactatgaagaaaaacagagagagaatggaaacttattaaagtacaatctctttatgaataagtgatgataacataatttagaaggtaggatatactaattattatctctgtttttggttacagcaatgtcctttggaatgtacacatttctatcttc

SEQ ID NO: 63489 - DNA, 505 bp, Cannabis sativa
acttgtaaattgtaaaacaaaaaatagaaaacattaattaatttcttacaaaaaatgtatttaaaatataaacttgtaaataaatattatttaccgaatagtctaagtaatcctatgaatttggcacagtaatgaaatttttgatatactttttttttgacaataaatttttgatatactttataacataatattcacgttgtaattcataaggttgttgacgatatttgttagcaatggattttgctcatcctattttcgtccatttctttccaaattgtatcctaagaaagctagtagttccataaaactttgatcactcaacctatttttagctttcataatgtataaaatagcatgtaccgataatttagtaaatctattacaattacgataaatagactttttagccttcgctaaaatagtttgaagtttcactaaatcaacattggattcaaattgtgcatcgtcaattatttaggtaatgtgatattcttcataatct

SEQ ID NO: 63490 - DNA, 1046 bp, Cannabis sativa
attatcttatatattatgggaaaatattacttttattttacaaaatttattaattagacttttattttgttaaatgaaaatagattttgtattttttaaaattatataaatagaattttgaattgattttttttatcaaaatagaatttttttttttttggtaagttatcaaaatagaaattaataataatatgatctagagattttatgacaaaagtgattatatttactgtatctattcatgttaaaaattatcttaaagttaattatattaaaaaataaaattattgaaaattgaactcaaagtcttttttttaattattttaaaaaaatatagagtattttatcatttaacaaaataaaaagtaacttttattaaacacaagttataaaatagtatttacccatataaatataaatgatgtaaaagaaaaagaaaaacaataataaaaaatatatttagttaagaggtaaaccttatctaaatggagatgtaatatttatttatgagctaaaattttaagatattataactcatttattggaagggtcattttaagagtattgaggtataatttagttttgtagctattatactttatatttattgagattactcttagagcagtcacaataactaatgaaaaatagctagaaaggttaaaaatagctaaaagtttttaaaaaaatgtcaaaaatgtgcatctaataaatgagctaaaataacttaaaaatttaccttatgaatagtgcttagctaaatgtaactaaaaattattttggttttagtacttagttataatttttttattattataatgtatttttttaattataagtgtaaaaataaataaatattatataatatacaatactttattatttgtgtgtattataaatatagtatttaaataatttagaaaaaattatatagaagttctataatataaatgtgtgaagtaaaataaataaaaaaattaaataatagagtaaaaaaactgttaggaacaaaaagataaaaactttaataaaatagcatttttttt

SEQ ID NO: 63491 - DNA, 727 bp, Cannabis sativa
tcttaaaatatttataaccactttttaaattatataattaactaattaaattaattaacccaaaaacaccaactccatagtgacagcacattagcttagccgcctacccttgtctttaggactaggtcaatgtcttttgtcctgacaacttttatctgacaaatcatgtctcaaaaaattttgtcttaataattttttatttttcctatttaattaatttaaaaaattatttatttatcataaaaataaaaaattactattttgccaattcaaaataaattttttcgaacatctttatataacttattatctctacctttgatagtgtttcaaggtggtaatatgaggaccataaacctataattctaagctccaataaattagattatttattaagtctcctcaactaaataattcttgtttattaattccatgattactctactataaatatggaattgaactcttaataactgtagaattatatttagtgagttgaactacaatatgtattgatataaccaattccaatgattagccctctatgtgttggttcaaattaatacaacccaaatattaatgattattgtacactcatcaatttatcaccattagatttattatctatagttgtaaaaatattcttactataagaacaaaactaatgtaactagtacctaccataaacatatcttttaatttttatagatatgggtgatgttatttt

SEQ ID NO: 63492 - DNA, 974 bp, Cannabis sativa
tagggtagtaataaaataaaataaagtattctatttttttgataaatatcatactctcatatgatatagggtagtaataaaataaaataatattcgataagaaaaaggttatataggataagttatggtgaattggaaaaataatttaattttttatcgacaacaacatatgttctggacttaattacttaaaaatttcagcattttaattatatccatttaatttaaacgtttataatatgacaattaaaaaaaatgctatgactttttccaaaaataaacactactttttctaataaaaatatctcagaactgtaaatctcataaaaaaagataaataaataaaagttattgttgtatattttatcattcatttgttttttttttttttaaaaaaaaactaaaactaattataaaacatttaaaattttacagtgatagatatctaatagatatttcttatcttatttaatagataaaaatctatataaaaacataaatcattctttcagcaaaaaaaactttagatcgacctgctaaataaaactatattttctttgatattaataattttcacgatgaagcaatattcatcatcaattattgtgttgagtttgtggttgagcatattgatgaggtgtagtgaaggaataattatggatgaatggtataaacaacatatttgcgtgtatcaatcagatgatattcgaccatgctttgatgagttgtataacttcaaacattgaaatcattcaatatcgtgttcttactgtaccaaattgctagatacttctaattgtttcgccctccgcctttgtcacgatctcataccttattattcaaactcttttgattactttcgtgttcgacaacattgcctcgttgcaaaatatagtaacatttcatcacctttattgtcattatcaacatcagcctatgacgacttcttatgtattgtgtagaggttaatgctt

SEQ ID NO: 63493 - DNA, 2340 bp, Cannabis sativa
gtacatgtacaagtcaataatttctcatagttatttattttgataagataattactaggcaaaatcattaagattatttattaataaatattgttattaggtatggtgtccatatatatatgcggtcacaaattatgaatggttaaagaaattttaaaatatttattaaattaaaaaatatatattagaaatcacttaatatttattattattgacaaaattaaatatgagatccatatgatttaatttaaaaactatcatttcaaaaaaaaaaaaaaaaaaaattaaaaactatcaccttatatcacatttcatttcggggtcgtattaaacactatttggtgcttttgtcatttctctatttcttttaatgctaataataaatgcaaaattgtattttaataattgacttaattaggaatgtaattattgatattgatgtacacttttatagcatataaatattccaacaaataagtttatttatacataccaaccttggaacaaacaacatttttccgtttcttttctttttccatttctccaatgttcaagttgttggaaagattgtatatgtgatctttctctctttccaaacacacaaaactcagaaagatttgttattattatttaaaccattttctgtgtatgctgacacattctctctcttcaaagctctctgcttttgctctgttctttctccaatggcgacgacttcagccccttcttcttacccatcttgtttctcaaaaccccattcgaatttgaaggatttgaacaagacccagttgagctacgctcccatactccaagccaagctaaccaaacaatggagaggtttttcaagcattggaaacggaccaagaatcagaatacccaacaaaacagagcattttgagagaagaagaagaagaaatgatggggtggtgaggtgtacggcagagggattagaaagaggaatattggttggaggaggaagaaggagttcttcttctacagaaaaagtcaaagtcaacgttccagagagacttaaggtggtggctatggtggctgccgttatgtgtttatgtaacgccgatagagtcgttatgtctgtggccgtcgttcccttggctgccaagcttggttggtctagctctttcttaggcattgttcaggtatattcaatttcaatcaaactaatttgacttgtgatttttctttttgagttttggatttctttggcttataattgtgcatgtattacttatttcttcattcatttcattttgaatcaaactaataagacttgggatttttcatatggtttctattcatatgtactatttaagttatctttagtgattaaatgtatgggagatgtggttgttgtgacttgtgtgtagtagttgaaattagaggctgttgttggttagccgtttctctaaaatttaagttatgttcctctttgtccccacaacatgataccataatcaacaagcttatttcttaccaaatctcttaatgggctaattggtatcaacccaagcccatttttatagtgtgagaccatgaatctatgatgactttgaagaagaatgtatgtgtaaaaagtttagatagtaagacctgattttaggggataggagaaatttacagtatataattgtgtgtatggtaactcatggtcttaaatgggttgaatccttcctcacatctatttgatgagggatactcttatatactttttctagaaggtggctctattttgagcaccaatcttaaattagatctttagtaagcaaaatttgcttgctattgttcaggattgggtgcttgtttgactataactttggattgtagtatgaaggttgagagagtaagagaatacaatgctacttatagaatggaggatattataatccattacaatatgttaacatgagaactttcaatgcttagcaaatagcagcccgaaatgctatattttcttattttcgtgtaccttagttttttgtgcttgttaaccattttgttgtaaaaatcaatgctgacgaattaagtgcctttttttttgaagtcgtcttttctatggggatacattttctcctcagtgattggaggggcattagtggacaaatatggaggaaagaaagtgatggcatatggtgtggctttatggtctttagctactctcttaacaccattggctgccaaccactcgacaacaagcctcttagctattcgggtcgtctttggacttgctgaaggtgtagcctttccctcaatgagcactctcatatccaggtgattcccctttagtgtcattataaatagagactaaactcttataataagtta

SEQ ID NO: 63494 - DNA, 837 bp, Cannabis sativa
ttctgcttctgcagacgcatactgtttcatattttcttatatataattgacatttgcaaaaatacggttttttagatgtattcatttatatgatgtattcatttatgagaaaaacaaaataattataatttttaaaactaattaattagatccacaccacaaatttaaaatatataatatgttattgcacagaactttaaaatagaagagccaaacattaattgatggtagtcataacaaaagaaggcgagaaggaagatgaagatctagatgcatgaatccaagacgaaaataatcagctcaaacctattgaagagctggaagaggttattttagatccaaataatctcacaaaatgtagatacaatgggaagaatttggacgaaaaactaaaatagcaattaatcaattttttgaagcaaaccaagatcaatttgcctagagccactcagatatgatatggatagactctaaagtaatttgtcatcatttaaatattgaccctagctacccagtgaaaagacaaaaacgacgaccattagactccgagagacaaggggcacttaaagaagaggttgacaaattgttgaccaatgactttatacgcgagtccttttatcccttgtggatttcaaatctagttcttgtcccaacaccaaacgacacttggaggacttgtatcgactttttagacttgaataaggaatgtcctaaatgataactctagaaatttgagttattcttcacatttttttaaactaaaattggtttagttcttaagtttttaattaatttagtaagtttttaattatttttgaatttattagctttattgta

SEQ ID NO: 63495 - DNA, 1019 bp, Cannabis sativa
acgttctggtatttgtttttctatgaataactactacaccaccaacaacaacgtgagtaaacctaaaatgcccatcatttgaagttggtctcatacatattgggatctctaaattcaaatattttaagctgaaccactgactttcccacaaatattcaataatgttttcacaacttcactaaatgtgtgatattttcaggtcaaatgtctccccacattcttcatatatataaaaatagttaagaatgattctatcttgatgtctatcattttttggatgatatgaatacatatatatttatatatatttgaagatttttgatgatgaaggagacgtctcaatggccagtgcggccattcctaaccacgtttgtcatattatttaggtacgcagctgccacagagaaataaatacataataataaagagaacctcactccaaaatgtggcataatttacattttacaaacattaatttcaaagcggcacatatgatgctccgcttgtcatatatctcaagcttgttttctctacattttgtgtatttttttttaattttttgtcataggtctcagcctaattttgtatagtcaactagaaatagataaaacgccagtggtaaaacatcaaaaagaatacaaagaatgctatagatattcaattcaaatgaacatacaaaacacacttataatgagaatcaattaaaaaatttctaaattagtaatgaaaatcccattattcaacctaaaataataataataataaagaaatagcaaaattaattatgactatgtcaatcgataaaggataaactaataaaatatggtgttattaataatgatatgagaatctctcatatttgaacacagaaagaggtacccatgccacctacacgtactgaaacgttgtgagccccaacaggaaacaacaccataatatatatctcactccataagcaaaactaaccttactaccaaagcaagaagagagtagtggtacaacaccattatttaaaaaaa

SEQ ID NO: 63496 - DNA, 1014 bp, Cannabis sativa
ttttttttttcttttttgtaatttgttgttgttataattatcggcaactagagataaagtcaagttattgtcaaacaaaaaagaaagtaaatatagtaagtgataactttttgaatttctttctattgattaggtcttagaattctctaggtaaaattaattattaattagatttaactaccaaaaagagttttatcatatgtcaatagttaacatcatcattaaatttcaataacatcatgacttcttctatggttgtttttattgccatgtcctatatagagtctatgatctgacagttagtagttttgtgatccctaagaaaaaaaatattaagtaattaagttgtgtaattatactctgcctaaagaatgtaaagtatgataattctaagattgtgtaagtatgagactatgcggttgaaaaaaacttatatgaattaattggtattagaattttatataactcataaaatatacaataacaagattcactttcatagataaacatattgcatattattataagcgtataaacataaattcaaagaatacctttgttgattcaaaaagaagaactaaatagtggaagcgtaccttaatcaatagatattgataattttaattcatcttgtagagatgatttttgtggtgattttaggtaataatcttccaagagaacaagatgtaggtttcttaattttctctcttaatagggaaaaatgagaatagaatgactcttatttcttagggaccactatcaatatataacctcatgggttattaattttaagtatttctaatttattagctcctcaatatattagaaatattttttaaagtatctacacatttaacctatgacactttaatacctagtgacttgtggtgattttggataataatcttccaagaaaacaagacgtagaattttctaattttctctcttaataggggaagatgagaatagaatgactcttatttcttaaggaccactaccaatacataacctcat

SEQ ID NO: 63497 - DNA, 610 bp, Cannabis sativa
tcatatatttttagttttaacattattaatttatcatttttcgtttagactttattgtttatttttatgtgctgcatgtatatattaaaattattattgtgttatatataatttttataaataatttatttaatcagtataccttctagctttttcttaaaaaaaaaattattatgtttttcgttaaacgatggtctaaatctttgttgatgaatattttagtgacgttatacttttcatgaaatatgtgatatactgcagtatatataggttgcttaatattttatttgactttttaaatatatatttctaattaaaaaaatcattcattaagaagaatggtaatattaattctaaaatggaaagaatgacaatatgaaaatcattaattataaataattattttcatattgtggaataatttgtattacaaaatgtaaatatattaatgtgtattattaatgtagtactatatattgttggtatattaattagtacataaataaaaaaaaataaaaataagcctttttttgtgtgtgtaaggatcaacatgaaaatgttaaattaacaaaataattatattgaatttacacttgcagttgcatctata

SEQ ID NO: 63498 - DNA, 945 bp, Cannabis sativa
agctcagaactgcttttactaatatggtattagacgataacatcttcttcatctctttctctctctattttttctgccattgatattcgaccatggttagaacttgagcaactgcttctaggaattctggccataatcatctgccaaacaattcctctacaattccagctgctccaccaacagacacaccgatcattcctccgacttccaccatgactggagacaatctcactcagactcatcttcaaaaacctgctcatgaagacaactcaagtccgtactatcttagctccggtgataatcccggattaatcttggttaatcctcccttatctgatcacaatttccaaacctggcatcacgatttcgagttgtctgttggagcaagaaacaaaaccgtgtttctcaaaggaaccttgcctcaacctccgatcgaagaccctctccatcaccacttgtttcgatgcaaccaaatggtgatgtcctggattctgcattcagtttcaccagaaatcaaaagcagtattatgtttcttgaaacttctgctgaaatgtggactgaactcaaagcccgattcgatcaaggtaacggccccaggattttcgaactacgagaaactttgatcacacttcgacagggagatgactctgttagttcctacttcacaaagcttaaatgtatgtgggatgaaattcaagaattaaggccacggatcccatgtacctgtgctgcttctgctgaaaattcggccttcttgaatcaagagcaggttcttcaattccttactggtttaaatgaatctttttttcctgttcgtgctcaaattttgttaatcgatccgtttacccccttgtctaaagtcttctccatggttattcatgaagagaggcaaaggaaactaaagaatccccaaattcccctcattgcttctgctcaagaaaata

SEQ ID NO: 63499 - DNA, 820 bp, Cannabis sativa
aagctatgcaacccattctgaattcctggatagacacattctgtccaatttgatagctgttttcaaataatcaacaaaccaatccgaaatacccttcttcacattgcgttgattgtccattgaaaaagcttaataagtagagctcatataagggtcctttcaaagctgcttacatctgggctttgagaaattgagactcttactcccaaattatcaaaacaagaattaatgttcaataaacagacagattctacagaattatacaaaaagtatataaaaaaaaaaagaacagattaactgagacagtgtgattcttaaaactaataacctcgttaggtcaacatgattacactatcaataacccaaaaagaaaagccaatttttactaacaaaagatatatcccagaaaagaaaagcttaaatattttcgatttcgaagattaattgaaatgaagataagagtgaacctcaaaggcaagtgagtactctccctttcacgaagaaaattaaggcctttagagacgaaatttatccactgatgaatacgtttccggaatcggagatggactcgggattccggtgttggaaggagagaatggagtccaaatatttcaaaaattggggtaaatacttgaaaaaaaaaatatatatatatatatatatatatttttttaggctagttattaatttttctccgtaactttaacatgtattaaattgtgcctctgaatttatttttgctgttaaaaattcccctcgaactattgagattattaaattttaattttagtaaaaaaattctaacatgaataaaagttca

SEQ ID NO: 63500 - DNA, 731 bp, Cannabis sativa
ctctctctctctctctagatctctctctctctctctctcaaccttacactatcacaattttcactcaagcaataatggtctgattcatccagattacaagtattgatagtcatttatatagatttatattgttgcctaaattagttccgagaatatcgtgactcatttacatcgtcttaaatgaattagttcatctatagcaacaataattctcgttagctttgataacgcgatttttgtacagacaatctggaagctttaatatggacaagctatcaggatacatacaagcgctccttcccgaatgaacaaccaagagtgacagtagctatccaaaagtgcatctccaaactaatgacaagcttatttagaaatatcttccggtttctacaaagtcatccgcacaagactttccaaattctaaccaagcttcttgtatatactctctagatttacaacttcccttttggatgacaaaacttgtaaccataatcaacacataggaataggaatgggaatgagaataggaatagaatgaaataaaatttaaaatgcatgaaaaatgataataaaatcattaaaaatttctcatgttatattagaatgatttctccttcattttaaaatggaatagtcattttaccaaaatggtagaaagaacattctattagaatgatattctaatattttaaaatgcaacaaaacaaaagaattaaatgaaattttttttt

SEQ ID NO: 63501 - DNA, 547 bp, Cannabis sativa
aatttctgctcttggctctagtagtttctggtttagctggattagtgtataattagtcgttgtgtgtggcattcctattgttagggtatttcaatttggtatcagagcgccaagatttttaaacttctggtagatcgactgaatatgtacaatcatcatcaaagacaagctcgactcgtggtgtagtaagtattgagagtaaatgcttaattgcttttgtgattaaatgtttaccactttttgttataggcagcatatgagcatttagaaaatataatgttgtaaccaaggcatgattagtaattatattagtaaatgattattttaaaagaaaagtagtatgtgtgagttagggtcaaggcaataagtatgtaagtgtggatttggtgtctgattcgttggggttgttgattttagggttatttgagagaaaatggatcctaatcaatcaactagaccacatggcgagcttgtggagcctgttaatgaccaaaccaatccacaggcaccacctgtgcctccacagaatctgggagataatacgagg

SEQ ID NO: 63502 - DNA, 2973 bp, Cannabis sativa
aaaaagagtctacaaagaaagggaaaacataagtatctagatactctgagcataccagggtagttgatactcacgagaatgtttacaagacctcttgtaatatggtttattataaaagacctccacctatgtacaaaggattagatggccacatggaaaccatatatggaggcccacacattgttgtaagcactataaatgcacaaaagagataattgaaagagctggaacaggatgacacatgcaatctattatagtcacctatgcaacctccttggatgatgaatctcccaatatcattcatagaagacgatgccaagatgtgcactttccacacaacaatccactgatgataaaaactcaaattacaaacaagagactgtctaaagttctcgtagataacggaagctcaataaaaattctcttcaaagaagcttttaaatccacaggcttgtggaaacaaacctaacatcttgtccagttcagctccaaggcttcaatggagatataattcagccaataggaaaaatacaacttccaattaaacctaatggagctatttatagaagcaatacaatcttagcctttaaatactgcactttcatggtagtggactgcccaaaaacctacaatgtcctcttatggtgacctattttaattggttttggagttgttactttagtctacaacatgttcctaaaattctctagtgatacgagaagcattggaacgattaggtgtaaataaaaaagttccaggatcttttacaatgtctcgactagaactgtcttaattgtgtgagtaaaaaacctagataaatcaagaacatccagtcaaccagcacatggggtactccaggaagaagatgagttagactcggttgtagtggaatgaataattgaacctatggacgagatagaataagtacgcatcaacaatgaaggtcccaccaaagtcattaaagtgggagagaatctacctccaactgttagagagaaagtcatctctacagtaagagaaaatagtgatgtgtgagtatggagccattcttacatgactggaatcatccctcatatgaattttcatgctctaaatacagatcccatggtgaagctagtttgtgtgaagagaagactgttcgatcaaggtttcacggaagtagtgaagacagaagtagacaagctaactaatatagagctcctttgagaagctttatatccagtttggcatgccaatccagtgttggttccaaatccaaatgaaacttggaagatgtacatacacttcataaatctaacataaagcttgcccagaagattacttcccacttccttaaataaataagatagttgatacaacttcaagatatgaacttttaagcttcatagattcatactcctgctacaataagattgagatgcatgcagctaatcaagaacacactagtttccaaactgacaaaggcacttatttttacatggttatgcctttttgatttaataacgctggagccgcatattagcatatagtcaacaaaatgtttcaagacatcttggagaagaatatggaggtctacatcgacaatattttggtaaattcgaaggcttccatgagccatagcaaaaatctaaaggaagctttctccattatctaaaaatatggaatgaagttaaacccaaagaaataaacttttggagtatccttaggaaaatttctgggttttattgtcagttccagaggaatcgaagcgaatctaggaaagatcaaatctcttctagatatgccatcaccctaaaagaacaaggatgtccaaagtctaactagaacaattgcagcactcgacaggtttatttccaaatcaatgaaaaatggtatcttgctctttaatgacctccatggaaacaacaactttgaatggacaaccgagtgtgaagatgccatctagaaacttaaagatcatttgaccaaagatccaatattgtccaagccattcgagggggagccattattttcataccttgcagtgtcagatcatgccataagtgtcgtcttagtgtgagaagaaggaagggtaaaacttctagatattatgtaagcaaaagattgctaggggtagagtccatatatcgagtgattaaaaagctttcgaatttattattaaattcttcacagaacttaagaccgtacttcaagcccatgcgatcaaggtactaacaaatcatcctctcctccaagtattgcaaaagccagaaacattttgaagactcttggaatgggaaatgtagttaagcgagtttgacattcaatatcagcctaagactctcaatcaaaggtcaagccttggaggatttattatggagggtacagggatgaacaaaaaccctaaagaacccatccttgagttagaagtgtggaagatttatgtagatggagcataatacaagaaagcttcttgagttagaatcaatattatttctctacaaaaacatcaacttcaaagtgcactttgagtttgatgaagtacaagatgaggcaatgatagatgccttacaattagctaaagaagttagagcccagaacattgagctctatagtgattcataattggtagtcaaccaagtttccagagagtaccaaactaaaggggaaaagactgttaattacgtaacaaaatcttcacagctattgtaatattttaagcatcattacgtcaagcaaatccccaggtatcaaaatgcctttgctgatatggtagcaaagttagcaacatatctagagatagaaaaataaggattagtgcccatcacacatctatccattccaaggacagaaacattggaggtaatggtaattgatcattcaacttcctggatggcccaaatcaagatgtacatggaatctggtacacttcaaaatgacagagcaacttcacagatgattttatattaagccccaaggtatgtgctcatggat

SEQ ID NO: 63503 - DNA, 901 bp, Cannabis sativa
  modified_base (135)..(137): a, c, t, g, unknown or other
tatatagaacgtccaaaatggacaaccgagtcaaaaattatgacaaaaatacgatttctgatcttctaggaatttctaagaactatgaaactcaaaaatcctaatttttcgcactcaccgaaacactaccaaaannnatccaaatcactccaaacttcacacggcgtatatataccataaatattactatccttgcgtaatagaaattaaaatcgagtccttaaatgaaaaataccattaacgttcggactaagctttaaaaagttcaaaactcgatctctaactcaaaacctcctcaaattcaacaagtaaacatcgatactagtctcttaccgaagaacaattctactaagtcagaatctctataactattctaattcacaaaacccctatacgaaactaattatttttaaacttaaaacgaaattaaaccataccttaagcttttcctctttaaggatttgctatcctgctactaccagagcttagatcgctaggtttcagattgaaaatcgaagaaagtagatataaaaagagaaagttttatcgaaagggggagaacaagaattcgttcgttcattcttcactgtttcatatattaaacttaatatatatatatatatattatataaacataccaattgaaactgataagttttagttaatatattataataatattaatattaataataataaaataataatataatataatattaataaaaaatttattattaatagttatcttattattttttagccactaagaaatttctatttctaggatatttggccaacttcgagtatcccaaaatacttcggtatttctacttatctcaaaaattctatcaatatttctaactaaaactgttgtgacatttttggcctccaatcgggt

SEQ ID NO: 63504 - DNA, 1904 bp, Cannabis sativa
atgattgtacatgtcgtgatgatccttggaaggaaacctggtggcctttataccaaattgtaacaccctacaaggttaggcgtgctatcgtgatttttataataaacgtgcaattcgttgctaatcaacaggtttgctaaaaatcgtgattaattaaaactttactgaattattccataatttgaaaataaataactgttatataagtcgtgatcctgtatttaaaatatttacaattgtgattcaaaatattcgatacaaaaattgtcgcttagcgactatacaaaacacagcctattgttccaaagattctacactccaggtctaactgccccaacatgtacaatcttcatcctctcgcactcactgttgtccatccttagctttgcccttacctacacatgtaaacagtaactgtgagtcgacaaactcagtaagaaaaacataatcataacataaatataaacctgattataattaggcgcccatacaccaagtcataaccatatccatgtgtcccacgcggtattgagtctagaacgttcgtacgacaatactattgaccaaaatatcaacctatactcaatactctaatcataccgatgcgatagtgttaatcagtacttgagcacaacatacatttattggtatccaataaactctacgtatattgataccactatttcaatgtaatctaacagacattcataaacatgcacactaaacatgtaatcacatatgtatatcattatactaatcttaccttgattttgaattcaggtgtgtcggtcaacctgagtggaattactgctcaacgatttacagtcccctaagtcacaatattcatgaaacttatgagtgacatgctaaatcactttttggggacttaaaatcaaaactaaaaatttccctatcgatagataatatggtaataccctaaatattactaaaacagaaaaatttaaggtgccctaaactgtgccaacttgtaaaccagttcccaacgaaaaaactagttttgaagggtttgcctatggaggaatcggtagattgtttttacattacaaaactgaaccagttgaccggttcagtgcaggtacccccaaaaaccttataaacactgcaattcaatcccaattcataacaaaccttccaaattacctaaataaaccataacaaacatatacaaagcaatataactaggcaaaaccctttgaaacacaatccaccattctaaagtaaaatttgaactccaaagctcaaactttgttcaaacacaacacaaaccacaaatcaagcttaaaaccaacttaaatattatcaaattaacaccaaaaaataaacacaaactcaaacaacatctacgacaacctaattcagaaaatgcatggacacatatattaaactaagaaattcaaataaatgaaggagagagagatgaacccttagcttcaatctatcaaaatctaaaaattcctagttgaaatcttttgaattgcaatagaaaatttcttaattcctaagcttgggagtggccgaccaaaagagagagaaagaaggacttgaatttcttaattttgtaaaattaaataaatctattattttcctaacattatacaccaaaattagattaataactaacattaaaccattaattcactaaaggacaaaagccaaaagctaacttagggaaaaagatcatttgaccattgcttcctcatgaagtaaccttgccacctaaggccatttttgtcaaattcaaaaccacaaatattcccaacattctcaaagtcaatctgaatttctccgctatttctaaaatactaaaccataagaaaagtgactctatcagccaaatgtcgtgtttcactattaccggacattaaatatgaaaaacataaaat

SEQ ID NO: 63505 - DNA, 2115 bp, Cannabis sativa
tgttcattgttatttcttgttatttcttgttattaattctgcactataaataccctgtgtaaacacattcatttggtacacttgtttgtgtgcattcctaaatctaaaaagtacttagtatacgctcatatgttttttatttatttttttcttcattgttttactaattataatcgttaatattggcttctatcatcttcttgaattatcatctatagcctcgagtaaatttcccaatcctcaactcaacattacctttttcaacggtgaaaatagcaatgtatgacaaggtaagtgaagttatacattatcgatcgatgatcaattacattttttatatatgtatattcatatttatacattttctaaataacattccattttaatgatataaattgatgaagttgctaacttgaaaaaccaataaatggttcaattagtggttcaatgattgcagagaagatattaaacaatgttgctctaatgccttggataagcttgtgcatcactatggttggaaggtatactatagacgctatatacataagcatttgacaacaaagtatagtatatatgtgtgtgtagatatttcttaaagtgattactgatgaggtatttgctaattatttaatttattatatatgtgacagattataggggtgaccattccggagatagagaatatgcgccttgcacactataccaccataggatctgagtgtagcacctctcttagttcctatcttgaaaagttgtatggaattctctctctccctctcttcaatttcttcttaattttttggttgtatgtatacatctataaatatactgtatactatgttttttatatttaaattgatttactaataatcttacaacatttctaattagggattatgcaaaaataggatgggatgcaagatttgcactcgctatatatggttccttcagtagcaaggagtacattaaggcccaaaaaatcaggcataatacatacttattaactattaccttttttaatacatatatatattacatgcatgaactagttgaatgtgaatatagattctttgttcattcgaaataattattaaggtttttatttgatttcgatggaccagctagcatgatttaatctatgaaaaatattgaaaccttaacaagataataataatatattatcgtatgtactttcctttaattttatagtatttttgcttttacaaacatggcagtagataaattaatgtgttaatagaaatatttctaggcacatggaaaacctttaaacctagaaattaatgatctaataatatgttccatgtgatatatgtgtttgtttgttactatatttatcatacgatatatgatcaccttaattaaattcacctttcacaggaaccgtcagatccaaattcacgacaacatattttcccaggcagacgtcatagttactccaactacagggtatatatattaacttgaaaattattgtggacattgtcccaaatagaataaatggtagagaattaaaccgtacataagaacatgggttactccactcattatcaattagttttgagatgaaccctataattctcaacaacaaaaactgaaagaaaaataaacaaaactgagctacaactattaacttcttaccaaatttctaaataattataagagtcactaatttgagctatatatataatcacagagtaacagcttatccaattttcaatgatgctctaaagactggtgaactcgactatgtaaatggaggtagtcattttttatttgtaaattacataaaataccataaacatgtgatcttatttgcttataattaaatttatgtgttctttctaataattaatcatatataaattcatgtcagctgccctggttcgatattcgatagcaggaaactttttggggtatccggcagtcactattccagtatgatatatcttatcacagccactatataatatatataattctactaatgatccatacatatagcaaactatatatgagtattcaaaactatattattgcaatttaagtcaaattataatttcttaattattattatttatctattaatttttttaa

SEQ ID NO: 63506 - DNA, 847 bp, Cannabis sativa
aaaagtatattctgtaaaattcatttttatttttatttttttattttatttttaaatggggtctaggttcggggtcagatttgggtttagatcagaggtcgagtttggcgctagggccatggggggtatttgggtccatggtcagagtccaaaatattgattaaaaaaaaaacctgtttaaaaaaatattgaaagtaattttttttgttttgaaaatattaattctcaatcaaaacattgaaaaagtgaaaatagttttatagaacatgtttttaaaaaatattttcacttttctaattttaaaaacagaaaactaaattagaaaagtattaccaaacgataccaaagattcggagtcaacaccaatatccaatccggacccgaactcggacacgaacccagacccaagacctgaatccggacctagacccagacctgcgacccaagacccgaacccaaacctgggacccagacccgtacccaggactcgggacctgaacttgctacttgaacccgagacccaagacccggactggaactaggaccaggacccagactaagactcggacccgggatctagacccagacccagattcgggacccggacccagactcaggacccggacccaaacacagatctagacctagacccgcgacccagaccgggactaggacccgaatttggatctgcgacccgaacccaaacctgaattgggacccggattcagacatgcgattcgaacccgaacccaacccatagttagtctggagagcatggtttagtacacaaacaatcactaaaacagtaaaattgaatgaaattgacaaaagtccttaaatttaacaa

SEQ ID NO: 63507 - DNA, 1173 bp, Cannabis sativa
ccacctcatttgtgcattgtttgcctctgtcaatcgtactcgacaccaccttttgcgttttgccactattctgcatggtagaggatgtaccatgcattgtaccatcctcaacgttaggatcatcccctaccttttccttcttcggcactggttcaccttcagccaatgcgcctctctgcagccgtgactgtgaaggctgccttctccagacaccctttcttctatctgttttcccctgtaacacagtatcctcctcattcactaacacttctctttgcaaggattttgtagtaaaacaattgcccataggtccttcaacctttatccatggcccatatgttctaaccgccggacccgatgctagagtaacccacgccgtgggctgagtgcactccctgttgaagtgtgcaagcctcccacagttgaaacatagaaaaggcagtttctcatatttaaattggacccatgtcgaagggtttgcaccagttttgaagaagaaccctggtgggaatggaaattgaatccaaacatcgatctaacatcgtaaaaaatccacgtctgaccacttcttccttcttttttccatctgtttttagtagttgtcccacctttttagtagttgtcccacacaagccttgttgacaacaatatcttccaaggttaagtcttcaaacagctccatcatctcgatttccatctcgctatcccgttccagtattttcccagcttccttatctatcaagacaacccctatagcaacttcttcagtgctgcttacttctttaacaataaccacactgaactcgaaatagaacacaataaacacccacactcaacaggggaggtcagaagtaagtctaaatgaaaacagactagactcaacaaaggagttaaaaaacacaagcagacatacaaagcccgaaatcaccgaatcaaagctacgacgagttttgaaagatgagataaatttcagtaatcggaggtgtaaggtagccgtggacagtagagagaaaacttaaagacactcatgcttagcagtatttatgtattaatttatatggatttgttatcgtattcttgtcttatcaaaaattgaggtgaataatgttaattgtacaagtgtcacgtgtaactatagtacaacctccacctatatacatgtgtcagtatatt

SEQ ID NO: 63508 - DNA, 1017 bp, Cannabis sativa
aataataatataattatgtaaaattatatatttaaaactttaattttaagttaaaaaaataaatttaattttttaaaatgaaaaatattttaaaattttgaatttttattatttataaaaaattatatataaatcttctaattgaattttttttttttacaactacagctacgcatagaaattgatcacataaaatatgatggataacacgttttagcacctcgaattggatgtaaccctcccgagactctcgttttctgttttatttttttgtattactggttttgtggtatcatgtgctttttcaagtttatgcataatcaaattttgttgctagattatgagcaaggtattattatgagacccctttccaacgccatacacaccctttgacagtccctctcaacttcaatcacagagaaacccaactgagagcaaaggagaagaccatacagaactgccatagcttccgccactgaaggagaaagagcttacaatgttcacaacctcaataacatcatcaagtatgagcttcttttaaattttccacagctcatttcttacaatgtaagtgtggttttgccacaaatctatttgtgtattttttttttctctatttatgtgggaaacgtgttgtttttttctaatatatatcataaaaaaagaaaattaagagttcccaatttgccaaataatacaaattccttaacgttcattttggattatagcacaaacattaatttggtataattcaagcatttattatttattttatttacttcattattttgttgtgactaaaccaatctcttacttttgtttcttatcaaggacaataaaatttcttccaacttgcactaactaggtacgtattattatatgaagactaaacctacatgtagtgagcataaagctttagtgctttacacttgtccatgcattaccattaacttattgactaatatgttatgttactttctttaattttggccaacttcaactatacttataactcat

SEQ ID NO: 63509 - DNA, 1060 bp, Cannabis sativa
cgacacactattgcggtaaaagcttatcaaagcaggttcatagcggataagggtattttttaacactggggcttctttttcaccggcgtgatttctcgccggtaaaacagagtttaaccggcacatttagtctacgcgccggtaaaaaatcttttaccgaccaagattctcagacaagttttgccggcgcagtagtgcgccgccaaagctttgccgacgcatttagtgtacttttgccggcgcaaaaatacaccggcaaaaaagagttttcttgtagtgatgtttgagacaggttgttttattgagagaggggatggttaaggataataaagaagatgaaattgtaagggtttggaaagtgtttggggaagctatatattgataaagttttcttgattagtaatattaggatttaaaagagggttttatgtgtttgcatcctccatttgttgggtaaaaattttactcacgacatatatcatcgagagcttttatgggtctgataccatgtgagaaggaaaggaaagtaaatgtagttatgttcctagagaaaactagtactgattatataacccttagaataaaacaatactaaagcaagacgcatgtccatcaaagaggtgaccaaacaccataaaattaggaaaagctaaactattacaaagcttaaattaattagtgtttacaataagtgattccatttccttaaaaccacaaatatgaagattggtttttcaatttgaggattgtgtaattggtattaataaattctcacttaattataaaaaatctatttaaatagggatgacatgaaaagtttaattttctttttgagtttttaagttcaagaaattggatgtgccaatttttttttatatataaatatttctctaatattaaatgcggttatttaacggaaattgtgatcttaatatttttttttaatttattcgttaaagttaacatttaaaattaacatcgttaaattaattaattattttttttttttgaaaaaaaaaattagttttaaatatcaaaatttaatttatttattaaaata

SEQ ID NO: 63510 - DNA, 1314 bp, Cannabis sativa
tgctcttaatatagcaaatgggctgatttatttatttatggctaattagaattttgtcttcccaactttgaagtatatccaatcatgtgacccgaagttttgaatttttcagaatgttaaaaattctttcaaaactattaagattgttggatcaaggaattttgtttatataattttactaatggattcatgacgtggataaaaattcaaagaacgtgattcagtacatgtcaaaattcggatgcatgatttgctagatattaaagctcagggaacacaatttagtatagtaaaattgaacaaaattatacataagtctttgaatctaataatctcaatagactgtcacaccttttatggtatttaaatcttcatactccccaactttcatcaaatctcttcataagtattccatgcccaaaataaaaagcaagagagacattgaatctcattggcgaagattcctttttgcttcaaaaaatctatgtaaagaaccattaatcataagactatatatatctcagagttctatgactagttctataaatttctttgaaaatttgaaagcattcaatatttcgtcgataaagtctcactcaatcgtgtcatatactttctagaggtctaacttgatcatccactttgttcttgaagagtgtctctcataatgtcttactaaatcttgacataccataatgttatatgcaataagcttgccttttatgaatccgctttgattttgagcaatgatatcggcaagaaatcattctcaatgtcgagcagattagtttagttgcaaccttatatattttgggtatttatacctttaggaattaaagtcagagtagtggtgttgatctcttttagcagtttgcccaaatgtagcaaagatagcaccacttcacttacttctgtaccaaccactttatgttgaaaaaagaaactatatattgaaaccatctaggccaggagatttatttcctaaaatttcaaacaatgtatttttaacctcatctaaattataatttgctagtaagagtcttgactggttctcatttatacactgcatgccctcttgccataattttttttacaaatcgatctccttccttccaacattctccccaataaaactttgtaaaattacaaaaatacttctattaattacctcatcagatttagtaacccaattaccttgctggtcttggattgaatataaatcctatcagttgcatggaacagtgccgagttgtcatcaccttccttgagttaagaaactttggcttactatattagagaaaagaaataaaactc

SEQ ID NO: 63511 - DNA, 1332 bp, Cannabis sativa
aacccaacttgcacgagcatttgaatcgtaattccagatcttcgatatcggttgaatcagaacataggtctttagcagcaagtcaggcagccacccatggatccaattcaactatgagtaatatagttagaagacaaatacaggcgataccaagatgtggaatataggaaattattaggatataattcaaatgaagaggcagaatgtaacgtcctactagattaggcacgctatagtattttcttaattgatgtgcatgcctttgctaattaaagggtttattaaaaacgtgaataattaaaatttacataattaaactttaatcttaaatatataataataatttacataaatcgggatcttattttaaaagttacataagtttacaaaatacatgtattacaaaagtcatcgaatggcgactatcaaaagtgagcctagattgtcccaaagaccctaaacactctaagtttaaccgtcttgatatgtacaatattcacctttagcttagacttttcacggttcaggtctaactttaacctgcatatacacataataactgtgagtcgacagactcaataagaaaagcgtaatcaaaacataaacaaatatctagaccgcaactaggtacccatacacctaatcacgatctaatatctgggtcaggaaagttcttgaaaaagtatgactaattgaaaatccaacctatattatgtactctagtcatactgatgtggtagtagctagttcacactatctaaaagccttccatatatttgttggcatctctatgcaactctatgtacactttactgataccttgatatgctaatgtgatggctactgatttgcctaacatatatctgttggtatctcagtacagatctatatacacttcactaatcactaataccctgatatgttattttgacagtgacagcaactaacatgtacgctaaacatgtatgcatatatgcaactattatactaatcttaccttgattctaaatgcaagtatattagtaaccctgagtgaaaactactgcttgacaatttacaggctcgtaagtcacaatatacgtaaaacttgtaagtgatacgctaaatcacttttcggggacttaaacttaaaaatagaaatttttctatcaatggatagcgtcacaatactttaaatatcgccaaaataccaaaaactaggtttctaaagctactagaaccaacaaaccagattcccaaaatgaaaaacaaattcctagggttcttcctggggaaacggttaaggcagtgactaaaagcccacttagagaagaaaggcagtgaaaaatcgaa

SEQ ID NO: 63512 - DNA, 701 bp, Cannabis sativa
tttttaatattttattaaaaaattgaacagaacctatcaaattttttctaatattttattaaaaaaaaaacatttaactaacgtacaagttttctattttttttttttttttgtatatattgacttttaatattattaattaataataatttttttaaaaaaaatctacttaattacttgcttcatatattacgtttaaaaaaattaatttaaaaaataataataaatttgtgagatattctaaaaatatctatcactctaaaattttaccaaacctcttatctatattttaaaaatatctatcactttaaaaattttgtaagataattatattttgtacggtcatcattttttatcaatgaacaaatatataattagagtttttctggagtcaacgagtcttcttcttcctttgctaataataattttcatctgaatattttatgtgtgatttattataaatgagatgatgtagcgataatagagttaaagtaatagcctatatgtttctcttatttttttttttcttatgtggcaaattatacattcttataccttagtgtatctttactaaaattctctttaaaatatttttacaggagtctcacaatgataattcaacacagaaataataaaagctatagaaaaataaaatatgaacaccgggtttttttacgtggttttgctgttaaaattctaca

SEQ ID NO: 63513 - DNA, 738 bp, Cannabis sativa
agatacgtcaagttggattattgatcctaccgttgctctggcagcagaaataaaagagataaaccaaagaatgaatgcgtgagacaagcacaatgaagagttaaggtgctttgcaaaggaaaaatttcggcaagagcaatgcatatgaagaaaggtgtgaacacgatcaagatgaaaatcgtcagcaccatcaggacgtcactgagagtttgtagaaatttttgctagatgttatcctaaattttttccacctaacgtggcatgtccatgtaagccaagacagagtacaggtagaatagagtcttgccaatagcaagacaatgtctccttacaaggtatggcaaaaccaccaagcaacaagcaaaaggagttgagcgagtcgttaatgagctgtaccaacatgtctggccggccaagggaagtctataagccagcttggaagagcttgtatggtcggctaggatctgggcacaagctgactggccaaaaggtgactttcagaccaagagagcttccgtcgaccaagggcacctgatagggatgacaattagggccattttcgcaggccgagtcgggcctccagcccgatggggcgactttggcccgaactattcgagcttttatccggctcccaaaagagagagcttgcaaaaagaacaatacacaaataaactatcataaaaaaaaatcaactcaacgttaacaattaaaatggattgtaatttgtaaaaggacata

SEQ ID NO: 63514 - DNA, 1332 bp, Cannabis sativa
agtatttttgtaaaagttaacccacattataatatttttgtaaatttccctttaaaaaatactaccattagaaaagctctaaaaaaaaaggtttttttggtagcaaaatatcattaataacttaccctattattcaacctgccagtgtcatattaatgtcagtttccttttttttttttttaagaaaatattaatgtcaatttcgtaataatatattctaactatgcaatatatctataaaattttaaagggtttggatacaacatataaaaatgaatagttataatttaggcagagtaacatgttactcattttattaagcgtgaccgaatcggcaccctatatatataggcatgtggctgtatatattatatcatatattgtattgtgtatatagtaagagaacataaaatgtatatatattgttattgttattgctattaggtaagagctatatcattcaatttatagtattattcttagggttaggtttagactctttaaatggatcaaaaaagataaaaaaaaataaataaataaaaaaataaaaaataaaaaataattgcatttaataaaggattaatttcacaaatgcacaaaaataacaaaaatacggtttcacggaattttaaatatttttacgattcttttaattttatttacataaaatacggtctttttatgttgaaattttgttcatttattgttaattttttgttatatgtatgttattttttgctgttatgttcatattacttttatgttgtttcttgttgattttatgttgttttcatgttattttttagaaaaccgtaaaaatataaaaaaacattctttgaacgtaaaaatgtaaatattttacaaaaaatgataccttatgtaattattcctttaataaaacaccatagctgaattccataagtccatgggtttcaaaaatactattttatgtcaaaacttatcttttctcaacaatactattttcaagttttaagcttttaaatgttaattttggctatttgataattatgataaactatcaaataaaattaccatttaactaatttattaattagcctttctaaaatctcttaattaataaataaatcctaaattttattttcttctcaaatttactcttgcttaatggaactcataattaagacatagtcttacttagaatttaaattaattaattaaaaccaattagttgagtatacaagacaacattatctcaggcagtttggagactatgggcttgtataatcaagatcccagtaagtagttttagaatttaccgatttaattctctatcttattaattcctcctga

SEQ ID NO: 63515 - DNA, 1339 bp, Cannabis sativa
tggttgctctgtgcggattgttgattgctttcctctgggcatgccagcgaggcaccctgctcggactatgccctctgagcagatactccaagaggattccacgtgtcactattatgtgatgccacgtcagagtgcaaaaattgggataacatatatatataggatacttctatagtagggatgcctcttttgtctctatgatagggacactttattagacgttgattaatgatccaatggtgagaagaatgtaaggagcatgatagttaatatggactttactacatagttacatatctcttcaaattttaataatattttaatacttattcttttctttattttttttttactttagtcaattttttctcctattttttttctctttttcctttttaattaaaaataattagtaaatttatttttatttcaaatagttagttgaaattttttttcttttaaaataaaaatattttcatgatagtttaaaaaatataagttgatctaataaaaattagtgtaccctctcaccccttatttcggcatccaaaaatatttttgatttttcagtggaccacttgtaaattttcaaaaaattctaaatagtttacaatgttaaaaataaggttcaaatattttatagtatgagcgactgttttttcttatagatgtggcaatcaactgtttgaattttatttacggcactataaaatattcaaaattttatgaaaatttacaagtggttctaagtaattacaatgtacatgatcaagaaaaataataatttaaaaattctcatagatgccaaaacagataagggggtctatcaaaataaccctttaataagggggtactattatttttaaaatatttttctttttctacttaattttttatgatgaattctactaaaatctactatagtatacccctaaaagggtgttctagcagactccatatctgttttggcatccagaaaagatttttagttcattttttttcatgatcgtgtatgttatagctatataagattatctgcaaatttaaaaaaaaaaaaaattgaatattttacaattcagaaaataaggttcaaaaagttatttaatatgtgtgtaagaacgaacagacgggcgtgcaataaaatatttagatcttatttttgacattataaactactcaaaattttctaaaaatttacgggtgctctaaaaatatacaacatacacgatcatgaaaaataaatagataaaattataaatgtttcaaaattttatactttttgataaaattattaaattaaatctacataatttcatgtgggataaattaagagaattta

SEQ ID NO: 63516 - DNA, 773 bp, Cannabis sativa
ttaaaaaataaataattaaaaatacactaaataactcccaaatttataattatggttatataatgttataaaattcacaattaaagacatttaaaatacaaaattctataagttgaaaatatataaagtcaaaattgattaatgtgaaaattaaaatattaaaatatatataataacttaatataattaagaaaatttattaaaatgactggcaagattaagtaataaatcccaaagaatttctctccattaatagggaattacatttattacccttgccaacctgaccatcactttcgcaagccgcaaaaccaccccggacactggtccgtgaatgatagtcaattcctgcataagagctaaggcataaagcaaaacaatacatgcatatctgtatataatatatacatatatacataaaacaaaataaacagtatgaatacatatgacaaaagtatatttaattacttttcatccacactcctttaaatctaaatatgaaaaagtgagaacaaaaaaatattattacgagatgaattaagaaataggaaacgttactagaaattagaagcaaaaataatagaaaattctcatcacccaaacaacgaacacaattgatataaaatctaatcttgaatagcaacaaaagtaaatttatatacacagagtcataccatgaattaaatttctctaccatttacctcatctgatgagctccgtttgaagaaggcttgcacgactcggcaaggaagacagcgtcgtcatctccattt

SEQ ID NO: 63517 - DNA, 2224 bp, Cannabis sativa
attctgttaagtgtaagtgtaagtcggtttggataagttagttaattttgtttcttaggttctttcctttcttttagttaagttggttatgctcctttaaccaactctactgtaatataaatagttgtattaacttcctttgtatcaaatacaattacttttctgcttttcattcaattccgcaataattattataaaatattatttactatttggaattgtgttgtgaatacatatatataggttggaagagcagtggggaatggaattatcatccactatagcaactctctttcccaactcatttagcattattgcaacacctttttgattgtcgagaagaaaagaataaggtgtgtagtgagattttgagagaatctttaaccaaaaacactaactatatataaaaatataataaatgcaaaacttaccaaccagctaccgagtagagtagaggtcatatatatactacgatcaattaattggtctcaacatatataatagccgtaccacgtacttaattagccacttcaatacacattataaataaataatgatcatatatattgaagaaagttaatgtataaaataaataaactcaaagaaaaaagaaaaagataactattataaattataatagaaattgaaattggaagtgataaataatggtgtgtggtggtcgtgggagactgacatgagtctattatttgatttagattagaaccttagagtcgatcatcactaataatatatgccattgaatcattatagtgtaccttagcttcctcaccaagctaaaatattaattcaaacccccttttcccaaaatcttctttatttcccaaaatatatatcattctttattttgcaacaaaaacatagaagaatagaaaaccatatatagccctacccctagctagttatacttccagctgcgattcttataaggttttagttggaggccattcatatataaatacatttatatatacatatgtgggggctaggtccctaatattataattaaagggcattgctctatggcaatggatcattcaattaacaaggcccaagggggaccaatttaacatatatgaaaatatagttattatattttaagaaaactatcaacttattaattacatagggaaatttgattttctatacttacatatacctaatattttattcctaaattaatacatatcaccattgaaaatatatgatcactttatctaaaacccaaaaatacccttctcaaatttcccatacttttttttagtgcaaaaacataaaagaaaaaaaaaaaaattggtagtccgatggggtccgatggtggtccgatggtcacctgatgctactttgtacaaaacattaaaaaaaaaaattgatagtagatctggtctgatgggtccgatggtggtccgatgggtggtccgatgggtctgatgggtggtccgatgggtggctcgatgggtggcccgatgggtggtccgatggtgtaaacgggggtgatgtaaatcgggtattttagggatatcataaaagttgtcatatcctacaaatattagttattatttgtttttaaaaaaatatttaaccaaatgtaagcataaaaaatcaaatttcccattacatatcactattaaatcaatattgtttgtaagtcgttgtttcacattataactaaaacaattatttttgtttttaaaaaacaaaaagcatttcacattatttttagagaacaatttaaaaataaataaagttataagaaataataaaatgttattttttatttcaaaaataattatttgtttattaataattttttacacttcttctcacatgtttttttctcattattattttctcacggtggggttcgaggtttgagaccgggtctgaagttagggtccgggtttgagttctagtccgagatccagtgttgaatctgagtttggatctgggaccaagagtctaaggttcgggtttgggtcagggtcagtgtctatgtcttggtccagagattggggcgaggcccgagtttagggatcgggatcagatcccaggctagatcagggtcggggttcaggattcgaggtccagggtctgggactaggtttggggcctaaggtttgaggctaggtttgaggttcaagattcagagtcagggctaacactacaagaaatgtcacttttgccagcacatttttgtgctgacaaa

SEQ ID NO: 63518 - DNA, 1094 bp, Cannabis sativa
  modified_base (855)..(856): a, c, t, g, unknown or other
agttacaacttcactttttgtgataatacataggatataactttttttaattgttactgttatcactttctatattacgtatttagtaatacttagtttcattattattgatcatatagtttctttatagtttatatcaatttttgttacatgaaaaatgttattattattatattacatatgttacattagtgcataaaaatacagttgtacaaattgattttgaaatctaaaaaattacaggtgtgatatctataatttttcctgatctatacttatgcgtcatttgataactaacccagaaaaaatatttacgccggttatagtttgacactaagcttgttgtgcactttataaccagtgcaaaaaggttaacagactttgcttatattttgtgtcggttatcaaatgacgagtaaagttttatgtcatttagtaattgacagttgacactaataaaatactatttgtgtatatacatcgattttgacaattaatgtaaaaaatttatcacttgaaaaatgacaaaaataacctttttttgtagtaaatcctaatgataagagtctgtataacatcaaacacacctctacttaaccacttatgttttcctgatgttcacactttgcacaatttcatgactttatacttatccattcatgattttttcggagagaaactccaattaccatcatggattgcacaatttcttaggtggtgtttgactttttggttaaaggtaatgaaagggaatggaaggaaaataatttttattctattcctttgtttagtagcattttaaagtattggaatattattataatgaaatgtcctttccaccattttggtggaatnnctattctattttgaaatagaaagaaaaattattccaacctaacatgagaaaatatttaatgattattttatcaatttttttatatattttaaattttattccattccattcttattcctattctcactcctatttctattcctatatttttatttcacccaaccaaacgccacctaagttcacataagtaaaattcttacagtatttttgctatatccttagagatgtttgttgctct

SEQ ID NO: 63519 - DNA, 1446 bp, Cannabis sativa
tatatttatatatgttatgtacttacgaacataaggaggtgtgtagtaagtggcagttccagaatctgcatgtgcgactgagtagaagcttaagaacatacccaaaaccaccaacacaaaattacttttcatttttatttccattctcattatattttactatttaactttctaattttttgatgtaaaatctaattaatgagattaatattattttgtaataaggatctatataaagctatttcttcattttatattgggagtgaaagctaaggcggcctaatatcacagactaatattaacatgcatttattaattatacttacgtaagtaaaatgagcatgatcattttcttgttacacatattaattattatggtactaaacttaattacacaaagttgattaacgtaaatagtggtataaatgcaatacttatttttagcggcatacgtatcaaatgtttgtaaaactgtaatgttctctagtttcgtcattaactaatactacatgtttctttcaagacccaataatgatctagaacctgttaggggtgttcatccaatctaatcagcactattttgctcatagtacatccgatccgcactaagtacagattttattttttggattcaatcctatccgcacaatagctcaaatccaatccaatccaatccgcaaaaaaaaatttaattgtatgtataaggaaatgtttacttttatcttaaattgtatgtaaaaaaaatttatatataagaatagaatatatatttgatttattgagttttaaaatataattgtattatatgtagacttttaatttactattatttctttacattataatattgtttgtatatataatttttaatttttttttataaagatgtgttgattggattggatcggttacttttacatgtcaatcaacttccaatccgcacaagtgcgaattttaaattttccaatccaatccaatccgcactttgcgaatgggattggattggatcgtgcgaatatcggctattttatgaatatccctagaatctatgctttatatgtgtcatgtttaagacaataaaatagtctatactgatgaatataggaaactaaatgctactttttttttaaaaaaaaaaaaatcagttctcataacaattttcacatggtattgacacttcaatttgataatcatattccatatactgcactaattcacttagctaaggaaatttggtattacacctctctcatttttttttttgaaacaagtagcatttattaatttatgatattaagaataatattaagttttaaaataaaacaaataaatataatgcatatggccctccatgtgtccatatttatgagttaacagaagtggtagcaacgggtgtaagagaattgtaatatttggtatttaacctccaaaaataaagataagata

SEQ ID NO: 63520 - DNA, 1081 bp, Cannabis sativa
tagaagatcttttcagcgtggtgaatgtgtgaaaacaaaataagtgatctcacctgcatataaactataaaatcacacttgatagaatggcccgcattctcgcaaatactgaccaccccatcaatatgcgagtagagtgaatactaagtatgcgaatagaaaaacatcccaataaatggttaggagtgtcctggtaacctcaacgacatgcgcctttcggcatgaccctgaggtgaagaggagacacccaccatttcaaggagtccaactaaagtcgcaacctgcgaataagtcacgcatctcgggctaagcgatatacctctagaaacggctgggagaaactcagtgactcaaggggcatgcgttctcaagcatgaccttgaagctactgaggtactcccaccgtttcgaggatatctaccagccaaagagtacgctcattagaacattaacgcatgtcgcaaatggctgggtgtatcatagtatctcaagggacatataaccgcatatatgaccattagaatactgtgacacatccaccatttagaagactcagttaatgttctcgcgaccaaattcacagaatacaaaatcctaaagatttaggcgacaatcagaagttattaagtcttgcaaatatgcgagtattcgaagtgttcgtccgaatacccgtgagtattcaaaacatgaagcagtgcctattcaagcatttcttatacagtatgtcattatgccaatttacaggtcatttttctgaaattacccagttttttacctaaaaacgtaacctcatacatatcccctacaaacatttattcttaaaccctctcatgcataggacaaaacccagaagacattgtccccactcaaacagaaagcgaaacacagtggagattcgaaaactaaccttttatttctgataaatttgttcccacgattcgcccttgacagcgctatagaatcaaggaaaagcccacggagaaaggcgaaaaactgggcaatttatggaagtatttttggtggtttctctgaaagagaagaaacaaggaagtttaaggaagttaaagaaaatgagggaaaa

SEQ ID NO: 63521 - DNA, 1036 bp, Cannabis sativa
catcggattcgggttttcgggtatcgggtattgtaaatctacaaccgaacccggtgttcgggtttacgggtgtatcgggattgggtcggttatgttcgggttgggtgtaatcgggttcgggccctattgggctgagcccgaatttttagtttatgggccgaggctatgccactgctgtgggatgggactccgtcggtgaagagaaccagtcaccgactggtgtgggtgagtcggacgagtcgagtgggatggtgagtcatgtgggtgtggtcttgggatggtgggtgaggtgactgggtgtgcccgccgtggtgtgtgggtgtgtggccgtgggtgggagtgggatggtgctgactgtgtgtgtgtgatattacttacttactcaatagtgaatattattaatattaactgaaagtgaagaatgaagattgaagaagaaaagaataatagattagaatatgaatagcctattcattgattgattcatttattaattcattgaaatttgaacatgattaaaaatttaaatgtaatttagttttacagaatagtggaatacaataggcaagacaggtaaatgtaaatgtaattactttaattatttaatgtattaattttttaataaaaaaacagtttttaatttttaatattttgggtcacgggttctaacccgaccaccgaaattaactaatatgtgacgcgaacccgaaacccattacagtcattttcgggttcaacccgacccgactatacggatttttagttggtcggtttttttggcatcggggcggggcgggtcttcgggttttttgagttcgcgggtctaaatgtgcatccctagttacaagggatggtttcccttttgattacaatgaataaaatagtaaacaatattaattccataattgcaattcaagaaataggaaactaaattatgttgccttttttccctaactccatcccacaattatagggattgtcttcgcgtttggacacgtcgagattattctttgatgttgccatcttccatatgtag

SEQ ID NO: 63522 - DNA, 1297 bp, Cannabis sativa
aaactgatgaagtcatttcatttgttccattaaacttgtccacctcgaatcttgcagcaaccatttaactcaaacagtttctagatgtttgaagatcaatcttggaggtttgaatgtggatcttgaaacctcttcttgacaccttgctctgctaccatttgtggtgaatcaaaatcacccttaattcacaatattgctcagctaatagtggcaagattgaatccaaaaacaatgacaacaatgataagaaacataaaaccgaaaaattggagatagttcaagagtaaagaacataaaacttaaaatgaatacttagaaaagattagcaaactcacaaccacttttattccttgatgatcatttgaattacatggagaatagcttgaattcaaaagtacatgtttgagagaaaattgtacaagaataagttacaatagaacctcactttagtcacctcaatagaaacatgagggagactttaacagcccctcaatctctctaaaaagaaactctctagtgttatgaatgcatgtacaaatgaattacaaaagcctttgttgatcgtgtagggtggctgccttttatattggttataaaagcttaacttgactggtttagctccaaccgaatcaactgttattttttgccagctaggataggtagttagctgacatggcagggagagagtgagtaaactccaccacaatagtagtaccatcacaatggaaaataattgtgattatatgcttcaaattatttagtctcgtaatttatcagttcaccaaatttacactgatgtgataatcagcgatgtggtttacttacacttagataagtggaatgtcttttccaatgcattactaatgtaactttgtatcagatatattggctatacatcagactagaccgatattgatagtagaaaagatactataaacttatcgttatatcttttctaattgaatatcacttagttaatcataaatcaattgatctcaatcctgagatggctaagttctagcttaattgtactatatgggttctttgacttgttcgttactagcttacccgtaggactagctcatacttatgtcttgggaattcggtagtacaattgacctggagcgttaatcatagatatagaatctataacttctataactatttagatttgaaaggatgattttctttgagtttggcaaaacacgataaatgataaagcactcattttaataattatattagtttttccaaatatcatttacaaagagcttagtgttttaagaataaaatacat

SEQ ID NO: 63523 - DNA, 1276 bp, Cannabis sativa
tgttccatccctctctctcccctttactccccattcaaccaagggagctccccgctccctccctctctctccccccattcaaccaagggagctccccgctccctccctctctctctctctttcctccccatccagctaagggagctctacgctcccattactccccacatgtaccaagggagctcccctctcccaacacttagtcaaattaccaagtgttaccccctctcccaacactcagtcaaataacctataggtggtgatggaaagaataccaaatggtcgtacgactaagggtgagcccgttaaagctagcacgcctctaacaaagtttggagagagaatatggttgtacaacgaatataacaagtacaagcagtggagatatcaccaaactagtacaattcactctaattggggtagtttggcataaaaataacatcataatgtcaagagcaatatttggcgcctaagtgaccatgcgctcaggtggtgcatcagtcaccactcgagtgaccactgtgtgcttaatgaggcaactaaggaatttacgttagcaatttcccaatatcacattggcaatccaatatatgccaaggatgaataattattaagaattctcactcaaatgaaccaaaaatctcacctactcattggtttctaggattgatacacactacaacatttcttatgcatatttcacttgataaaatttgaattacatgattttgagtgcattagaaagcccttttgattttctttcgatttatgtctcacaatgatattgaaattcaaaatcattcccataaaaaattgagttataaggagaagttagaatttaggctatcaaagcttcgaaattcaatcaatggaccttgttcaatcttagaaccaatggtcctcattccaaccaagatggatgaatctcaaccattcatcaataaacaagatcaatggacaatattcacctgagaagatctaaggtcaccaatccaatggtgtgcccttattcatcgacttagataaaagagaatattcttgatatttaaatcactactaaaaaacttggaattttcaatagttttacaccgtcaagtaaatatttcttgatggtctataaaaccgtcccctatacaagctttgtgaatacttgatagaataggtgacgatagaaaaatatcagtataaaagaatactagactgtttaaaatcgtcggctatagtcgatactataggtcatgatttaaaaccatcgctatagtggattgccccaaaa

SEQ ID NO: 63524 - DNA, 1580 bp, Cannabis sativa
tcaatatccattcattctattttcggtctaataacaatgaccgatatactatttcaattcattcttgaaatttaggggaagttatggcttagatatgtatagagaatttttattttgttgggggtttatttattattaaaaaatatttatatatatatattataattacttttactatatttatttaattttgtggaaacttttttactattttaatctataattatcgaattaaaagaaatttaatttaattttttaaaaaacaatatttttattaataggagctgtatctccacaattattcaagtgggtacgtatgttcctgtatacatataaatattaatagacacacaaacagtatgtaataaataacatgttaatttgtttgggaagaatacgttttacgtgcaagtttatatttgtatatatcattatatatttctttaattattatatgtttacattgtatatgacaataaaggggtctaatcataatcataatagtaataagtctaattactgataaaaagctttatttgcagtgttcataattaaacttttggttagtacttgatttacttctaattagaggtgaagtaatatattcatcccaccaaacatcgaaaaaggtaaataataaaaagttaaataacgatcacaccggtcatgatcttacatctatatatatatatatatatatatttatatatataatatattcgtgtgtgaattataaataactttgaaaaaagttaaccataatcatgcatatacatataaatataaatatatatacatataagttgtcaacaatttcacgataaaaagtggttttgatatattaattagctgggaacagagagtatgagatgcttcttgaacctataatattatatatataatctaatactcttttgagtgagatctttactttaagatacctttttacataatttttaatttttatacttaataattttttcttgctctataagtcaggtgattaaactccattttgcacatgactaatcatttttaccatacaaaaagttaatattaattatttggctataatataattagcaaatatatatattttttctagtatatatatgtttccttcaaagtatatgaatatatgtagtctaattccttgtatgtacgatatgacttaattttttttttatttatattaaggataccttatatttgttactttatctttttaataataatattttatatttgtacatatttggtatttaaagtaaaattaatacaatttaatcaaattaattaaatagttctcaattatatgtaattaaataattatatttaaatgagaatgcataaaattttaaacagtttgattatattgataaaattttattaattttttttttttaagtttaaggtactaaatatgtatgatttttaaaatacagagtaataccaaataaatattattaaaatcacaaaatatttaacttgcatttaaataaaacacacggtactaaatatatatgcatcctttacattatcactgtcttggtgacactttttgaatcatatatcatata

SEQ ID NO: 63525 - DNA, 1060 bp, Cannabis sativa
aaatgttgaaagggagtgtgtgtgagtgtgaccactggggcacaacctttagaaaacaatggcttttatctgtcttgtcatatgagcaattctgtggaggacaatccctactctattatatgccttgttttagggatacccaaggtgattattttcaactagatggaccatgcatacattcattcatcgactttgatgtgataattctcttaagcctcctaccaatctatttttgcacttaagttgacattaaccactacttaacctggactttcatccccatttcaattctcaacttctgactgtttagcaataataatcctttgaaacttgatcccaattttgtaattgggactctttttgagaagagaatatgaactacccccacaaattcattgcagcctcacatggataggaagttttatcagtattgatgttgaagcaaaggaaaggaagccatcaatggaattaaagctttaagatttggcaatccccatactttgtccacctattagctactactacttgtatagtagtccccaaattgatgacatttttttcttcatgctagtttgcactttgggctagcgtaaaagtgtaccactacactgtcaaccgaacccattaaagtgttatgtgaaaaaagcaccatagtgcgtctatgtattgtattattgtacaggtgtaagtaaatacgaccacccactaattcctttttttttaattttttttggacaaaactatttctttctttctttctttcctttttccttttcattacacataccattttttgttttttgttgcatttaataatttggggaaaattaaattgcttcgaaaaggttttatgaagattagtaggctcccctattattaattagataaacttattgtttcgttcgttggaacttttatagataaatttactctgcattcatttgaaattttatttagagatttttctagtttgacataattgcaattatagtcttcgttagagatttgccgacccatttttatttcaatgatttccctttgagacacgttaggcggtgct

SEQ ID NO: 63526 - DNA, 1669 bp, Cannabis sativa
  modified_base (56)..(72): a, c, t, g, unknown or other
tcactctattatttaatactaataattaattaatttcttttatattattattattnnnnnnnnnnnnnnnnntattattattattttaataatttagtgacctttaataaggaaagttagctaatattcaatattgtggattcttaagccttatttactaaaaaatcttcaaataaggtttcttacatgcaatttttttttattgactgcaatatttttattttgatatatagtgaaacttagagattaaatattatgaacacattggacatataaaattaaggttttaaatatatttgattgtacaattaattaatcaaataatactaattttttaccacaatttgtatgactctattagtatggctttcgataaatattaacaactttctttattaagggtcactaaattattcaaaaaaagaaataaaaataatataaaaagaatttattaattattaatataaaataatagtttgacaaataatgaaaaaaaaaaatgtctttattatgtacagacattttttgtgactctacttaaaaacattaaacacataaacacataggacaatcttagtatatcatgttttcactgtgagatgcatgagaatacaattgtctgagatttctatgtataacatgttattcactaatgcatgagcatgctattaatcaactattaatgaatatttatttaaaagacaataaataaaaaataatgatgaaccaggtaataatttggtattcctaattttacaacttttagaaaaattagaaaataaagtacaaacctaatctacatcactgcaatgacatttttgtaattgtgtagggtctttgtaagcctcaaaattaagtaagaaattttaattatttatttttaaataaaattttcatttaatatgtctttttaaactcttttaattaattaaaaaaaataattaattattcttaaatataccctttatttaaaacaacattattatcatattaattttgtcttaaaatagtaacatttattactttaattgggttaagaaaatttttgtcttaatatggttatagatttgagttcgaatttcaaacctaaaatcaattatatttattcaattcaaaattaaattttaaaaataaatattccacaacactttattattgtcttaattattaaaaataataaaattattttatcatattattattaaataattaagatagttattaatttgaatttgaattttaaataaataactatgatattaatttgaaattcaaatctaaataaatatacaatcgggttcaggtcaacgggatagtgccagccaccaccatacaccatcatggtcggcggctttgacagccaccatggcctacgatggccatgaaggccacaaagaaaaccaggccgcacgaacaagtaggtcaaagacccaagttaaggaggcttcgcatgagccgtatgggacttatgtcccattgcatgcatggcttgcatgcggacgtcctgtcgttgccggtaaggccttgtggcaggcgtccttttcccgtgatagtcacgggatggtggtccagacagtaaggtagtcaaactaccaaggagaaggagcggcgatccaatttccattaatgtcgaccattgacgtgatcttcaggaccaaaatcccttgct

SEQ ID NO: 63527 - DNA, 1143 bp, Cannabis sativa
agaaaattacataaaagtaatagagaaatataattaaaacaacaacaaattaattagagtacaacataaacgactgtattttctgtaagtaaaatcataaaaattattaatatatttaaaattttgtacgaccgtatttgtataattttttttattgtttttatctattcatgaaataaacactttagaaaaagaccattccaaatgatcttttgatctaagcctaatgatttcctagctaggttatgtgttgaaacattgtcaattgtcagtacttgaaatgtggcttaaggaaacactaagaaataaagataaagagttttgtactgattgaagaagacgcgaaagggaagatatgtccctccatttatgcttgatcttgttaactaaaacttagcagtccgatttcactgcttctaaagggaagtgcacgacaacacactaggaaagggctgcctgtaaggccttggctttagcatagatgggaattaagactcctgcaaaatgagaacacatgcttgctaccatggtcccattacgatcaataacaatggcacctaacacttgttttcaaagaaaggatatcaagggcatcatccactttcatattaaacatctcaacagaagggagtctagccatgtccatctcttgttggtgcgcaacacggtcaaagggagatggattcactgaattctgatgaaagtgttggttttggacatccctatagtactgcaaaagattagttacaaaaagttccacatccataatcatccagcaaatatcaaaaagaaagggaagttgatcattatttagattgtcaaaagctcttagtagaaagctcttattgtcatagtgtctattgagtagatagaaggaatggagattggtttgtctccatatggtttttgctctggtacactttaggagggtatgagtgacaatttccttcttgccattacaaagggagcaaaaggggtggaaaataattattttttttttttttggaaaaggttaaaagaacaaggcagcacatggtggaaggctttccatataaaatgtttgattttttggaggatttttcatagaccagactaccttctacgagtttttaaaagcatcaagattagatgaggagggatagg

SEQ ID NO: 63528 - DNA, 952 bp, Cannabis sativa
ccccagagaaatcactttagaaacccaaaccgtaaatttaaaaagttaaaaaaatagtatatggggtaattcctctatttcttatatttctttaattaagtagctaaattaagtacagaatttcaaaattttcttttattattcgtcattaaatcaaattcaatggtttaatattttgttttgaataggaatggtaactttattaatcacattgattcaaccattacaatagataaaagatcatttggaatatcatacatactgaaactgcgatctggatacaaacaaaagttacaagcaacacaatgagcaactttgtttacagaacacttaacaaaagataatttgacaaaattcaaagaggctaaatggtacgcttacaatcttgaacgacttaaccaaaagggaaggcatatctaaagagcttaatatagcctgaaccgaagccaatgaatcatttccaagatgaataaccacctaagctttcgagtcaatcaaactcaacggttctttgaacacctccacaaatgtcggttccactaacccagcatgacacaacaaacgagcctcaatcagtttaccagaactatcacgagcaaccataccaatcccaaaccatactaagatggatgttaaggatgagttgttgatctctcacactaaataagtctttaacaatctcttcatcctaaactctagaacccaccaccataaggtttgagataggttatgtaatatcccagaaaataaataatattgaaataggcatattttattaaatatgtaattatgttggtaatgaagtaagattatgatcttagttagggtaactattgagaattcatttaatgaaataaaatattttcgggcccggtaattgtggaaatttagcgatgtggttagaaatgtcacgatgttaatggaagagttattttgagaatatttcggatta

SEQ ID NO: 63529 - DNA, 819 bp, Cannabis sativa
acttgacatccccagtaaaagtaacattagtttgtctagtcatttggaccttgttgagttaggtataagacacagtttggcacatgtggataaaggcaaacgtacatatttacctcctccaactttcacattgtctaaagaagagaaacaagacgtatgcaactcatttgtaaagatgaaagtgctgatggatattcatctaacattcaaaacatagtgtatatggaataattaaagttaatgggtatgaaatcgtatgattgttacacagtaatgtaacaattgcttccaattgccattcgatcagtcctacctaaaaaagttcgagaaattttgacaaaggtttgcatattctttaatcaattgtgtgggaacaaattaaaaatgaagaaaatagattcattgcatcatgacatagttaaaaatctatgcaatcttaaagcaagatctacagtccctctaaattatgatgattggagacatgtagattcaaaactcaataagaaaatatggaaagagacatatgtaagacttaaatgttgtatgtatatatttcaacacatttaatgtaattcttttaataactaattaattccttttatgattttaggatactttcgaacttccagaaacgtataagcctaaactactatcagatgcaggaaaaatgataaacaaattgtgggctttaattatgctccacgtaaataaacacagcttttatttgaaaatcacacagctatgatttaagccgttttgtaggaagtcaacacagacgtggattaagacacgttaccaagggtacctcgctgaggtgtc

SEQ ID NO: 63530 - DNA, 1188 bp, Cannabis sativa
  modified_base (1107)..(1118): a, c, t, g, unknown or other
ttattttaaataaagtaaaaagacctaacataaaactaaatatacgtgccttgcacgtagcttttttctagtatatatatataatctctttgttaaggtaggtgacctggcagcaccaataaccttcattatgtattattttaaattcttattatataaaatttggatcatgtggtcaattcattctatctgatgttttctttggtgattccaagctccttgaagatcatttacaatactaagcatattcttggtaagagtcttttttaccattaaactctttataatttttttttgtaatttttttttttactttgtgactaataattttactttttttattaaaaaaaaataaataactttcatatttgtcaatcattttttaattttttattctgcataataactaataaacaaatacatatgtattaaaaaataaattaatgtacatgcgattttttttcacataaaagaaattattaactaatataccaaataaataaaaaaaaattaaacttaattatgtttatcaccccctctcctctcacataatttaagtaagtactatatcgatcattgttatatttattttatgtatagaacaaatctattagaaatagtattaataatgattacaagtaagatacggtgatgacatcaactttaaatacagtggtaacgagatatacagtgatgatagttgttttgatattatatgatgagttttctatatatttattgccttctttctattaatttagatatctattttgtgtaagtatttagtttttaattttcttcactataatgtacatttaaaaaaatttcgtgattttatatttatattagaaattttatgatattttttttttttgaattatttagagtttcgatataattaatttattatttttttaataaacatatatttttctttttaaaaaaaaaaaatgcataaaaataaattcaaaattatctgataccgattttattgtttaattaatatttatataataatttaattaccgtacgcgaagtgcgcactgtttactagtatatatatctattctatataaagtgtgtctatataactgaattcttggtttnnnnnnnnnnnntgggtgactttttatttatatttaataaaataataaaatattattaatatataataaaataataaaataa

SEQ ID NO: 63531 - DNA, 794 bp, Cannabis sativa
tattttattttatatatttttgttttgattttttttttcttattcatcttcttcaaccaagttcgaccggagcatcaccacaaccgcaaccacatcccgactgccagcattcccaaccaaccccagccagccctagccacccccacttcaaccccgatgttgtcagtcggccaccaaaaatcaagccattttaaaacagtttttttaaagtaaataaaatattcctaaataaaccatatgatatgagtgtgcaaaaccattgaattcgatttctaaaagcaagaagaaaatcaaacaaaatgcagcagaggatgggacatgcttctctctctatctctctatttatattttttttcctgggtttgcgttatctttagctttcaataatggaaagcaacgaaagagacaaaccaaaagtacatatagatgaatcaaattatattttgatgaatagaaattagggaaagaaattagaaaagaaaatatcacaattttataatatgaaataacaaacactacattcttattaaaaaacaacactatattttgggttttttttttttttgtcaaaaacaaacatgcaacaccagtttgtaccagaccaaaatttcaaaatccccaggtcctaaaacccagttctccctcctgtccgatctcatgagcccaccctttctctatctcgtctttatctcttctcgtcgaacagccacgcccaaatctgacgccggccattatcggtcctgcaagcttgaaatgaatccagaaaaatcgcaacccgaaccccgacattccac

SEQ ID NO: 63532 - DNA, 655 bp, Cannabis sativa
agattaaccttgggagaaacaacagcgatttctatggttagacatggggtttttgatttttagtagatacaagcccttactgaactcagcatagccaattatctttcccgattccacatcctgaaaaacacaaattagcattaaacttagcttcacaattaggatctctactccatttgcttactgagagtaaattacaatcaagctagggaaagtaaaggacagaatttaagacaagacttggtgagattgttatggttccgattctgtcaattctcgaacatgaaccatctgctttgcgaacactcttttcattagagcacttgcttaaaaaggaaaatagtgatctatcacctgtcatatggtcaaaagcaccaaaatccacaatccaaggggatgagaggtttaataacctgaagtgaatgtgtagcattgtcttgcgcaactaaaagagatggcttttaaggagatttgttttgccatagagaaagacagtgagaaccattaatgaagtgaacggagagagatgacgctataataacatcgtcggagacgaagaagaaccactaatgaagcaaagcgagagagacaccacagaaaaacatcgccgaagacagccacgtgcatacatgctggtgcatggagaaggcgacag

SEQ ID NO: 63533 - DNA, 1128 bp, Cannabis sativa
tctctcatttttataattttaaattttattttattatttttcctaatattttattaaaaaaatttaaaataaacgtaccaaaatttattttccttaataaaaaaatcatttttcaatttttttttcccaaaatctgatacatatagcttattaatttttatattcaaatattattttttaaaaaaattaatcactcaatcgcacacaacaaacaacaagagtatttatttatttttggtgttttttaaaaatgtctataataattcaacttactattacttttttcttaaaaaaaatatctcatattattctctttttaactcaagtgcatataattcaagtgctatattattattttaggatttcttattttaattcataaatcatagaagtacatgtattagaatttagaagcttcttcttgatagactcaatataaaactaaccatgaaggtatatatttatcaataatattcatttattgataatttagaatacattgaaattatttaatgatatcgtcaattagagcacataaatattaaatatatactatgacatttttttattttatgtgtttcagttgtaactactttatattttttttatgtattatatatatatggattcattaatgtctacacactatacttataatttctatagtttaaaagtaatgaaaaatttcaaatatatttctttttttcttgctgtaccaatttttcttggtctatatttattttattattttataaattaataaatagtaattctaaccacatgcttagagtcatagtggttctggagtgttttctaattgatacattttagaatctatatatctataaagcacaatataaagtagtgacatgatactctaaaatcattccaaatatttttatttagataaaaaatctataggtaaaaacataattataaaatcactccaaatacttttagataaaaaattattattattatattttcttcttttactattctaccttaaatactattcatttatgacttatatatatagggaccggatttcgtcccgttactgtacggacacggatttcaatccgtgatgtactgtaaccgtttgatgggtagttaatttgatccaac

SEQ ID NO: 63534 - DNA, 770 bp, Cannabis sativa
aatgaaacttccaaaaatactttataatgagagaaagtttacaaaaatattagtacacaaagttttttttttacattttatctcaattttttttttatatatttttactataccctttataaaaatactgtgtgtaaagtttcaaattactaaaatactgtatttgggtaaaataaaaaaaaataattcaaaaatattaaaaaataaccctagaactacctaacaaacaattataaaagaaaattttgaatttatatgcatacatttgaggtacattaaatttttgaacacaagcttactaaaattttaaaaaaaaaaataagcacattttattttcagacccataatacccttctctcttctcctcgcttctaacttcactatctatactccctattcccatctatactgatagtagtccgatggggatctgatggtggcccgatactatcaattttttttttatttttttttttatgtttttctacataaaaatagagtagcatcaggtgactatcggaccaccatcataccatttttacatttatagatggtaagctacattcattaagcttgtcatgaaggcatcagaccatatcatcgagctaccatcggaccaccatcgaacattcgtcttcaatctttactcatgttaacaaacaggaaggcaactgtgatgaaactgtaatctaacaattaaatctgttgcgagccaactaacatagaactacaaaacaactaataaattcacatatttaatacaaacgaat

SEQ ID NO: 63535 - DNA, 675 bp, Cannabis sativa
atgactcgagagaatcatacaaaataaaaaagaaacagaaaaagcacgacaaatatatttcaatacacttcgtatataacgagttgaatgaaacttctgaaaacatttttcttgcaaatgaaaataggattgcattttgcaaacctgagcccatgaggcatgagagacataagagaggctcaacaaaatattgtcgatttcataaagacatagaacatacaacagaagaatgttgaaaactgaaagacgagatagagagtttaatctagcatggatattttagacaatatgtaagacaacaaggaaacgaggtagaccagcccagcaaccccattaacccatataaccagagattacaacctcccatattaagggtgaggatatactggtcattttgggagggccgcatctcactggaaacagtaatattacccaggaaagatacatcaatgaaatgaagaatgtacaatcgatgtttgctctagaacaactgaaaagagaaaaattaaatggaaagagtgttggtggataacaagtgttcggtgaatattctttacaaggatacattaaagaaaatgggattacaagatgcaaaattaaagccttgcatggtaagctatatgggttcacaggtgatagagtcgccagcgaaggaatcatggaacatccattaac

SEQ ID NO: 63536 - DNA, 749 bp, Cannabis sativa
  modified_base (522)..(525): a, c, t, g, unknown or other
acctacacatgcaaacaataaatggtttttttctggttttttatggttttgttcgtcgttttagaaggtggaagcgtctaattcacttttcgtccgtacagtataaaagaaataaaaatgaatcatgacagtatttttgtaattcttggcgtgtggtagtataattgtaatatttacccccaaatcagtatttatgtaaaatctcatttactctatgcgactataatgattgcacagtgtaaacctatgatcgttttgcaactataatagttatttatagtcacacaatattattcataatcgtttttgcgattatacaaatttattttgcgaataaaattttttataaaattattttgctaataaaaaatttcaaactttatttatgcaaaacactttaaataaagttgctaaaatttattccaattattattattattgttacaaaatggtgattaaatttatcaaaaattaaagtagcatttggtaacgcttttgttttaaattttttaatcacaaaannnnaagtaaaatttttatttttaaaatttatttttgaaaaataaaaatgcgttttataaccacttttatttttcaattttaaaaacaaaaaacaaaagtgttttgtaaactttatttttcattttcatttgttgattttatttaaatcgggtatgaagtcgggtccgggtccgagttcggtttttaaagtttaagttggagtcggagtcggagtccaaaatattaat

SEQ ID NO: 63537 - DNA, 999 bp, Cannabis sativa
cactaaccaaacgtgatttgtgttttaaaaacttcaaaaattattttttgttctcatttctaaaaataattttttaaaacaaaaaacagaaaacaattccaaacatgctctaatgttttctattttatctcaaaatttttacattacaccatatattaacttctttgaaatacatcactaaaattctatttttttttttcaaattttaatatattttattcattttaaacatataatattaatatttacacatacccccatatgaaaagtaaaattaaaatctacaacaattaataaaaaaatatttagagcaatgaataatattctataaatatagagcatgaatagtaaatttcaaagaatctttaaaatagagaaggagtttagagcatctgatatagcgtgttttcagtttaattctttaaatattttaaaaattctctgtttaaagtatctattgtaagtgttcttaggcctcgtttagtaatttttttttgtttaatggtctatttttagtagttcaatgttataagaaaattctacaatgcacccctaaaaggggtgtatcgacgcactcctatctaaaataattttactacacatttttttaaaaatatttatcactcttttaattaaaaaataaataaactactaatatttgttgcacaaacacatccaaagttttattattatcattttacaaaagttttgaatcaaaattatttttatctgactgcaaaaaaaattatttttatcataaaaaattataaagaatatatacatacatagatccaatatctacatcactgcaagcatataaaagtaacaaatataatgggtaattttactgtaagacccgtagtttgtacctcatagtatggggtagttttttggtcaataactgttatatatttgttatttaacaaatatataatgaagattaaatgtggcatattatatattaatatgagattgatatatattatgtgttggaggtta

SEQ ID NO: 63538 - DNA, 1340 bp, Cannabis sativa
gccaactaaaagccagcaatcatatcatcatgttcaacttcattgttggaggctttgaattcaaatcgaagtgcactttggtgctgaagttgttgaggagaaatcaaaaaatttccagccttagaacatttttcatttgatgctgcatctacacatattttccaaacttctctctctaagattggtgtttcacaatcatcattcatctccgcgcattccacaatgaaatctatgaaggatgaaccttcaattgaaatcttaggttgatattgtatgtcaaattggtttagctccatcgcctattgtaggagccttcctgatgactccggcttttgtagcactttaaggagtgggtggtttgctagtacccttagacatcagcttgaaagtatggtcttaatttttgtgaaaaaatcagtaagcaatacaaaagcttttcaatcatgagatgtttggactctgcacccagcaatctcttactcacgtaataaataggaagttataccttcccttcttctcgcactgaagaggcacttgtagcatgatcggaaactgcaaggtacaggaacaacgactatccctcaattggtttggacaatattggagccttcattagattttcttttagttactcaaaggcttcttcccactaagttatccattcaaacttattgttttctcgaagttcattgaagataggtatgcacttatctgtagatttggagatgaatttacaaatttctacaattcttccacttaacttttgaacattattttgttttctatgtgaaggcatgtctagaagggcattaatcttcaccagttttgcctcaatgcctcgagaactaactataaaacccaagaatttccctaaagaaactctaaaagtgcatttctttgggtttagtttccttccatactcctggatgaaggaaaaagactcttctacatattcatgatcacttatgaagtctttgatttcaccaacatgtcatcaacataaacttccatatttttcccagtacattcttgaacattttgttaaccatccgttggtaggtagctctggcattctttaatccaaagggcatgaccttgtagcaataaattcctttgttagtttgaaagcttgtatgctctcggtgtgccacatggatctttatttgattgtggccagagaatgcatccatgaagctcaaaacttcgtaccttgaggttgcatcgaccatcttttctatttgcagaatggaaagcagtcctttggacaagctttgtttatatccgtgaaatctatgcacattatccatgttccattaggctttgggaccaaaaccagattg

SEQ ID NO: 63539 - DNA, 728 bp, Cannabis sativa
cctacagtaccatcaaaaaataaaaagaaaattcacagctaatttttgaattacaactaattaattaatggatgtcttattattattattacaactaagttctctagctatgcatcatgcattaaagattaccacaatttgatttttgtttattctcagttgaagtgtagaaatatattatatttttaacaagtatacaactcatctatatatatatatatccatatataaatattaattatatatatgttaacatccttcttttttatagagggatgcctccgaatatggccaaaaagttaaatccgtagtgtacaagcttgatagctacgcccacaaaactcaatcgaacataccagtagtcatcactacctagctacctatacatatacttatatacacaattttctagacttaagaataatataattatatatatatatacatatatatgagaatggtaaaaacttaaaacaattctcaaaaaaaaaaaaaatacatgattcttgacaaaataatgtgctaagcagcacactcgtataacagcaatactatataatatacgattttatccggtgatgtacaggaatgtattttgtggtacattatataggtctaaggattacacttaaatcaatctcaaccctcaaatcaaataactctctcagttaccgtacatcacagatacattccgtgaaagtacgggacaaaatcgtatctcataatat

SEQ ID NO: 63540 - DNA, 905 bp, Cannabis sativa
taccatttgagcagtgaaggcactctaattagagaagctagggacctgatgaatccaaagattattcagaaacttgaggaactgaaaagggtggtggagaacaagttcatgtgactttatgtcctaagattcagaaatcaaataaacagtacacagtgattccagacccaagatatgatcataaatagggattaggtgcatgacaactacatttggcttttgaagtgtagagttttgtctcagaaattttgatacacatattggcaccaatgtatatcaaccataaaccttcatcaagaatctttagtagttatagattttccatttccctttaggtaatgcaatgtatatcaggaagtatattatctttctctccacacattttctaaataataaaaaagaaattcacaaacttctaatatttccttcttttttgaataataataatgctttattgtcaagagcaatcattcaacaatacaagattagatgcagaagggatatccccatctacaaacatactatcagctaagctttgagagtttctagcaagataatgagcaacttaatttgcagaacgtttaaaaaagaaacttacactcatcaataatcacaccataagaagactttatacacacagctctaaataatttgtccatgaaaatagtgtaaatttctaatatttctttagtacaatgtataacaggtaatgcaatacatcaaaataattattttttttgacacacttgtttaaaagtaataattgttttaagcatgaaaattagttacaatcacaatccaacttattagcagaattaagtaattaatttttcttgtgaaaaataaactaaaaaggtaaaatgtaatcactgggaaaagacaaacttgattattttattgtatat

SEQ ID NO: 63541 - DNA, 1131 bp, Cannabis sativa
aatattgtatataattttataaaagtatggttgctaatacatgtccgataactcttaaaaaaaacaaataaatacatatcgatctatatctatatctactataaaataagaatggatttcacttttttattgtttttaaatcttttacatttttttattatttttttacaaattatatttttgtacttgttattggcgtccttaattagtagtacccaataattaactagcaattttttatttttactttttacgaataatttttgtactacattattattttttaacaaaatattttttgtatttgttattgtcatcttatggtggtcaataacataataatgtggtacctaataagtagctaagaatttttttaaatttttttatgaataatctttgtactatatattatctttaaaataattttttaaaataattttttatactattattgttatgtagtatcttaaggtacttaatttatcagcaattttctaaacctattattaaattaaaatttgtaaaaactcatattaaaatacaccaataacgatatgctacattttgtggtgcttgacaccttaatgtacccgtaatatttttgttattaatatcatatatgtacatatctttattagctaattgtgttttttttttttttatgaatgatctttgtactctattttttagtaaataatttccggtactattattgatatgtagaaccttaaggtgctcaataccataccgatgtggtatctaataatttgttagcagttttctaaattatttatcaaaataaaatttgtaggaacttatattcaaatgctcaaataacgacatgctatcttttatggtgcttgacaccttaacgtgtctcttaacatttttgttattaatatgtacgcatctttattactttgattagaattttaattttttttttaattatatataagtttgcaagaacatctctaatgagaaatgcataaaaaaaatgtaatatatttggcaaaaaaaaaatactttgtgttgctcctgaattcgcccaaaatacgtggatcagtcgagaggggacacgtggatcagataacttgtaaatatttgttaagtctttgtgcgccacaagga

SEQ ID NO: 63542 - DNA, 695 bp, Cannabis sativa
tcttccgatctgcaaagctcgggagaggtatgctcggacagcacagcacgagtaagaagaagtgatcctggtcgtagaggaaaggaagtttaaaatcccaggggcatgagggcccaccataacattcaacgatgaagatgttgtcaagatcaggtttccccgcaatgaccccctggtcctagaagtccagatagccaacaaaatggtggctagaaccatgatagataaaggagcctcttctaacatcttattcaaaactgcctatgaaaagatggggctacaactcaaggatctagccccttgtctcctgcctgtatatggtttctctggccaaggagtcgcacctctaggacaaattcccccacccctcactgttggacaagcttccataaacttgactatcatgacacagtttctgatattacatgttctgtctgcctttaacgtcatgctaggtcgaccagctttgtatgacttaaaggttgtcacatcgatactccactcgtgcctgaagtttccaacgaagaatggaatagggtgtctgagaggaaaccagcaaacttcttcggaatgttataaccttaaagttgccaaggctaagcaggaagtatactccagccagagcacaaacaagggaaaaaaaattttcaagtagggagtttcccaaggcggggatgaagatgtggatcctcgac

SEQ ID NO: 63543 - DNA, 1049 bp, Cannabis sativa
gcacaacaccgcgcgaagcgcggcctagttccctagttatatatatataaatgaaagcaataattgtatattaatgtattgggtaaatatcggtataagtacctaaagatttatgttggtaagcggcataaagccaatatttatttttagcagtatattaatacagagtctgtactgacaaaattaatgaaaaattacagttatacaaacattgggtacttatgccgcaaaaaataaacattaagtttatactccttacaaactttaaactttaaactttaattacttatgccgctacatttttcttaataaataaaatatagatacacatagaataaaaaaaggggggcaaagggatttgaaacatgagcatcttaacaaatttgttctatttaactactatatatatgtatatgaaagcagcaattgtttattgatatatggggtaaaaagcgatataagtatctaaagttttaagtttgtaaacagcataaagctaatgtgtatttttagcggcatattaacacagagactatactaacgaaattagaaaaaaaattacagtgttataaacattgggtacttatgctgctaaaaataaagattagctttatgccacttacaaaccttaaactttaagaacttatgctcctacatttttcttaataataaaatgtagataaacatagagaaaaaaggacaaggggattcgaaacatgaaagaatcttaataaatttattctatttaactactatatatatatatgaaaccaacagttgtatattaatatattgggtaaattgtgatataagcatgtaaaattttaagtttgtaagcggcataaagtcaatatttatttttagcagtatattaacacagagactatactaaaaaaaattagagaaaatttatagtcttacaaatattttgtagttatgcagctaaaaataaacattgggtttatgcctcttacaaagcttaaattttaggtacttatgctgctatttaccctaatatattttctaatcttagggtaggctttagccct

SEQ ID NO: 63544 - DNA, 2542 bp, Cannabis sativa
  modified_base (32)..(33): a, c, t, g, unknown or other
tgattaacataaataactgctaatttccaaannaactaagcgggctttacagagtatttcgaggagagactaccaaaataacagaaaaactggaaagtacaaagaacacaagagaatatagggttcagtcagatcacggtcttcttagtccactattgcaaatgatttctatttagttattcaacttggatcactcctttatataaaacgcaagtgtcctttcaaatttacataactgatcggttatagaacctttttacaataaataacaatattaaatcagaataaatgtaaaagaataaatgaagatcacattttaatttgttctaataataagtgcagcaactgcgacctatcgggtgcaagctacctgttcatattctcgcacaagctcacaggttttaggtgtgttttatattttcgcacaagctgacatgctttaggtgcattctatattcgtaaaagggctaatgagcctaccattaggatgtttgcattctatctaagtcactttatttgacatcttgtgttgataacgtgggacatgcgagtccctatagagtcgtcaaacactttttgtcattcagactaatcgtaatgtaaagaagcaatctttacctagtcacaggagaagaatacttagtcatcgcatatatttcgatatatgtgcgacttatatgaatcctctcggtcctgcttatactacactacgtaaggcaaagtatgcgactagactcagtcaaggttgcatcatctcgcgagttttgttcaagcgtggttaactcttggagagtcattaattaacaactcatccatcccttgaggattggatccacgtgtcaattctacaggagactgatctcgagtttttaggcaaaaaattcgcactataacacatgctcttagttttgcgattgacagttgtgtcattaggtaaactatcagagagaggctagtgagttattgtcacaagatggtaactcttggttatcttgtcgagggttttgaaaagatagttgtaattattattttatttctccgagatgccacatcatcaagaccctccacggtatgtgcatgcgtgctctttggagaccgttggattgggagaccttaagcattctcttaccacgtgtctacatcccaatgaataataactgttagtatttaaccccctcatacacaaatcaattctcattcttttccctctcattttctaacttcactttcttgcccgaaaattcaaacttaaaaaaattctctgaaggttcgaattcttgtttgtcgaagacgatttcaagagcttgaggattttcaagagtgatctttgagataattacacagaaggttagtttctcctatataactactgtgattattttctctgaacgttcacatgccttctgggtttctactaccgagcagaagaagagaacattcctgaatcctggtggttcgggtcaaaataagaaatttcgtgggaaccaagccaaatgaggacgttagacttactcctatcttgagtgtccgcgttgcaaaaaacatcaccttggggagtgtaatcggagagcttgtttttagtgtgggttggttggacaccttaagaaagactgtcctcaattaaagaaagaagaacctaaacaagaagttaagcctgcttcggcgtgagtatttactatcacgcaagcggatgctgcagccagtccatcagtagttacaggttagcttcttgttaacaactttacttatactattttattcgactctggagctacacactcatatgtagcattgagagtagttaattagttgggtaggcctagtgataccttagaggtggggtttggaactctattacctagtggagagctagctatctccagaaggtgggtcagatatgtgccaattaagattgaagataaggaattgagtgttgatttggtagaattatcgttggttgagtttgacattatactccggatggattttctatccaaatactcagccagtattgattgtgaacaaaaaatggtaatctttcaaccagaagatgaggaaccatttgtttatgtcggatcagtttagggttatcgaatactaagaattacaactttgaaggctagagatcttctatgcagtgggtgcgtgggatttctagcagttgtgattgactcaagtcgacctgaggcatgtgggcctaaggaagtgattgtacgcctaaaaatatgacttccactagcggtggttgtagtatagatcgggcggtcgattccacaaggaggtgattatggacaaaaacgttagtagaaaaataagcacaaaaggttaataaaaggtgaatataggaataaatgattttgtgatttttgttttggtaataaatattaaaagaaaataagtaaaggtgtaatcaatagtaaaagaaagaaaggcttcaagaatcatccatatgcttgtttagctattttgtacccttgattcacaaagttgatatatgatttaacattaaatttaataaatttttgagtatacaagttcttgc

SEQ ID NO: 63545 - DNA, 889 bp, Cannabis sativa
ggtcggttggttttcagattgcaataatccaaactgaaaaccgaattttagattaataatataaatatttttctttagagtaatttgcagcataatttaatgatctggaccaattaatatttgtcacatggcaatttacttaacatttaatagctagatagctacaaaagttacagaattataacttaaatattattattgctaaaaattaaacttaattatttatttgcaatcgagaattaaatttaagtatttattcgtaaattatttatttttttaataattaatccacgtagatgagtgtggggaagaattcattttgataggcctacctagctagtagctagatttcgatttcatatctttcgtcctatcgttctctctcatattctccacttgccttattgcttactctctttacatctcgaatttattcactcttccatcctttcctttctttttccattcctctgatataaaaacttggagtttttgtaagaaaacacaattactgtaatcttactcctttttttttcctttagattttaatttgtatgagattggtttggaagactacaaattagggagcaataactttgtagtcttctcaactagcacggctggtatacacaagtctttacacctataattttgtatgactactgtacaccaagtgataatggaccctgttaaattccacaggggttgttttgtggtaataatcgtacgtatagattggaccatttgatgacttggcattatttgattggattaggatatgagagttggatgtccttttgaaatgaagaaaggacacgtcctttttggattatcataatatggatactccaatattgggctgtgggatatggtgcagagcaccacatga

SEQ ID NO: 63546 - DNA, 597 bp, Cannabis sativa
ttttaagatttactaaaaaaaatacttaatctttctcatttttattttgagagagtatgatttgatagttagtttattaggaagcaaaattgctaattgacaaagacacatcatcatttaaacgaaataatggaacgaaacttaacagaaataactaaatttttgtaaatgtaataattaagggaattcttaacacaccgtatatattttaggggccaaaattaatattgtcgaaagcttcgaagagaatatggttaattattctttatatatcaattaaagaaaaaaaaaatcatttaatttttttgaattaagagaaaatatgtatattgggaagaaaagctattgaatattatggagtaataaatattgactgttgatatctattacgtacctacttaatttatgataaatgtacgttaattaatgtatatagtattcttttccaacatatcgatttcctatgtctattgccttcccttactttttatttattatttttcaaaaaaaaataaaaaacacatatgtattatatatatatatatacataaaccctagctagctagagaaactaaacagtgaccacacaagtaaata

SEQ ID NO: 63547 - DNA, 1600 bp, Cannabis sativa
  modified_base (818)..(825): a, c, t, g, unknown or other
tagtctcgatattatgtgttatatgtttcatatgcttttcttacagagtctgttgactcacagttgctgcattttgatatgcaggtaaaggcttgtcttgaactgattattagtgagtttggagcttagtgaagattgtacatatctcaacggttagacctggagtgttctgatcttcgggacaacatgggctcataagctattatgtatttatctataatatgtaaaacaggatcccaaatttttgtaacattttgtacaatttatattattataaaaaaaattattcaaatcacgatttttattaaaccctttgattagcaaaggttgcactgtaattaagaaagcactgtagcacgcctaaataaatagggtattacactaattatagagaatatgaactaaaaaaactcaaacaacataatctatctatcaatctatatatctatataattttattgtttgggtgggtgaggtggagtttgaactttttcaagaaatccagttttctttttttatttttttcattatttaaatttttttatttttctaattatttttctctattaattcatattcacgtagtgtcttttcattgacatatgaaaaaattattattattaaaaattagagtattctcatatggttcaaatttattctcaaatgtaattattattattttgaatattaatattattaagttacaaaccaaataagaggagtaaataataaaaaatattatataaacataagttacgtataaatattgttatatatcagttacaacttatagtaaatgagaaagttgaaaagacatnnnnnnnnagaagagtatcctcatatggttcacatttatacccaaatgtaattattataattttaaatattaatattattcaattacaaaacaaataagagaagtaaataataaaaaatattatatacagttacctaatatatcaattacaacatataagtgaaaaagttgaaaaaataatattaaataaacataaacatatagtgagtgaatgaatatatatatatatatataatttttttatctatgtttttttattatttttctctattatttcattttcacattaactcatagtactgtcttttcattgacatatgaaaaattattattattaaacagaagagtattttcatatggttcaaatttataccccaaatgtaattgttatgattttgaatattaatattattcagttacaagacaaataagaggagtaaataatgaaaaatattctatacacataagttacatataaatattgtagtatatcaattacaatttataataaatgagaaagttgaaaagacatcctcatatggtgcacatttatacccaaatgtaattattctaattttgaatattaatattattcaattacaaaacaaataagagaagtaaataataaaaaatattatatacatataagttacataatatatcaattacaatatataagtgagcaagttgaaaaaaagttgaaaaaacaatattaaataaacataaacatacagtgagtgaatgaatatatatatatgtcataaatattaataattatgtgga

SEQ ID NO: 63548 - DNA, 1579 bp, Cannabis sativa
tcgacctagtacgtcgcgtacttctttacttagtcaattttcaagttaccttgtgactttgagctaacccgttcttttttattgtcgcagatagaccagatcgacctgcactagacgcgtctcgcagacaataccgctaaagttctcagaagtctccctgttcaagatcgtgactggcgactactgtgcaggaccttaaagttctgggaacacaagctaattccagagaacgcaagccttcaaagggagctagtgtacaaggagtcgtctgagaagaaaaaatagtggatagacaaacgcctttccaagcagacttctcggccaacgtcaggtaacatttcgcatgtataaactagtgcattaaaatctatcattatttgtacttatcttttcctgtcctcgcagagatgactttcctaaagtccacaccggtccgtaaccgcaagccaaagactggaacagcgatgacatcacctgtcgttcctcagaagaggaaaagtgttgttatggctactcctgctgcggattcctccaagaagctagctaaggctacgcaagacaaggggaagaaggtcgtgatcaatctggccatccgagctcgcaacatcttaattcttcaagagaagtttgtgggtgatgagtttatatcaaaggtcgataagacccctactgaagagcttctgcctcgttctacggaattggcttcgcagttcattgctatgtttttgagggcatttgtcactggatccaaggaagtcgaacttgtgaaaagacagaatgttcagcttcaggaagacatcaagaagctaaagcaagatgcgattaccaaggacaaagagctcgaagaactttgcaagtttaaggtgcaagtcgagctcaaagccaagaactctcagatgaagatcgaggagatgtctcgcgacttggaggttgagaaggagaatggaaagaagcagtacgaccaagcggtctctgactatagttataaaactctttccaagattccatacttcgacttctcaatccttggggcggaagcggctgagatggcgaaggatattcgagccatgtcgcccactcagactcaaggctgtggaggaaatcattttcccgaggatgatgatgctgcggacatcgaggaagttgtggacaaggctgccagcaaagtcgcagatggatctactaccccaactgcccctgctgctcctaatgcttaatttttactttaatatttacttttgctagactttttaatgcagtacaagggtactcgcaacttgtacttagacaaatttatgcttatttttcttttgaacaaatttacatcccttcggggatatttatttatactataacatttttgcggtacacatgtactcgcattttttctgtttatagcatctcaattgcggtttaattacagcttggtgtaataagtattaaggtagaaaaatttcaaaatctcaaaaaatttcatgactatttattgatcaatagtaccaagtgagtgggttatataccccctatacttagaatatttatgttaataaattgactaagtataaatacatagcgagta

SEQ ID NO: 63549 - DNA, 716 bp, Cannabis sativa
aatgagaagcggtagtgtgtgttgtaaggattaatttggagcgttggatttagtttatattaacggtgtagatttaatttagtgtctcgatgcggatcgtgatccgtgtgttgacttattgtccaataagaatgtttctttttggcgcgtagttttgggaactaaaacttttggttattcaaaaatatatattttcctctaaattttggttataattgtttaaatgaaatggagtggattggttttttaaagcattcaccaagtgaggaagtataaattataaggtgattcaatgccgcctctttattgatacacccttcacttgtttcggtatccaaaaaaaaaaatttctaatctattttttttcttcatattcatgtacgttataactatttaagataacctacaaaattttaagaaatttcgaataatttacaatatagaaaacaatgttcaaacaacctattttacacgcgtataaaataaaataatcacgcgtgcaatatactatttgaacgtagtttttggcgtattaaacttttccaaattatttaaaattttgcaagatgtcttaaataactataacgtacatgatcctgaaaaaagttttgactaaaagattatttcgagtgctaaaacagataaaggtgcatcaatgtattcattttaagggggtgcattgtagaatttctctaaattatattcttttggttttg

SEQ ID NO: 63550 - DNA, 947 bp, Cannabis sativa
tttttttagtaaaaaaaagccaaaaaaaaaaaaaaaggagaccaaaaattattcatacttattaatagagatatatatatatggatatgattttgtccctgatgtacttttacggaataacttctgtggtatattagatgagtctcgggtacattaaatgagtgtcagagtacgtttctactttttaatcctaattacccttagattaatctcagccgtcagattaaataactacctcatctgacagcttccgtacatcacggattacaatctgtgaaaatacaataacggaacaaaatcatatccctatatatataaattcaaagaaacattttatttcaaaatttaattctagtataatttggaaattaaccaacattattattttttttttattttttattttttgagtcataaccaacattatttttgttcaaacgaaaagcactattataagtcatcgcagctttttcagtcaatgaaactttaaattgtctatttaagatttttttttttttaagaactatgacatatatttattgtattttttaaactacatttataaataaaataatggcatgagtgtttagttacttaccacattaatactacatgtataatttaatattaagaataataaaaataagatatttttaaacaattattaaattaataattaagaaaattacataaaactaaattaaaaaaaatttaaattattttttcaaattaattaacatgacatgaagtggttactggctaagtagtcgtatcatcattttgtacttttgtgaggacaaaagacttacttaactcagtagttaaagtatgctttcatacgaccaaagttattagttcaaattcaataatagatagaacttattagatagtaacgtcaatagtatataatgagttttatactcatttgtttttattgaatttgtata

SEQ ID NO: 63551 - DNA, 940 bp, Cannabis sativa
atattattctaatttatgtacgtacgtatttataaaacctattatctgatctttctaaaaccttaatttcttaaaatttaatcaagtatttgacattaatgttccttagaattgttactatataggtcatgtttgttgtgctactaattattaataatataattataaaagtatatatattatattaaaaaattatttcacaaatacatataaaaacaataaaaacattataaaaatatatttttatagaatatttaaacattcttatgtttttttaattttatttacagaaaatatggtctttgatgtaattttatgttataaattaattgttaatttattattaatttttttgtatttatttattgttattttgatgttgattggatgttatatatttttctactatacttttatgtaattttttttattatttttatgttatttttataaaaaaccataaaatttcttaaaagaaattaattattttacaaatatagaaaaatacaataaaaaagattacaaaaatacggttgtggcttttataaagtttttgtattatttttataaaatattgtaaaaatataaaaaatatatatttaaacgtaaaattataaatattttatgtaattattcttatattaaatataaataatttaatttcaaaccagaatacaaatacgactaattaagaaactcattccatcccaataaaaaatcataacagatgcatgtggaacacaaccatgcctattagctagttaaatcaatttatatatatatatatatatcatgtgtactacgctaaacctaaaactcaattatataaggttacagacttttatgtccttcttatccaaaaactcattggtaggagagagtttggaatcggctatctattctattgtggacaatgtcccacatggaataaatggtagag

SEQ ID NO: 63552 - DNA, 833 bp, Cannabis sativa
gagggaccccaggaaaaggtgtgactatcacaacgatattggtcataccacaaatgaatgcaagaatctaaaagataaaattgaaggcttgatccgattgggccacttgtatgagtggatcaaaaataggctaacacacttgaatctagtccaaactggaggctccatgcctcagggaggaagtgcaattgtgcctaaggggcaggtgcctcccggaggggtgccccacctcagcctaatgggagagtcgctatgatctccgcaggaccgcatattggaggaaccaccaagaatgagctaaagcgctatgctggggccctaaaatatgacgaagaggtatgggaagttactcaaccgatcaccttcaccgagaaagatgcgaagccagtatgtttcctgcaccatgactcacaagtcatagaaactcacattgcaaataaggttgtggccaaaatactgattgataatggaagctccgtgaacttgctattcaaggatgttacggccatcgggctcactgacagggacctttctcctagtaatttgcagctcacatgattcaacgggacgaccctcatcccaatgggaaaggtgcggctcccagttaccttgtgccttgataccccaaaagcaccttcgtggttgtagactgccccactgcctataatgccattctctgcaggctgaccttggtcaattttggaacaattaccttcatttgacacctgtgccttaaattccctacccaggagaccagagtagggacaatgtggaggaaatcaaggagaagcgagatagtgttacaactgttggaagttattttaccaggaact

SEQ ID NO: 63553 - DNA, 777 bp, Cannabis sativa
ctgaacggtcagtcgctcgatccctgatcacaggttctgcctgtgggcaagcggtaggcagccataccgtatctagtaattcgtcaggagaggttatacctaataacttcaccagattaacggttttggccaaatgatcggccaaaccaaccagtcactaagacaacctaatgcatctgtatttaatagactagggatagctcatgatctcagggatgatgtaaatagaaggagatggttatacaaatagtatatcttggtagccactcaacccagggcccatggtcaaaatccagctcaaagagatcctaacgtgaccttggtcggccaagacgtcgaacaagttaatcaatccgtgcaagcacagttggatgaactaaaaaacatgttccaaggtttggctggtcagaagaacaatgacctcgagttcgaccgagcacgtggatcccctttttctccagagatcaatgttctagagttgccccacaagttcaaaatgcagacctggaagatgtatactgggaaagaagatcccttatcaaacctcaaacattttgaaatgcaaatggacctacaaggagtacgaggagatgtatgttgaagagtttttcctgccacactctcagaagtcgcccaccaatggtatttcaagttgacacagagaaggttcaactcttggaaggatttctcctcggaattccatgcacaattctcttcttcttgccaactcccattgcatttagaagacctggtcgaagtaaaataaaggccaggaga

SEQ ID NO: 63554 - DNA, 943 bp, Cannabis sativa
tatacacatatatatatatatttcggtacactgcccctcttaaatatacttctcttttagttatagttataagcgtatgtaaacatatatgggaagattgtttggtgagtgcgtcaatattacttgtatgataacatttttttgttttatatatatagagaaattatgacccttacataataaaccggctcccctgtcattataggtcaccaaaatttttatcttccggcactgggcaagcgtcagccccatacatggtcttacgactttacaaagttgtttcatgccacaaataaattcgaacacttgaaaaatttgttggccagacaaattcacatctcttacaacccacacagttctttgttcttggagcacattaatattatacttaaccatttttaaaaaaatttaaataattcaccgtgtttaaaatagaatttaaatatttaattatatatgtgcctattttattttacaagcactacaaaaaaaaaaaacaataatttttagtgacaaatttttagtcacaatataattttttttatgacttacttttaattagtgacaacaaaaaattacttgttactaaaacatagtatttaagtacaagttgtcactaatttacttttagttacaataagtattgtgactaaaagtacatttagtcacaatcaattatgatttttgtgactaatacctttagtcacgcacaaaaattataatttgttatgactgaatttgttaatttagtcacaatacttattgtgactaaaactaaattggtgataacatgaatctaaaaggtaaattttactcacaagtaattttttgttgtaactaaaattgacatttaatcacacaaaaaattattatgatgtaactaaaaggttgtcactaaaggtagctttttttgtagtgactattaggtaccttaaggtgttga

SEQ ID NO: 63555 - DNA, 3965 bp, Cannabis sativa
  modified_base (3007)..(3008): a, c, t, g, unknown or other
  modified_base (3068)..(3071): a, c, t, g, unknown or other
atggtatctacacattatttccatgacaatttaatatccttttgatacccataacataattggtcacttaattttgcatcacactttataatagcatgtatgtatatttatacatatgtacctacaataggctttttaatccaacaaaaatttctttctccttgttgagaatatgcccacacatatcaaagcagtactcaacatagtgaggaagattatgtagttcaatcgtcatcaaaagaagaattcaggttcagatcttgatcataccctataacagattggatcaagggttagagatcggaacagaaggagtcatattgttctgctaccatcactgtaaggatttcttaatccctaatgtttttatttattgtttttaggaattttatatttaggatgttagattataaaattataatcaacatacatgttagtaaatctagatcttagtcaaataagtttccaacaactagcctcagagccatggtaattatttactttcatgaaatatggatttaaaataattttggattgtttggatgtttcatgttgtgtttatgtgagtttgatgattgaatgtgtttttgtaaatttttttatagaaaataattttataatgtttatgaaattattttatttggatagttggttaaattttaagcaagtttgctttttacagaacttgtttccgataaaaaacaaaaaaaatattaattttggaagttcaaaggtgctggctgcctatgagcatctatctgagcacgaccaaggctgcaatttcccatgtctttgggccattgagcctagggttgtacataaattttcataaatcttccaaacggaaaaaacccgcccaaactaagccgaaaaacccgaccaaaaatataaataaaaaaaaaacttgacaaaattataaactgtccaatttgctaattgggcaagttgaaaatagatccaactcgcccaagtaaactgaaataacccacccaacccgactaattattttctatttttttccttcacatttcacttctattatatataatatattctatctttctatttatctattattatagcttgtagtactaattgcatttatctttacatttatataatttattttggcatataatatgtataggtataataaactataaaactttgccttttattatttttgtcacaagtatatttgattatttatatatatatatatatatgatatgtatgcataaaaatgataagtgatacattttatgaattccttcctactaataattatagtcaaacacttttttatttttgactttataacataaaaaataaaaaaccttttttcgttgggttaacccgaccaatctgtctcggtcggtttaagatttttttttctttatttcagcgagttgtacttagaattttgtaacccaatctttacattgagttaaaaaaatatatagtatagactgaccaaactgaccaacgtacaaccttaattgagcctacataacgcgttttttccttgacacgtccgagatttgcagtctcacatgcatgctttcgcatgcaaatggtatttttaagatattttgagttttataaatcatttttaatgattcaaaagtcaaaatttattaatttttttttgtgtagaattcaaatttcaagttgaaaatagaaatatcagaataaaaataatttttatttattttttaattaataaaagttatttttagatattatgatattttaaacttgaaaaattaatatgctattatttgaaattggttaaaatcaattttatcttttattttaaataatgagattagttatttggagtattagaaatattaagtttaaaataatattttaaactataatattaaatttaaaattatcttatttaatattttaattaaaaagataaaattcaaaacctaaaaatattttaaattagataaccataataatcaactttcaaatttattttatttatttaaattttaagattagaaaaatgataaaagatacatatctttttcctaaaataagatattttatcattttatcttaataaacatttgaataataaaatattattaaaataaaaatttgaattaaaaaaaaataaattgaatttgtaagttaatcaaaattgaatagatattttggttgttgtacaacttgtttttttttcaaattttatgtttgaattgtaatttggttatttttttcaaattgattatttattattttaattataaggtcagatatttttatattgtatttatttatttaatatacgtatatatgaaatggtcttatttgacattaaaataacaataaaatttttaaaataatctagataattttaaaaatctaaccataattatcaactttcaaaatttgattattttattatattttattaatttaagttataagattagataaatgctaattatttactattttattttattagatatttattttttaaaatatttttataataaaataaaattttgatagttatttgatgtttttatttttgaaatagatatttagggttgttacaaccttactaacttttcgaaaagtcgagattattttatttaattaaatataaaataaaataaaatcctttaaccaactatccttaattgttgtatttttgtttatttaaatttttttaataaacttattatttatttaatttaaatagctatgattaactttttgatggatctaatgatccaaattagtcatagttaattgtcaataaatcaattaaataattagtaataggtaatttttcaattttcttttatttgtgtcataaaccttgtaatatgataggatccatccaaattaatatttatgtgaacctatatgtttgatattgggcttaaatacatataggagctcatttaactttagatatttaaatgaacgaggttgctaaaaataaaataatcaccatgatagttttatttaggcccanntagtattgggcttattcaattaataataattatttatttaaaggttaaattcttctcttnnnngccttgtgtgagagttagggggtcgtagtagtaggtgcgacatactgaactcaactctccctcacatgaactatcccaattgtgaaggcacatttcccattattttgaaactaatttagaaaaatatacttagtttaatgaaataaattctaaataattattttttagtaaactaatttgtatgtttatgatatttaattaaataagaaaataaatattaagttgaattctattcaagatacttaattaattatattatatttaattaaatagaaagttatatttaagttaaaaattaattaattttagaacaacttaaattagaatattttaagaatgtattttattttattttaataattatttatttattcaaagaaaacatttttttaatgttagaattttgaaatttaaagtttgaaaattaaattaaagttaaaaattaatttcttaattaattataaatcaacttaaattaaataactttcattaataattaattaaaataaataggttaaaatatattataattagaaaaactaacacttagtttatgaaataaattctagataattaatttctaagcaaactattttgtatttttctacatatttaattaaatagaaaattaatattcaagtttatttattttaagatacttaaatattggataattttttgaggcatttaattaaatgagaaaattatatttatgttgaaaaatttcttaattaattttagatcaacatatattagaataatttttcaagatttattctattttattttaatattaacttgaatttatttttaaaatacattggattttgaattatgattaatatatttataaaaaattaaatttaagttgaaaattaattcttaattaatttt

SEQ ID NO: 63556 - DNA, 1931 bp, Cannabis sativa
  modified_base (800)..(802): a, c, t, g, unknown or other
  modified_base (894)..(902): a, c, t, g, unknown or other
acctgcacttagtattacttctcctctgttacgaattagtgccttatgagacttcccttttgaatcagtgtacataactccaatagcacttggatctgtttattagacaaccacaataataatatttcaaatttgttagtgtaatatttttatttcaacaccaaaatatatataatattaacttaagccaaagatgaggattagtcaatgtgtcaaataagatgtaacaaatgtacaaaaatatttatcagatggatacatttatggatttgatgaaaaaaatgatttcgtaattatgttcatatgacacatattctcatatttttatgtttatttgatatagataatatgtttggtttattgtaatgaaaattatgagttacattagaaaagttatataataattagaattacatcacaaaagattaaataaaataaagctaaaatgattttaatatcttttttatataaatatacaaattaaagtaaaacataattttatcaatttatcatttattttaatatttattctaataataaaataaatatctaaattaattttcattatcattcttattccattattacattattattaatattataattacattctaccaagtcaaacatcacatttatttcaaagttaattagaccaaatttttcccatgtttgactatacatattttggtgagaataggaaatagaaatcataaatttttacttattaatttggttgtaaggagttaatcagggacaaacactataaaaaatctaacttttagtcacaacaaaacttnnnactaaaagtaaaaaaattgtgattaattataaatcattattcatatgttgtgactaaaaaatccgtggttaaaagtattagtcacaaaaatnnnnnnnnnttgtgattaaaactaaattaatgacaacttgtaactaaagactatattttaatcacaaataatattttgtagtgattaaaagtcacatttagtcacaaaaatatatatagtccaaattaaggtggcctttggttgaaagtaatgaaataaaaaaaaaaaattatttcatttctttgtttagttacatttaaaattattgaaatatcattccgatggaatggtctttttattattttggtggaataactattctattttacaataaaaggaaagatcattctaatacaagatttgataaaatttaataatattttttattaatttatttattcatttaaaattttatttcatttcattcatattttaattcttatttttatttttatttttatatttttattcctccaaattaaactaaacgtgacttaaaaattcaatatgaatccaacttttatatgtaaaacaaattaacttatgaatgttccaattccgagcatactaaatgattgaaatgaaaatgatagaatattaagttaaaactttattttatttatccgtacgattttgtttggcagtttgctaatctagcatttttactttggcaatcacacatctttcaatcgatatgtttttttttttggacaaaaaatccaaaaaaattttttgaataaaaaaatccaagacataaaatattaatataggataaataatgacataagtattaaaattttaattaagtttgtaagtgggataaaactaatgtttatttttagcggcacaaatactcaatatttataaaaactgtaatttatttctaattttgtctgtcttatacaggacatacataaggataagattctaaatcattaggtctagacaggatcatgcagaagaaaaatgacagtttttacaaacattattgaatacttatgcagctaaaaataaacattaaattaccctatcaatatattttaattttttgaaaaaaaaaatagtactatagtgtaataaataaataaataaaacaca

SEQ ID NO: 63557 - DNA, 1364 bp, Cannabis sativa
agggggtaaaaatcctaattaatcaataattaaagtatttttgatggagttttaaatttttgatatattgtaatatttttgtattttcgtaataattattttttcctcacaataaatttgatacattataaaaattatactaaatttcacataataaatatatattttgatttacaatcatcctaaacattccattgtaataaaaatcttaatttattaagaattattatttttagcttaaaaaaagatatatttttgtttaacaatttgcggtttgatttttttcttttaagaaattgtgcaattttattcataataattggctaaattaataacatgaaattaaattaagatatctttagaaacataattaggattagggtaaaaaaataattcaaccaatcgagcctgatttgtagatcaaatgaaaaaaattgaatcaaatgaaaaatattacagcatcacagttaataaccttaagaatacttatatttagttttctctaccattcataaaataccaatattattatagtgtattgaaaattaattataaaaattatgtcaagtataacatttgtatatttactcattttcaaataattttttttagagagaataccaattacaatctcttattataattttttagtgaattttctcgatccaaatcacatgtaggaattttttttttcatagtaatatttgttatagttacaatttcatgtttgtaaatgtttgaaaattttgaataatttacaacatgaaaatagagtttctaatgtttaatttaccacgggtgttcaaaaaatttaggatatatttttgacactttaaactattcgaaaattttcaaaaatatatttcgacatgtatttttagacacagagattgactaaaaaattataataggagattcgagatggtttaaagtaagaatcttttcatccaattaaatttgtctaatacattatttgggacacgattttgtctcgtgatacattagatggatctcagttggtacattacgtggtacattagatggatctgagttggtacgttactattttttaccataattacccctagatcaaccccaatccttagatcaaattctctcatctaacggctgtcgtacatcaagaaatacattctctgaaagtatatcagacgagaaaatcgtgtacatacattatttatgtacatatcattatttaaagaatcttaagattaagaacaaatatttgctacagtattatttttgtatatatatacacacatacctgacctaaacaaaatctccttctagggagaagagcttttacatagagaccataaaacctaaacttgttcctttccccaact

SEQ ID NO: 63558 - DNA, 1021 bp, Cannabis sativa
agggcataaaacccaacagagagctcttgcaaaatccttggaaaacttgtccatggatgaggaggagtcagtgacggactttcatgccaagctatgtgacatctctaatgagtcctatgctctggggaaggtatactctaacaagaaactggtgagaaaggttcttggtgccttgccgaaaaaattcatgtcgaaggtcacctcaattgaagaaagtcgcgacattgaagctcttgatcttgatgaattaattggctccctgcagaactatgagatgtctctgaaaaggtggtccaaaggtaagaaacagaaagatcttgaaaaggacaagagtgaaatgggagttgcctttgttcttaaagaggacaccaacaaactgaatgaatcagctgaatgctccatggatgagaactttgcccttcttgcaaaaaactatgctagatttttgaaaaagagctttaagaagagctcaggtgcaggaaaagaaaactcgagtggcaaaaaccagtccagtttcaacaaagctcctcagtctggtgaggaaaaaggaagagggatacaatgtcatgagtgcaaaggatttggtcacatacaggcagagtgtgccaacaccctaaaaaagaagaaggctcttatggtgacttggagtgatagtgatgaagaagagccaagtgatagctctaaagatgataagtccatgattgctttcatagctaaagaatgctccactgtagcgtcagaaccagaggaaactatctcagattcagactctgatggtgctgaaaaaaatagagcctatgaagagatgtttgctcaatggagctacatggctaaaaggatcaaggaacttcaagatctgaacaaggaattggatgccagcaaatcagatcttgaagagaagctaaaaaagctcactatggaactgtgctcaaaggatagtgagatttataagctcactgagatttataaacaatccctctcatgcttgcctccaggaactgcagccttgaatcaagctcta

SEQ ID NO: 63559 - DNA, 996 bp, Cannabis sativa
cggctctgggacctacaagctaaagagaatggatggaaccatggtgcctagggcctggaacgctgatcacctctgaaagtattaccaatagttaggaaatgtaaatttaggctttgttaagaaaatttttacgaaaaagtatatgcaacctccaaattcatgtataaagttgagtgccccaaaaacaattttttcatgccactcatgggggtagtaaggcataccacagggccaaatgtaaaacaagacaaaagtttagcaaagttaagcaaaatatgtatttaagcaaaatatgtattttagcgtaaatgtaaagatgtcctgacccaataacaggtcctaaaaaaacattaagggcctggggacgggcctaaaaattgtctccccgtaaagataataattaaaattgtctgaaaaaagggaaaagaggctgtaaattaaaaaaaaagtgaaaaaaaagatagtgatagtgataaacttgttggcttagtcaatgcggggtggaagacaaggcccccttcgctcctcgagcaaggcatcgagtctcttcttcttctcccagaagcgagcaaggacttcctcaggcttaggataaaaatcgagcttgatgttctgagcgtttgtttgccaggccatgaagacgtcatcgtcgaagcgcttggtgcagtgcttgtaggcaacaggggcgaggagctcatctcttttacccttcttcaaggcttgatctttgaagtccatcagctccttcacctccacggtcaaattggctgttgactacaagtccgcttggtgcagctcctccatggatttcagcctggcggttagctcctccacggcctccttggcttccctcagctcgcgcttggccttggccgcagcctcgccctaaactttcaactcctcctggtgcctctcctccgcctgagcttccctatgctggatttcctcccggaatgctctccgctcagccgccaagtctcgcagactcttcatggc

SEQ ID NO: 63560 - DNA, 678 bp, Cannabis sativa
attagtcctctcacatacttctgtttcttggtgaaatctctgggcaccagatcaccagcaaacttagacagccggtcaaactccagggtgtattcgaccactgacatctttccctgagtaaacttcacaaaatcctccatgtgtgaagttctcacaacgatgttgtaaaacttttcctcaaacaaacttttaaattcttcccaggtcattacactgacatcccgagtttgacccacaatgtcccaccagacgcgggtatggtcttgtagcataaaggctgcacaattcacttgctcagttcccgtcacccccatattatcgagaatacgggtaatagtgctcatccactgctcggcctttattatatcaatacctcccagaaaagtcggaggttgcagcttcacaaactgctcaaataccgatctctatgcagcaaaacgaacccctagttacccaccattggcacaagtgctggtggtaacacttgatcaacaggggcagccggttgccttaatcgtcgcaactcttcttcctgacgaagtatgacacttcgcatttcatgaaacatttgctgccagtcagttgaaggattagcattactaacccccatattatccctcgaattctgcggaggtggggtggtgccagtggattggtttgggcagccccaggctctac

SEQ ID NO: 63561 - DNA, 642 bp, Cannabis sativa
ataataataataattacttatccgcgtctttgatgataatggggtagtcgcggtgttatagagtgataatggagtgtagaatgggaatcttattcgagcccttttaacatttcagaggcctcatctattttttttttatcttgaccgaatgatcttttaaacttcaaaaggacaaacttatttgggggcattatcgtaaacaactactagcaaataatgtcaaagatatgagtgagagtttttattatctcttgatttgttagattttattctttattatttattgtaaatattatgtattatacctatataaaggtcacaaattttacttatcaaattaataaataaaaattatttctttattctattctttatggtatcaaagtcatgaggttcatcttctcctttctcttttctgacatattgatcttcatcttctccgacaaggatggatgacaagacctcttcggcggatgactcaaatattctcattagaggctcttctttcgttgttaactctggttctattcagtctctctagaactcaagattttatttctcaacatcaagctagtagttcctttggatctctctacaaccatgataatggcttgctacacatcacaactcacaagcttgaag

SEQ ID NO: 63562 - DNA, 902 bp, Cannabis sativa
taaggaggttgcacaacctctggatgacagagagctaggggctggctaggcttaggcacctgtggccaagcccgtggctaaccgagatcgaggaggtcgtgcttgacagaaggaacatgtacaagacttgctatgtttttctcaacaccccccgggttcataatgatgaggccatgtagcctttgaatagctcgatcatctttcagagatcggagtggaccgagttctagaaaaggctacagagcctcaagtccttgatcatggagagcagcggaactagtggatctctcccccatcctctatcacaaccctaacacatgacaagatcaaggaaactgtgctggtgggagatgtccgatgcgacaggcctttgagagaccaacgagcacatcgattggccttcaacttgatggcatggtcggagcgccatatagagcagggagcagtgttgcccccacatccttattttagagatattgccatatacttcagggtgtgcccgacttagatcaccccataaggtataaaaatacatttcgacaatgctcattctctatgctaaaatctattctaaagtagaattagataggataattttacttcagccagataggctatcagtggttaggcgacaccaacaacttagctttgtcaaaagttggaggatacaccaggaattacttcattgcatgtgatattccacaagtctgccactacttccagatggtgctgacttacacacgcctcatccccactcaccggatgtgggatagagcttattatatcctgcccttccccatcgataggaggaatatattaaggttggcttgcgaggccaactttcaaaggtatggtctataagtaaataaatccaaaatatattaaatgtggttaatcccact

SEQ ID NO: 63563 - DNA, 1156 bp, Cannabis sativa
  modified_base (698)..(722): a, c, t, g, unknown or other
tcctttccaaatatcatcaaaatcctaaatcaatcctaagtcataatataataaacatactatatgaaaaataactcaaatacttctatataatttctctttaactggcactgaacatgaactttcaagttggcttcacgactatttgccttgatccactcaattttcgccacatacaaaagttttcaagtatcaaaaaggtcgcacaatcccatctataaaataaataaaaaagaaaacaaaagataattcaaatattgaccaataagaaaggaattagaaaagaaaattaacacactcaaaaataagagagaaataattataaatttatgaaaacaaagaaataactaagattataatttacaattgtgtatatacaattaaatatatcaatttgcataaaaataaaggagaatagtagaagatgagagagcgggagagagatatgtatatacaattaaatagatcaatttgtacaaaaaaaaatatgggagagcgattgaaagagagatagaaatatatttttaagtttagaattatgtttataatagttttaatttatagaaaagatagtagattaatttgcacaaaataaaattaaagaaaattaaagaaagttcaggttagatattttagtatttttaaaattaaaaatttatataaaaaaacataacatcataaataataataataataannnnnnnnnnnnnnnnnnnnnnnnnaataataataataataatgttaatgtatattatacatatagtattttttaaaaaagaaatacttgatttatactagatattttttatggaaaatttattaaaataatagtaaaatataaatttgtagatttatgatataataaaatattaaaaatgagagaattaaggagagaagaaaaaaaaaatattggagagattatagagtaccatgtcactgccttatttatgctataataaaattttatagccaaaattcggctaccattttaatggaggacacatgtcaagttaaagagaattaagcatgtaaaggtaataacatttaatgaaataactcattaaatgcggaagtaacataatatatttgcaacttgctgactataaggtcttatgcgagataaaagatatataaattgttgcctcgtgtattaacg

SEQ ID NO: 63564 - DNA, 555 bp, Cannabis sativa
tggctctctagccattgattctgcttcgatcttgtctaccattgaatactactttgctcagttgtttaccagtcagaatcctggcaatgacattattgatagagttttagtcgagatcactgagcatattacagaggttgaaactgctagccttcaagctttgtatactgcgagtgagattcaaaaggctgccttctaattgcccaatgacgaagcacctggaattgatggtttcaatggtgcctttttgttggttttatggtactaaattaggtacacagcggaagagtttcgtagattatcattgtaccatagcccctaggatctccagatgtgtgcacattaaatcaaaacaataaaaataataagtttagagtatatttcttgaagcctatcaaggtattctcgacacttctcgtaagttgtatcccttaatccaattaatgaagaatatgcaatttagactcacatcaatgtcttcaaacacttgtaattgtcgtttcatttgactacgtatcattgcctaaaaatgaggtcaacaaataacatggatga

SEQ ID NO: 63565 - DNA, 2059 bp, Cannabis sativa
ttacatcttaagttaaatttaaaaaataaattaaactcgtaaaaccctaatcatccacacagatgacctgctgttttcattgcttgtgtacacatatatcaaacaataatcttcaaattgatgttgaactctttgatccatgtatcgttgccaaaccatacaataaatttatgctttggggtgatataatatttaaatcgaccccacacatcaccatacacatagattttgtttaggaacaagtaatttgattaggctgccacacattctaattaggctgtagtagaaactttaatgattattattatcatgtttcaactatacatgagtttctcaatttgggcctatgatgtgggtatttctatgttttgttttgaagacttattctcattgttctttcttaattagtgttgctttgtatccttctaatgccaaattatgttatgctgggatgtgtggacaaaaaataagagtgttaaaagaatcaccacttttattaaacaatcaactgtaaaaaccaccacgaaatgtatatgctttattttatttcatgcctgtaataatcttgttactatgctggacacaattggttcattcattatttagagaccaggacactttacgagaattgactatttcttggcaaggactctttattttatttttcttgtgattgggagtagtaaaattgaaggatagtctcttgctcatgcttcaaaggtaaactattatatattgccctttataaattacttccagatctaaatttatgttgaaatactgaaagtggcaaatttgctaattctccgaatgaaagaattctatctcaagatcaatcatataagcacatatgtgtatatatatagtgactacttagatgaaattaataatgactaattattcatatttttcatattttgtgatttcaactaaatagcaggactctaagattgttccaagaagtgtgaagtgttgagagcttgggtctcctaaagatagactgtttagttagttttgtgagatactgagatacatacacaatttctacactgggtcattactttcgttcacatattttccttttttccatttaacatattgttgtaaatttgtaacagtacctttactttctttgcataaaaaaatatatagtttttagtgtaaatatgttaaatatataattatttccttaactaatcttcataataaaataatataataaataaaatcattgtagcgtattcgataatagttttaagataagtaataaagaatattatgaaaattaaaataatgatttcattatacgtgataaagtattatgaaattaaaataataatacatttttaaacttattaaaataatagagtaatacacaataagtattattgtaaattaatccataatatttttagtataagtgaaatagtgtattatgaaaactcataaagataatgtaaatttaaatatattaatgtattaaaataatacttaaaaagtattataaaagagttttcaataatattttagtataagtcataaaatacattataaaagtatcatgacttttaataatatagccttctttaatgttttcaaaagtattatggtagtaagatttttataatacttttttggtattatggaaagcctgttttcaaaagaacataatttttagtttttgggcgtattatcaatatttttaattatcaatattttagtcaacctattttctctctatttttgtctctctaaatggggtttgtgttctgtaccaataaaattattgatgtttttgctttcggatttctcatacctctacacttcttgattgggggaagggggccataggtgagaggctgacactttaacagtcctaacctctctccattgtaatttacttagaaataggagtactatactttgaatagcattgaaaaattgggactcttattcatttatcaattacagtagctgtgtgtgaaactatggctcccgtggagctaatacaaatatgacataacaactaatccagtttgccattgtttattaggctttg

SEQ ID NO: 63566 - DNA, 607 bp, Cannabis sativa
tatatatatagataactaacataaaatcctaaaataacccataataattatttaaaacatatcatttaccctatataccttagcctttcatgctcttattagagcattgctattgggcattagtggtgcccaatatcttttataggtagcaatgcatccaacgatttattagcgatattttttaaaagttaatttcttaagttatatgagactcgatatttaattacatcaaatagcggtatgacattgaggagagtgctagacactagtgatgcattttatcaattctcctcttattattatgaccctatttaagattatattcaagtgttatcgaaaactcaaaaaatacaaaaaagaaacaaaatctttgtgtaaatataaaaaattattctgaaattgttgtcgattttgtctattattatgacacattattgtgccatttatattattgttttaagattatatttaagtatcatcggtaagtataaagattataccaaatcaatggaatgctaaattttgcactattccaatgtatataaatcgaattctaaattttgtgcaacactaagtagatagtgtttttcctctttttttttttttt

SEQ ID NO: 63567 - DNA, 845 bp, Cannabis sativa
aaaaggtgaagaacaaatgccaattaagaccatgcccgagtcaaacccacaaactcagaattaaaaactcaaactcagaaatagaacacagaccacaaacccaaatgcccaaattcaagctcagatctgtaaacattgatagatttttttttaacaaaggttacatattgctcaatgtaaatgttagaaacaaatcacattcagataaaggagaagaacccacaaatgacatactaactctaaaaatcgctaaccctatcgatctgcattccagtatggtggtcctctttggcttgtcgattctcattcccaacacgaaactcgctaactttttcaaccccacatgcttctgacttcgatcctgtggtcactcgctggtggatctcgagtgatgagagatttgggggttcttttaattattttacaatttggatacagagagaaaaaggaagaaaaagaggatgagatgtggtgaaataaggctgttgatggtgaggaggaagaagacgatgacgatgggggtgttcgcaggttgacgtcgatgagggtgaagaacgatgaccccctggttcgcaccccttgttcccagaagacgatgagggagaagaaattgacccctgaatcgcaaaagagaaggaggagaagaatgggattttagtgttctcacttctcagattttctaggtttgtatttaatttaattttaagtgtttatgtttaattatattgtattctcacggttatataggatttttattattaatcaattttgtaggaattagatttaagttttatgtgtttgttaattttgtaatttttttaatttaaaaaataagttttattttt

SEQ ID NO: 63568 - DNA, 908 bp, Cannabis sativa
  modified_base (44)..(66): a, c, t, g, unknown or other
tttatcgttttagaaagtttttatttaggatgttaataaacatnnnnnnnnnnnnnnnnnnnnnnntggtaaaataatatccaacatacaagacctgatatctatatgttgttaaatgttaatcatctcaaccaattcttcattagtcatcgggtaccgcatcttcaagcagcatttcgtattctccaataccttaaaaggactccaggataaggcatgttctgctcttccaactcgttaccaaaattgttagcatatacaaagagaagcttgtctccatcaaatgttcaattatccttctttgctgatgccaattggggggcttgtcaagacactaggcgctctatatctagttattgtgtgttccttaattagtcccttatctcttggaagtcaaagaaagaacaagttgtctctcgttcctcggctgaagccgagtaccgtgccatgccaaatgcaacatctgaaattactccttgctctccttattgattttggcatctatcacaacaaacctccgtacctatattgtgacagcactatagcaatccacattagtgagaatcttgtatatcatgaacgcaccaaatactttgagatcgatttccacttcattcacaagaaagttcaacaaggcactctcaaattgcttcatgtctcattccaacacaacttagcagatatcttcactaaagcattactccacccttttaacgatattgtattcaagataagtgtctctaacatatacactccatcttgaggggggctattagacggctattagacttaatcggtataattagttggattgttggattaaggactcgtttggtacgccgtataagagtcgtattgtattaaatagtaaataacactatgtttggataaagcaatgtattgtatta

SEQ ID NO: 63569 - DNA, 962 bp, Cannabis sativa
cttgaaaaccagattgaataacatgttcaaattaaaatatcttagtgacttaaaatatttccttgggttggaaatatcaagatttgccaaggtaatatttgtgtcacaaaggcactatgctcttcaattgcttgaagacattggatatcttggatccaaacctgtcgatacacctatggaggctaatttgaaatcgagccaagacaacaaggaagatcatctagcaaatcctacactgtacaggaaaatcattggcaagctgcagtacttgacaattactcaaccagatttatcctatgcaatatacaagttaagtcagtttcttgttactcctaaaaccaaccatatgacagcagcacaaagggtattgtaatatgtcaaaggcacacctggacaagacatttttatgtcatctaaagtagacattaaactttaagcttttactgattcggattgggcagcatgtctagatactaggagatcaaccactagcttttgcatctttcgtggaagctcaataatctcatggaaaagcataaagcaacacacaatttcaagatcttcagctgaagctgaataccgtgccatagaaaatactaacttcaatcttgaaagagttgaaagttgagtacaagggaccagtaattttgcattgtgacaacaagactgctcaacacattgcagccaatttaatttatcatgaaaaaaacaaagcacattgaaatagattatcacattataaaagagaaaatttaagagagaatcatcaagactgttcatgtctcaaccaaagatcaaattgcagatttcctaacaaagcctttgtttccaagtcaatttcaaacactcaaagacaagatgagattgcaaaatattcactccacatcttatgggggagtattgtgtggacattgtcccacatggaataaatggtagagaattgagccatatataagaacatg

SEQ ID NO: 63570 - DNA, 510 bp, Cannabis sativa
aaaacctaatatagctttctattttaaataaataatatttatagcctttttaaagtttttgcatttgtttaatgacaaagtaatttggcaacacatttagaatttatactatcaaatcaggtttctatttggctgcaagtttagaggaataacaacaatctttctcttcgaacaatcccaagaattggttaaaagctttttggagtataaatctacctttaaaaattaaaattttcgcatggaaagcactgcacaatgcccttccaacaacgtcaatccttcaccgaaggaaagtcatcgacttgatagcttgctcgatatgcacaaatgcttaagaaccaattgggcatgctattttctgttgttcacaagcaaagtcagcttaaaaaaattcaaatttcactattaattatcaaaaatctcaacactatgtataatggtgattacatagtccatctttccacattacattcctatgctaaattggaacttatcatctatgtcatgtgg

SEQ ID NO: 63571 - DNA, 998 bp, Cannabis sativa
  modified_base (959)..(962): a, c, t, g, unknown or other
tttatgtgcatcctttatcttggtaatcctctcagtaacttgccaaatccaatcctaggaatgacaaatataagatagaatagaaaaactcaggtattgcatcaagtaaagcataaaagaaactgggaagcaaaacttaaataaatgtgcagagaattaaatctccactaaagcatgtgagaccccattacattcaaaagtgactaaaggttattttgcaatcttcctaaattcattaaactccaaagatattgtattagttaatgctcatctatgctatgcttgtaactttaaacattgatgacagaacaacaaatcaatagttcaacaatagtgctaataaaagtctctgtaaacagaaaatatgaaatattgccatgaaagagtatcacgagaaagaagagaatggtgaacactacagtgaaaagattgccgctgaaagaagaagattttgcagcttttatcttcttaaggctttaactttgataattcttaaaactaagaccacaattacaagttctcaaacatacaatttgaaacaaaataaaataactaaaaactcaatcacaaaaaagatcaaacattatggatttctatcaaaagttgatgagtgaatcacaaaatgataaatgaatgagaagagagtcaatagcatgcccaaatcgactcacctgtagcttactccagtaggcccaaatcagttgcaccactaaacccaaatcactacctctctcaatcgcaaagcttccatcctcaattgcaaaatttcctcattcagttgcaaatttatacagtttactttcttcaatccttcttgaatggctaaaattcctcctcaatcgtttaggcctaaaacttctatccttaatcgtaaaaacaaaaaatctataaaagagacaatattaataccagataaatattgctgccatggttggttgagttgagaagctccttagtannnnccaaagcgattctcagagtctccagtgatttcaatt

SEQ ID NO: 63572 - DNA, 782 bp, Cannabis sativa
ttggccgcctaagaaagcaaagaaagaggatatagattggatattgagaatctgaacttgtacatgattataattgttgatagttagtggattgtaagcaacagtaaattataaatggttgtgatgtaagtttggtttagagcaataaaattttcttattcataaaaaaaatatatttttttttttgactaaattattaataatatcaaaatttatttaaattttttttagttaaaagacacatcaattaattaaattcttactgccaagtttttatttttatattaatttcatattattctttacatattctattaatattattcaccactctatgattattttcttttaaaaatctttcatacaaaaacaaaccaaccgtcgtaaaaataatcacaataaaataactacatttatcaagaaacattataatactatttaaaaagtgatttatatataaaatgtcttattataaaaattattaattattaattaatagttcaaaaattctaaattagttgaaatgtaatcttgtagtaaatattaatgttcaaatttattgaattttaagtataattatatcacccaaattattaaaaaaaaatgtatattacctttaaaatataggtcttaaattttgagagatcttaggcaattaccaaagttattttatggttaagaccctgactaattatatatatatatataaaaaaatcaaaatcactattttttatattaaataggcaaaaaggtagtacaagaatgatctatttattaaattg

SEQ ID NO: 63573 - DNA, 873 bp, Cannabis sativa
ttaattgtgaccctagatatatagatatggctaatattattagtgaattttgttgtgtattaggtttggtcatgtcatcatcattaattaatagttcctaccaactaattttgtatatataatttaatattattgtgcatagtatctatcactttttataggtgacgttttataattggttaataatattctttcaaaaatattttttaaattataaaaagtctaatacttaattacaccaacaagaatataacactaaaaaaagtactatacaccaatactttataacattttcaatctaacaagtttatatttgcacaaatgttgataaaaaaaaagtatatgttacaaataaacattgtgttatttaattaatgctttcatttatatatagaaaacaaaattaattaaataattggtgtgaatataaatataagacactttacttttatatgtttttcataaagggctgcattgcaagtttttaattaagtagtcctccttttctttatatgaatcaattaattgacttctttaaccgagaactaagaaactttagatatatttatatttatttttagagatttatatatcttgtatatttattttggtcggctgcttttcgcatgaatttttaattatatttttattattctctctttaattttaagcattaatttccacagtgagtagagtagctaattgccaagatcataaagtaaagtataataaaatagcatactataaccttgttgtggttcctaaattttggattaaagcccttactttttatatatatccaaatcttatcatgaaaatttgtcactaaaaatgccaaaaaaactatacataattattattattataaaaaaa

SEQ ID NO: 63574 - DNA, 1167 bp, Cannabis sativa
tattggagacagttggcattttagaatttcatatactaagttttttttttattattattttgcagcttgagagggtctttctactcatcaactactaataatcctaaggaagtttctcaaaagcttcatcttccaagtcaagtttatgaaaaatatgcacaaaaaggtgaacctaaatttaagctaaccatttctataattaattcaaaatttccataaattatagtatcaaactttaaataggacaaacaaatatataattctatacgcataataaattacagataggattcaaaatttaatgggtgttaaatgcagggacggacgcagtaaaaaaaattagtgttaaaaaaaattaaatatcttctatttaattaaataattatacaataaaatagtaaaaagccccacaaaataattataattttaatgtaaagtaaataatatatatttttataataattaagcccccactgatgaaaaattctgggcccgtcactggttaaatgtgagagttttatttaatggacattaatttagaggtattgagattaatgtaagagtataagataatctcacaaataaatttaaatatgggaccacacaaatatttttttttttttttgaagaaaataatcaaaaactttattaaattttgaactctggtaccaagcaaggcaacaattcagttaggacatcccccatactgaaagtacgatcaagataaaaactagaagctcttgcaaatgaatgagctactgagtttgctgaacgtcttacaaaataaattaaaacattacccaattccataagtaaagctttacactcctgaataactgaaccaaagctagaaatcatggtcaagggtcttcagattgcttgtatgaccaacaagcagtcagattctagtgttacctgctgccagccattggctttgatccaacttaaagcctcacgaaccccaatttcctccgctaactcaggtctaaccacccccaaataaaagcgtgtaacaccctcaattagataaccaaattcattcctagcaacatcaccaaagccatagccttgtgacccttcaaaaactgcagcatcgacataaaccttgacgtcatttgaaacagggggctccactgctcggctccatcaccagcagccagctgagat

SEQ ID NO: 63575 - DNA, 978 bp, Cannabis sativa
  modified_base (941)..(941): a, c, t, g, unknown or other
agggtgagtggtaacaaaagaaactttagcaagcttagacaaattggtagaagcaagataacaatgatattcattcaagtaagatggcttatgaactactcttcctgatctggtatgagaaaaattgttaggtaccaaatcgggtgtaccaggcagatcagtaggagcagtagcagccggctcaacaagttcaggttgagacaactcacctgatggagaaacagtagcagatggatgcaaatatggatctgaaaaatgagtagatgagttgagagaagaaatgtcacctgaaacaatacttggtgcaggagaattcatctgttctgcagcagcaggtgtacaatctggtgcaacaacagatgaataatctgccatatctgatgcattgtgtggtgagtgagtgaaaaatgtctcataggcagggggtatacctccagcggaaacaaatggaaaaaatgttctcataaaaacaaacatatcgagaaatgaaaatgagatttttattcaaatcaagcaacttgtaacctttgacacctggaggatatcctaaaaaaatacaaggggttgatctaggtgagaattttgacctagattgactcaaagtggaagcataagctagacacccaaaggctttcaaatggtcataagatggttccttagaatgaagaataacaaatggggtcttatttttgagatttggtgtaggtgtcctattgatcaaataggctgcagtagccacacattctccccaatacaccaaaggaatatatgattgaaaaagtaaagccctagcaacattatgtaaatgctggtgctttctatcaacaacagagttttgttgaggtctttgcacacaagaatgataatgcaaattgccaagtttattgaacaagtctttgaactgtaattcttttgcattatcagacctcatacccttaatngtcttaccaaactgattttgaacaagggtaatgaatt

SEQ ID NO: 63576 - DNA, 1323 bp, Cannabis sativa
ggttctttaagaacttttgagttaaatcaacaaatgaagaaaaagagtaagcaaagtgtcttgaatgagaaaagcaaaggtattgcttttaaaatttctgaaaaatgatgtttctgatgatgaaatggccttattgacaaagaatttttaaaaatacatgaaatttgttagaaataaaaagattttttcaaaaactccaagaggtaacaattcaggtaactatcattctaaaccttttatcactaataataaaaaaggtattcaatgaaaagagtgtgaagcgtatggccatactcaatctgaatgtgtcaataccttaaagaaaaataaaaaaaggttttaatgttaattagagatgactctaaaagtagtgaggatgaaaaagaaaaagttgctttatcaagtgttttgtcaagaggtttgcaggaaaaaaggagaattcaaatgtttgaataacactttgaccgatgtcaatgggaaagaagatggatcaaactcatatgtgttagatcttgatgagaactctatggctgaatcttacaagataatgttcaataagtggttggaaatttgtgctaaaaattgttccttggttaaaatcagttcagatttgtgtcacaacatcaaagatcttgaagaaaaaaataaatgttgtgaatctgaattgattttaaaagagtctgaaattacctctttaactaaggaacttgaaattcttaaaagaaatgtcaaaatactaactccaggttccaacttttttgaaaagattcaaaatttaggtcaaacgagtcatgctagtttaggttatgtttcgactcaatccaaatccaataccaaatttattatggtttctaaagaatctgtctctacgttgcagagttctgttattacagcaaaacacattcaaactttcaaccgaggaggaggcacctcagaatccatggcaaacaggggtgcatcatagagaagaacgtgatgatagccaactaaagctttggagatcaacaagagcgcgaaaagccaaatccaaaatatgctaatgctactgtagctgaagaaaagtttagagaaccagagtcgtatgaagaggcataccaaaactccaagttgctagaagctatgaaagaagaaataagtgtcctagcgaagaattagacttgggagttggtgccaaagctgaaggaagtgaaacccatttcgtgcaaatgggtctacatggtaaaaactcgtcctgactgttcaattgagagatacaaggctcggttagttgctcgaggattctctcaacagtatgggctagattatgacgagacatttagccca

SEQ ID NO: 63577 - DNA, 1115 bp, Cannabis sativa
agtagttagtattaaaatagaaagtttttaataactacactcaattctcgcatgtgaattggagagagtaattggaaccaatcaattacttacacagttacaatacaatgtaattatatggtcatacaaatatgttaaattgtgtaattaccaccaattacacataaattcaattacattatgactttctaaacgtgcatctattgttcggatgtattgatacgccactatctctattttagtatttagtctattttatttatgatagtgtatattataattatttaagaaatcttataaattatcattcccaagaatctaacacaagatggtagttgtacattatcattcccaaaaattaaaatttacatattgaatgtcttctgtaaaataaattatttaaacactattttctatttttatattgtaaattattttaaataaattttattaaatatcttaaataattagaagatatacaattataaaaaaaaaaactaaatatttgtcctcaatgttcaaagtgtatcaatgcaatcttattatatctttagataatttttttttggtaaaacttaacggctgcttttctttatttttgttgaaaaaaaatctgattttattctaattgagaggagattcgagtttataaactttccttaatatgaaaatggttttatttatttatttatttatttttgtttccttagtggaatggttcattggatgtatgtagtcgttttctcaaccttccatatatctttgtaattaaatttaagttttttaaaaaaataaataaaaattgatttgttattaattacttattgtatttttcaatgtgaaaacgaaattgtggtggtggtatacttctcatttctcaatgacaagtcagaacatttttatttccttttctaggagaagtcatcaccattatttttttttttaaatagacatcaccattaataagtatactcacttattctattttggatatatatagagcgagtaaattgcgggataaatacataatgttttagattttatacacttaaatatttaatttttatttttagtggcaaaaatatctaatgttacaattttcttacaccgttact

SEQ ID NO: 63578 - DNA, 1723 bp, Cannabis sativa
ataaaacatatcgtttataacataatttacaattagtcactaaattcttaaacaaaaaccacaagaacttaaaataaaactaatatttacgtggcttgtcacgtaactcgcaattagtataactaaaaatgcctaactaattaagctcattaatttcttcattttcttttatctatatatgcatgtgcatgattttacttttttaatttgtgagttacttataaaacttaattagaatagatgttctttcaacatttcaaaatataaatagttggctaatttatctactaatcatgtaattaatatgcatagaaataaactatatattggataaggattttcactttagtattagttgtcacaatattttttccaatggttatgtggtgaacctatacctatatgatcattaataactttttttttatcttatcatcttgaccaaaacataacctaatttgttataattaaatgatggaaggataagttgctaaaacaaacgagagggttggatcgacctatgaaatataattctttttttttttttttttgattaacaagacttttattccacaaagcacaaggctaaatagcagccacaaggggagctgcttccctaaaaacagacgaaacacaaacacgattcactcgagcgagatgagcaagctaatccgcatacgagttttcagaccgggaaacataaacaacagaccgctgtttataagagtttaacagagacaaacacttagcaaaacttgaataagaaccccaagcataaggtagcgacctatgaaatataattctgaagaaagattgttggcagcggtggagacatttatttggccccctttaaaagaaaatgcgagaatcacgaaggaatcgaaatatcgctactttgagtgttattctcactccaatggaaatcgctttcttgatgagaattaatatgcataagaacacttctcaaaaggtattacttattaatggctatcaaataaatttaactataaatattaattttaaaaatattaaaccattaaattttgatccaatgacgaataataaaaggaaaatttaaatttttatgtttaatttaactacttaattaaaaaaatatcaaaaaaatatatttttttactatacaaaatacttgatttaaactcaactttttttatcttttttttttgtagaaaaactttttttcgtaattttttttctagtcgatggaccaacatcagcctatataatgtaaaaataagagatttttctaattagatagaaaaattaagcataagaattcaaatttttctgatactactcatggataatactcattaaaagtgcacccatatataaatattatgggggaattggtgcatcacttttttttgtgttttcggtacttagtaattgttgacatcgcttttagccaacgatactgagtcaattaaagcaattagaataataaataataagtgtatgtaattatgtagataagaacacatagattcatagaagttcgatcccgtgataatagtaatagcctactcccctttacttatatttaagagaagtatctctgaagatcttcttatgtcgaattactctactcaaaatactctacatctttggatgatatgattctgtacgggcaatcatgcacaggttttccctggttgatctctgctgaagatgtaatcttgataattttaagtagaaattc

SEQ ID NO: 63579 - DNA, 596 bp, Cannabis sativa
  modified_base (206)..(206): a, c, t, g, unknown or other
atttgattgcaaatatattagaaaattctataatgcaatcccataaaaaaatgtattatctgttttggtattcgaaataattttttagttaatttttttcattgttaagtacgttacagttatttaagacattttataaaattttaagtgattcggaaaaatctaacacgtcaaaaatatgattcaaatagtgtgttgcacacgtnactattttattttatacgcatgtgaaatacactatttaagtactactttctcaatttttttgcagatcacccaatatattatacttgattttgttaattttatttgcatacaataaccaatatatacaaacatgtaatagctgtttacgaaaatatataaaagttttgtaaataaaaataatatttttttgtaagatttgcatttatctttgtttttaaaattttttgtgctttttttaaaatttctcaaaaaagattatataattgtcgctcaatgtacaattttgaggaaaaatggtttttttttcacatgtttttctaattataaatggaagaaatcacaaacagattttagggtcaaaataaaatgtgtaatattttttactaata

SEQ ID NO: 63580 - DNA, 771 bp, Cannabis sativa
caatgcaatctcaccaccacttcccaattagatgagtcaatttgtctttctaatgcaatttccaattgtaataagttcactgctaatacagtgcaacactgtaattcccactcagacattgatgaagattctacttctcattccaattatattggtcattctaatatctatatgtctactgtcaatcaagatgtcaatatttggcatcaaaagttaggtcatcctaactcgactctccttagcagaatgcttaagcagctcccacactccggcactataaaagacttgcaattttgtgttgcatgtcaaaaaggaaaatgccataaacaaccttactctttatcccttagaaatgccaaacaactccgtgaactcattcgcagttatttatggggtcaatctcatgaaccctctaaagaaggctttagatattatatccatttcatggatgaccacactagatatatctaaatttttcctttcacacttaaatcccaagcctttgatgtgtttattaaatacaaatgcatggtggaaaagcaatttaatctccctattaaaaatgtgcaagctcattggggtggggaatatagaccctttgcaaggtttctaagagatcaaagaatagggttttaacatccatgtccacatgaccatgaacaaaatggaagagtaaaaagaaaacataggcgaaaagaaaacatagacatataactgaaattggtctcacactcttggctcaatctggcttatctcttgaatactggtggt

SEQ ID NO: 63581 - DNA, 1418 bp, Cannabis sativa
ttaaccaatcataaaacgtcacatttaagtagtgatacgggcaccactaatgcctaataactggctcatatatatcatataaggaataatagtacaaattgttaaaaaattattctaatatataatgtatatagtagcattttaagaaaattatgtcaaaatttaattaatatttatttattattgcaagaaaaagcctaattatatatttcaccttaggcctcctacacgttaagatggccctcgatgtattattaaggatattattgctcaatgtgacttttttaatagtatctctttttgtttttgttctaggatggataatagtgctggtcattcattggttaagctagctttatatttgtctaatgattacgtttggtggtttgatcacgtattcataatttaatttaagttgacattacttaattaatatattttaaacactgttttttcttttgagatttctcccattcgatttacccttgaggttttgatgaggcctattttttttttttaagaaaaaatagaagtattaacatgtaaagtcatctcgttcattgtcaaaaaaaaaaaaaaaaaaccatgtaaagtcatctctattgagaaatataaaacttaaattatatttggtaaaaaaaaattaaagcatactaaatataatttttagtattatattttaatgcaaaaatataaaaaatttgatgtaaaatttaatatttaataatatttttattatgtaaaacaataacaaaatgtaaaaaagtacataatttaatactacagctaaatatgtatataaaaaaaggataaaagtaaataaaaaaaaatattgtattcatagttatgtaaattttgaatcatgctgtattttaatttggctgaatttttattgtgagccaattttagtacaacttttggcacacaattagattaaattttttatgagcatctccaatagagatggaaattggccatttataaaatattgctcgaacttgtaaaaaacttgctttaatggtgtgctaaaaattgatccaaatttaaatcataatatgatataatgtaaaatttctatcataataaatgcactgtatttataattgcttttataccattttttaaaattttattattaagtttagttattgcatctaattataaactatttatatttactttttattgttttttatataaaataataataaaatttaatcttttttttttctgtagtaaaactcccttaaatatcattttatttacaaatctaatacatctgtaaatatggttatttttttattttttatttttttgaaaataaatcttgtgtattataaagaaacaaatcagatatacaagactaaatggaaggcaaagaaccattctagaagaactcattatcaagcccaagaccc

SEQ ID NO: 63582 - DNA, 1767 bp, Cannabis sativa
caaataataaaaagtttacctggatctatagtaaaagaattttgtcttatgtgtgggatctcacaccttaaagcatagtgagggattacataaaccccatatatatattagtaggctttggctgtagtcccattgttaacaattcaagggatggtcctttgacaggtgttgggcaagcattggtctttgtaatattgtcatgtgtactattttgttgatatttattttatttttggtttttaaaaataattgatacttataattgtaggttttgtaaccggatgaagaaaaagacaaaaatttatgagagtatttttggagtttcaaatcacttaatgaagggtaagtttgtatttacacacaaattaaaaattttgtaatttttgtacaatgcataaatttgacatcacatgttggtgaacaaacaacaaaatttaaagaccacttgcacattaaattttgacaagttatcatatttaagatacaatcacttttttatcaaaaaaaaaaaaaaaaagatacaatcacttttttgatgtatgcatttatttttccatgcatggaactagtaaactaatgaactcaaaataataaaaaaaaattatttaacaccctagctaattataagacaaccaatgattatttaaaatttaatattactaaaaaaatataatttctcataatccatatataatgaacatggttaattaggttatccccacgaccccaccttttccaaaaaattattaattaatatttttttcttataatcattggaagaagttctaattaatctttacaaaaaaaaaaaaaaacaggtaattaactatttttaaattttaatgtcaaacatatactaccattgcaattaaacaattttagtcttcacttacaaacaaaattgcctatttaaataaacgagtgcacattagattggtgctaagtaaatgcaaataaactaccgaagaaggtactttgaaatacatttataaagtgcaaaatgaattaaattttttttaatagaaaaagacttaataagcatcaaaataaaaatttagattgtatgatactacataaatgggaatgattgaaaagattcttgtgttgaatcattcacaaagtacccagtgttttcatgattgtttgttgtagtaggaccaaagaaggaagcaagttgactagatgatgcactttgtcctcttgtgtttgggtctcggtttgtgagggcatttatgataatcatgttcaacactagaacacatacgacattttctacttttcttaccatcaaggccaccaagtccctcaccttgacctccatgatgatttcccattcctttcgtttttacaatgactggatctctcacaatatttgggttgttttggtgtcccatgtgtggtacttggactggtgttggtgagcctaagttttgttcaaaggcatctttacagtatgcagtgatgcgtgctatctcttgcttagcaaatatgaaatttgaatttattcttgaagcataaaaatttaacatgtttgtgtcataagtaagagagccatacctttccatttgtgtcagatgttcttggttattggagacaccttgttcgggtggagttgatgatgttgttgccttcttagtccattgtttcaaaatgagtaagggtggcaaacgacttatgttgaagagtttcatggatgtccatatgtgcttgcaaggataaccttctgtttcgaataacaagcaatgtcagaagttgatcttagattaa

SEQ ID NO: 63583 - DNA, 1558 bp, Cannabis sativa
tatattaaataataatgtgtaaaattatgatagtatttttgaatagtatttttaaaaataagagtgcgaaatgaaagagataataaaatattatatttttaaataatgtgaaaaaaaaaaaattatacgtttaaataatagcattgttatttagtggtgtccaacaccttttataagtagcgctttatgattggttagtaatatttcttaaaagttatttttttaaaaagaaatgctaaaagacaccagtgatgcttggcaccctcatatgtattaatattgttattgatctaactaagtatcgagcccagtttaatataataattttttagaagtatcgataactaatctgatatttttagaaatgctaagtaccactaatactcaacaataatattatttcttaaattatatgagatccgacactaatagtatcttttaacaattctccttcacgctctaatagcaatagtcctacaataaattaatactatacaatcaaatgatatttctttcacttatcctttataaaaatggacttatcaattcaatagtatgcttatttggggcagatgaaactttaaattgaagtgtctaactaactatgtttatcaaccaataacaaagtgacacgtacacaatccatatttatatctcctaactaccccctcattaaaacaacatcttcatctatatatatacacaacattttgatcaacattgtatcacacaaaaagaaaacccaatatactttatctcatattttttttctcaccccaaaaaagaaaaacactatggttttgtctagtgaagaagaatcaagcttggtctataaccacaagctttcctcagttgggccgagctatgcaattgggtccaacgaggcccataatgtaagtgggctggacttggccatgaagcttcattatctcaaagtagtttacttctttgatggccaagctattgaagggttaaccaatatgaagattaaggagacattgttctactttctggctgagtattttcacacgtgtggccggttcaggagatcagaattgggccgaccatttctcaagtgtaacgattgtggagcccggtttattgaggcccaatgtgataagaccattgatgagtggcttgagatggacaataaggcccatatgaataagcttcttgtttctcagcaagttattgggcctgaactctctttctctccactagttttttttcaggtaagttttgttttttttaatagaattatatcattttttattgttctattctttttctttttttaatgttgttattgaattattggtttaaatatttcaaataaaaaacactcaatttgtaaataaatttgtaaatatatggaaaagtcgtattccgagtgaggtggcagcacaagattagtcaagctttaaagtttttcttaataaatttagccgcagacataatatttatttaattactaaaattctattatcatattaacatttggtagctataagtgtaataagattgcttatattataagactaagcattactataaggca

SEQ ID NO: 63584 - DNA, 776 bp, Cannabis sativa
  modified_base (613)..(614): a, c, t, g, unknown or other
caatcaaccacccagcaaccttcgattgattgaaacctctgtttgatgcaaccttcggccaatgtaggtgctaaaatctacaatgatcggaatgaacgtttgtgggcaccaacaacctgcgaaataaagacaaaggatgaccgtaaaaaccttgggacaccggggtggtgccggaagaaggcactccgacgctcaagtcaacttatagtgcgaactaaaaaagaaaataagaaatgtaaataaatacttcttgtgtcaatggttatgtgatgatcgacggtcaaaccttggtcaccgaaaatgaaaaagaatacgtcagatcatagagaaatgataagtttagttgtaaaactatagaaagagagtgaatattcgtatatccttcgatagatcccccctcagtcccagtgagggtctatttattatcttaaaaaaacggctacctcttgaaacgtggtccatccctagaaaaacggtcattctccacttttctagggatgagcatcatcttttaggttcgttgacggatgagcatcttcacatcaatgtatcacttagagggttgatcttctcgctccgctatgctagggaagatcgctattttcgtgggttnnttgggaaacttaacatccttcttccttcacgtgtcaaccataacattacactttggggtcaaactttattgtgggctagacattcaaatatgagtatgacctaaaaggcatggattgggcgtagcccatgcgagccattgggcttacgggttccttgtttct

SEQ ID NO: 63585 - DNA, 907 bp, Cannabis sativa
aaaagcatataacaaatcatataatatcgacttgtatctaggcgcccatatacctatttataaggcttaacaaatgagtaagaatattcttaactaagatacgattctgtaccattgtaccaaggtagggtatgaaccgtaccccgagtaatgttaagtgttgtaccacatacaccatgtacctactcgtactagtgctagtaacatcgtaatgtactcttcagacatcgtacactttaccaatgcactctgtaccactaccgtacaagtattggtagtatacgaatcacaacaagcatgcacatatatttcacacatacatacactcacatatatatatatatatcacatgttttacaatattcttacctcgtttctaatttcacgtgagttggtcgacctgaacggaaagtctcgtgctggatggatgccctaatcacacaacataaccaggtaaataactcggcaaaaccctaattcgggaaacccgagcttccaacttaaggttctactattactaaccgaatctacaataccctaagaaacatggaattacccaaccaaggctctgaaatggacatgaatcgaggaaatgaattgcttcagggaatctgccaaaactagttaaccgattttacaagtcctcgcaaaccggttaaccggtttgcaccaggtttccccaaataattccaaacctactcaaaacatgtccaaatcccaccaaactctccggaacacctataaagaccttccacaatataatccaagcaataacagcaagagaaaaactcaaaatccaaaagttccattaaagactcaagtttgagtttccaaacccaaacatgttcgatctattcataatacacaaaaatcagcaaccaggactcaatatcaacttaaaatgaac

SEQ ID NO: 63586 - DNA, 1190 bp, Cannabis sativa
atattattaatttaatttatatttattattatagaaaatttattaaaataatagtaaaatattaatttgtaatttatgctttaaaaaaatgatgctgctactgtggcagctttagcatacaatatttggcagcccgaaatggagctctttgggaaggaaagagtgtgcaaactgctcaaatagtgaataaaacaaaaatagacatcttgtatagaattaaaagtgtttggcctaagaaagttagtgccaaaaacaggtcatggttttaaaagttagaaagaaacacacatatgcatatttgttgatgtatagattatttttaggtctcgcttgagatgctattaagttgtaaagggatgtttggagtaatgataatctcgctgattcatcaaaaaaaaaataaaaaaaatgaaagaattaaggaaaaaaaaaaagaaaaatagttttggagagattttagaacgtcacgtcaccgcctcatacttctcctatattatataattaatgaataaacaaataaataatattaataataattattatttaatgacatgataataataggatataattttaatctaagaattagaattcgagcctcatattcatttaccctattattttaattaaaaaactatttaacctaagcctattgaatacttatataaagaaagagatgaaagttaaaagaaccttaatgactcattctttagctgtcacaaaacaagggaaccaacttctctttttctctttctttgaaaaatttagaattgcctatttctatatgatttagatattggctttctcctctcataaatttcaatcattaacattcattcttagtgagttgtcaaattgcctacactagtcattattgatacacagagtattatagaagactatatagttttctttaaaaatccataattttgcaaatcccaatatatttattaaattctaataattaaaaacacaattaatacgatttgtagtaacagaatggaaatttgttgttacagaacatagatttgtagtaacagaacaaaaaaaatcaaaatataaacacttgacacaagagagttatatgcagtgtcaatattctttcaaacactcctagcctacgggatcacgcctagagaatgaaatcaattagtaaagtatcaaagattacaaaaacaattgacttaaac

SEQ ID NO: 63587 - DNA, 1182 bp, Cannabis sativa
  modified_base (250)..(253): a, c, t, g, unknown or other
agcaaccttagcccaaaattcttttggattaggctggtatacttccctcaacagtaggctatggacaacttgggggtggaaaacaaaatcaggtatatccaaaaaaatgaccaaattgggtgtcacgaaacatagacaacaaattcacagataaagtattctttatattatcaataacagagaaattaatagtacaaatacatttcgatctgtaaaattcagagggactgaatttgtaatcccagacctnnnntttaacaaacatggcaaatataaacaaacatggaaaataaacaagtattcaaactataaaaaaaaaaaaactgaaaaacataaacaccacttcgaacataaaatacaatgatctaaaatcaaattgttacccattgattacctaaaaatgaacagcaaacaactaaaccaaataatattcccaaaagacaacatacataaacggattacactattaaaaaactaaaacaaaatgacaagatacattacaacgaaattgaaatttaaaaatatttaaaaaacttgaaaacacaaacagaacaaaaaagacaacaaaatgaaacaaaattaagactaagcaaactaaaatgcaaaacccacaaaagaacaaataaaattaatcaatacaaattgaagccctaaaaaaccaaacaaaaccaaacgaaatgttaaaatggaaaacctagaatagcactaaccagaaacacaaaatcgagaaaatgaaaaatacaagaaaatctaggaaaaaggggaaaccaaaaagaaactgtaaacaaacctcagttcgaagaccaccaccaacattatcgtttttttcagcaacatcttgagccattttttcttgggcacccacctttgatttcttcttaggaggagctcgcccacgcttagacaatggaggagcaaaatcagagtcatcctcctcaataataggtcgtttacccttgttcttattagctaatgatttcaaacccattttagagcttttcttttgaacaagggagggagatgatgaagaacgggtcacaaccatgtttatacacagattgaaaaacaaaaagaaagagggaaaacgattatgagattgagttactgggagttgaaaaaaaatttgaagaacaaaaataggagggaaaatggatgtgggatcgtggatatggaagttcagca

SEQ ID NO: 63588 - DNA, 1989 bp, Cannabis sativa
  modified_base (1483)..(1485): a, c, t, g, unknown or other
catagccatttgatttttcttcacttcttttctgaatttctttggagtttaatgctggcttaacttctgtcatggtcaaagattctttcccataaagagtggtgtccacaaagtgctcatagctctttggcaatgtgctcagcaacaagattccttgatcctcatcttcgatcttgacacctatgttgctgaggtctaaggttatcttgttaaactcatcaagatgcttcctgagatccttagtttcatccattctcattgtgtacaacttcttctttagatgaagcttattggctagagactttttcaagtatattaaagccaatttctcccataatctcaatgcagtttcttcacttgaaacttccctgagtacttcatctcctaaacttagtagtatggcactgtgtgccttattttgaacttctttaatattcttcttgtcttcttcaagagctgcaagctcttctcgatcaatggcttttaaaattccctgatgcacaaggaaagctttcattttgatactccatagaccaaagttattggtgccattgaatttgtcaactttgaatcatgtggaagtcattgcagatcagttcttgattcttttttgatgtcttgattcaattctttgatgttacccctcgactaagctctgaaaccatttgatgtgcttgattgcttgatcatgtaactcatgcaaaaatcaaaacataaaaccttaacaataaatatttgatcaacaacaaggtaacttcaaaaacacacacagtatacaaaaaccagtaggcaaaacaaataacaagaacaatttgacaagaagaataaagtaaattgaacataagagattacgaggttcgaacagtgtgatgatgaaccacctgtctactcctcgctcagaacagtcccaatggctccaatctttattgagctagaagaaagaattacagttgttgatcaccaatgtgtactgacacaatcactcaagaagcacaacttcaattacaaaacaatctcactagtagcactatcgatcaaacacaaccataggccaatacactactctatcttttctctcttttctctctgttctttcactttgaactagctcaccaaattctgaaaactctatctcacaatacactgtctgcagtaggtaatggctataaatagcctttggttgttgagctcaatactaacactgtctgcagtagttagttaaaaaagttggtgaaattaaaaatatgtttccttacttaaagaccaatcacaacaaaattgaataccacgactctaattaaactatacaaagcaaacaaagatatggtgcgataataaaatatttaattagaagatttatgtaatattggtaggcaatggacatcaatatatatcatatattaatttttaatgatatccttcaattctacattacgcaatgatcttcactatgtattgatataaatttatataaatatatatnnntatatatatatatatttattgaaggatttggaagcaaatagaagtgagtgccatataatatagatggtctattgtccatattaaattgagattttcacagatgtcgaatttgacaattttttttacttttttactgggataattacataagatattatttttattaaaaaaaaaattgtatttttatgtttaaataattttgtttttacatctttatggttttttatagaaacaacacaaaaataataagaaaactacacaaaaataataagaaaactacacaaaaataacatcaaaaagaaaaaataacatacagataacaacaaattaacaagagtacaacataaaaagatcgttttttttttcttgtaaattaaattaaaaaatcgtaaaaatatttataattccgtgaaaccgtatttttgtaacttttttgttgtttttgtgtatttgtgaaataatccctcttttttcttatttatgtttagatttttaaattttttt

SEQ ID NO: 63589 - DNA, 968 bp, Cannabis sativa
taggaaacatctgccagcagctgtcactaactgtatgttggctgcaactgtgtatgagatttgaaaaaatagaaacatgtgtgttttttaagggtgctcgaggtcagtcaattctattgttgctgaagtaaaaaatgtgttgtcttttagattggctaatgttgttaagggaaagaggaacactaatgatcaaaactatttccttaaaatgtttaacttattaaaaagatgattgcaggagcagtttgttactcggctgctgttgtatttgttggttgtgattaatgaaaatttctttttcttgataaaaaaaacataaaataaaattacacatgtatgtaaggaaatatttaaattatttatttggcattgtaaattttcaaaatattcttaatagtttataatgtcaataaaaataaaattccaacaatttattttacacgtatatttaaaataaataatatcatgaataagagactttcgaagtatgcatccagtacttatattgtgcgtatatttttcataatttattaaaaatatgtgtattttattcttaaataattcaattataccgacacatggaaaaaaaaaattaaaattataactattttaagtgttaaaaattcgatagtggtgcgccaatcacacttatttatttttaacttattttaactatttagtggtagccataaataactttattatatagttttgatagtggaataaatggtgtgatttataaaataaaaatacttatttatttatttatttgagaaatttcctatatttttataaaagagtatgttgtaattactaatcctagacaaaaatttagcccgaaagtatcctaaatatcattaattaattatgagtaaattacactctatatcctttttatattggcctcttttatttttaccttcttttttaaaatctatcatttgtacctctttttttgaacattgtac

SEQ ID NO: 63590 - DNA, 940 bp, Cannabis sativa
tcatttggtgttcacttttttcatacttatccaaaaataatttttttgattccttaatgtattataaaatatcaaaccatttggttcaccttgaaatgtgcattttcttattttgtaataaaattcaaataagaaaaaataattatgttatacaaataaggtaaaaagaaactattgtttgtctgtatttttctatttttttccgtttcataataaatattttgaaatgtgaaatgcaaataaggtaaatagagaactgttataatattatgtaattccatatataaactacattttaagacacttaatatgaaacaaaacagaaagagaaattacagacacactatagttttctattttaccttatatgtatttttttaaaaaaaattaaggcagtttatagtttattatatattatggaaagagaaattagagagagactatattccttcttacagaaaggctacagttttcttttattctttatatgaaatgaaactgaaaggaaaattacagatagcctacacttttctttttaccttatatattttataatttaaggcattcatacatttatatagaaggtgaaagaaaaaaatagttgagtagattccttctatttttgttattttattttatttattattttttttgaataaaatagttaaactttaatggcatgtttattacacagtatttagaattggaataaaataatggataaatataacagaataaataaagaataatcggaatcaatatttgtaatatattgtttactaaaaatttcttggaaatagaatgatagtgatttatcttgtttactttatcaagaaacaaaatcgaaatgcttaaattgactaaattacctttttgagttaaattatagtatatggtagttattttgtaagacatcttttaaaaaataaaattgtcatta

SEQ ID NO: 63591 - DNA, 913 bp, Cannabis sativa
aattctcttcctgactggagagtagctagtgtgttttatttatctttaaacttggctaaaaactttcgtttatgttgtttttcctttataagcatagttgtaatgctttggctgatggtgtagctaaatacgctagaatttctagtgatttggcaattttgtatcaaggggagggcaatcccccggtgattcccatcaattttcttaattaatgaactcatgattctttcaaaatatatatatatatatataaatgtgagtttaatgagctaacatttagtttatagaaattgacaatacaacaaaaacttccaaaatactttagtggttctctaatacttaatcttaaaaattttgtacaacaaatcattcaaaaagaaaaacttaaaaaatttcttcttcaatgcaagttttgtatataattaaattatgtgtagcatttcttcatcaactaaattatgttaaaaaatgtacaacatttataggtgtagcaacaccatcgtccttttcccaaggtcttaattcacatatgtttgtataggtgtagcaataaacttgcaaaagtaagatttcatattagcacctaaacagaccttgccacaaaacagcaatgagataataaaagaatatgaattggatactcactttattttttttggtaaatgatactcactttattctaccaacaaaaatgtctaacaaaattatgagggcattttgaacattctcctaagaaactgcggaaaagcattgagttgtaaaatatacatatgcattaattgtgacaatatccccttaaatcatacctatgatcaagaactctgcaattacagtccttaccacacatagagaaaaaacaatattattagcaaacaattaataacatatcaaaattgttgggttttgtgcccta

SEQ ID NO: 63592 - DNA, 922 bp, Cannabis sativa
tattaaatgtgcatttgggaattttacattttttatacttgttagaggcttcgtaatcaattacttattagatttttagttagagttgctgttagatttttcttcattattattgtaacagcttgataaatttacttttaataattttacactatgtgagttattttcgtgtaattgattttattcgatttacctattaatgcttttttttctcttaaggaaaataatatatataaccattttatgatacaattaagagcaattaaaatttcttttttcttgtagggggcaatttaatttaactaaaaattataatttacatgtaatagagtatatatttttaaataagtcactgtcgtattatttttcaagttaggtgtgtaaacttaaaaataatcaacttaataagtcatgtcaattcaagaatgactcaaactcatttaaaaaaaaaatcaaactcatttatttcatgtgggtttcaagtacagttccgttattatattaaatttgtaacaaaacttagtttttgaatatgttaaaaaaaaatttagaagtaactgatgctacaagtggcacaataatttagaatgtgggaattatatatgtcctaattaagatattaatggaatataactagataaatattacaatttaacttattaactacttatgctgctataaaaaatattagatttatattggttacaaatttaaaattttaagtatttatactgcaaatatttcaaaataaaaataatttgctctctaatagtccttagtgtggctgcacatggacatgtttttcaagttttgggttttcatgcttcgagttttacaaaactctataccaaacccgcccaatttggggaccgagtttcctaatttcaagttcgggtgtgttcgagttcgggtggaacagatg

SEQ ID NO: 63593 - DNA, 1280 bp, Cannabis sativa
attttcacaacacttactgcaactatatgtacaaagaacaaagaaataaattcagcaaacttgataccaatacttccaacaacagtatttttaaaaaaacaaaggattgaatacaacaactattttgacaacacctacagaaacacttccaacaactctatgtaaatagatataataataaaatacaacaatcaatttagcaactcttgcagtattacttatagcaactttctaataattgattatagcaaaccttccagcaacatgtgtagaaacactatagcaactatagatctgcaactttaacatcaattcatatgcacaaaatataacaaaaacaattcattaagtgaaacaatcaaattgaactgtgtaaactatactcaaagttaagaacaagatgaaaaataaataaaatttaacacccaaattcatatttacccataatattaataaaagagaattttaagcttttaattacctcaattagaatttaataaggctgtaataatccttcaacttgaatttaatgacctatgctgatattatttgaagggatagaaagctttttttttttttttttttcaataaatctaaatttttctcaaattgttcaaattcttgtcaactttaatgtaattgaagaaaaaaattagaaagttgaacatttgattctttggatttgtcgggagagagagatagcctattttaaattcagtagttccgacaatggatgttgaaatcttgtcggagccaaagagatgatgtcgtgtgaattgtgaagctttagaatagcaggtttttttggaatagtagatttttttttggaatagcaggtttttcttaaaagtatcctatatttacaaataaaatgtcatttaaccgtataaatggaataaatttttgtacaccgtatatttgaataatattttagcaacctgtgtacaattaaaaacagcccaaataaaaaaaactaaatttatatatatataataattttagtaatgataataataatataaatatctttacatataaataatatagtgtatgtgaatataaatatacatcttttttagtttttataataaatattagtttatatatttaaaagtctatactttggatgtattataggaaaaaatgactgacattgaaagttcaaaagaagaaattccatcaacatatggacgaaataaaggagtaataatacccacaggacctattgactttttttttttttaattaagcatttatatattacaatgcataacttggga

SEQ ID NO: 63594 - DNA, 1214 bp, Cannabis sativa
  modified_base (626)..(635): a, c, t, g, unknown or other
  modified_base (1066)..(1079): a, c, t, g, unknown or other
cactagaccagacatttgctatgcagtaggaattgtgaacaggtatcagatgaacccaaaagaggaatattagactacagttaagcatattctgaaatatttaaagactacaaggcattatgtgttagtctataagggtagtgctttaaatcttgtaggctataccgactcagatttctaagcttgtcttgatgacaggaagtctacatctgggatgttattaaatctttggggtggagcagttatagtgtcaagaaatttgtgatatcagactctaccatggaggccgaatacatagctgctactgaggctgctaaggaactggtctggctaagaaagttcttcacaaaacttggtgttgttcttggaatggaaaaaccactagttctactatgtgacaacactggtgctatagccaatagtaaagagcctcgaagccacaagaagagtaaacacattgagaggaaatgccacatcatcagagaatatgtggcaagaggggacgtactagtggaaaaggttgatactgaggacaacctagctaatccattcaccaagattttgacagtcactacatttgaaaagcataggaagaatctaggattaattgaaatgtactgattgtnnnnnnnnnntgcaagtgggagtttgttgagttttgtgtcctaaataaaacttcaatttaatcttctatatttatttatcaattaagaaataaatttatttcattacttgtttaatgtgttattttgttcacatgtttattcatgatcatttgtttaatttataagttcatctaaatccttatcacattgatattcttgattattgtgatgtcaacataataaaaattaatcaagattatcagtgcacaatatttcactgatatgataatctacaatgtagtttacttgcaccttggataagttttatgtcatttccagagcattgctaaagtaagcttggattggatgtatggagtacacattggatgggaccgatattgaacttggataagatatcataaattcactgtaatacctatctaattcaatatcacctagtnnnnnnnnnnnnnnatgatcttaatcctgacataattatgttaaagttcagttgtattatttatgatcttcaatttgctcgttaaagtcgaccaattagatctttttgtgacatacagattaaatacatggtagtttaattgagtggga

SEQ ID NO: 63595 - DNA, 938 bp, Cannabis sativa
attattatatataatttaataaaaagttgaatgattaattcatattattattagataattaattatataataagccggcgcccgtgagaacggaccttatcttgggtttggtttatattaagacttcatccaaaaacggctctcctcatgcttctaattaactctttcattcaacgtgttctaaattgtaattaacactactaacaaattattatttatttacattttaatattcctaatttaataagtattcaactaatcaatattttgtaaaatagattgacacgatttttttgttaactgatctaaaaagattgtaaaccaacagactagatttagacttaaacttatatcgatagtcaaattaattataaatgagtttaacaaagaaaaagaacattgccataacaaaaaatagtggcttaaatacatgaatggtgttttaactataatgaatatcgctaataaaaaatataacgacttaagaactgaaattatagtgcttgtaatcgtcataaattcaatgatttttatagtattataagggcaacttcaatgccaaaaccgaatttagtattaaataaccaccaaaaaagtactattttagcattaattttttttccaactccaaccacaacactaaaaactatatttactatataaataaattatttaattataaaaaactaaaaaaaatgcatggtctacagtgtcccactaatacactatagactctcatcagaataggatgagttttacctctcaatcggagcattttgttggagaaattaactacattatgtgggaaaattaggactcaaagtgtagaattaaaaacatctaaaactttaatcaacacacagttaacaataacaagatttaacaatcacaaacaattaatcagagaaaacaaggatgaacgagagtataagagaacc

SEQ ID NO: 63596 - DNA, 992 bp, Cannabis sativa
tggtaaaataattccaacaagatacaccaagtaatcatcacatgaaatcgcagtggaaaatttacttttaaccaagtataatagaggaacattacctgcgagctatctcggtatttacctagaaagacgatttttaatctttacttttttatttctcagaaggttacttgtatactgcgagctatctcggtatttcagtctgtgttctcgcaatttagtaaaagtacaaagaaggcgccaatctcgatccctgattgaaagactactcaagacttctataattttcacgtgatccctatctagtttagattgagttagtctacctgcgagtacaaataaaggttagtattcgtaagataaaaggaagaaaaaaaatactaagtataaaaatctgcaacatacgagaatggtgattaaagtctatcctaactccaggcaatgaaaacgcataaaaccacttcgatttctaatctctcatattagaaatcatgccttctactctgttaacctgagagttggcccatttactaaagcagtaaaagttgttgtcatggccaacgttcttgatgtcgtagaagtaacaaaaatcctcgatggtagattcccttgcgtgtattccatataaattgcatagaatttgaggacgattctataactgttgggggtgtgctggaaaggagaaacgtcgtaatatatcaaaattgctttgacaaagggatggaaaggaagagcaacaccacaacgaatgatggggactgaaaccacagcgatgctagttaaaataattacagggttggtgaaaggttggtgaggatgttgtgttgacacaggtttcgtacaaccagaaccagtattgatcaaattcatttcttggaacgtcatcaaatcagactttcttactcgcaaaactaaatcctcgcaagaaaatggttcatccaaaggagcatctgttaggttataattagcctatgtttcgggtctttaaagttagc

SEQ ID NO: 63597 - DNA, 736 bp, Cannabis sativa
tattttatataaaatatacatttttaattatattaattttttttttattttttttcaatttatattcctagaaaatataaatataaaaaaaaaaatattttaaatattataacaaaaattatacagaatttaaaaaaaattataaaagattttttttactataaaaatagtaagtgtgattttaaaaaattggcttaagcttaatttttttttaaaaaaaagaaaatttaagtatacttatcatattgtggaagagaaacataatttctattgataatttatatatataaatttatcttatcttgaaccaatttaatcgtgatgaagatacatatatttatatgtatatatgtatattaccttctggaatatcagcagctataacagccagctcagcaagcaaccataaacaatacttgacaaataatgggtactcagctttacataactctgaaagatgcttccctgtacatataatttaaaaattaaattaaatatatatatatttacataattataatgatatcatcttcacctaatttataaattaaacattatcattattgttatttggtcttataaattataaaataataataataataattaaattattacctgtagtgacacctaggttagctgcaagagactggattatgagggcaaagattaatccaataaggattatccataataactgaaacaaaatacatattattactaatcacctcataat

SEQ ID NO: 63598 - DNA, 1241 bp, Cannabis sativa
taagagccatactaccctcccgacctcttttttttcttttcaaatagtgcatgacttcaaaagagaccatgatattgtcagagattagatgacctggaataaacgcactttaagtatcagacattataacatccaacaaccctttcattctattagcaatcaccttattaatcactttgaccaacacattataccaaaaaataggtcgcgaatccccaatcacagaagggttcttcttcttgggaatgagaactacattattagtttcattaagaccctctgagagaacaccacgatcaaaaaaatctcgaaccatcctcaccatatcatgaccaactatctcccaatgtttttggaaaaaagcaagattcataccatccggtcccgagctcttgtctaagtgcatttggaacagagcatgcttcacttcttcttccaacacaggcttgagcaactctaaatttgagcagccaaaacaatactcagcacacactgagccacctccagccaattagcattagaagctgaaaacaaactagaaaaataattcaccaccaattcttataggccatagtcccactacacccaatcaccttgatcatttttcagcttatgaatatgattggtacgacgctgagaacttgtttttgcatgaaaaaatttaatattttgatctacagattgcagccacaactgctttgaccgctgacgccaataaatctccttctcatcaagaatagtaaatagtttcttctaaattaattggaaccgctggctcaaaatcaaatcatttttattgcaaagctttttaagtttaactttacacgcttttatcctttccccaaatttcgttgtaatatccccccaaactcgtagcttatcactacacatatgcaccttctgctgaatattcattaaataaccttcttccaactcttcttgactagctaaaaacacactgggtttaccaatcaagcattctcaaatttaaattgcctcccatttaccactaatgcatatcttttcggttataaaaataggactatgatctgaagataagtcttccaaattataaaatcttgccatatcaaacaaaaaaagccaagctgacgtaactaaagcccgatcaatacaaatttccataaactccaaagtacccctaccaaactcataagtgaactgatgaccaaccattccatatctctgtcgccccacaacttcaagagctttattaaactctt

SEQ ID NO: 63599 - DNA, 961 bp, Cannabis sativa
ttatttttagtctacagttaagtgaattaggagaataatgagtaactaaaagaatactttttggtctagagttagattggtaaatggacttattgtttgatcccttacactaatgggctgctaaggtgtctcttcaattaatctgaaatattaatggagaatagttattaggaagacaatcccaactgatccctcttggccaatgtaaagattaatagagagagagagagagagagagagagagagagaattgaatggactgatcttattgaattgagagaagttgagagtagtatttatagtagtacaagtggttacaagtaaccaattacttaagctaaacaactaattaacagtttaacataatacttaactactctaactaatctttaactaaagagtggttagttgtactacagctccccctcaaacttattcggctttgcaacaggaagtttggctctaagaaaatgaagccttgagcttgggagtggttaaacactctgccaattgatcgattgcttgaacatgttttactttgatgagtggctgaagtatctaacattcttgtttgtaatttgatgcgtggaaaactaattagtaattacatgggaaaataatatatttttagtagttaatgtttaaaataaaaaaaaaaaaattaataattacactcaattcttaaagggccataacaattgaagagtataattagatcccctcaattttcattgtgtaattactgtcaaacaaaataaattgagtaattacctccaaatcaattattcacaaatccaattacactatttcccaaacgagccctttgtattttaattgttgtgcacatccatcctattttattttctcttctcttttcaaaaaatgatgtctatttttcatttattattaatggtcgtacaatgatgaactaatatgtgcaattcttaggaagattcctaat

SEQ ID NO: 63600 - DNA, 621 bp, Cannabis sativa
aaaacaaattatgtatatgccataggatagcaaacctaccctttcgatcttattagcccacattcttctcacaaagccttctaacacaacaagaggagggttggctcctaacacataacacactatcgagggcttccggaaatctacttcatcttgaatgtaatctttcgttatcttcaccttattatcgaagaactcaaaaataaactttggataacagaaccagatctcagaacaggggattagcatccataccttgagatatcttagcagagcaatgctcggatgcctccaagaaatgagcaaaatccttccgaatgtcctcctgctgtacaattgcgcgaagagatgacttaggggagagaggagcaggttcctgaaatctaggaggaatctcccaattatcttctggagagtcttcatcttctacatccgagaattcaatagggcaattcctaaaaccgcatccatggatttagtttttcgagcatcagaagctaaattaggtcccttcttctttgaaatctcagtcaatttcaccttcccacgccctctacctcttgtttttgtcatagctccagcaccaacaccagctgcaaggagtcgagagagagagagaga

SEQ ID NO: 63601 - DNA, 1094 bp, Cannabis sativa
ttggttcagggttgttccaaccgaaattccggttggactgtatcggggaagaccgaattttgttttggccataacttttgacttgaaactccattttaggcgttctttatatcgttggaaagcttgttttgagctctatatgttaatctataaatataatgttaattatgtgattattaaaagtggatttagggattaaccctatttgtgtatctcgaaaattgtgactaggattaccgacacttgattaggagcacctggggatttggaatttcctcgtacttgggacatcaggtaagatagtagttttcacgtagagttaagcgcggtggcgctcatgttttatactatggttgtgattaattaagaagcgggattagggtttttaccctaaaatgaacggttgtatggcctagggtttttaccctagtaattaaagattttgggtgttatgctatgctaaatatgttggaataaggaattatgtgctcaaggcataatgaaattagactcggtaatttagtaccctaagtttaatagaaatgctgtctagggttattaccctagaatttacacgaaggtaagaaagcaacgatgtatagtaacattactaatcaagtgaaagcaagttagggttattaccctcaataggtgttattttgaacatgctataatatgttatatgagtaattatctagtatgcaagttaaggttattatcctaagattttatatattatagcatatattgaaggtacgcatatatgtcaagagttatgtgtataagacataactgggttagacatgaaatttaccatcacgataaacctctgaaagaacgtaatgtatgaattatgtatatatgaatagggttatgcgggcaagacataatcaagttagactcagtaactataaccgagataaaccctactaaggccttattgtaaatagaagtgtgagcataacacgtgggtctatgctacatagacataagagcggaacacgtgagtctatgccacatagacatatataggtgtgtgagcgtaatacgcaggtctatattaaatagacaaatagtgcggtggcaccattaat

SEQ ID NO: 63602 - DNA, 1289 bp, Cannabis sativa
atttatgtcactggaggtcgagctgccaccatgggggaagcggagagaagttgaggtggagaaaaagggctaaattgtggagctaggtcttcacagaatggagaggccaaccttaacttccatttgggccctcaatggactaaggtggcccttcggggccacatcgtgaaagatgagagaccgcagagatgcacaatggttttgctttttcgatgctacaagagcgagaagagttagcgagcgattagcagcgacctcatagtggtgccccaaatcttgctttatatggaactgcgagatgagggagcaagagagagagggcattggtagagagagtgagagtggaagatatggaattagggtttttaggtttagttatataatgttcaatttgttagaaaaagttgacttagtcaaccattttatttttgaagaaaaaaggagtgggttttatccgacattacttttgaagtaattttgataatttcaaaagctataaatatgcttaagcctttgattttaaaaaatacacaaaaatcttattttgtacaaagtttataacatatacaatttacttcctttgaggataaactgttaatggaataaaatttcgtaaaatactatttagagtcattatgctatcatagtgtgatagagttcaggaatatttagtttgccaaaagtataaggtagtgcgtcttgtaactttattatattgtatcctgggagatagacactgttgaaattttctagcaccaacgagagaaggcgaatctattttaaggaaactatgtgctacacaggccttagatattctctaataggaattgcatttatggttaattttctttatctctataaatttgtacagtgtatttaagcatattaatggaagtatagtaattgtaatttatcatcaagtttatgtcaactattctattagtctcgttaaattgtgcaacaatcttaaaaagaactatctttaatataatatttgagaattaaatgtaattttatgatatatgttttatcataaatgtttgaaatatatagttttgatgatataaatatatctattaatatgtgttatactgtggtaaaatatttcggattgtgatatcctatctaaaaagattagctttaaggtctatgatagagtatcctccattacttatttaaagaaccccaggcagttcaaaacaagtgtgggacgagtgatacatttccaaccttcccaattggcctggggattgaacaaactcaaagaaatattcgacgagaggttaaac

SEQ ID NO: 63603 - DNA, 1137 bp, Cannabis sativa
  modified_base (1069)..(1082): a, c, t, g, unknown or other
atgatcctctaaaattatccatcatcacatatcgatgtgcttgatactgtagccatctggagagggtcctttcttgaggaaactcgcctttggttatgtatttgacgatggggtccatccagtttggctttggctcgattgtagccactgtatctttaactttgatgcttggttctatgaggcactcagcgggcaccacccccagtctctcaacctcgctgtctgatgccaacttggccaaacagtctacgtgagcgttattttctctgggattctttccacactgtactcggtgaattcatggagcaactctcggataatagctacgtacttttgtttaccaccagttacgaatcgctgaagacttctactctcgtggctcccacgatttttgctaattttaaccctgcgatcagggcttcatattcagcttcattgttaaaagttaggaattcaaaatgcagggccgcctggagccaaagcccattcatagatatcatagctatcccagcaccagatctgttctcgtttgacgctccgttcacgaatatcttccatgtcggggttttcggtactagtacgcttgcactagcctttccttcattgcactctgttatgaagtcagctaaggcttgtccttttatagaaatgcgcggtacgtcgtgtatgtcgaacaggcttaattccatggcccatttgaggagtctccatgacgcttctagcttctaaaggactttccgaagcggatggtttgttagcaccttgatggggtgagcctagaagtagggtcttaactttcttgaagccgtcaggaggcaaaaaactaacttctcaatcaatggataccatatctcggcccctatcatacgcttgctgatgtagtacacaggatgttggactttttcttcttcccggactagggctgcggtgacagcgttctaggagacggccatgtaaaataacaagtcctctccgtgaactggctatgataggatctaattcaaggagaaggacattcggattcagctcttgataatactctgcgacagaaaggattcaagggttagannnnnnnnnnnnnngagacatattattccgttgcaaccaatgtagggtttccgtaactttatatgtgtt

SEQ ID NO: 63604 - DNA, 1165 bp, Cannabis sativa
aatttcaagaacatcttaattaaattaaaatacattgctattgaacattagtagtgtctatcacttttagacatatcgtcttgcgattgagtagcaatactctctaaaaataattgcattaaactatatgaaactcgatacaattagttagactaataacgatattatcatatagtatagtattagacaccactattgtcttttaaaatttttcaaaaattaaaatttcatagtaagagatttgttaataaaggttaaagatgattgtgtagtatttgattagaacatcaacattgttttatgaaagaagttttgatgttttttcttcttgtttcttgattattaggttccccatttggccatatggtaagctaattttgatgtgttggttagtgttaccacaattcaatggtgcagcatatgtttataagcactatattagaccatactatatgaacccacctcatgctgctcaactttggtatattccacgaaataaaaacaacatctttcgaaagcaagatgacatcttaactgctgctgaaaagtatattgaacaacatggaactcaagagtttgaaagacttattaccaaggtatatatttatatactttatatacacttactttaaatatgctatatattattaggtaataattaataatctcttgatttaaaattgtaggctgacagagaagcaagaacaaggagaaacaataacaattacaccatctttgatgatgattatatgtattgatcagttagctagtttctggtttgtctaagattttattattattattatgatgtttaatttatatgtatctatatatctaactcaagctcagaattatatatgctacatatatcatctgctatgttggcttctgtttaaacttttaggagaatggagaatcatgaatatgatcttttcttctttcttgctcctctttcttaaacttttatttgtttatttgtttttctcaaaatctcataagggctatgtgtcacaaaaaaaaaaacaaagctacttttttttcttttacttttttttttttggaaaaaaaaaaacaaacaaagctacttttagtcatcataacataaaattttttgtagctaaatgtgaattttaatcacaagaaaaagttattgtgattaaaatat

SEQ ID NO: 63605 - DNA, 3208 bp, Cannabis sativa
aatctcgaaagatatgtattattataaatcttttattctgagtaaggatcacactaatagtgaaagctcacagtagggtttacaaagtatgaaataatagtagaatctcataaaataagaatgaccttgactctcacctaaataggacaacgtcagattctaattttgatcgaataaaaggttgctaaaatagtatccattttaaatgagcgaataactaatatatatatatatatttgactctcgccttaatgggacacacatatgatctagttgaaaatcttttaaaatatttgagatatgtttgttttgtatttttacatgtctaatgtttacaaatttctaaaaattttatattgaacctaaattattttctattattgattatattgtataaattttgaatcttcgttgttggtctagcttagtttcttatttttaatgggacaatccccaatagattgccatcccttaaacaacataatagtgttagatctcgtaagataagtattttgtaaatgaaacatctagttgaatcatccctaaagatgacaacttagactagtatttataatactaaaataatgaagaattttataaaataagaatgtaatgaccgcatggatagatcatgggaattagcagataactaaggattaaactattaatttatgattatctcatcgtagaaattagggcttattgccagaaataggccttagaaaagtattttctcaattacagagatatatttaaatgttaggtgcattatttatgttatatgtaaaattttataattttcatggcttgtgcctagtaatagcagaatgcgatgatttggctaatagagttacttagatatgtttgaatatcttagaattagcggggctacatagttagatatttggaatgtcaagattattaagggctttatttttggaccatatacccttatcttttgaggttactttctaatgaagtaaagggaagaagtgtcatttggtttatattttggtgattggattttctagataaatcattaatcttttttattattaagtggatggatgatataaggttattttcttaattgattaacattaaaaacatgaaaataaaagaaaaccaaaaatcatcaacctcttcaccccctttttccttctagtgtcggccaagaaagaacccaaggaaaactaggttttgcaccaccaatttcagaccaattttggttcttttcagctaggttggtggaggggaagatctaaggtaagtgtagtaacttttcttccttgattttcatagttaaaagtttaggttttcatgcaatttatgagatttctagctctgctcgttttgggattttagagaatggttattgaattccatatgttgttttatgcttatttgaatggttatggtagagattgaactaggtttaggcttttaagttcaagtttagctctttaatggtgattttgcttcttgggggttaaggatgcttttagctgttgaaataggtttgttttagccttatttaaagttttggaaagtttggaaaagattggaatcattttggttgagtttcgaggtttgggaaaaaacttgctacgaaaacaataggccgtttctgggtgtttctcaagcaaaaaacccagaaaatagcttgtcgttttcacagaaatggcctgccattttttagggtacttttcctaaaatcccattatcgagagagaaacttttagtttcaagtttcaacttttagcggatcacttaccaattttatgtgaattgtgattttgggccttaaatcatcgagcagaagattccactcaaagttaccagcacacttgcattcataattaaggtaagagtagtataatagttgcatatatgtatacataattagtgtgcatgttaattgccgtcagaataacatatcagggcattagtgaggtgtttgtaaagttgcattgagatgccaacatatgttaggcaaatcagtagctatcaaattagcatatcagagtatcaatgaggtgtacatagaggttccaacagatatatgctaggctttcagatagtatgaaataactgctaccacatcagtacgactagagtactgagtatagactggattcacagttagtcatactttgtcgagaatgttcctgatccaattatcagattatgattaggtgtactggcacctagttatggtcagaatatatgtttatgtttacaattatgtttttcttactgagtcagtcgactcacaattattatgtgtatgtgcaactaagagttagaaataatcgggattagtctaaagctaagggtgaagattatacatatcaagacggttagatctgaagtgttcaggatcttcgtgacactttaagctcatttttggatatcactagacaaaaaattttgtagtacaagtattttgtaaacttatgtaacttttaatgggatcctagacatatgtaaatcatatttaattattaaagtttaagttattcaagaaaattttaattatccatattttttaataaaccctttaattagtaaaggcatgcacagtaattaagaaaatatgataacacgcctaatctagtagggtgttacaatttagtatcagagctgccaggttgttcgttgaagattgtcaagatatgtacaatcatcatctaagataagtttaacttaggattccgtaagcttttatgtgtttagtagttttgattgatatacgtgatctgaaaaggtatgatagggaacatgttaacagattaatagttgaataggtgtatactaagtttccatgtaaacggtaagtagattacaatttcgatcactgcttgatcaagcgactcttgattgtaggcttatcctacaaaaggatgcctggcaaaacacaaggagttcggatgatgtagatgaaaatggtggcggcggttggggagagattgggatcccccttattctcaaggccaagttattggtcgaggaagaacttatgaaagtggttatgaaagtccaccgtacgctctgccagattttgagcaaaggttcacaaagatggaagctaagattcaaaatgagaggaggagattaagagattgaggcaacgtggatctcttgttgcgccttcacctcaagtaccggttactttagttctagaatttccagcaaaaaaattatgtcc

SEQ ID NO: 63606 - DNA, 1242 bp, Cannabis sativa
  modified_base (810)..(816): a, c, t, g, unknown or other
ggcaaaatattggggcgttacactctcttccagtcaaactctctctcggtccctcttcccccgatcccagccgcctcacacaaccacgcctgactccgacttcacccgatcccagccccctcacacaaccaccgcgccgtcaccccctcacgaccgcctacgacccgaccaccacgtaaaacagaataaaaaaaaaacctctcgagtccgatgggtccgattggcccaatatggtagccatcggacccaacctaacccatcccatcggaccatcgggaccatcagacccaatccgtcggacccaacctgtcggaccccatcggacccccttcttccccaatggtttctcagatccgaatccatgaaattttaaaagagaaatttaaaaaattaccttagacatgtgcggttctcgggtctcctcctccgtgcggcggtgatgatgatcggatagtgggtgggtctcggtcggagtcgattgggcgtggtaattgtgtgaggtggctgggatcgggcgtggttgtgtgaggcggctgagattgggcgaagaggaacgagagagattttgagtggaagagagagaaaaggattggggctattttgggggtttttaaaaattggtcctattttaaaaattacctacactaaatgttcttcaaactaattatgtattaaaaaaagcataataatttaaatttccctttatttatgggtaatttttttttttttgacaattatttatgggtaaattttgtactctgtgttttgcaaaagttatcaattacattttttattttattaaatgataannnnnnntctatattttttaaaatggtaaaagtaagaccctaaattcaattttcaacaattttattttttaatataaccaaaacaatttctaacacgaacagatacagcaaatgtaatcaattttgtcataatgactctagatcagattttattaacttttattttgacaaaaaatcaattcatagtcctatttgtacaattttagaaaatacatgatacatattgtcatttaacaaaacaaatagtccaataggtaacttttacaaaaacacgggatacaaaatgttatttaccctttatttatttatatatttatttattatacaatctttcctaaaaaataaaaataaaagttatcaaacattgtgttagtgcattttcaaaaaaaaaaaaaaaaacattgtgttagtggagagcctccttttatattat

SEQ ID NO: 63607 - DNA, 1413 bp, Cannabis sativa
ttatgccctaggtttacaggacctttcgtgattctcaaaaaggttggactagtggcatatcgtctagcttttcctccagcacttttagcaattcacaacgtgtttcatgtttccatgctacaaaaatacgtttcagatcctactcatgtgctaagttatgaaaatctttagctacaaccagacctatcatacgaagaacaaccagttcagatcttagacaggaaagataaagttcttcgaagcaagaccatagttttggtcaaggtgctctgaagaaacagtaaggtggaggaagccacctgggagttagaatccgacatgaagattcaatatctagagttattcaggttagatttcgatgaagaattcttttaacggggggataattgtaaagactgcttagctttgttttggaattagtagataattagggtttgtgtatgaaacttgaataataattatgatttatcattttatggagatttatttgaattcaggatgtattatatttaccatatatgaaattttatgtttttgcatgttttgtgctcggcaacatcggaacgcggcgtttggccattagaatcacattttggtattttagtagtagcggagcaacttagttagacattgggaatgtcgggattagttgagattttagaattgaccaaattacccctaaaaagttttgtgacttttagttaaagtgagggcaaaatggtctttttgccaaagaatttcttttgttttttagtgagtttaattagatttagtaatctgattttatcccatattttagttagattatatcaagaaatttaattattaattcatttgtttcaaatagaaaaatcaagaaactatacctttttgtccctctctctcaagctccttagaaaactagctaggttttgtgtttttttttttgctcaattcaaggagttttcagcaagtttagagtgtgttcaactcaaggtaaattcctatcatcttcttcttagttttcataagttctagttaagtttttatgcgtgtttttggcaagtagggttctgtgttgttgatttgtgtttgtttatgttttctgaagttgaattaaggttaattaggttgaattgaactgggtttgtgggctattttgatgttggagcaagctttgagtttaagaactcaagcttttctctttaatggtgaattttgattttgagcatgttgagttgtttggttgcatgaaatatgtccattgtcgtatattaagcaagtctgaaaggtttggtaaagtttggggtcgaattgagggtgtagtgaatttttgagtttttcctgcactgaaccagtcgacttgttcagggggacctatagaaaccggatcgaccggttggtccccaagaaaccccatagaaccggaattcc

SEQ ID NO: 63608 - DNA, 842 bp, Cannabis sativa
gtggctgtgggtttcgaaggaatgttatcagttgacgtgagaggccacagtggtggaattgctttgttatggagattcaatgacgaggtaaaattaataggtactgctgtcaattatattgatattgaagtcactttggcaagagaggaaccgtggagacttacaggattatatggcgaacccaatcgaagtcagcgacataaaacatggaatcaaattcgaaccttacatgctgcatcgactttaccgtggtgcattattggggacttgaataatgtcttgtctaatgctgataaaaaaggtggtaactgctatcctcaatggcttattcgtggtttccagcaggtggtgaatgattgtaatcttcatgatttagctcttacggggtatccttttacttgggaacgaggccgcggtacaagggaatggattgaaatccgtcttgacagagcgttagtaaatcaagcttggactcagaggtttgcctctgctaatcttattaatattgaagtgtctatgtctgatcactgccctattcttcttcaactttgctgtcagtttttttccagcaacaattcttgtttcaagttcgaaaatgcctggctccgagagcccctttgtcgtcaagtagttgctgattgctgggagttgagtatggggcggccaatacatgagaaaattaaagcttgtggggagaaattactggtgtggggtcgcgattacacaggaaacttcaaggatcggattgcaaagtgtaagaaaaagattcaaatgcttaagagtagccgtgaccaagaatcaattgagcagtacaaaaatgctaaggctaaccttgatgagat

SEQ ID NO: 63609 - DNA, 576 bp, Cannabis sativa
aaacttatatataatatttaaccacaatattattaaaatactttgatactttatttggagcagtcacccataatttttcacacacttgtatgtttaatactctttaagacacacactttatttgggactctttattgtttgatcacttagaagtcacttgtgcacacactcactttaggtcctaaggtgtatttatagtggttaattctttttttttttacttaaatatagcagctttaagtttggtcattttttatggtaatttttttttttgaactattttatgtatttactatgccatgtatctgtaaatttaattttcacaacccatatttaatctttagataaatcaattttaagaaaaaaataaaaattttgcttcttcttctttgtcaaaccctaactctatcaccccctcaacaactccacctatccaccttcgttcacctgttctacattcggttaacagcgactgacgatccacccatctggtgatactcagttagagcaaaattcaccaaagatcattcatcaagaaactacttttgattatataaaagtaaaatttatatatga

SEQ ID NO: 63610 - DNA, 550 bp, Cannabis sativa
cattagtgtcagtaaggtaaattttcctttcatacataaccatgggggtagattgtaaataacaagcatcacaggccaacaactatgcttactactgagagtagtatgcggatttatcccatccgttgaaagacctagacatagattacgatcttcagctccaaaactaggccacttcatatcaactcttttccaagttaaactgtcagctggatgtcttaataaaccatccttcaccctcttatttgcatgccacgataaatttttactatgtttggcacttctaaacaaatgaatgaatcgaggaataggcgacatataccacaaaaccttagcaggtactccttccttaacctcaatgctatttttttttcttttaccatcgtgactctccacaagtaggacacgagtatgcatctgaaaaactattccgatacaatatgcaatcattaggacatgcatgtattttgtgataatccataactaatgagcatatagtttttttggccgcatagaatgtcgtcgaaatttcattatctttaggcaataa

SEQ ID NO: 63611 - DNA, 640 bp, Cannabis sativa
aacagtcaaagaatatgtccaatccaccaaatttgatcaatgtaatctccctgcaaaagagcaaaaacagctagctactctctaaatccctcttgaatttccacaataatagatagaccaaggtctaactcatatctatatcggtccagtcagacttgccttaacccatcacggaagaaaaggcttaccagtctgtgcaagaataaaattgcttgacacaagaatgagaaagttctaacatgcttccacaggcactctagaagcaacactcaatccaggcacggtcatcgttacattttatcccaatttttgtatgtccttacgggataagcggttgctagatgtcttgaaaatatcatattggggagttagctgaggttataaatgtaatttgtaataattacacatatatcataatctatttttataatattgaagtaaatagataaaaggagatataaataaaaaatgtcctaaccctaattggaaaatcctaaaatctaatcttttttactcctctctctctctctctctctctctctgcttatgcggcaccaacaacggaccaggagcaacgtgctccaccaccacgcccagtcagacctcgtgtccgttttccaaccccgagaacccagagccc

SEQ ID NO: 63612 - DNA, 823 bp, Cannabis sativa
  modified_base (797)..(797): a, c, t, g, unknown or other
aggatgctatgtcaaatctcaactattttgatttggatactattaaccctcggtattaataaaactaaaggagagtaggtcattacccgctatcacaggggatcgaacctctataataaatctatgtttttagtacctttttgttctatttgtgttacacatggcaagcatcagatccatacaactttgttgtcggttgattacttttggaggttaacggtctggtgcttccatcgagagtgtggatatcttacctgatcaaatgccatggttaacacgagaagaactccaatcgcaccatctacatctttggctctccctcaagacccacaaattacagatctgaatgctcaggttccaaccataaaggaattccaattgctgtagatgtggtgaatcttgtcagcataacaggcaccaccaatctggccactacggctggccaaactgatacaagcatcccggtggatccaaataacaggcccctacctccatgagcagatccaccattggcacctcccactgaaggaaggacttgtgggcgatagcctaggggattaacaaccagatctcgtctctggtactgcattagagagataggaccagaagttggcaagccccatgttgacttaggagaggatctcacgttagtcagactcagagaagctgtaggccaagcagggctaactaaagagccacgtgctattaattgcaatgtattcgctcattaaagacgcgaattcttgagatggatggatgacgaggagtacatccttctgttggaaatttattttacnaggatcttagatctacttacaagtat

SEQ ID NO: 63613 - DNA, 1585 bp, Cannabis sativa
  modified_base (288)..(289): a, c, t, g, unknown or other
ttattatttaataatactaatttattttacaagacaccccacatcacttcttcaaaattctttttaaataaaataaaagaaatgaaaactaaaaggttaaaaggctttcaaaatagataatttgatatttatcattctctttttcattttatattttatatttgttacactaatcactatttttacaaataattttttttccgactattatttgtataaatatatgtttatcattaagataaaaaaatatattattaattagtgacaacagttttacaagaataaatnnaagagcagtccacataaaagaatagttactgattttaaataacaaataaaggtatgttataaaacataatatatacattttaattattcaactcaaattccaattgtgttctttctcctaaataataaatattatatatacaaataattgataaaattttaactttatatgttattatttatatggttgcatatatttataccaattgagtattttccctacagtgaaaaaaaataattctattaataaatatacaaaaatgataaattttatatttttatgaatttaattctttctttttatatttttatggatttttttataaaattgtagagtattatttttctgctgctttaaaaaaaatgttgttttgacgttgaaaaaaataacaatcttttttataagtatacagagtgttgtttttttattgtttcaaaacaatgttattttgacgttattgtcatgggaaaataacataaaaatattttttctagaaaaaaaaaatcttaaaataaaaaatttgtaataatgtcaataaaaaaaattcgtaaaaatatattaaaaaaatatacttttaagtgtattttgtaaatttctttattatatactttggcccccccaaacttcttatcctggctccgcccctgggtggggtgaaggtcggggtggttgggtggtgagtggctgggtggtgaggaagacgagagaaacaggaaaaagaaaataaaaataataatttttttaatttttaataatgattttttatttttaaattatttttaattaaaattatgatttgcacatataatatatcaacacgtagcatttttaaaataaataaactgatcagttaagttagggaccaacagacttacagaaaacgtgaccttgggaactatcgccgctaattttcgagattagagaccaatctgcatcaaccctaagtttttgggaaattttgtcgcaatcatcccattaataaataataattttctacagcttcttacacgtagtttgcttacccgttgtgttgactcataaatctggacatagacttctaagtcatatccgctcgctagattggcgagaataaaatatttgttaagtaaaagtaaagagagacatagaaatttatagtagttcactccctgtatcgcgacagtaatagagttacgtctacttcgagtttttatttcttaagaaatggtattacaaacataggttaggtgtcaaagctccaaattctagagagagaagctctgaccttgtgggtaattttctaaatgtgaaaaatga

SEQ ID NO: 63614 - DNA, 924 bp, Cannabis sativa
gacacaaaggagaatcaataacacattttttatggagaaaggaatggcactagacagcaatctccaaacaaaagctttcacttctgaaggaattttttaggtccagatttttgactaaaatttcttagagttggtaagagatgaagaagaggggatatcctgatgagagaaggctaaatgataagcagatttgacactgaaaactccaaaactgtcatgcccccaaataatttcatcattatcatgcaaacctgaaacagggacattcagaatttcattaaccaaagtttcattaaagcaataggtaagttttgaaacatcccaatccccagaggtgttaatgaaatatgaaagaaaggaggaaggaggtgtattatctgagttaaaagttttaaccttattgtgaggaagccaatgatcctccaaaattcttatattacccccatcacctaccttccaaatcagacccgaagttaacaagtccttaccccataatatacttctccaagtgaaagagcgattatgaccaggtttagcttggaagtatgagggaaatacctagccttgagaattgaggctagaagagaggtggaatttttgaaaattctccaagcctacttggcaagcatggtttggttaaaatgaaccaaagaacgaaaacccatcccacccaaaaatttagactaatacaggtgtttccaagagttccaatgaattttcttagaattctccgcagaaccccaccaaaatctggccatcacagcttcaatacccttacacaatttaaccggcaaacgaaagcataccatagcataggtaggaatagcctggatgacaacctttaataaaacctccttaccagccctagaaaaacacttaacagaccaacctctaagcaccgaattaactttatcttttaagaaa

SEQ ID NO: 63615 - DNA, 1710 bp, Cannabis sativa
aaaataaattccaacatatagtgggttcccttgcccgtgatattttttgcatcctttcctctacggctagaaccaattcctttggttccggttgtaaagttcaagcatacctctcccgagctttgcccaaatctctagcaatatgtgggtcccgaatgataacttgcaaatgcccgtccactggtggggacacgaacaggtctttgttggtctttgatttgggttggccttgacatacttttgcacgtgcaggttattttttcttataaataattctatttctcatttcagattgttgcacttgttagtgtcatggccatagtctccttgaaaatggcaaaattcggacatgtcttgcctggttatgtactttttcatgggagcaggttttttatacgggaccactgactgagttgccatgtagatggtctccaagtcgttaatcaagatagagaaagtactgaacttggaaggattttctctaagggtctgtttggctttgcctgcgaactttctctttttcccattgccttgtctgccattgttgctagatcctttgccgatcggatttgagctactagggtactggcggttttgggcagacgctcttgtccagggagcttgtggttggcccggtctaggctcgacatctacccattgaatggcttcttcaagtatgatgaaaccatctactcggtcgaggatatccgtcaaagagtctacaggacaagttttcttgatgtatttccatagtattctgagaatctcgatgccccctagtattgtggctagcttcccctcttcaattaaccgtgctactttcgtagcctctttcgtgaatctgctcatgtaggcctacagaggctctcctggtctttgcttcacttcaaccaggtcttctaaatgcattgggagttagcgagaagaagagaacagtgcatgaaactctgaggagaaggctttccaggagttgaaccttcttggtgataacttgaaataccactgctgtgtggcttctgaaggtgtggcatggaatactctgcagcgcacatctcctcgtaccccttgcaaatccatttgcatttcaaaatatttcagatgtgataagggatcttctttccctgtgtacatcttccagctaaatattttgaacttgagaggtaactctagaacattgatctcaagaatgaaggacaatctacgtgcttaatccaactcgagatcattgaattttttgtcggccgggcctttaaacatatttttcaattcatccaactgtgcctgcaaagatgggtgaacttgttcgccctcttggcgaatctgtgccacgtcaaggtctctttgagctggttcttggatgcaaataccgagctgagtgggcagttgaacatattgttcgtcctaacccctccttctatttagatcatccctgaggtcatgagttgttcccagtctgttgaatatagaaacaccatgttgtctcagggactggttggttggccgatatgttggccagaactgctagtctgggcagagttattaagtataatacctcttaatgaatttccaaataatgtctggccgcctacaacatggcccacaggtggaacctgtgaccatggattggatggttgatcgttcagagtttggccgataggcccagcaggaatttcttccgcaccgcccagtgggatgctggacgctggttgc

SEQ ID NO: 63616 - DNA, 601 bp, Cannabis sativa
  modified_base (108)..(114): a, c, t, g, unknown or other
aactttcctaacaaggaaaagagcaactacaattcgaatttataaggcaagaaatcgaaaaatgaatgcacaccaatcttaccataaaaggaaaaattattttgtcannnnnnntgccaaaaaaggactttacaaaatgttcttcacgtgtaattcagatggatgtcatgtcactctgtgcaaattttgggataacatttgcccttcaagtacgtgtgggaactctttgctcgaacatggacttattctatcactaagcttgtcggatgggtgacacgtgttcagtacgtgtaccattcttgatccaatacagctgaatgaaaaagtgaaaatttgagtgcctcttcagtaatggggcatttaatgcctcgtcttgaaatttggacttcgattggcacaacaacagttattgaatatcgctggctgacatgcccactatagaaaagttgtaggcagacttagaggctaagtcaaaaagggcaaatgaagtctgcacatggacttgaggggacaaatgttatcctaatttttcctacatgacgtggcatgtccacgtgggcaagattaatgccacgtggagttcaacttgtcaacaagaaga

SEQ ID NO: 63617 - DNA, 678 bp, Cannabis sativa
tataaaaagataatatttttgtaagaaaaattgtggcaataaaattgtaagcttttacctaaaatccaatatttttgtaaaaccctttcttttttcaaaatttcgtcatgaggcccgtgtaattttctccagttttttgagcccattaagtagcccagcccaatattccgtttgaagcgataaaacctaataaaaccccaacacactctttctctctcttcctcaactcggccattcattcctctctgctcgtcttcttcatcgtcttccaattttattagttatgtgtttggtaagtgagccatgtatttaaccacctttgtttatcatttacgaattccattgcctagatgtgttttatataatgctaaatttattactttttttattgattttgttttcaatttaatgaaagacgaaagcttcatgattaagtaattacgttttttagattacactgtctttttatgttcccgggaaattcatgagcttaattgatgattactgcttgtaggaacatgataaaatcccaaatatgacaaatttgtgagtgtcaaattcacaatttgtgattcccagacctttcaatctaagaaagaagaagcattagaagcagaaaacatggagattaatttggggtcattgccatttgacattgattttcatccatcagatcac

SEQ ID NO: 63618 - DNA, 696 bp, Cannabis sativa
aatcgtagggtgccacttatgaaatgtgttggacactaatggtgtctaatagcaatactctttagttataattatgtgatacttgatattaaaattatcattttagaaaaagacataaagttatgtgatacttgatattgaagttatcattaaaaaaaaaaaaagacgtaaagtaggcttttgttaaaaattaattaatattctttcataaaaaaatttaaaggctaaactttaaattagacaagacaatgtaattaaaaaaccgtattattatatcttatttttcttttttaaaaaaagccaaaaccttaaaaaaagaaaaaaaaaaaaaaaaacttacacattagagtcattatttttagattataaaaaaaaagccaaaaacgttaaggtatatatattgattggtattttaaatgaaatttacaattaattatatttttaagtaatttttttttaatttatatttcattttctaactctttttaaaatatttcatatttttataaaaaaattattaaaataatagtaaaatattaattttatatttatggttttttattaataaaaaattattaaaataatagtaaaatatcaatttatagatttatgctttaataaattattaaaattaagcgaattaaggagagaagaaaaaaatagttaagagtgattttaaaataccatgtcaccgct

SEQ ID NO: 63619 - DNA, 1167 bp, Cannabis sativa
tttttttacctatgacccatttcaactcaaggtctgccctaattttaggatctcgtttaaaagttcatgactatttataaaacaggttactgtaaaagttgtcgtccaacgactacaaaaatgtgagcctaaactatcgcgaagacccgaacgctccaggtctaatcgtcttgatatgtacaatcttcatctaactctagacttattatctgtggttcaactcgggctcttacttgcacatgcaaataatatttttaagttgatagactcagtaagaaaaatataaacataaacataaaatgtgatttctgatcttttattaattagtaaatttgattatattgaaataaattttatttagggcacaaaacccaacacaattgtggtggtggtaacgcaaagaagaagaagaagtcttatttaaaattttaattttaatcaatttatataatatttaaataaaaaaaatgtgaaataataaaatcatacgtacatgtacatagtgataagtttatttggcatttaacagcaaaaaaactaacgaaaaaatagagagctaaatagaattaaactttgagaagttctaccccaataattcagtactaagggttagagtttggccgcaaattatccttttacaaatgataaccattattaaaattaagttttttttaaaaaaaaattatcattattaaaaaataattttttttagaaaaccaacagctttccaatacattttttcaaacgtacgttaatatacatttttcttttctcttattttcttaggcatttataaaaaccattaaaattaataattattaacgattaaatgtataatactattctttcaattaattaaaagcctaaactcaacaaatttattaatatttaaatcttaagtttctcaatcaattaacagtattaaaaattattatttagttgaattttagtttttaaaaaataaatattaacaattattgttatctttcaaaaaaaaaataaaaaacaaatactaacaaatgtgtgtgtgcttttttttttggtaaggaaataattgttttcctttaaatattagataagaataattacatagaaaatataaattgatattttatttacaaaaatacctccataaggtaaagtcaacatttataccttttatgtaat

SEQ ID NO: 63620 - DNA, 726 bp, Cannabis sativa
  modified_base (684)..(684): a, c, t, g, unknown or other
ttagttaatttcgagttcttacaggattttagcctgcttaaaggttttataccttattttgggatgggagtgtcctactcccttaaaaaagtatatttctactctataaaagtttttcttgcaaggaagcaaggatcaggaggtttttattgccttggtacccacactaacggtcctaggatcattgtgaggttacctaacaaaaatgagttcaaggatgacttgttttgaacaaatggtctctctcccatcaacattttactttatacataagtattatcttttataaaaagcttggttttgagtatttgatttataaattaaatgcagttattgattttgcctattgtgttgacagcgctcacgttaaggccaattctaactccaaagatggttaaacggcataaggctttgttagctcttccgtttggactgtgatcaacatattttctactgaacgagactaacctaaagactgtcaatcttcttggtaccgatcaatctacctgtgactataagaatccaaagtactataagtggtagtgagttttaattccacctgatgaggaagatagagattacatgtgtgaagaccacttagctttaatttggaaattaacagataattagagtttaattatgaaattagttattgtttctgaattattaatttatgatgatttntttgaattcagaatgcattttatgtgtcatatatagaaattt

SEQ ID NO: 63621 - DNA, 868 bp, Cannabis sativa
tggtcttttgacctttattttctacaattgataaaagattattttgagggaataagaaatcaatttctggacttctctttcctcttgggcgaccctctctctctcaaactctcttttgtttttctctttgatttggtgaggaaattgttggaagcttgcttaaatcttgctagtttggaattgaaggaggttcttgctttatttgaggtagtttttacagcctttaaactttgaattcttgctgaattttatttttgataaagcatgaaattgattgagaatgtggttgtgttgcatgcttgatgaatttgagttaattttgataagtttgagtgtgtcttgcttgaattcttgatgtgttggttaattcaaatcttgatggaattttagggtttattttcttgtcttgaattcagcttttggttgagtttgttgctagaaaatacttgggtttgttggaatttaagctaaagttcaagagcttgaagttttagaatttcagcatgaattttgttgaatttttaggatttgttttggtaattcagaggcatttttaaggttcattgagtttgaagtttgattgtaaactctgattttggttgtgtaaagcaagcttgagttcatggaactcaagcttggagctttaatgacactttttgatttttagtgaaattattgtgtttaagttgtggaatatgtttattatgtcaaatgatgaagctctagaaagtttgggctgattggggaagatttgagtaggttttggaggtttaaaagttatgttttttcgtgtttttctggccagacaaccggaaatccagttggttcagggctgttccaaccgaaattccggttggagtacatcggg

SEQ ID NO: 63622 - DNA, 813 bp, Cannabis sativa
taagatagaatagataaataaataaagagaaaagagagatttttttagcactttattaccctaattttattattatttattttatattttaaattgaaatagttaaaataaagaattgattgttttgtgattaagttatgataaaccaattcacacacttatatataaacacactcaaatttggttatgtgaattttagttaaggatatggtaaattacaatatatatgcattatcaaatacgttacttgattaaaaaaattaaaaattttaaaaatacgtatacatataatcacatcacattcaaatgacacactaatgtagcaatagctaattttctttttttctaaagatcaaaatctcaaactttattttaaaaattaaaaaaaaaatacattatcttattaaaaaaaaaattaaacatacatgtattgtacttaacatcacctaattgaacctaattaaaaagaaaactaattatatgtgcattgcacctaacatcaatctagtttatacaaatatgcgagttatagattaagaaatttaaggagaggaatagtaattacaattaatggtaattaatagaaaatatttgggtgaattggatatctatataaataatatttcataacactcctcattggatgttcataatcactgtctcattaaaaaccttgtcaaaaaacctaatagaacaaaaattgggccaaagaaaaaaaggtacaacatgtattaagtatattattataattggttatacccaaaataattgtctagtaaggcttgattgtaattaattaattagacaattcat

SEQ ID NO: 63623 - DNA, 893 bp, Cannabis sativa
  modified_base (778)..(786): a, c, t, g, unknown or other
atacctcgcacttcggggtcaatgttcaaccggtgacacatgacttgcggagatattccgaccatgtctgaatatttccaggcgaaaacatctaaattttgcttgagaaaagtgacaagcttttctcgctgttgaaaagttagtttagaaccaattttcaaaaccttgttattatctaagggatcaatgggtacctcaatggtttcttctgcagcttgggcggtggtggtataatcgaggaccctaggatccaagtctggtttgtcttcatgcagtatttcctctattctgaacacctcctgttgagggggttgtgcttctaacatataaatcatgttgactgacttcttttctgcgagctttaatgccgtgttgtaacattctcgcgagtccgattggactcctcgcacagatcctactccggcgggagtaggaaacttcatggtgagatgataaatggacgtcacaatcttcatctccttcaggatagggtgaccaatcactgcatatatgtcgagtattggtcgataacggagaagtcagccatcgacttgggcacgataggtgcagttcccagagtgattgggagtttaatcaatccctttaaagcaatggtgtctccagtaaaaccgtagatactcgacacgactggtcgcagatccttctcttgtagtcccatttacttaaaagcttgaaagttcaggagattcacggaacttccgttgtccactagtatgcggtggacattgtccactagaagtgaaacgatgatttcctnnnnnnnnngctaaacagagataaatggttgagtactcatttcacttcgctgaaatatcatttatacgaagctaagtgtcttaaggataaaatacattgcaaggtgtaacggtaat

SEQ ID NO: 63624 - DNA, 1484 bp, Cannabis sativa
ttaaagaataaattttttattctttataactctgctgactttatcatctattaatttttttcttttcttcatccaaatcttttatagtttctcgaaactatctcgtttaagaaaattcaaaacttgctagaaattacaaaacagaccaccctttaatccaatctaactatttatattaatatatttatttcactcaaaacacccttaaaaaaaacacaaaatgcacattacatcattattaatattgttgatgcagagaatcaagtattggctatcggaacaccccaaaatcgtcggcttcaggtggagccccactcaatcatggggctccacgtggtccttcgtattcggagcaatagccacctacgtcgtcaccgccatcgctctccacctcatcctctccctcctactcaggcgccgacctaaacccgtctcactcgggccaatcccagcagtccacagcctcgccatggcagtaatctcagctaccatcttcgtcggaatgctggtctccgccgccgccgagattcgagacacgcggtggttgtggccacgtacaaagaccacaacccctcttcagtggctgctctgtttcccaataggcacgagatcttcagggcgcgtgttcttctggtcgtacgtgttctacctctctcggttcctccacctgctacgcacattcatcacaatcctccgttaccggaagctgagctcgtcaaaccttatccggcagtcgatcctggttctgacgccgtttctgtggctggaattctcacagtcgtttcaagttctggctataattttcactaccttggttaacacggtggtgtacggttaccgtttctgggtgggaggtggcgcgagcttcacactcccagtcccagtggttgaacttgaagtgaattgtcaggttttgtcagtgggattcaatgtgatatgccatattggggttgttgttctccatttccggaaaggtgggtgtaatgggattggagcttgggtgtgtaactcaattctcaacgctgtaatccttgtacagttctacctccaaaatgtgaatatcaaatcaaccaagctgctacgggaacaggacgctgctatattagaaccaaataaaaatatttagttaagttaacccctaattaattatacaaaccttttttaaccccaaaaaaaaaaaagaaaaaatcatacaaacgttttcccttttttagttgaccaaataatagaaaagtgaaaatatacgagtttgcatgataaattgtaaataactttttctggtttggaggaaaatcaaatgagaaaaaaaaaaaaaaacactaggggacattttcaaatttgtacgtatattttaatatgaaaagaaaattttgcatgttcagtttttgactattgtaaagtctttttttggcaagttagttgacaaaatattttttcttgtaagattgttttgcattcatacccgatttcttaccttgtatatt

SEQ ID NO: 63625 - DNA, 821 bp, Cannabis sativa
ctcatatcaatgcatgatagcctacatcaattaagcaccacacgataggagagttacctacaaaactagtagttggatgatcttgtagtactttacagtctttcttacgtgctgagtaagaaattctagtagggtaaagggtatgcccttacccacttatgtgcctataaatacctctattttttatgtaaaaaggcgtagtgaacaaattttacatacagaacctcctctaaaatttctagagagctttcttcttagagagaaacaaatgaatacgtagattaccattgtaaacacttgtaatactcaaacattttccaaaaacggctaatactactgactcgtggactaaggatcattaacacttgaaccacgtaaaaaatttatttctttattattttatatttttcatttccttaagctctttctaatcagttttcgaaaatctcgataaatattttggtgcttatattgagagcatgaggaaaccttgttagttgttacctcactttgactatagtgaatacgcgaaagaacaccagtaagagaactccgctagacacagtcatggaggaagctgattgccatgcctctgacctccagacttggggcgtcaaggaagaaggcacaaacaatgtcgagaactgagaggaagatacagagaatgtgcttgatgacctcgatgataacaagaatcttgaagttgagattgaagaagatgatagaaactactacgtataagatgtgtattataagaatggttattattatgaccatgacccaaacttgctgcaagtaactaaggagttggaggcaactca

SEQ ID NO: 63626 - DNA, 846 bp, Cannabis sativa
  modified_base (430)..(433): a, c, t, g, unknown or other
tggctgcgtttttacttgtataccaagaatttgtaattttatcgttcataatgtgcctaagtacccacaaatagtatggtagcttgaatgtttcttctattctgcaaaacttattttctaatgaccatatgatctaatattaatcgatgaacgctcatttttttaaaaaaatgtgacaaacttatatcattataaaattataatatatatatctaagaaatttctcatgtggaaatggaaaagacttcatagttataggactctttcttaccaaatgaatgattcccacatcattaagggtatccgaaatggtattttgcaactcagttcttcttgtaactttgcatttttaaatagtgtaattactaattggtaggctatttacacaatgacatctaaaggctggcctccacatccaaaggctggcctnnnnttggtaaagctgacaggaacatgacctgctagatcctgacaggaacaagacctgtaaaatcttggcaggagcatggtcggccagacctcattttgcaggtgtatggctgaccagcttctccctggccggacaatgatgcatagccttcatccgtggacaacaagccaagctccgagttgggccttgatagcccactaagatgctacgaaaatatctactttcaaagggcaatttggtcatttatatttattaatttaatatgtaaatatttattattttatatgctactagggttaatgctctcctatataaaaagtcttaattcaaccttaaaaagcctaagtcactctaagtctcatttaggccatattactctaagtctgaaaccttaattatctctctctctctctctc

SEQ ID NO: 63627 - DNA, 1022 bp, Cannabis sativa
taagataatgtaatgcataatatataatgtagtaaaaattatacatacgtcaaatttaaattaatattcaatttttttttctttctttccttcacgatatttcatatcacatacaaatgatatacataagaccaataaaatataccacaaacttaaactaatatactattaaatgagattttttcaccaagatatataatagcatacacaaaatatatactacaatcataagctataatgaaaaattaatataataaattagaaaacattatatataccaaaaacttaaagacaatatttcctagtgaaatataactatacctaaaacttaaactaatattctaattttttaatttccgtctttcgtctattatataccatagcacattaaaataatataccacaatcttaaactaatatactacctttaagttttttttaatatactattgaacataaaaacaatatattattgtgcaaaataattataccaaatacttaattattcaaggttataattgtaatttcatcatcaaatttttagctgaatggatattttattaattttttataaaaagggacatttattaacttaattgttagatttagagtcattttgcatcttgacccttttaaggaagcttcaaaatagagaaagaatttagagtatctcatgtagcttgtttttagtttactttttttaaaatatgtttgaaattctcaattttaaagcatttggtgtgagcacccacatcagtataggtgaaatagttaaaaatttaaaatttcaaacaaatatgtaaaatagtgactgtatcagatgatgtaaatgtttctttattttagctcaagaactttttaactatttccttatctaaatgttgtcattagggttgagcatgagttgcgttagttgggttgagggtatctaaatgacccaacctaatgatatcaacctagaaatttttaatccattcacatactaaattttatgtaacccaacccattttttcctttataaa

SEQ ID NO: 63628 - DNA, 857 bp, Cannabis sativa
  modified_base (801)..(814): a, c, t, g, unknown or other
attctcaacaaatctaataccatgatccttgttatctcatgttagtttattgcatatgcaaatattcaacatctattgtcgacaaaaatttcaataatatgataattttttctcatattgacataacttatagagatctcttatatatctttcaaatatgtatatcatttatagctacctatatagaacaactttaaagattcaattatgatcaaatatattatgtctgacttcttttgggagtctcttctagagtaccattttcatcacgattattatttttaaattatcaatactttattacattaaggtatctccatgagtacctctagatttgacatcttctagacaaatcaaatgagcatttattaataattactatatttttcatttacgcttcgggtatttttggactcattctaactcaactttaaataatattaatttgtagttggtatattttattttgaactatattattcttatgtactttgtgcaaggattatttttcaaaagtcttcatcgatcccagctgtatttctctccgcttaattgaaagaatttctaaaaattgtgaaatctaataatatcaataaacgtgtatggatttcaatatatcacaataaatcaatatttgtttaaacacatatatactatatgacattgaaattcaggtttaataaatataattatgaacttctttcatttctaagaatgagtcgtacgtgtataattagaaatacataaatttataaatcttgtaaagagtaaataccattattttgttgggttttatgcccnnnnnnnnnnnnnnttcaatataatcagatttacatattaatatagatcagaaataa

SEQ ID NO: 63629 - DNA, 1010 bp, Cannabis sativa
  modified_base (952)..(965): a, c, t, g, unknown or other
attactattttaatacactcatttttgtcactaaaataagtataaataaaataataataagagagaaaaataaaataacaaaatgtatttactctactctaaaatccgatatccttttcatttcatttggcctctatttatagtgtgcatataaccctcagctaatgaatatcgtggcttcaagtaatggagaaattcgggtggacaagctctacaaatggtgggaggtatttggcttttttgagctaggacaagatatgtatgcccaaaaccagtggcagtttaggcctgcgcagcttttctggtataaacttctgtctccttgccaaacttggttggatgcttgctaccaaacatcaatcactttgggttaatatgatcctggagaaatactgctctcattccaactttttgagcagcaaaactccaaaaaatgcctccttggtggccagaggcatttggatgactcgagattttattaaggataacagcagtctggatcatcgacaaagactccaatgtcgagttctagaactgtgaatggtcgtatggtgataattgtattattggcccgggggatgttaatccaagaattgttggggattgttcggtcaattacttttttaaggacgggggcactgtctagaagacacaagtgataatggacatcttcatgcctgctgctgcaagcaagatcacctcctgtacaatcagagatctccctagcaaggattatcttctctgaaaatcggccactaatggttcttttactctaaagtcggcctattatgatttgatcaaggggcacttttcactgataatacatgcactgccctatggaagtcccccctacatgaacgactaaagatgtttctgtggagaattgtgaaagattgcctcccgtttggctctcacttggcagtgatctttaactaggggtgttcatcaaacnnnnnnnnnnnnnngcaccgcaaaaaaaaaatgcagtttgaaattccttgcgatgcggt

SEQ ID NO: 63630 - DNA, 814 bp, Cannabis sativa
agaatatgaggagttcaaagttaggattaatgctttggtagccaaagctatgaataaacaagaaaatggatgggttatggaagatggttgtccatggcctgggaacaatactcatgatcatcccggaatgattcaggttttatgctcattcaaatataatatggttgtctcttagaattgcttcaagattgaagaaaatgaacatgaaagagttcacttgctgtgtaggttatgttgggtagtggtggtgaagttgatgttgaaggtaatgaactaccgcgtcttgtgtatatctcacgtgagaaacgtccccgttatcagcatcataacaaagctggtgccatgaatgctctggtcagtacctaattatattttgaggaattatttgaagcaaagcaagtatataattaatttgtgttttatagaagttactgatcagactatctataactaaagttttggttctcaaaatcaattggcaaggagtagtcattcctcttatatattctattattttttttacacattaacaatgtgggactctctaacattttttgtatttacatatgctacaaattggcttcatgttagttttattaaaaaataaataacaaaaattgaactcaatttattattttatactatatattttgaaaaataaaagacttgatctgttatttaactacaaaatcattcaagtgtaaataacttttgtaaaatacagaatcaaaaatagtatttaccctgtaattaattatgttatagtggcactactaacttagaataattattatgaataatgatttttataata

SEQ ID NO: 63631 - DNA, 885 bp, Cannabis sativa
aaacgaggcatcatgacgccttgaaaaaagtacttgaacctagaaaatgaatagataatctaactattcatacaagtaaattaaaaatattcaaggtgacaaaatcatgaaagtatatttaagtttgcttaaggctgattataactactatagcgaggcaaacacaatggaaaaactcagaagtactgtacatttgatcaaaatatagttatttacattgtgaataaaaatgcaagcaaacacaattgtattaagttataatgaaaatagtacaaggcatttaagataagaaaaaacccaagtcgggttacaaatttgtctttacaagaatgctgcaaggggcaaaccactaattcatcttcctggacaaaaaatgagagaatggggtcgataaactcaagaaagaccgtctacacatagcttggagaaagaccgactacatgtaaagagccttgatctctacacagacaccattctcatcatcagaagatcccatttcttacagtcgagacctcatttctagcctcaggaaatttctcgatactatagagaggttggcacgagtgtcttctgttgcaagttcaggtcttgggttggttggattctctgatagaaaccactccaacttccctcctgaattcagccaaaattgtgccaactttattttgaataccttgtcagcctgaggaggacctctaagatcgctcacaagatctatgtctattcctgtggagcaagaaaaaaaaatataaataatatgtatgatccgactcagatcaccatttactaggaataatactcaccctcaagaatcacttgtgatgatcgcctgtaacgatcaacggggttcccttggtctgcattggtcggaagctcctcagcctt

SEQ ID NO: 63632 - DNA, 2317 bp, Cannabis sativa
tgctaatctttcttggttaatcataggtgattttaatagttatctttctcatcatgataaggttgggggtaactcccctgatcaagtttctatggactgttttcataattttctctataagtttaatctggcccctatttcttttattggaaataagtttacttggactaataagactatccgtgaacgtcttgactgggcagtggcctctgattcttgggttgatactttccctgaacattctttgcatcatttgggtttctatgggtctgatcatagagttcttaagcttgttttaacttcttctaactctcgacccaactccacccctacctgtaatcgatttaggtttgagaatgtgtggctggaggatcctgatttctatagaacagtagagacttcttggaatgaggggcctaactccctttccacgggtagtggttttaatagttttctggcccaacaaaaacattgtgtctctattcttcgaacttgggctaaaaatacctatcattcaaccaagactcgtattcaatttctgacgcaagaaattaattacttgcaaaataaagccatgcttactagggaggattgttctcaacttactcaattacagtctaggttggattctctgctctataaggacgaaatctattggaagcaaagagccagagtccgttggcttaaggcgggggatcggaatacaaaattttttcacaaacatgcctcatcccgtaggaagtctaacaaaataaaatatcttaagaatgatgagggggttgtggtgaacacttctgagggtattgctgacctagttacttcgtatttctccacccttttctcatctgagggatgtgatcttgaggctgctgcttcgatttttgactctctaggtccaggattggatgaccctgagatatcctttcttgctcaagaattcactgatgaggaagttcggaaagctgttttccaactctctggggataaagcagtaggtctagatgggctcaatgcttatttctatcagaaaaactggtctgtggtaggggcggatttcacaaaggctattcttgcttgccttaatcaaggctgtgatttctcggaagtcaactctaccctcattgttctcatccctaaaaagcagcatgccaatactcttaaagatttcagacccattagcctgtgcaccactttctataaagttatttccaaagttttggctaataggcttaagaaagttctagataagatcatttccccttatcaaagtgcttttgtgtcgggtcgtgttattcaggacaatatccttattgcgaatgagttagtgcatgcagttaataataggaccatgggtaaacggggatgggctgcattaaagttagacatggccaaagcttttgaccgggttgaatgggactttttgagacatcttatgtttcattttaatttccctgtctcctttgtctctctcatttttaagtgcttgactactgcttcaatttctttttctataaatggtcaagtgcatggatctcttaagccttcccggtgtctaaggcagggtgaccctctttcaccctacctttttatcctttgttctgaaggcctttcggctgtgttacaggatttccagaatcaaaatcttttaagtggcattgctatttctcgacaagcaccatcgattactcatttgttatttgctgatgatagttttttgttttgcactgctaaccgacaatcctgtgaaaaccttcatcatgctctttctctttactctaaagcttctggtcagatggtgaattttgctaaatcttctatacttttctcccctaatacgagtcaagagattagaaatctttttttccaaacttttcaacttgaggatagggagtttattaccaaatatttagggcttcctcagtgtctatctcgtgtaaaataccctgctttcgcctttctcaaggataaggttgccaacattatccattcttggaaccacaaatggttctctcgggcgggaaaagaaaccttgattaaggctattcttcaagctatcccttcttatgccatggcttgttatcgaattcctacaaaaatctgtaaagaaattgagtctctgatttctaaattctggtggggttcctcggttgagtcacctaaagtgcattggaagagttggtcaagtgtgtgtcaatctaagtttgttgggggtctggggtttaggtctttgactcatttcaatcaggccatgctagctaagcaggcgtggagaatttttcagcaacctcactctttgttaagtaaggtccttaaagct

SEQ ID NO: 63633 - DNA, 1073 bp, Cannabis sativa
ataacattgattctctaaatacaaattaaaaatagccggttctaaatacaaaaatataacaatataatattacttttgcataaacagttaaaaaaataaagaaagtcacaaataacaaaacataacagaaaaaaaagccggttaaaaacaatcaaaaacttgaaaaatattaaaaaaaaatatagcaaaacatacaattaaaaaattaaaagaaaaaaaaccagttaaaaaaaaattacacttaaattttaaaaagaacttttctttgaaaaaacaaagtagttatcaaaaacataaatgacaaataaaaaccaaaaaaccagtaaacaaaaaccaaaaaaaaaaaaaaccaattaaaaacctaaaactaaaacaataacacctataattttttaaaaaataaccggttccaaacaaaacattacaataatattctgatattaccttttcctaaaattgcaggtatggaacaaatcatgtgtgtcatcaaatatgggggtcagtggagggaaaatacaaattatgatgactacacaatgacgggaattctaattccaaccaattcatcattagcaaacttgatggagctgataaaaatagaaatcaactgcagcagaagcaacatagacatatcctaccagatatcaccggggacaacaccgatgaagctactaagtgacaattctctcaagttctacattgagttgagaaaatcacaagctggagtaactgattctccactatgcatcacagctacagaagaaacgactatacaaacagtggaaaatcaatcttcagaccaaccaatacaagagcaaacgaagacagttgaggaacaggttctataaatacatgacgaactattcaaccaacaatctgatattgaaggacaagattcaaatcatgattactgtcagtatacaattgcccccaagatgtttgccatggctgaacaagttgtagactttataatagagcaatccaatgcaacaacaaaaaagagaagggatgaggaaattgagataatcacagattgcatggtgcttgagatcgaagaaggacaaatatacagt

SEQ ID NO: 63634 - DNA, 683 bp, Cannabis sativa
tgtgagtctgcattaatttgacaacaatgcggcagataacaagggtggtatcttgtcttaatacattataaatggaagtcttggagacatgtgtgtactaccatagaaacttgtggaaaccaggaatgttcaatttatataaaaagaatttactttttagttttttgtgaaactaggaatgaagcaaaattatgatactcgagctaataatcttgattttggaccagttgatgagatctcaatacttcatgaggtgcttggtgagaggcgtgcttatgatcgcggaacaggtcgcaaattgaaaggtcaattgtcaagagaacacccataatctgcacctactcaacaagtgcctatggacttagcgcgacagatagctagattacaaaggcaggttgaacacatgagtcaaaaacttctacttgaggatcgtttgccacccgacgaggacatattttccagatgttcatgcagatgatatcacagtcattgcctatgatgtagaagatgtcgcaggtacttcagacgtcacagatgcaatgatgtcgatgccacaaatgcaacaaacatcacaaatcccaagagtacaacctacaccttcgcaacagactcgaggaaatgagaatggtggtgatgataatgagtccacgtcttagatgtttagtttattacttttgttagta

SEQ ID NO: 63635 - DNA, 1169 bp, Cannabis sativa
agaattctcgacggtctataaaatcgacgtctatacgagcgtcgtgaatactggatatatagaataggcgatggtgaaaaaatatcggtataaaagaattctcgacaatttaaaactctcgactgtaatcgatactataggccacagtttaaaccgtcagctgtagtagtcgacagctttaaaccgtgtcttatagtatagccgacgatttaaaacgttcactatagtggattgccccaaaaaaaattatcgtttcgtcaagaggctaaaatccccctaccccccaatcgccccctctttttagttaaaaaacattgcggagttttcttcttgatttatcaaccagtgaaatttttccgtaggtaaggacgtttataaattaatgggcccaggagcagctacaattgctttacctaaagtactatttttttatcggtgtgggccaccatttggaggcggtgaaatggacagattttgaaatagtcgagaccaggaggccaggggagtggcctctctctgggaagaccctcaatccatcgtactgaagcgatccgagaagaacgattagggtcatattctatcctttctacaatctttcagaaatctaaaaaatcaaggaaccggattcttatctaacaataaagccaaatcttctaagaattggaaacgagctatgttagaaaaaatggaagctctttcttcctgtgaaaccaattcttgcatatatcgcagctgctttaaaacctttacaagcttcatcctcctctatcatcattatacttgtcttcgtcctcctcgaaattttcttttacaagtttcaaattgcttttcacttgacgatccttgaaactttcttcggattgcaagtttcggatttattttgaacacacaaatcaagatcaacaaaataaattatggctaatagaaatttaaacaacaaataagggaatgttgtgcttacctttgtgctgccacgagaaagcggaagagagggacagagcgagaaaaagtggaggagagggatggcatggctcgtggtcgcggaggagagagagtcgagaaatgaaataaaatttacaaatgactttgaaaaaatgagatatgataatttttttggggaggtttatatcttaatagggcaacggaatttaagatggggaaaataaaat

SEQ ID NO: 63636 - DNA, 841 bp, Cannabis sativa
ttcagaataaaagaagaaaataaagaggaaaagaatgttgaaaaccccgttgaaaaagcctttgcgattgatttttctctctaattttcgtactcctgcatcgcttgctaaaaaacatcgaagtccactcattttatagccaaaaaaagataataaagctgagaaaaatatcatctgtttgaaaatacgacctttctgccaattttttaagcctttcatgccatggcatgtgtttgtcatattaaggcgctcctccaaattttataattccttcgcctcaaaagctccaaccgcaccataatttttggattttttctcgaactaatttccaggtgctcttgccccgagaattgatttaattttttttttcatatttcttcaatattttccatttttcttctattttaaacctgcaaaataaaagataccaaaaagcgtaaaattgctccaaaaaagagtaaaacttaattaaaaaacacaccaaaattaacctaaaaatagtactaataaaaacctaacatgtatgctatgtattcgtccaagccacctacgtagcaaaaaggcaatatgatgtatcattgtgggatacgacagccaacacaaagcttaaacactttacactttacattcaacatggttttatataggggtgttcgcggtgtgggtggtgcggtttttgaccatttttaaaaccaacttgcacttgcggtttttccaatttcccaaactgcacctgcactacgaaactaaaaaaccgcataaatcgcactgcaaaaaatgatgcggtgcaatgtgatttttgagatttctatggtttagactatcactaaataattaaact

SEQ ID NO: 63637 - DNA, 1079 bp, Cannabis sativa
gaagtatgaggcagtgacatggcgctataaaattgtttgaaagtcatatttttttttttctccttaattctctcaattttcaattttttattgggcttataatgtgtattaactggttttatcaattaaaaatactcatacaatttaaaatatttatatctataacagtatcccaattaatttttttttaaaaaaaataaaaacaaaacactacaaagatcttaaacttaactttaataaaaccttaattacgattgataattttattatattatagtttatatatatatatatttataaagataaaaactaaactactactcattcccattctctacttataaagatctatctaattatattttctattttttgcttcaaccaaattatattatattttttaatgtggaggaagaaactctcacaagcatagtcttttgaaaaaggtatggttttttaccaaagtgtatgtatttttctctatagtaattatatagattttttcaaaaaaaagttatgcaaataattgtattttttgtgatatgattattgatagatataaatgcaaaaaaaaaaaaaaaatcaatccaaattcaattagtttaaaaaaaggacacaatttttctttttcttaattattagttacttatttttcaaatatcacataattttaaaaatgataactcacacattttttttcaattacttactaattgaactctctctctctctctctctctctctctctacatatatatatcttaaattatttcttttacacctaacttatcatattattaaaagtaaaattatatacaaataagttaataatgttaactcattacttgatttattttttggtaaaccaaaatgataacgaattagtgagatacggtaacaatgttgagaacaattttaagaagagtgttatatgaaccatgtcggggctttttcattaaaaaaaaaaaagaaaattttgtacttacatgtcaagctgactcgtttgtacacataccttctcatattattcatataaaaattatatgaaaattagtaatgttaaatttttttaaacttcc

SEQ ID NO: 63638 - DNA, 952 bp, Cannabis sativa
gtaaatatatttttaatcatctataattgaatcacttcggttcaatttacgtaatacgtacattaattttttcacgtgttgaagacccaatctagaaagacaattctgcatgcatattaatatatagaactcggatggcatgcatgcatatagaataacatatacatatcaattaggaaactgattaattaattaataaatgctataaaatcttaaaaaaaaaaaaatacgagaaaaacataaagaatacaacaaagtgatgggtcattttgaaaattagtttaaaaattaatataggtgataatatatatgtatagtggattgtgatattatagagcatgcctgctgagtaatcaccactctaaagtacgaggtggatcatataatatatatacatatgtatatatataaaaattcaaggtaggattataatatattatagaaaagtatatgtattccttagcatgaattctccattgtaatgatttttacaggacacgcaggaggagaggagggggggcagtgaaaacatacataatttaatggaagagagaaaagaaacaaaataggattattgggttggatttgagagggtgtataaggcctttaaagccatcataactttccaaaacaaaacaagaggtggccatcatcatcatcacccccaaaacccctacaaagatttattatgtctttgtataatagttggcctgctctcactactcccacaccaatatcataacaacacaatactactctccccgccctccacctaattactctttatgtatatatatatatatataatgtacatcacactgacgtcatacccacatcactcaattagcaataatttcaccaaaactttagaattaaactaatattatttacttaaccgaaatttaaagcaagttatttacttaattattaggaaaaccaaagcaataaatat

SEQ ID NO: 63639 - DNA, 1214 bp, Cannabis sativa
gttgcagcgctaattgcaataggagtttctatgtaaaattttgtaaaaatgcaaaaaaaaaatattttaaagtgtaaaaataaaaaagccaaaaaaaaataatatttgtaactaagtagcaatatctgtaatatgataaatgtaacaacaaatatttatactaattgattactcattttccttaatgatattttttcttaagagcaactttattagatattttaaggtgtccaacattatatcaatgtagcttacgaaatgattagaatttattaaattaaaaagcatggaactaatatcaaattataatttattagctttaatagtggttaacaccttaaaatttagcatttctcttttctttaagtaatcttctaatcgtgtatcaaaagtattattttataataaagaaaaggttattagacaagctgaaaagaaaataaatagtaaattattaattttccaatgcaccgataattgacaagtcttattataatcataattttggtgatatttaaggtctctagaaaatcacatatcattaatatatttccataaaattttggctaaaatatggtatcttgtattgtagctttttactttagccgaatcttagattggtgggagataccacctacctacctatataactagatgtgtgtataaatgtatacattgtatatacaatggaatctagttgactatacgcatcaatcagtgtaaaagagagtgatatatagtctatagatttctgaagtttctatttacctgaataaaaaagtcagtcatagtgcaactaagtactaatataacctctataccatatgatcctatacatcaattccgttacttacaatagtaatactgtaatataccacttgctgcatgtactattattgatctccttggatatacattgggcctggaaacttatagtgggcctaatctctggcataagccccatacttcattccaatctacaatcaaatctgtgtctccctgtatacattgttagtatgtggtaaattgaaaaataccttttttatttatcaattaatcaaatccatgtttgattaaaacatacctctttctatatgtactgtacccataatatcctaatataaaagaatcacacagagagtatattaaagtgacaggagcaaaattagtaaagtatttaaaaaaaaggtaaaaataatagattttaaaaaaga

SEQ ID NO: 63640 - DNA, 1368 bp, Cannabis sativa
  modified_base (948)..(954): a, c, t, g, unknown or other
cgtgtaaccagaccggaattgagatctggacctggacctaaatctagtacccgatcccaaacacaaacttggaccaggatagggatccagatagggctgcacacgggtcaggtttttgggttttcgggttgtcgggttcggttttcggatgtcgggtcttgaaaatttataatcgaacccgattttcgaattttgggttgtagtgggtttcgggtctggtgtcccgggttattattaggcgggttcgggttacaatgggccagatccgattgaaagattttttgggtccaaatggtattttatattttcaaaatattaatttttttatttttaatatattatttaagctgcgtaaattgtgaaataaactaattttacatgttaatttttcttgggagaagaacagatcacgattgggtttgggacttgggaggagaaacaaaaggttattagtaatgaatatgattatacaggtaatcgttgtataatgggatgggatagtgacatggggatgcgtatacattaattaggtttttactttttacttttttttttgacttttgcatttattttcagttaagaatattaaaattaaaataataattattaaatatatacttatatataatacattctggtcgggtctcgggtgcacacccgaataaaattcaatggctttttgaaacccgaacccgatacctgaattatgcttcttcggttcagaccagacccgacaatacgggttttggttttttcggctgtttcagcatcgggtcagggcgggtggtcggattttcggattgccgggtcctaatgttcaaccctagatccagatacgaacctagactcggaccaagacccaaactaggatcgaaatgctagacctagatctcaaccgtgattctgacccagacccaaacttgcacccgcactcgggacccgaacttnnnnnnngacccgaacttggacccagatcggggtccagacctggacacaaagtcggacacagactcggacccaaactcaaacaccgacacctagaatcagacccaaagctagtcccggacccagaccataactcaaacccagaccaggattagaaccaaggacttagaccaagaattgaatccagactcagatcgggattggaactcgggactcggacccaccctagaacaagacccaggacgcgaacccacacccggagcttgatttggccctagattgaaattcggacccgaacccaaactcagaccaggactcgaaccgattcgaacttaaacccaaactcgaactcagaatcaccaatggaacaagaaccgaactaggactaggacctcgacaaggacctagacccaaacccgaacc

SEQ ID NO: 63641 - DNA, 1417 bp, Cannabis sativa
  modified_base (190)..(192): a, c, t, g, unknown or other
tgtcagattgggaggagtgatacgggatgcagagggtgtggttcagttggcgtggtcatcaagtgtgttaggtgatttttctactaatgtggcggagctgcttgccattcggctaggcttgactcttgcacatcaatttaatttcagtatctctattattaatagtgattctactgtggcaattggttgnnntaataagcttcacattaattttagttttcagtctatttattttttattagatgttgttggtggtgattcttatagtgccattctgcgttcggcgaatggtgttgtccatacactaacaacctctgttactagtttaggagagtgtgtttggacagatgcttatccacaatctttgaatttttctacaacatcagatttatctctatgaattatatctttctttcaaaaaaaaaaacttactagaaaaatagttaatgaattgttttattatatagatgatgaactacattaatatattcatttagggtctgtttggtaagttgtataagagtcgtattgtattatataataaacaacactatttttagataaaacattgtattgtattatttttagataaaatattgaattgtattaattattactaccataaattttaatacaatttaagtcgtattatttaatacataacaaatgaccatattagcttgtattataatatttacaaaggattttaggtcaatctcggcccagatcccagccctagatcttagacctggacccaaacccaaactatggactcaaacccggacccggaccctggacccaaaccctagacctgaaccagggcttggacgtgggtttggagtctgggtccaaggtttggggttgggatctgggtccggtttcggggtccgggtctgggtccggttttggagtccagtccgggttcggttctagggtccagtctgggtctgtgtttgagttcggggtccaggtctcagttcaggttcgggctcgggtctcggtttgggtctggggcatgtttcgagttcggggtttagatttgagtctgagtttgagtctaggtcgtggtcaagattgtggtcgagtttattataaataatttataattttacacaactaattagtacaagtcaatatcaaacatggtatggtattaaataatacaatacaatataatataatacggtgtaccgaacacgaatccttagtatgctaaattattagatcgtattgtaatgtttagtattatattaaattgtgttatatattatatttttgtttaatacaatgttaaactttgatttatgtattttataaatatacgtgcatatatataagaaattatttcatatacaatttttttttaaaatttacagtttgcgttgctcttgtggtttctatgtgaattttggttgcg

SEQ ID NO: 63642 - DNA, 719 bp, Cannabis sativa
gctttccaaacaaaatgtttgattttgggagggatattagaagaccaaacagtggtccaccaacgcttataagtagtaggattggaaggacgaggagtggaaaagttagagttagccaaattgtagccggagttaactgtgaaacaacccgaatggtgatgattccagataagagcatcattgttatgagcatcaataggaacagcaagaatggcattgcacatctcctcatcaaaataataccaaagttttgtaaggtcccaatgtcggtcttcagtgaggaaaaaagagacattttgggagggaggggacaggccaggctttaacatagctttacggtaggaaggaagccaattggattcagaaatgtttaccagggtgccatccccaattttccagataaggcccttgatcagaagatccctgccccaaagaatgctacgccaacaaaacgaaggtgagtggccagtggctgcatgcaagaaatcatttcgcttgaaatatttagccttaaggatttggcaaactagggaatcaggggaggtgaggatacgccaagctttcttagcgagcatggcttgattatgatgaacaatattacgaaagcctaaccctccaaaaaatttggaagtgcaaagattgtctcattttttccaatgaatcttatggctctggccaagggacccccactagaatttagacattaatttgctgtaatg

SEQ ID NO: 63643 - DNA, 1210 bp, Cannabis sativa
ttttcctcctttttgtccgtagtggccccttatggattggcaacctggattggtagtttggtcatatcgagtcgggcctacttttatactcttgggccttggtgtatttattttaataggccttttcaatgtgggccttttggtagtgctttattttgttgggtcgtttatttccaagttcaatttttccccccaaacaaacatcatgagatacaattttatggcacatttgctaaactgtaattagaattaaaataataaatgcgagaaatgaattggtttaaaatagaaaataatcagaattaatattttactatgttgtttactatattgtacagaaagaaaatcaaaattatattattttgtttatataactataaaatgtaattggaatgctttaatttaagaaaattatcattgttagaatgtataattattttttgtttataaatttataaaggacatatttgttatttttatttttaattaataaaattaaaattaaaaaaaataaattaggaaaggtcactactttctcaatttttaaaatttagtaaacaattgtatgagaatcaataccatatcatttattcctattcctatttcctttgtgagacgtgttttttttttattattattttattttactaatatatacaagcatataattatttaatttttttattattttaggaaatgataattgtattagttagataatttttatatatattttttaaacatcatttttttattatattaaaaaataataaattaaattttaaaattagcagatttattataaacaatttatataaaactaaatataaaataaaaaatcttcttaaaatataaatgtaaatatattaaaaagaaaaataaaatattttttttttgagaaattttcaatattattataaatcaacagtcatttacaataatagagaaaataggatgagaaatttctcctatccaagagacgtcttcatccaactctagagcgtactttgctaagccatgggcaacttggttagcttgcctacgagcatgagtaacagtaactttagggaaagaggataaaagacaacgtacatcagtgattagatcattaaaacatgagaggtcattatgattagaatttaaagcagatgaaacttttagcgcgtctgtttccaccatagtgattgacatttggttttgtgttgcccaa

SEQ ID NO: 63644 - DNA, 1094 bp, Cannabis sativa
ctacacgtgtaacacttaaagtaatttataaaccatgtgagacttttaaatttaatgtacttgtaaaagaatgatatacatatttttatatgtctttctttttgtttttattattttaagaggatgtgtagcttttttttaaataaattgttagaattaaaattttcttaacaatgtgacacttacatatataaaattgttagacatatataaatataaaattttgtataaataatatttacagatagtaatacctatgtacatatataaaaaaaaaaaagtatttaaatagtgaatatatacatatgtgtatatgtagtggatatatatattgaaattttttctcctttagtagataaatatttacaataaattacaaaaaatatacatgtttaacttttgaaccactaaaaatttagaaaaacattattatttttttccctcaaagtatatataaattcatatttatataaataataaaaataaatttcctaaaattaatttataatatatttattataaaaataattattacaaaatttatagctaaattaataaataaaaataaaaataatgatgaaataacttatctacaattataacaaaaatattaggttttgggtaaatatttacaattttactgccacacagtaaaaattatatttatactaccttgtcctttcaacatacaaaaaaaaaaaaaaaaacgaggcctccacctttgacacccacaaacagaaccaccacaacaacaccaaaactgtcggaaaataaccattaattccaacgagatgaaatagaaacattaaaaccgttaatattggggatgtcatgttttttctaatgttatttttgggttgttccactgttatttcgtatgtttaacaaatgttggttttaaattacacaagttaaactaactactgaatatttgtttgaggtaactggaatgaaagaatcatggacaatattagtcttacctcccatcgaaagggtgaaatctgtaagataaaaaaagaagataaaagttggctgggaaaagaaataacataacaaatacagcaaaatagggagagttggggcacaaaaagaga

SEQ ID NO: 63645 - DNA, 1648 bp, Cannabis sativa
atgtggtattataattttaataacaaaaaacaaacaattaaaaatgcttaaataataatattatttttttataaacgacaaaagtaaattatattttaaaatttatttttaacttatgtttcgcggcgaacctatgaaaatataccatagtttatgtaaaatttaaataatcaataaatatataattaaaaaattattaaaattataataccacatattcataaatcaacaataaaatagaatataaatgctaaaatataaattgctttttttactacaaaaatgctaaataccattttaatacatcacttgtccattatatttctataaaaaagacatataacatcattccaatttccaacactaattaatttcaaaaattcaaccaccaaataaaatcattcatttcataaccatacatatattcctattctaatttcatacacagttcaattctattcatataccctcaatgaaaatgaggtaatgctcttcaaaattaaaaaacctaaaataacaatcatatatataagaaaaaaaaactcaaagataaataagtttaaaattgacaagtgtgagataaaacgcccaagccaaacaaggcttagcaagatccttagcaaatggattgacacgtcggaatgtacggtaacaagcaaagagagtcccaaaatgtatcaaaccaaaaaccaaaccaagccaagtttggcccatcacaagcacaagtgggtcccaaacgaggcccagagaaacttgagcgatgtacagaggcaacgaatcgggttgggcatggaacccaccatcggcccaaaataaccaggccgaaaagcccattaacgatgacgagcccaacgatgcgaggtgtatgaaccacaagggtgggaaccaaaagggctttgcaaaggcccggtaacgttgacccgacccgaaaaagaaaatgatggatgctgtcagtgaaagtggcaccgaaaccgctattaggagagagcgaagggctctcttggtcttggccttggctttgtcttctcgttttggcatcttggaattgatggtggtttggtcgagaacgaaagtagcagaatggagagattgggatggcattgtgggatttttgttgggtaataaaccataaaaggagaatatatgggatgagaagaaattgttaaatcgaaggaagagaaaatatggtgaagggaatttgtattggggttgaaatgaaatgaacgttttggagcaagtttaggagttttttttgagaatgttttggcattttgtttgtacgagagagacttatgtctttctttctttatttatttttttatcttattaattgtgaatatattgcttttaataattgccaaaaatataaaactcaatcaattgatttcatttagaggtaatttatttttacattgatatatatatatgtaatggtcataaaaactttaaaagacttctccaaaagtaaagaaaatccgaacaaaacattagttagcccccacttagcaagtgagttgtgtcaacaaaaactctatggcgcccaggaagactgggacaaacaatagcttgaaaaaccttgttgagagaaacttccttatgtaaagacacatgtttccagtgctaattaaaatccagagtaatctcttta

SEQ ID NO: 63646 - DNA, 1134 bp, Cannabis sativa
cctgctctatcaaaaatatatatattataataaatcaacctagcgtttaggagataactaatttcccatatatattaaaaatgttcactaatgattacataatatatataataattataaataaattactagtaaagagtactcgatcaaaattctgtttaaatttaacacaaaaaataaatcaatatgtcttatatatgatgcttgcaattgataatattttaaagaaaaatttacggcataaatacttaagtttaatttttagttataaataaataattaagtttaatttttagcggtaataatacttagttatatttctaaaactctgtacgtacctgaacgttaaatgttaagttattatccacatatcattttcttatattggtataattaaactaatttattttaaaaaaaaaaaaaaattaatgacttataccaatcagaaattatcacgtgaaaatttacttaacacttaatagctattatttacagaagttctaaaattataatttaaatattattactactaaaaattaaacttaaatatttatttacaattcagagtttaatttaaatatttatgttacaaattattcatttaacaaaatattataaaattatattaatacaaattattaattattgacagaaaaagaaagacaaagtttattatgcggcaaattttaaaatatattttgcaacacaattaattaaagtcacatttttcatccgtatcatataataacttataaaacacgtttaccattctcagcttgttgaaaagtcaaacttgaattaaacaagtttctgcatatatacatataaatatagactatatattatttataattcataataattatgcacttttataattttattattaataaaatgatttttttaacagaagtaaaatgagcttacgtatattaatatattaaaattaaaagcgttagtcactataatcataatatatattacctaattatataatcttaaataggggtggataattcaattcaatcaaagcaatttatctaatctaattataaaaaattaaatatttaattttaattagattggattggattgaatcggttattagatatcattctcaaaatctaattaaaa

SEQ ID NO: 63647 - DNA, 674 bp, Cannabis sativa
gtttgctcttgcaatttgtggccattttttctattatttttagaaatgcagaggggaacacaatattgttattggtacaatttaatattggattctacacaatttgatttaataaataatataggaacaagaactcaccagttacttataatgtttcatatcagtatggtgttggataccttaaagtgtctaataacaatgatagtttgaaaaaaactactcttcattcgtgttatattgtgatctttccttaacacatgcatcattttggttcgggtaattgtttgacaaaattgatcatcatttattaattaatgaaatgaaattaaaagtaatcttaattaagattcacttaattcatatttacaatttttttcctttctgaatttaatgatttttcactacaatttataactccatttttattatataatgcaacatatattctgagaaaaaacataataattaattaaaaaaatgagtaatattcacaattatatttgatataacaattttttaagatgtcttattaaaaacataactaatctaacccaatattctacaactacaacccactgaaacaaataatatgatgacaataaatttaagaaggaaaaaaaaaagtgatatataagaattttttttttcacattaataacatatttttattgata

SEQ ID NO: 63648 - DNA, 1889 bp, Cannabis sativa
ttttttactatcatttaattaaatgacgcaaataacatatattattagtgtcatttttaaagagatgagtccaattatttgggtactattcatgtcggtcaacgctatgaacagtagcgttgaccaacatgaatagtgtaatttatagtagtgaagtgtgggtcttcgggagaaaatatttctaagtctcatttcgggagaaagtgagcatatatctttgggagaagatttgtcaaaaacattacttttgagaggaagtgagcacgcatcaatagctgaaggtaggggtgttcaacaaaatttataaaccgcccaacctgaataaaccgcccaaaccaaactgaataaatcgacaaaaaatacaacccacaataatacaataaaaatctaaactgcccaatgaacatactacgtagtttacaaattattctaaatcgcctaattaatctcaataaaccgaattaaaccgatttatatatattttataaaaaagtttatataatatattatataaattatatttattagttaaactattttatatttaaagtttgaacattttagtgtttaacttaatttttagactttatagttaataatttttattgtatttagatatttaagttaaagtttaaaatctacaccatattattactttttttattattttattcaattattttatgtttactcaattatatttatcttatattaaagtttttaagattaattaagactataacattttttagcttaaaatataaataatgtattttatttttttaagtctaattatttgaatactataaactaacaataataattatttaaaagaaaatgaagattgatttgaatgggttaacccaaccaaaccgacgaaattattgagcgggttgaacttttttttaatttttaattgggcgggttgcaactaaatatttgcaacccgatatttatattatgctgataaaaatatgctataacccgaccaaactgaccaacgtacacccctagctgtagggagttcactactttgtctgtttcagagatcatattagcgaggtgggttgcaaagagttgcgagaaatcattagagggagtctaattttgcttaagtcagttgttcttgtaatctttgatactttactacttgattttattctctggacgcggtcccgtagactagtagtgtttgaaagaacattgataccacacataattatcttgtgtcaagttttaaattctacataatttattttatttctgttatgttacaacaaatctttattctatagtatcaggtttttaatctgttaccgtaaatatttatagtcacattttatgtacagttcttaagaaaataaattggtatatgcaaaaataaattttttcaaagaatactcttgaaattagtaaatatatgaatattttagaaactctagtaacaacaagaaaattctaaaaattaaccatattaaatcaagtttaatatttcaatattttcaaactggagtgttggctttgttaatgggattggattgggcttgttatattagggtgcatgttaaagttatttttttattgtttatcgctaagtgttgaataactctaatgtatacaataatgagctatgagttattttttctaacattaaggtgttattgttagtgatggacccaaaatttcgctatgtgagagtttaattgtcataaaaaaatatttaaatttatttaattttgtgggagcctttttaactttttaaatataatggggctgcaaccccacaccatcaacagtgagtttgtcacatgttgttgtttaaattttaggggcatgtctttctcatattagtcataattttaatattacatctcataaattagctaaat

SEQ ID NO: 63649 - DNA, 885 bp, Cannabis sativa
tgagtaagttcttcatttccttccttttatatgtttgcatatttaattttttgggttttgtttatatgcagtcaagtctcaaaaggtgcttcaggccttgaagaaaagatctagcgacagttctggccagaccccttcgcccaaacgacgtaggggcgaagaggttccatctaaggagaagggtctggctgaaacagttgtcgacctctctgaagaggtggtgcctactatggaccttccaacccagaaggtatccgaatctaaaagtgctaaagggagagatcgaatggatctggtccgaccaaggcctcttctactgtcgtggtgctgagctctaaagccaagaaagtcaaggagatacgcaagtactatcttgatcggtcactccccgaggtgagcgatcagctgttcggggcagacaatgagttgtctttggagctagtgatgggcggggtcctaaaggaaacagctcgtgtaagtattgtcttctttatttttatcctatctttttaccaatgcaggctttaactctttctcatgcaagtcaatctgaagatggactatgcctactctcgagccaaatctatgaccatgaagaatatcaccaccaccaacaatttgtagaaggaggtggattcggccaaaaagcaggtcggggaggtaagagctgagctgggagaggtgtaagaagcttttgctgccaccaaccgggtcgaggagttgactaaagagattcaagagatgccatcaaccacccaactcgaggcaaacaatgacactttaaccaaggaggtcaacgagctcaaggacgagagggagggcctccgtactcttcttgcgaatttaaccaaacataagaccgacttggaaaatgacgtcaaatct

SEQ ID NO: 63650 - DNA, 1567 bp, Cannabis sativa
ggttgtcttgtttctaaatcggtctttacacctatggaacaaaacataaaactcaaccaatgagttaagggaccctcttccaaatcttactcgatacagaagcttaattggcaagctcatatatctcaccatcactaggccagacatcaaattttccgttaaaaaattgagccaataccttcaatccccacgataaccacatttacttgctacgactagaatcatacagtacttaaagagttttccaggtcaaggtctcttcttttatgcttcttaacctacaaaactccaacttcaggctttcgcagatgcatattggggtgcctgcatggacactcaaaggtcaatatatggctattgcatcttcttaggccaatctctcatttcatggaaatgaaagaagcactagacagtgtcctgatcatcaactaagatagaacatcgtgtaatggcaaatgttacctgtgaattaacttggatcacttcacttctcaatgatttcatcatcaatatcactcttccatccattatgttctatgacaactgtattgttattcatatctcaaagaatcttgtttaccacaaaaaaaacaaaacatgtagagataactcacattgttcgtgagaaaatcaccaatggtagcttgaagatgaatcatatcttctccaaaaccaacctagctgacatactcattagatctttattccttactcactttcatgagatcctatctaagatgggtgttaaaagtttctacactccattttgagagggactattaagttagttataattagttcatcaattagtggctaggtggttagacttattttgttatatcaacttgtatatataggcctctctcaccggtattcgatttattcaatcttgattcaataaagattcatcttctttctctctctaaattataatttggtatcagagccaaactaaactctaacgagtatccaatataaatcaaaaaactagtctacaaggaagagtcaaaagagtcacttgtgattcgggaataatgagccaaaaagagtcgttgtgagctaaaaaagttacttgtgattgagtcgtgcaagattggtgagcaaaaaatagccactatcttgaggaaagatgatagagagtcccacattgataatgtgtgaaaactaaataccatacataagatgcatggaatactcatctcattatcaatagattttgagatagaacctcaagtaactactaacttattcctacttcctcaaccatacatttctgcataataacattttctttttttacaaaccatagttaaacttatattaaataatgatgattggtgaaaaaaaaaattcgacataaatgtgtatcaaactacacattattactaagaaaaacataagcaatagtggataaattataaagcaacattaatcccaaagtcaaaataattataaatcaaattcaatttaacaaattagccgtagttaaacttataaggaaaacattgtgaaatcagtggattttatgattgatttttgagaatttttcaagtatataccaaaaagg

SEQ ID NO: 63651 - DNA, 1116 bp, Cannabis sativa
cttgcttcacccaaatccttcattcggaatttgtcggctaaccacttttttacatctgataacatttccacattattcccaataagtagagtgtcatcaacataaagaactaggtataccactatattacccttagtatattgtatacacaggcttcttcttcattttgttcaaagccatactctttaatagttttattaaatgtgatattccatgatatgaaggcttgcttcaatccataaatggatttaagaaacttgcacacctttcgatcattacctgataataaatactcttctggttgttccatatatatggtttcaccaagatcgcgatttagaaaaacagtctcgcatctatttaccatatcttataatcatatgcggtagctttagaaagaagaatgtgaatgaatttaagcattgccataggagagaaggtatcttcatagtcgatgtcgattcactgtgcgtagcttttggccacaaacctagctttaaaggtctctaccttcccttcagcatattgctttgacaaagttacagtcgcaaaaaatatgtaagcaatcttctttagagctagcatagaaaacacactcttcgactcttaaaaaaggcaatctcgaacatgtaggaagggaatcattcaaaacttgctatagcataatggccaatctcggatgaatttttggactccatatacgattccaaatttcttttctaagggcaaaacaatgagcttggtccatatagtaagcatcctttacagataaaataccattctttcttgctttccaaattaacttatttgagtgtggaagcggaactggtgggatagccatggttctttcactaagaatttctccaaaaatctgcaatattttctcagaatcccaactagaaccagatgataaatcaaccaccatcttgattgtatagccacagggtcgaagactctcaataagatcatcaaacttaggatgatttaacgagggaatccacgattgcctccaaacatcaatagaatctcccttagcagccaaagttattgattcgtgtttgatgatgtctctagtatctaagatgctcttccacaagattgagtcgctacactttg

SEQ ID NO: 63652 - DNA, 1123 bp, Cannabis sativa
gaaatgaattattccaggattgaagatcatccgatcaaaccaaaccaagaagagacggtcaatcattataggcgattcttacaagagattttcgaaggtaagaatcattctttctgaattttggcctggtctgaactcatccttttttttaaaacttttattccatttacaaaaccaatatttttacccagcgtcactgatcttttgcctttgtcttcgcatgaatggacgtagattttgagagcatgttcaaaagtcctccccaagccgacaagagatctaggaagaaggtagcccaagctatgaggtctcagattccgctaaagaacctcaatggaccaagactaaggccttcacgaggacatcctcgaacaagcttatcattgatgctgacaagtctcgcgaggcagggaatgaggtctctactgtgggcattgacgtctttgctgcggggactgaggtctatgctgcagtggttatcgaggagcaacctaccgggtcggcacactaggtaaagttatgtggttctcttctgaagatggttctccttgagccctcttgccccctaccccttgaagttgggactgaggggtttcaactgagctcgcaacatgccaccaacaattggcgcaacctctggacactcaggtctcgcgattgggatcctgctattcgcgacaacactgaggatctgaccaaaagaaggcaaactagaagcacgaactgagttgcatgtttgtcggaaattcttaggagactagaggtggaatattttatagtcacaaggataataaagtgtttgtttctacaaacgccactttccttgaagagtactatataaagaacttcaagccacaaagtaaagtagtgttagaggaaatgctttcaaaaataactccatctaatgttctatcctcttgtactcaagtagaggaaaatcccactcccatggttgaaccaacgcaaattgttacaactgaaaaatataccacaaatgttcctattcagaaggtcacaactcctcatagtagtgggagggtttccacaaaaccagctcgttatggcttggatggtgaaatctatatggtcgttggcgacgatattgatgatgatccattaacct

SEQ ID NO: 63653 - DNA, 920 bp, Cannabis sativa
gtggacattgtcccacatgaaatacatggtagaaaattgaaccatatataagaacataggctactccactcattgccaattagttttaggatagactcccatgattctcaacacggtatcagagccatatcccttgcgagcaagtgatcctatccgatccgcacttatatgtacagataatgaccatagccatcatcttgaggggaaatattgtagacattttgtggacattgtcccacatggaataaatggtagagaattgagtcatatataagaacatggactactccactcattgccaattagttttgggatggactcccatgattctcaacatggtatcagagtcatatcccttgcgggcaagtgatcctatctgatccgcacttatatatacagataatgaccatagccattatcttgagagaaaatattgtggacattgtcccacatggaataaatggtagagaattgagtcatatataagaacatggactactccactcattgccaattagttttaggatggactcccatgattctcaacattcattttattaataactctattactatccaataacaaatcaaacttttaagaactttaaattacaaactaattgtcacatttcttaaaaataataatttcattaccaaattgaatatttaattagctcatatttactattttaaaaagagtaaaatatgtgtaccaaattacaccaaatatcacaatgacattaacttttcgcgataataatatttaagttatattttttagaactatataggtataaatgtttagttattatctacgtgtcattttcttattagtttattttaattaattttttaaaaaaaataaaaatttactaactttgaacaatcaggaattatcatgtggcaatatacttacaatt

SEQ ID NO: 63654 - DNA, 676 bp, Cannabis sativa
aaaactaacaaataaacccaaaacaaattggagtcgctctctctcctcctctttctttctctgcctctcttcctctactcaagcttcaacaatggtttttgtgaaagcacaaaaattgaaggtctacttcaagatgttttaggttaagttcaagagaaggagagagggaaagactgattaccatgctaggattagattgattaatcaggaacacaaaagaaattgaaatcctcttcttcttctcgcccttcttcttcttcagtcctcaccaatggctgttgttgcttcatcatcagccttccctcgggctccgacttcggcacagaaatcccacctgaaataaacagatctgcttcactttgcttgatgccagacgaagcaactcgacggagatctcggagaggcttcgatgccagacggagatctgtattttttttctgggttcgagtatacgatgttggtcttggcaggcctctgttcgcaggttgttcaggtctggtttgcaagttctcattcgcagttcttggcaggccaccagaggaaaaggcggtcttggcagctctggtttgcaagctctcattcgcagaagtggagggggagagaacgtgattttaggggttagggattctatgttctaagattttttaggttttgaatttaattttgtatttaattt

SEQ ID NO: 63655 - DNA, 687 bp, Cannabis sativa
ttaaattactattttttacattaaaatattagttgcatatatatatatttctttttaaatatatctaaatatgcatggattggattgggtcggtcacttttatatgtcaatcaacatctaatccgcacaagtgtagatttagatttttcaatccaatctaatctgcaaaagtgtgaatatccgtattttacagattggattagattggatcaagcagattggatattttgtgaacaccctaagtgaagcacaatttattaaattaaaaaagtgttattttttcatttatgttcttatacaaatacatgcaattcttttgttcattctaccatttttaatatttgtcacaaaattgctatttttctctatattttgaaaataacaaattattctagtttcaatactattattttatttataatatacatatcaaaaaattatatttttatgttggattaaaattctcagtataggctcatatgtatattagtgtattgctatttgaagtttgacccaaaataaagtgttcatttttgtaattgtgggtcattaggtattaaagtgtcatagcttaaatgtgtagataccttaagatatacttctaatttattgaggggctaaataagaaatacttaaaattataacctaactatgaggttatatattggtagtggtctccaagaaaca

SEQ ID NO: 63656 - DNA, 1084 bp, Cannabis sativa
  modified_base (98)..(100): a, c, t, g, unknown or other
  modified_base (191)..(195): a, c, t, g, unknown or other
ttggagtgtattataaaatttctcggtaaaaaaaatgactaattttttaggggttttttttaatttttacacttcaaaatatttttttttttgtattnnnacaaaattctacatagaaacttctattgcaactaccgctgcaacctaaattacaacaaaaaatcatttagaaacccctattgcaactagcnnnnnaaccactttagaaactcaaaccgttaattactttaactatattcaatataaatataatattataatatttatatttttataatgttacatattattgtatctaattcaaatgtagaatataattcttgattcttaatgcatgtataattcgttttctttttaattaggtaatgttaagtacatatgtttaattttttaataaggtaatatatttttttctaaacttttgaaatggtccaatacattagtgtgatttttggatgtgattatatatacgtattttatatgtacaataaaaactaagtgatatcgtggtgaataactaattgagtgaaattgtcttttattttaatttaaagttaaaccaacaaaactaaaagagtaattaaaaatatctacaacattttaaatatttaaaatttaaaattaaaattttcacatataaaatatatttctgtaatttttttttataaaaaatctacacaatatttattctgttaaatcaagaattttattttataaccacatttttctaatacaggattcataaaatgtgtaactaaataaaatatagaggttatgcttatttataactaatttaatttggttgttcaaaaaaaaaaaaattgggatttattcttttttttttatctcttattttttttaggaaaattaaaaattattcttaaatagattattctcaaaattttatgtagaaaaaatgttggacaaaactgacaaagaaaataaaaaaatttacacaaaatactattttggcaacattttaatatttgtatggtcaaataattatttggggctttttcatttttacacttcaaaatagtgttttttttttttttgcatttttacagaattctacatagattct

SEQ ID NO: 63657 - DNA, 956 bp, Cannabis sativa
tcagatttgattttgtgcaacatcaactaatgaatcaatgctcccaaaaattgtactggctctcttaaagaactttttgaaaggggattccctcaccctatcccataaattgaattctttaaatttggccttaatctttgggtagtaataactaccgccgcgccatgtgatatggcttgtgtaatgctccaacactggaattattaaatgtgcaggtctctgaaaaaaaatataaaatgaaagttagaaatttttaaatttttacaaggccatcgggcccacaatcgggtccgtcagaccaaatataaaaaaattaaaatctgcacaaaggaatcggacccaccatcggtcctattggaccgaacaaaaaaattaaaactgtataaaagaaatccggccccatcgggtccaatataaaaaaatgataatctacagaaaggaattgggcccaccatcggtcctatcggatccaacaaaaaaattaaattttgtataaaaggaatcgggcccacaatcggtcccatcggacctaacacccaaaaaaatgaggacacataggcatcgggtccatcaaaccctacaccattttcaaaaaactcaacaccatcgggcccagaatcgggcccatcagaccgaaatgaaaatttcactttagcacgagcatcgggtcccccatcagacccatcggacccatcgggtcttcatcttccccaccccattcgcgatttccccacaggtccaaatcgcgatttccccacagatccgacctaattgtttaacaaaatttttctaaatctaacaaaatttaggtttcataaataaaatcacaatctttaacaatttctcacaaaaaaaaaaagaataaaagggacacaccttagatattgtgtcgagagcaaggggcaccgtcacggtgtaccaggggagtgtcatcaccgtcggtttaatccgatggg

SEQ ID NO: 63658 - DNA, 2206 bp, Cannabis sativa
atccttttataattcttatttatataaattttatcgtgcttcccactgttcttgtaaaaattataatgatcaattaatcttatataaataaacaaatttgatagtttagaaatattttaacatgaatatcaatacaaaataattagaaaagtaatttatgataaaaacattttgatatatttattctattacatagaaaagtaattaaattttagcaaaaaaaaaaaaaaagaagtacttaatataatatctggcctttagaacaaatacataatatctaagtaagcaaataattgtgatatatatcaaaccactcttaaaacatttttataaataaagaaattagtataaaaatctacacaatgtagagaggatattagtggacaacaacaatattaaacacacttgcttatttggctttggtacttccatcattcactatcttcatcttcttcaatgattttaattagttttagaatgtggctacttcctttgattttcatcctcattttgtcatttataatgttagattatcaccatacctcctactcttgtcatccacaactaagcattctcggtggtaagcactctaacccaagtaactcaagttaaaaagataaacctacatcctttactctgacacaccactgtcaagagcttttgttgacccacggaaaaaaataggttcatggaattgacccagaaaaaacaaagagggggatgcaaaggagagagataaagcagggaaaccaaataaaaatgaagactctgtcaattactattgggagattaaatagaaaatgaagactgaattttgaacgtacgtttggaatcaattggataaatattaattagttctcccaattaatagtatacattgtaaaaaacttccaatttatagcatacgttaactataaattttcttagctatataataactacttataaacaataacgtttatttggctatttagattgtcataagagaagctaactcactccctatacagctcactaactaaccaaataatacacaactaactcactagagttgtcctattatgatacttatagaagatcccgaggagcacattaccaaatttgtttcttttagcctattaacatgaggctctgcaacaagcagtgcactaaagtagatgataagaagaatttattttagtattttacatataaaattaatagagtttttctgacaaaatccaatctggaaaaggaagctcttacccagaaaaaatggcaaaggaagctagtgcatgaagataagccacgtagtaggaaacatgtataatgcaatataaggtggtgtagccttttcccatttcatttgaggacccaaaagggcttggctttttaaaatattacacgttcttctcatcttttggcttttacacttttgagctcatctttcctattgaaaagtgaaaatgtgaacttgactccaacagtcatgatctccaagcaaagtgagctttttttctccaatcttttgcctttccaagttgtacaaccttacgtgtgaacactttgcattttagaacatttgttcttttctctcttctctatttctaactttggcttttgtttcgtcactattgggtcttgacaaaggtatagaaagcatacttattaattaattctatgcaagaaaggggtatattattaatctaataggaaaaggtagtcccaaaatctttgtgcttgtttacaacaatgaacttggtatttttttttgttttttgaataattgagtgataaggaaggaattactagattcccctctggtgggttttgtctaaagttttgaatgttcttctcattctttgttgggttttggttttcctccgtttttcctttttcctttttcttttcgcagaacatggcttccatatttttggcataattggtatgtttgagggatgcatttcccatggaactggctttcagcaaatgggcattcacatttctgctgctctttggcctcttcttctatggaggacactcaggtaatttatattgctataatttcttgttaattgtttgttttttgggaagtttttcttttgcagcaaattgttcattgagaatgttttgtttttactacttggtttatgatctgttgcatatttaagtggagggattacatggggattctaaagttagagcagtaaacttgggagggtggctt

SEQ ID NO: 63659 - DNA, 1204 bp, Cannabis sativa
  modified_base (39)..(39): a, c, t, g, unknown or other
gcagaattactttatgcttttgcagacgcatacagtttnatattttcttatatataattgacatttccaaaaacacggtttttcaaatactattggtttcataataagataacaaccctctcccactcaccattttaaaagcatgtgtttttcttattaaaattattttgaaaaagattttaatttttaatttaaccttttgtaattcattaattaaattctatattataggtttaaaaataatttaattaataccatattacaaaacaaaaattgaaaactatttaagaaaataaacttctgttaaaaatgtgactaactttaagagatagtcacttggtgtgatttatcaaattatttaaactattttaaatgaacataccattttatgtttatccatttcactaaatgcaatatacataaaatatataggacaatcttaaataataatgtttttataatgagatgcatgattatcataaatacaaactatgggggattatactattttttttttattattttaggaaatatttgaccaatattgagaaaatctctttgtttccttttctaggctcacatgaagatcaatgtaagaagaaaatagtttcttttattctttttattttgttttgaagggtttttttttaaaggaaaccgatacaggttaaaataacaaaggtaacaaagttacgcaagcagaggaggattttcttccatctataacagttcattgtctatcctaagggcatgcagagataccccaggagaactagacaataaaaccataatatccgaaaagaaaatgtaatgaccgctttagtaatttggaatagaaaaggcaattaccattaatttctgatattttatgattatttattaaattaaccatttgtggaccccaatatttagaaatgaatattagagttataatttctctattttggagattttataaaactctaggggcattacttggtttatatgtgaaatatgttatttttgtaattttgctcggtgacaacggaaaatgcgatggatggctagtttgatgacatgggtaagtttataacattatttcttagtgggaaatattttagagaaaatattataacggagttaagcgaggttatagaattgaccattttacccctagcttaagaaataccctagttttaagtctaaggggcattttagtcattta

SEQ ID NO: 63660 - DNA, 1268 bp, Cannabis sativa
ttttttttactattaatatacatataaacttttctatctttaaaaaatccagttgtattgtctgaatccctagacaatgaagagttaggcgtgtacctagaactcatagatcatgatgtgagtgctatcctaacaagagaagaagacggtgtacaacaccctgtatactgcatcagtaaaagactaatcgacgctaaaagttgatacccactcatggaaaagctgacctacaagttgttgttagcctctagaaagttaaggccatacttccaggcacacccgataaaggtgtacactgatcaacccttgtggtaggttttatagaaacctgaactcttctctctttccctttcttcattcaatccttaaatcgctcctttcttttttcttttttttttctgttccagttcttccgcaacatcatcctttgtctctcccgatatgtttgatgatggacctaattgtgagtgagtggattgtcccaattcaataaaagttttcttgattttaattgggtaatttggcaaagtgtcattgattattgggtcattgatgttttgggttgggtccattagaaagccaaactcattgattgaaactcactatctttcttagaatgtagttgcatctcctccacaatttttgccctccatcattgccaaccgttctgtcaaccgtcacagtcccctcaactgcgattgggccaccagagtattcattgcttattgatttcttagggtcgctctgatcctcacttctaatcgcacctcctgaaaaatacgtatctcgttttgctctcctacatcatgtctctccgttgcatctgcttcaccaccttgacccaatcatgcctaaagaaactgatgcgccatgaattagttaggaattggatcatcttcattcaaccacttaccatatcgaggagctctcaatccattttcatcaatttcagtggcttcctccgcttaataattcccctactcatgaccccaaactccacaccaaaaacaaagttcaggcatccattcaataatttgtttcatttattttggccaccaaaaggaacaaaacgcccctcaaagatactctttgctattggaaatcctattcgagctcaaacatatccatttagaacagatttctgggcatcactccacttaaccttagtaatctctccagccaaagcacctatcctttgaacataattaagggtaaatgactttagtagaaatcctctcattcgaaactaatgttgggttttatgccct

SEQ ID NO: 63661 - DNA, 1597 bp, Cannabis sativa
gtccaagttcatgtctggtttttgttcgtgtcctgagtcataatccgagttttgatttgggtccatgtcctggtccaggtttgagtctgggtcctagtccccttgtcttattcccatgtcccagtccgctttcggttccacttccagtttcaagtcacggggtacgggtccaggttgggtctgggtttgggtttgaatccgggtctgggtttgagtttgggtatggatccaaatccaaacatagactacgggtcaggtccaagccctgggtccagatcaggatcccagtcttgggtcctagtctagttccacttctggtcccaagtccaggtccgggtcccaattcagggtccaatttcggggtcaaatcctgggtctcggtgctccttccgaagcccgagtccttggtccaagtcccccatccaggtccgggtcctaggtctcggtctaagtctaggacccagttttggttcaagtcctagtctgagttggggttcggatttccgatcctgctccaggtccaaatctgggttctagtcacgggttcaagtccagatccaggtccgagtctgagtctcgagttccgatctgggtctgggttctgagacccgggtcctaggttctagtccgtgtccatgtttgggtttgggtcctactactagttccgatttcgattccgtttctaggttcgggtttgggtctgggtctgggtcgaggtttgagtgatggtccgagtctagggttgggtctgggtccaagtcccgatccttgtcagggtcttggtttgggttcggccctggtttttgggtctggttttggcttcaggtccatgtcccggtctgggtccaggtcccggtcttggtttaggtcccaggacactagtcccggtctgggtccaagtctcggtatgggttctggtctaagtttgggtttaggtttgggtcctgttacagtcccatgtcccagttctacttccagtcctggtccgatcacggtctgggtatgggtccgggtatgggttcgagtccaggtttgtacctagatccatgtcaaggtccaagtttgggtctaagatcgggtcctaggttcaggtctgacccgatcccggacccgaaatcggaccaagactgggactagaacccggacatgggactgtagcaggacccaaacctaaacccaaactcagactagaacccataccgagacttggacccagaccggtacctgtgtcctaggacctaaacaaagaccgggacctggacccagacccgaagctaaaaccagacccaaaaaccgggaccgaacccaggacccaagaaccagactcggacctgggacccgaaacccggacccagactaggactgggacccaaactcggacccgaacccaaatccggaccaggactcagaccggacccgaacttgaaccggaacacaaactttgacccagacctggacctaggatccaaatatagatgggggacccagagttggaatcgagcccacgaactaggaccagaacttgggcctcagatcttggatcgggatccgggactcgaccccagacccaaacctggacttaggacccacctcggga

SEQ ID NO: 63662 - DNA, 1875 bp, Cannabis sativa
tatacttaaaaataatcttttaacaaaacaatttaaaaagctaataaattttaaatttcttaaattataatactacatatacataaataacacacacttaggtggcaacttaattttatgatacaaaacaagccttcttcgagacaaggccaatctccacaaactgctattgcataactattcagatgatgaaaatagtaattacaattatttagcttatatatcagttctaattactcaagtctcaacactgcttgagttacaacaatggctcactctcaataactcagcttcaggatgtaatccttcagccagccggatttcccgcgttctcttttcctctgttgtgcctttgctcatgtttgttcctgaacgccgattaccccttcgttcggctcgctgttgtcttcatgagctgctctctcttcctctagtcgggccacttcttttctttgtttctaggctgcctcaacattcaattggattgggcctagtgcttgggcctcgctaacattactccccccattgaaatcgaccttctcctcaaggtcttccaatccatacatacgcagaaaatcatcaaagacttcctaagtggcatcttcgggactgcttagagaccattgaaccaacacttgctttgtaagaacattgttaatctgatgaactcgagctgcaattactgccactgggaacatgaccggtttgttggcaacacaaatctccggaagtgggaagcaagcaggtgggggtgttccgatataaggcttcaacaatgagacatggaacgttgggtgtactcggcttccttgaggcaacttcagtgtatacgggacttgacccacacaagccaggatttcaaaaggtccaaagtaacgtcgactgagttttgcattcagccgcttggccaccgtagactgtcgatacggttggagcttcaccaacactaaatccccaatctgaaactcgatatctctgcgtttcttattagcttgctggcgcatcctattctgagcttgctgtaagttggacttgagtttctgtaagatctcatccctagataacaaatcgtcttccactgcttggattgtagtcgcgcctcttgtataagaaggaatggtgggtggagttctgccatagacctcttgaaacagagtcattccgatggcggagtggaagctggtgttgtaatggtactcgacccaagttaggaacttactccactttttgggatactcggctgtaaatgcccggaggtactgctccaagtaacgattggtgacttcggtctgtccgtctgtttgcgggtggtaagcggagctcatcttcaacttcgtgcccatgaactcaaacaatttccaccagaaagcactagtaaaaatagggtctcgatctgaaacaatggagcgaggcataccatggaagtgaatcgccatgtgagcaaataaattcgctactttagttgctgaatagtgtgtcggtagagccccaaagtgtgcgtacttagtgaagcggtcaatgacaaccagaatattagtgactagtgacacccaatgaattcgtcagcccaacaataaagtccatggccaaatcttcccatacacgttccggtatctcgagtggttggagcaaaccataaggtgcggtcggcgaatactttactgtttgacacaccaagcaagcagaaacgaactggcacacctctttgcgcattccaacccaaaaaaaatttgctgccaatctgatgaatgttctatcatcccctgcgtgacccccggtaggcgttgagtgaaattctgtaatcaatggctgtttgagtgcagaatgttgactgataaagagcctattccaaaagtaaaggaggccatctctgac

SEQ ID NO: 63663 - DNA, 845 bp, Cannabis sativa
tgttgagagacgaaaagtagaggcggaaggcaactctggacactttcaatattatttttttcgatgagttctttgttttactttatttttcatgttcttaattagttgttatcaattttttacaatgactatgagtagctatactttaattagggttgtaagtggagattatttgacattttattatagttttaatatgattaagttctttcctaattttctatgtacatctagttcatttcattcgtatttaatttttttagttgtttgatcactaattaattgtttataacttcaatgcaaaatttaagaagtgaatattgattatgataatgtaaaatagacacaaatttcgatattggacgagagtacctatggtcagtgtaacatttaggatttttatggtaatgcattctatatatttaaatttatcacggaatgtaaaaattttgcatataggttgagatttatatgtcctaacttgaatataagtttctttagtaaattcggtatcacatgaaaattagaaattacaattaaattataatctatagaaagtaaattcaattgaaattaatcaccctaagctctgatcaatgttaattatattttaaatatttttttttcttttcattagaatttaaaccttctttattattattattgtcaccaaataaaatttaggaatttaattttttggtaactaactacagtcttcgtaggaacaatattttacttatcaatatattacttaattcgactacgtatactagcgtactagaattttcataacaagtttttagcatcattttcgggggctgtttttagttaatatcaaaataatt

SEQ ID NO: 63664 - DNA, 998 bp, Cannabis sativa
taaatcacattgcatagtatttttttaattttcaattgcgacgagattgttggaatataattgcgacttcccttttttatgattagtgtttttttgattttctattgcgaatgctgattgtattttggctacaactctctcgatatagttcaaaattggacgattcaagatgttttgggtagctaaaagaaagatctagaactttaattgacaatgtttttttctgaaaatgaacagatcatagacaaaaattggcttgaaacttcagacttcattttcaatcacaaatagaacgtgttgagcatccaaaacttagaattttttacccattgtcttacaactccaaaatctatgataaatccatataattcatcttgtttagtgtgttttatctcatttcaacccatatgatgtacttgaccgttaaaacctgaaacaagaagaaaataagtgtaaacctgaacaataacaaataaaaactactaaaaatactcttaaaagtagactctaaaacgacataaaaatagatttaaaaaattctccaaaatttaatatttacttctccttgagtaaagacctaaacatactaactaaataaaacacaaacaacctaaataaaccactgctattgtctaaactgctttgccattatttgaaaatttcaattgcactttgtaatcagaattttagtttaaccgcttcaaaattaaacttattaaaaaatatcaaaatataacttacaaataaccacaattattggactccattataaatccccgactcaaaccatcattccgcaatctaaataatcaatggatatacaatcaatgtcttgccatatggcatgtgttttggttttttctctctaaagttcttatttgtctttttctgggttatattatttggagatatagtttgaactgtatcacgttgagttcagtttggactgtgtaatggcttccaacagcagatctatggaggaaatggaggagagatat

SEQ ID NO: 63665 - DNA, 973 bp, Cannabis sativa
aatttcaattcaaatttgttggcactaaaatgactaaaacaactcgtgccgctcttttatcaaagcttctgccaatcatctaaccagggacattttcgttacttaactatttaattcccgaacgacgatgtattatgtgtcgtacacgcttaaccattcaaaattatatttataaatttgtgtcgaataagatgttctggtagaagattgtgtttcatagtatattaaaccaattttattgtgagacattaattattttgagatttttaatggaaaaaaatattgtatagagatggttaatattttaataaatgaaaaattagttaaagtgtcaaatttagatttgtttaacacaatgtgacacacaactttttaacaggagatcctattccacaaaataaattaatattatgtttcatctaaattttacaattgcacttcaataaaaaaaaaaattttactttctaaattaattttatatttaatgtattaaagcttaattgtaaatcaaatatagtattgacttattttttgaattaaatttaataaaatatttacactatatatcataaatggtcttagaatattaatttaatttaattttctcactcgaactttgacatgtgttaaattgtgctccatttaacttttcaggtgataaaaatccaaataattgacattattaaattcaaagatttttattcaattttaataacaagcgtgtaacatggatagaaatttagaagacacaatttgatatatattaaagttcaagaatatgatttagtatatataaaagtttaagggtataatttggtacatagataatcacgacgttagcatttattagtaaagttgaatataagcccttgaatttaatgatttcaataattaaaaaaaataataggctgaaaatttaggagacatgattttatatgggtcaaaagcagaaaaaaaaaatcttaattaactt

SEQ ID NO: 63666 - DNA, 540 bp, Cannabis sativa
taaattgaagccgtcgttttggctttctcaaggaggagttcgatgattacacctacgagctttggatttgggctaggatttctgcagaataggtcgatcattgcagatgtttccttctctgttaaggtttattcatgcaggtatttctctaaatttatctatttaagggtctgggttctctggcgatcattactattctgcttgattctcttatctttctctgagtattactgggagttctgtttatctttattgtcttgggtcatggagggtatagcagataacatggcaaatgtgctttctctcactgagagagaagctgttgttcatgagcatattgatgatgtgggagggggtgttgagcttgggagagctttctgcttagtttttagggtcttcaccactaggactattaagattgaatggtttgaggaagctatgagaaatgcttggatcactcgtgctcctatcattttctctgaatatggaaatggaatgttcatgcttgaatttggatgcgaaggggacatgaagagagtc

SEQ ID NO: 63667 - DNA, 769 bp, Cannabis sativa
tacgtacgtactatgtatacatattttcaagaaaattgtcgtttttatataacattgtcgtttttcaataatattgtcgttgctcatgaatgctgttgtattataattaaagaatatttctaataaagatgtcctattaaaataataaatgaacaaaaattcttaactcagccactagtaattaaataaaaattgtggtggatccaaattaaaaaaaaaaaaaaaaattacataaaaaattgttgtttcatttgatagtatcatgatcttaatctcagatctaaccactcatagaatgatataatcattcaaacctatcatagaataaaataaaataaaaactagaactagattcaaatcaaactataaaaggaacatatataaataattttgaaaatttttataatacattctcttaaaaagagttcattaatacacttttatctattccgattttgcaaaaattttttagttcagttttttatggtttgtaaaattttgagaaattaaaaaaaaaaaaaactaacacactaaaaatagagctcaagtagtctatttcacacgtgtataaaataaaagactcacgtacaatagactatttgaaccatattttcagcgtgttaaacttttttaaaatctctcaaaattttgtaaaatatcttaaatttctacaaaatatacaatcattggattaaattttttttcagatgtatcgaaacaaataaaaaatacatcaatagatttcttttaagggggtgcactataaaaa

SEQ ID NO: 63668 - DNA, 941 bp, Cannabis sativa
  modified_base (859)..(863): a, c, t, g, unknown or other
ttgaattaatcaaataattaattagcctaaaaaaacaaacttcatagggatagggacaagccatagatgcctaccactgtctttaggacaaggttggtgttttttgtcttgaaaacatttgtcctgacaaattttatcttaacaatttctgtcttttctctatttaaaaaaattatttatttgttacaaaaataaataattagtattttgtcaattcaaaatagattttttcgaacaactttttacaactctttattcctatccttgatagctagtgtttcaaggtagcgatttggggaccatggacctatattctaagatctaatagagtagattatttattgagtctcatcaactaaataatcctttgtttattgatttcatgattacttcactttaaatatgtaattgaactcttagtaattataaaattatatttactaagtttaactgcaatgtccattgatataatcaattccagtgattagccctctatgtgttggttcgtaattagttttggtcaaaataccattttacccttctaattacttctttaacctttagtaccattaattcactagtggaagtataattcaagatcccatctaaatttgtgcacaacattcgagttttagagttaacacgtaaaaggaataaacatttaattcattatgaaaattaatattccataattgtacatcatgctcccaaccatctatattattagattcccaaaacagaagttgtaagaattatcttctcagagaaactttaacaagtgaatcaaatatttaataacatgaaaaagagttcatgattactcaggatttaagttgatctactattgatcatcattatnnnnngaattaggtctttatgataaatggtatgttgataaagatagttttattcattttggtccttgtcatatataatctcta

SEQ ID NO: 63669 - DNA, 1239 bp, Cannabis sativa
cttcttcaaggacatattgatgacgtgaatgaggctattgcggccataactgctgaagaggccttaaaggcagcaaaggctaacaaacaatggttagctgactggagaagcaagtttctagaagagctaagtgaggctaaagaactcactatttgttttggagacgtggttcaaaacgagggtactccaggaatgagtaccttcaaaagtggtgagacacccttttgtgtaattagagctccatccttagcaaatttaagtaactttgatccgggtgggttgaaccaatacttcttaaatttagaccaagataagtaccctagcactgattacatagataaagtagattgcatagtgagaagtccaaaccactttgttcctccaatgcatcatcatgttagagtggatgttcttagcaaaatttattttctagggttcttccgatacgaaactaacttaggtcaagaagacattgttcttttgctagaggaaagaccaattatgctaagataaatagtttggatgttgtttgataatttttattatgattacattcgatgtaacttgatatgttatctcctttattttttttatgcagaacaacctgccactttccagatgttcattctaaacaacttcttagattccattaactccacggccaatgaattccatgaagtggctaaagatgacaagagcaaaggtaaagctgaacaagtctctcggagtggatcttagaagccaacacatccaacatccaatcaagatgttgctttgaaggctctgaccacaaaatcatgtatttttctcctattattgacttgatggagcctaatttgaccgtcgtgccactgcaacaagtgcctattgaacaagttgaaaatgattcttcagactgtgatgggccagtccttatttccaagaagcagtctggaacttcggatggtgggatgaataagaaggcaaaagtggacatcaaggagacgttgcaatagttggttgccttaaggaaacaagcttttaatcctcattcttggaagggatatgatgtcacagatggcaaaaggtcttccaggaggagtactcgatcaagcaaccagacttaggatttgcctccaccacctttatcaccttaaaacatttggggtacttccattcaactatctacggaaaagacaactcttcctcagcttcctcctccacgttttaatctttgtgtcaagtctatgttgctgctcg

SEQ ID NO: 63670 - DNA, 834 bp, Cannabis sativa
atgtgattaatggccagcttattaccattgccaacggttacgttttccttaccaccatactcctgcttttgattcatggtagagacatccgaggtaatgtgattactagcgccactgtccgcgaaccaagcatcgctgtccaaaatttctggggtagcaacaaatgcatttgcaccagtttttggctggtttcgtgtgagattaggatctgaacccatgaaactgtcatcataccgattgtagcatacagcagcgctatgaccatacttgccacaaacttgacaagtaggtcttgagttatttgttcgacctctgcctctgaatcttccactatttcctcggccttcagaccctcttccagcattgttaccagtgttttgatgttgatggtaggaaccccatcctcggccagcagacggacctggtgtagagtttttggcagccatgtttgcttgaggattcatggagttatgagttttgtcaactgttgacagagtttgaagcctttctatcttgctatcaaaactcagcagaagatcttgaagctcttgccaggtggtgcttgttcttgcttcaatctgagtaacaatggaaatatattctataccaagaccagacataacattagaaattaaatgagaaataggatatggatctccgactagagtgagaatgtcggcccagtttttcttctgacgcaggtaatcaaccatggtcattcctcctttcctggtagtttgaataagagtccttgtgtcatccatcttagccttcgagtgagcaccgtataggctctccaaagctttccataagtctgcagctgaagttgaaccc

SEQ ID NO: 63671 - DNA, 877 bp, Cannabis sativa
aaatatcatacaataataaaaatggttttatacaaactaaaaaatatacaataatatcataaaaatggagcaaccccattaatgtcaccaactcccctcttaaaggcaagttcttttcttgcactaaggccaatgtctctttatctccatgtgcttcttctctcaaggctctttccattttttgtttgattggaaaagtggtggctcctatgccagtggatgaagctacgattattgagattattgattttgtggctaaaagctggaaaaaacctgtctctgtggttgctttggcagatgattccaagcactcaaactgttttgagtttggttttgagttggcagaggataggaactgggcactggagaacggtccctggtgcattagaggttactctcttgtactccaggcttggactccgagtaatgctggccctgttatgttcaaaattatgcgtttgtgggtgcatatccataacctcccccacgattacttctccattgctaatggtcagctattgggaagccttgttgggaaggttgtgaaggttgatttggagaaagataaaccttctacttggagtaagttcctcaaagttctcattgttatcgattttgccaaacctcttgtctcggggtgctttttcgacttggttgctggtgtaaaataatgggttcaatttatattcaagaaagtcagaattttttgctataagtatggatgcttaggccaccaatcctggggtaatgccatgtcttctccggttacattggtgagcagtgaaggtattcccttccctttatacggaccatagttgtcaacttcatccgtgtaccaggatgttttctcgggtgccaaatttgtaacggctcctgg

SEQ ID NO: 63672 - DNA, 733 bp, Cannabis sativa
  modified_base (703)..(706): a, c, t, g, unknown or other
atcatgacattaacttatgcaagagtttacatcttatagttttgagaaatgctaaaatacacttatagtgtctaacactcttataaaatataatatcattattgatgtaatttaatatcagattctacttgctatattttaaaaaatattataaaaaatcgctagctaattataaaacaacacttcatcatagtgcctcataataatgctccataatttttcaagaagaagacttagatcaccaatgcaaagtaatttcttcgagagattttttattgaaatgtcaattcggggctattttatcggtaagcaatgcctattgcctaccccgtaagcacttttattggagttgttcttacaaactcaaagtaataagtgtaatatagattagcctaccaatgtactaactaatgtaaaaagagtcattaaagtgtcgtgtaaaggattggagaccgttatatctgttagtgacttattagttaagttaattgctaagctggattggaccgaaggctttacataggtctcttctctaccccaattcacttcactcaatcttgtaagattaattcttttatttgtctaataatgtgtaattgttctaagggagatcagttgagaaagacttcacatacactacggtgtcgtttggtaacacttttgttttttaattttttaatcaaaaaatgaaagtaaaattttnnnntttaaaaaatttatttttgaaaaacaa

SEQ ID NO: 63673 - DNA, 1365 bp, Cannabis sativa
caatttaagcacaattttttcaagtcatacaaggtaaataatatattcctatgctatttacaaatcacactcttttaaggtgatattcatgcatcattcaagcaattctactaaccctatttttttctaaaattaaaattagtttgcatcttactaatggtgatcaagcaaaagtaagctattatacaataagcactcttgaatgaacaaaatcaattcactaaacatagcaacaaaatattaaatcacaatttttagccaacaaataattttagcaaaaaaaaaaaaaattagctcataattaattgtgcaaaaattacaaaatttcaaataagaaaacccatattggagttttcacaatactccaagctttctttgccaaaatccttcgctcctttctcttaattttgaccaatatctaaattaaaagggaaatttgcggcaaaagtcctcaaaaaggtcactttgatgcagattagtccccaacctccagaaatagcggcaatagtcctcaaggtcatgctttttatttgtccattagtcctaattttaactgagccttttactttttaaaaattaccacgtgtcgaaatattattagtccaaattattattttaatttttaaaataaataaataaataaattatttaaaaattatttcttttttgtttttgttttttttcttttcttctttattcttcttcgtctttttcgtctccttcatctccttcgccgaaaaccactccgagccaccagctgcacctcaaccattcccaagcatccaagcccagtaattctttctccacatacgtctcatccctctcccctctggcctgcaacaaaaagtatgtcgtctctccccttcggcctaaaccttaaatcctagattttgccctttcctcttctgtcgaccacgcccgagatgccaccgccacccaaacccaagtcatccagtattctccactccatccatgcttaggcatatatatctctgccttcctcatttcttttacagttacaatacatatataaatgtttgaaaaaaaaaagtaaattaggggcaattttttcagcaaaggggctttgaaatcggtagagagtttgtgatagcgagtcaatggcgatggacctcaaagtctgtgctatagtaggatgagatcagaaggagcttaacgtaggtggctatggtgaagaatcaccaaatccctaaaatggggttcttttggttgctctgttcttcgatggagataaagtattgagaaaatgtgtacaatgaagaaaaatgctccattttttatatagtttggtggttggttagcaagatggggactgggagtggatactcaggtttggggtggagatga

SEQ ID NO: 63674 - DNA, 1507 bp, Cannabis sativa
caaagtcaaaggatgactcaaggataattacagacaagaagtgtttttactgtaaaaaggaaggccattttttagatgaatgcttagctctgaaagcaaatgtaagagagaccgtaagaagaatagatagaaaggtgaagttggtgttgtagcagatggctatgaatctgtagatgtgttagtggcctcaaatgaagtttttggtcatgaatgggttcttgattccagatgcttgttccatatgtgtccaatcaaataactgttcaaagattttgaagaaagaaagggggaacaatactttttggtgacaacaaggcctgtcaaattcatagaattggttcaattgtgctcaaaatgcattatagagtcaagaagaagattcaaaatgttaggtatgtacaagaccttaaaagaaacttattatctattggtgtattgactgaaatagtttgtaatgttgaaattgatgacaagtttctcaaggtcttaaagaattctaaaatggctattaaagggggatttagaaacagtctctatatcatgattagtgaaactgttcctggttatgtcaatattgtttcatcaagtcgagacaatgaccaagcaaaaatgtggcacctaaggcttggtcatgtaagccaaaggggtctgttggagttagaaaaataggaaattcttaagggaaaacttggtggtaagcttgatttctgtgatgaatgtgtgtatggaaaatgttgcaaacagaaattcagcattggcaaacacaccaccaaagagccacttgagtacatacatttagatctgtggcgtccctcaagagtgtcaagtttaggaggatcaaattactttttgagtattataaatgattactcgagaaaggtatgggtgcacttgcttgaaaccaaagatgaagctttcaaaactttcaaggattggaaaactcttgttgaaaaccaatctggtaagaaagttaagaaactaaggacagacaatggtctagaactttgttccacacaattttcaaactattgtggagaagttgggattgggagacacaaatcagcaccaaggactccacaacaaaatagcttagctgagaggatgaacataactcgtattgaaagggttagatgcatgttgaagggtgctggtttggaaagaaggttttggggagaagttgttaaaataacttgctacttggtgaatagaagtccatctgctgcaattggattcaaaactccacaagaaatatggacaggtcaggctccaagtctagaaaatttgagagtgtttggatacattggatatatgcatgtcaaacaggacaaattgtaacctagagcaatcaagtgcatatcttgatggagttaaaggatacaagctatggtgcctagaagaaggtttcaaaaaaagcatagtgagcaggaatgtggttttcaatgagaaggtaatggccatgaaactagaaaacaaagctgagatcagtactgaggctagacaggtacaa

SEQ ID NO: 63675 - DNA, 771 bp, Cannabis sativa
ttcacttgcacactactctagcaatgatctaatcttgctcaaaaatatcccaatctgatcaaccacatcaacttactttcacagcaactcactcacacaaaaagttcacacctcaactagccatggtacaatcccctgtatatatgattcacacttccatataatcaagatttcaacacttcaaccaaacacacacaataagcagcccattgttcaacaaccacactaataatcagcaactattaatcacggcaaacccaccaattgatcaccaattcaaattcaaaactttgacacaacttatcaacacccataaatcacgatgtccttcaatcacaccaagggaacattcgaaaacttttcaaagctactccaacaattcaatgtcctcctaacaatgccacaatatcaacagtactcaaatcaaagactacactacctcttgaaccacttcaaccaatccaaattcaattttatccaaaacaaacattcacacataaccactcactatgcggcagccaagaaattgtccaaatacaaagttaaaaattaaaagcatccatcttgacaaaccagggagttggttcggtgtcaggtgagtcgatggaattgctgctgggtgcggttgaatggtggaaacgactgggtatcgtgtttgcttggtgaatgttgaacggctgggacaaagggaagtgaagatgatgatgatggatatgaatgtggtagggttaggatctattgggctgatcattgaggaaatgggctagtcaa

SEQ ID NO: 63676 - DNA, 1071 bp, Cannabis sativa
tttatttttttattaaaaattattttcaaattttgatatttagaattaattgaattttaaattaaatttgaatgttttgatagtttaactaggtgagtattttcattaattttgaagataaatttgacgaataataatttttttttaacagtaatttttattttattttaaattattattatgctttcaaatttaatagttatcactacattgaatattattaattttaaaattataatattaaaagaaaactaaaaattaaaataaaattaagatacgtgagttgggacttaatattttatctaatatatatatatatatataaatatatatatataaaactaaatatactactactagactacacaacaaaaaatgaagtgtccagctagattaatattacagatcagacgtttatctttccctcgctaaatctgtattttgggccttgtggctttcaactaatatgtttctttctcaatgatattaattaattagaagatatactgttgttcgagtaggatattatcctacaatttttctagaaccgctagttaaaaatttgtggaaagtggattgaatattatatccaacacttctaataattacataatcagcataattacatgggtaacgtctaatattttcatgtcattttacaattagttagttaatactttactacacaaatactttaatgttaagaaccattaatatcttttaacatttctcttatataatatgattttatagtaactagctacttgtttacctctaggtgattaattaactaataaaagcagtttatgaaataaatatagattacgtacgtgaagttgaaattatgtcatatatatttgtaaatatatatgttacgactcgaacttaggccgtggcatgtaatataatttggatagtcaaatgtcacactttgatctttgtagggtaataaagcttataaatgatcgtttagtttatattacaaaatactaaattaaaagtaatggattaactcctatattaattagaaaatattagtaacaaaatcaggaccactcattaatataaaag

SEQ ID NO: 63677 - DNA, 662 bp, Cannabis sativa
aattaaaaataatatctttaaaaacaacaattaagtatctttatttattactttaataaaataaattattcacataatcatacctttagtcacataattattcacgtaactcctacctagtataattaaaagtttagttataatttaacactttaaagtatttaaaattaataaaaaaaatatataaaatacatattataactataatttacacaattatgtaaaagtatttaaattatgaaattctacaagttccaaaaaaaattcatttctatgttttattgtaactcgtcaaataaataaaacttataagaacatttgcataaaagaaaacttaaggaaaaattaaaaagaaactaaatgaatattttgaatcaaaataaaattatgggagcattaaataaactaaaagaacgattctttaggaactctttttctttattttgaacaataaaacttatataatagtataaaatatatatatataggtgcacttttaatgggtattactcatgaatgggtaaaattagaaaaaaattgagtttttatgcttaatttttctatctaaatagaaaaatttctcacttttacatcatatgggctcagattgtttcatggcttaaaaaaaaaaaaaataaaaaattttttaacaaaaaaaaaaa

SEQ ID NO: 63678 - DNA, 796 bp, Cannabis sativa
  modified_base (26)..(43): a, c, t, g, unknown or other
  modified_base (249)..(251): a, c, t, g, unknown or other
aaataaagttttatttagggcacaannnnnnnnnnnnnnnnnnttgcactaacataaaataatcagtacatctcaattaatcttagattcgttttgtgtttttcaaatgtagtgactgtcaaaattttggtgaatggataagctaagttgtcttaagtatcaactttttctactagtatgtcccctctttccacatattctttgatgacgtggtacttcatctgaatgtgtttgcttctcttgtggctnnnaggctctttactgttggctatggcaccagtattttcacaaagtaaaactaatggttttccactgccttcgtctcatgtttaaatctttctgagagaagaagtacttgagacttttatggtcaatgtatatttcacactggtcaccacacaagtagtgtcgccaaattttcaaggcaaacacaaccgctgcaagttccaagtcatgggttggataacgctgttcatagtcttttaattgtcgtgaggcataagctataactttgtccacttgcttcaatacacatcccaaaccctgtctggatgcatcgcaatacaccataattttttcttgatcggttggtagggctaaaactagggctgcaattaattgttatttcaattcttggaagcttctctcacacttatctaaccatacaaatcgttgattctttctagtcaactcagacaatggcgttgcaatcttagagaatccttccacaaaacgtcaattaaaacctactaagccgagaaaatttcgtaccttagtgactatttttggccttggc

SEQ ID NO: 63679 - DNA, 1512 bp, Cannabis sativa
aaactacactatgtcccatggctttaatttcttccttttctctttgtatctctaagaataaagaaaaagttaaacaatgtgaattttttacttgaaaattaggctgtagtttcatctgttttaaagcttgattttggctattttaggaagcaaaatatttgtttaagtaactgcatgtggtttcactcatattattactgctactaaacaaaacctatctatatataaataataatagtaatgacacttcattttgttcaacttaaaacaaaattttatagtgacattttcctttcctccaaaaaataatagctaatattctttccttcgtaaaggtctcttgtaaaaatggataatgtaccatttcggattgatgactatatatatattgggattgtgcatttgggtcctttttccattcaagaatttctatatctttttatggattaatgacatttttgtgatttgtcttagactagatttgcacattgctcatatttatatatgactatgatccaaggattagaatttaaagcatgtgaaaatatatagagccaagattgaattgtagggggccaatagcgcgagcagcgtgtatgatgataaggcttcatatatagtaattttaatgattaacattcttttttagataatgctaactattaatgagtgatctaatataatttacttagattaatttaaaattttataaatatttttatgtaataaaatataatacatgaatcaaattataatctaatagttaataagacttataaaagtaattaattatcgacctgattagaaaatattttacatcatttcaatgtcaaaaataaatgattaaattgatggtagagcatatttaaagatagttagtggttgattaatatagtaaaattaaccatatgaatagtgttaaaaaaatgtataatggttgaaaatgatcatatataagtcaattaataataaaatatacctaatttgtatatactttttttaaaaaatatttatttatttagtatgatagacctataattatataattatatatattttatgaatatacaatatatgataaatctatgactatagtgcactttcttttaacacatagtgcttcaatagactttgtttcggtatacaaaagagttttttagtataatttttctttttattccagtctattatttaaaacatgaagattggtggaactaccaacctactcaaaccagtggttggtatcggagattaatccaagtacgtgatttggtgaagaactattacacgaaggatcagtttgaagcgcttcaattctctaacaatcaggtttgtaaaaatctttttcccgcctcatttacatctatttggtatgcttttctaatttggtctcggtttagcattcaaaaatattattttattacttggatggtgtgacagtcagtagtcttgtgatccgtaaggggaaataccgggtaagctgtgcaatcccacatcgcctggagaaggtca

SEQ ID NO: 63680 - DNA, 1205 bp, Cannabis sativa
gctcacactcttgtaaaatttactaagcttttttcagccctagaactgctaatacagtagctcacactcttgtaaaatttactttaacaactattgttagtacagaaaggctaagggtcaccttatagtgtcaagcgccacatggagaaatgctatgcaggaagaaatcaatgcccaagaataaaaagaggatcagtgacatattgctattgatacaaattattagcagatcctacatgatttgatttaataaataatataaaaaccgtaatcaatcgtaacatgccatatcagtatggtattggataaaatataatacctaatagcaatactcattgttagcctcaatatctaagttacatagtaaacttttagttgatgccttttatcaataaatttcttagttctctacccatgagcttattgctttttagtgttccttaaaactattttctcaataataataattaatgtgttcggcattcattatatattatatatgtacctttggtggccctcccatggaatcggtacaataaagcctggcattatccacaagatggcaatatcttggaaatgcagtagcaaatcttttgtgggacgttaactgtgaattcactctcactgcccttccaatcattatagctctcctatgtatatatatacaatattatacacatacatattaatataataaaaaattaattaattaatccttaagtaatgacattataatacaattttatttatctataaaaataatgaattaatttacctaatgcctctaacgacagccaaataagggtcacaaacgactccaaccaactcaattctgtagggctttcttttgggcactaatgagtcattattttctccattaataatgtcatttgctgttatttgttcccaataattttcatttatagtaccatcttcggccactttgtagccaacacccatacggtaccgaaacttgtgaacattcctagccatggccaccgtttgcttcacaaagggctcccacgaaagggtcccatccatgatcacgtcacgcccttcgttcagtgccgtcactaatagtgacgacgctgcatctgtcgacgattggtgcacctatatataatatatatttattatattagttttttaaaaaatagagtatatttttattattcaataagattggaattctcatttttaatgca

SEQ ID NO: 63681 - DNA, 869 bp, Cannabis sativa
ttgaggaatgataattcctctttgtttctcttcttggattatacaagcaaaagccttattaacatttggaagaggatcttgaagaaggatttaagatctagcattcaaatacgattcattcaggccaatcaaaaactcaagcaccttgtcttcatcctgatattcctgaatgattttcaaagctccacaagtacatacccgttgtggtctgtattcttgaagtaaatctcaaagtcttttgagtcgtgtgtagtaggctgtaacatcattagaaccttgtgtcaatgtctgcatacttcttttaacttcaaagattctaggtgcattcttttgatggaacctttcttgtaattcacaccagatctgagaggcatcttctatgtacatgatgttatcagcaatggtgggagatacagagttgaggatccatgatataacaaggctattgcacctgatccaagactcatagtcttcatcttcttcatcaggttctggtaatttaccattgatgaacttgattttgtttctcgccattaacgccaccatcatagatctacgcaaggaactataattctcagcaccagtgagaatcttaggaacaagtgaagaagaagcattatcgccagtagacaagaaataagggcttcgtggatcattagtaggaagcttactaccatcatccaaagctgaaaatcggttggaaccagcagcaactccattgttaacattgcttcgagtttgagttccacctcctcgagccatggaaagatagaaacaagagaggagaagagatgcggaagaagagccaaacaatcaaaatggctatgataccattttagttgcagaagagaaacaattacagagaaaca

SEQ ID NO: 63682 - DNA, 525 bp, Cannabis sativa
tgcaaatgaatttattatatgcattgactaatgaatatttgtagtgaagactcgagatgaagatatatgaacaacaaataaattgattataatatttaagcccaaaaccctttagacttttactacaagaccattctcgaaactttcttacagcttatatctaacataacgtagagaccccagtacattaatatatgactatcatcattagtaattaatattaataacctcgaagtttgaatatttaataaacttagagattggggtaattaacttacacatgcatgtttcacaactcgaataactagataatctctgttccgcgcggttactctcaaagttaggattttattgccaatatattgaaatttatttaaaataatcagcaatatctatggattatatcattatcttggataaggttattctaggtttagaaattttatggtgcaaattctcaagcaaagtaagatgtagactgtacttaatcacattttcttgctattttctctcgtaaaccttgga

SEQ ID NO: 63683 - DNA, 2060 bp, Cannabis sativa
  modified_base (73)..(82): a, c, t, g, unknown or other
aaatttagtattaaaaataatatagaatttaatatctactgagaagacccactacaaatttttttacttttannnnnnnnnnaacttgtgactaaaagtgaaaaaattgtgactaactataaattattattcctatattgtgactaaaaggtccgtggctaaaagtattagtcacaaagattacaatttgttgtgactaaatgtatttttagccataatacttgttgtgactaaaactaaattagtcacaacttgtaactaaatattatgatttagtcacaagtaacattttaatatgggataaattgaggaatacctcatttttttaatcaattaatcaaaaataactgcatattaaaattcattgaaatctaaccacttttataagtcttataccaaatatacccttacttaataatgttaacatatcctaacagattgtccctatcgcaacctaactcaatgcacacaagctctgcctcctctgccatcacctccgtccttccgcctcctccaccggcgaaatcaacactacacctctgtgatcacaatcgcagcccctgacctccaacctcttctaatatttgaatgtaaataacctccaacgatttgggtacttgaatttatattctccaataattttttggaatgtaagtattgcttgggacttttttattaaaatccaattgtgaagccagtgtctaattatgcttgtctacgggaacaagtatttgatgaaagttgaggtatattatagagtcaccttgctaaacataaaattttttatcatcttttggttcaaattaatgcatatttagtttatacatatcgttaatttgtttttattttaaaagttactatattccatcagtagaaagcttccatattttacaataatttttttatatcatatcggaatgtaattatcgcaagaggaagagcggaggtgatcattagatttggactctggagaagtaattgattttatttttttcattaagctaagggcaaaatgggacatgacttataaaagtggctataaatcaaataatatgaaaagaacggtataaatgaaatggactaagttaaaatgggtatacggtgaaattttcccttttaatatcgtgactaaaagtcgcatttagtcacaaaaaaattatgttatgactaaaaagttgtcactaaaagtagcagttttttctagtgacagttaatttatttgtatttaatataataataataatttacttgatttgttgttcgtatacttattaagaatgtttattatacattttgaaaattaaatattaatattgttcatgggaagaaaatacttacagtaaaaaaaagtgtcaaaagagataattaaggaaaaaaaaatgagaaaagagaagagaagagagaaaatattatttaattattttttataaataaataaatattattaaaaaaatataataaataatctactacaactcaaatattaactactttcatacacttatttatttattactatttgatctattatctatgggtataaaaatattcatacaatatcctatatttatatatttacaatgaacgatcatgcggaaaagacactggaatattaaatttaatatatcatcatgataacacaactgagaatataagagtatcacacgtcccgattggatttctcggaggctctgtgtggagaggcaaaggcctgttgctagcttggcggtgtctgttgctttggatctaaagtataagtatgttattgtggagagtaactcaagactggcaatcgacgctctcaatgggaaggcgtcccactgggcccttgagaattatgtctccttttgtactaaatcttctctttatttcagttgttgtaatttttcgtatgttagtaggacctgtaactatgcagctcacaatattgctaagtgggcttttactcaccaggtgtatggatcgattccgatcaactctgtaccggaaaacttattgtgtaacgaccatgaggtctagttttatttaatatatatctacgcttattttccaaaaaaaaa

SEQ ID NO: 63684 - DNA, 605 bp, Cannabis sativa
tctccttctcttgatactgaatctcctcctgctgcaactggtaaggcatctgcagcattaactccaaagggcccttcctctcgaactcgttcccaacaagctttacttaagaaggaacttcacaccaaaaggcgccatgacagaccaattcctgctgccaagaaccttaagatgaatcccccctcggcctcctcgagttttgatggggaagaagatcccatggaagtgtcctctgatgactccaagaccaaaactgagtcttttccttctgaaaaatgtcttttagaagatgttggtgtctcctctgacagtgaggaaactaacctagagcctgagccacccttgcccaaatctgcagtagcctttcctcgttctactcctacagccaaagcctctgctgctgccaagggtaaacagcccatgaagagctccattcctggtaatatttctccctctcaagctgtaaattccaaattttattatcatgataaccagcgtgattagaacctatatgccacccgaaagtttgagagtgaaagaaattatgatttgcatgctcatcgtgtctatggtattgtaaagtttgttcaatatcatcattggga

SEQ ID NO: 63685 - DNA, 1984 bp, Cannabis sativa
tatatatagcaaacaaactttaaactttatatatgaaaaaaaaattgttttttaaaaaaaaaaacaaaaacaaactttaaaatttttatgtttttctttcttattatcatttatataaatgaaagcaaacaagctttaagtatttcatgtatttaaatattttaaagtcgtagccgaacctaccttaaagtaaggccgacctaagattgtaatagagctacaattaatcaatattgtaaacaaaaataagagtattattcatatatccaatccatcgttggttgaagggaaattcatcaaactaaatgcatgtttaacattaaatacaacttaattattagctcatattgagaactcctcctcccaacaaataattttgtataatttaattacaacaaataaacaaatgttattttaaactgaaatgctaaacaacactaagtgtccaaaaatatcgtaaattaatatgactcgatatcttaaaaatagttagcaatactttataaaaattattatattaaattaaataaaatttaaaatttaattatattaataatatatataacacttttttaatatattaggtgctacctgtatcttttagcagttcttattataaaatcttactacgtacttattcacaaaatatcacaaccagagatactatgcatccaccatcttgactttcttaatcagtagtaagattattaattaattaattaattaattaataaggtcccaaaagagactcctatcatatcatatttagtaacatgtaatgttattaactcactacctaactacacttgctaatcaaactagctaattaaccaagtatagttatatatatatatatttatatagataagaaagagatgggaaactcctcttacaataaaaaatgctaaagggcacattagtcatatataactaagttgcgtatatctctttaacttattaattattattattattattgttataaaatatcacttgtgctgtctaaaatatcaatgctctaaaaattaatacttagatctatacggcgatatatatatatcactgttcatgtataatttggtgtctagtactttatttttatagtgttacatgattttaaaaacgttactttcaatggttttgttttttgaaataaatgaaaatgaataatatatatcattattaattaattaatttgtgagtgaggttgtgaactggacggcagaataaaccaatgtaaagagagccaataatgaatgaatgaggctttggaaaactctccttaaattacaatgccatgacgtaacatatgcatgaaagaatgaattaaacgacaagtgttccatgacaaaataaaccctggttattagggtttacactctctagctacaacaccctacctatatagctatgtgtggaaatcaagagcaacgttgactttttcttttgggttgtaactttacatttacaatgagtccaaaacaatggaaattaaatataattttattattttgaaaagaaaaattattaaaaaatgataaagttgaaacatatatatatatatacatataggtttgcttttgcatgagtcatgagtgactgatttagatttctgtagctttgttgtgtttgagatatcaaacaaagacatatgtacataaaaataataatgtcgaggtcactctcaatctcatatttcttttctttgcctcttgctttaattaatattaatgctgctacgaatttgtatggaaatgaatgcttatcacaaatttgagttttttcaactttgctatatatgaacatataaaagaacgaaaagaatataataataaagttatactattttggatcatttgacttttaaaatatatttttaaaaaatattataaaagatatactcttatctatgttagaaaaaaaaaattgagtttaatttttttttttatggggtcatttttattgtaattatttaagatatttt

SEQ ID NO: 63686 - DNA, 747 bp, Cannabis sativa
gaattaaaagaattccaacccatctcaagctgcacttgtgctgcaatgaaaatattcttggattactataaccaaaatcaagtgctccaattcttgacttgcttaaacgaatcctatgcctcggttcgagctcaaatcttgctcaatgaacccatgcctaacctgtggatcgttcaagaagaacgtcaaaggtctcttggttctactaacttggttcccgtggctgctgctgccagttctactaatccctcacgagccaagaaaccaaggccttcgtgttctaattgtggcaaaccaggccacttagtcgacaagtgttacttcctacacggatttcctcctggttatggagacaaaaagaaacccgaaaaaggcaaagccaaggcaaatcatgcttcttccagcaatgccaaaccagactcggatggactcactgtcaatgctgatctttctaaccaatgccagcaattgatctccctcctaagtcagcaactcagccacaacaaccatcccgaacccactcatacacctgctgctgcctctaatcttgcaggtactcattttaaatccaatactataccttggataattgatagtggtgctacacaccacatgtgttctaatatagcttgcttttctacatttacacctatttcatttcctaaatatgtctcactgcccaatggacaaactgttactgtaaaaaatattggaaccgtgcacattaattctaaaatcattctccat

SEQ ID NO: 63687 - DNA, 637 bp, Cannabis sativa
tagtactacatgtttttcaagtatatggctagctggtactaaaagttggtctaagaattgatcagccactaattaaagaaacacactaataagttttaatattaaaatcatgagaacgtgaatattgatgtatatatgctaacaacatatgtatataactatatggataaaatttaatagttatattttttttaactctatattacatcctttaaatatttttatgtccaactattgtcatgaaaaatatcaaaaactgtttcctgacctacagttgataaattgttatagtaattagagtctcattagtgtagtcagctactactagtgttacttgcttgcccctacatgatttttttttttttttgaaaataaagcgtttcatagaacgaaaattagacctcacgttcattataaaaaatagtttataggtattaaagatatcaccatgaaacctgaaaagaaaaaggcattgctatcatcactttctatttatggcggtctataattggttaatgatattgcctaaaagctatttttttaaattatatagagtcaaatatttaattatactaataacaggattacactaaaaaaaaagtattaatctttttagcaattcaaaaaaaaaaaaaaa

SEQ ID NO: 63688 - DNA, 951 bp, Cannabis sativa
tattgactgttcgtatacggacaagttaaaacccatgggccatatgggttgtcgcatataatagtcttcggactaatcgaagtgaagatgcaatcttcacatatggcgcggggaagaaaacacttggtcatcacgtatatctattatacatcctaactatgtatacttctctatgcatcccgattttatcttattgttatgtgatgcatgacgtgggactcaatcttatctcggtttttaaccttctcgcatgattctattatttgaggacttataaattatcaggatttataccgtcgacacatcattcttttcctttgtggaaatgggtccaagtgtaaattatatacgacagtgtactcgttatttagatgaaaaaatcatttgattacagtagatttattttcttgaattgaaagggaattcgaacttgggacttcttttttataaggagaaatgtgaaattactaagctatatctatcactgtatgaccacataataatattggatttataatttcattgtaactattaataaaagaataattgtggtaaaagtccccaaaaatttagagttgatgcagattagtcttcaacctcgaaaattagcggtgatagtctccaagatcacgttttttgtaagtctgttagtccctaacataattgatccgtcaaacccaaataaaatggcacgtgtcaattttttattgatccaaataataattttaattaaaaaaaaattaaatagaataaaaactaaaaaatatattttaaaatcataaatttattttattttttcttttcttttcatttttttatattttttttcttcttcgtcctcctcacccagcagtgatttcaaaaccaccccgaccttcacccaccccatcccccgatctactaaggagttcaaaaccaccctaacagtgatttcaagggctctaaataagc

SEQ ID NO: 63689 - DNA, 875 bp, Cannabis sativa
  modified_base (156)..(159): a, c, t, g, unknown or other
aaccaaatcgaaactcaaaactcaatcatcaaacttcaaactttccactttccagattccagacctgcatattataccccaataaaccatttccaagcaacaaaccaataacccaagctcagaatctaaaattaccattaaagctccaagtttgannnntaaaactcaaaacttggttaaacctactaacaaccactaattcaagcttaaatcaacataatctaacataaatcatgcataactcactttctttaaaatcacgaaataaaaggggaagttgcttaagaccttaccttggcttagagattacaaaaacttgctgagaatcacttgaattttggaagaaaatccagaaccctaaatggttctctagtgttcgaaaagagagagagagagagagagcttgagacaaagagactttcttttgtctaattaaatctttttatgaaaaatgaataaaaagaaaaggtttttcttattttactttcagccaaagcataggttaataataaattcttaacttaaattaaaaatccacaaaagacaaaacataaatggcaaaatgactattttgcccctcccacactaaaagtcataaaatagcactaaggggtaatttgggaaattctaaaatcctgactattcccgacattcccaatgtctaaattattgtctcgctatactaaaaatactaagatttgattctaatagccatacaccgtgttccaatattgtcgggcaccaaaacatgcaaaattataaaatagcatacgtgacatattaaatgcattctgaattcaaatatatcatcataaataaataattcaatactaataaatatttttcataattaagtcctatttatctgctaattt

SEQ ID NO: 63690 - DNA, 900 bp, Cannabis sativa
cccaaatatatatatttataaatccgatccctttctgtataaattcaaataagtgcatatatatatttggaatgatgcttggaaattgtaactgatcccacttggtacgagttcacattcaaaacacttaaaatatatatacgagaaaagtactaacattaaaaaaggaaatgaattaaagaaaaagaagctttgaattaatgaatatttgattgataataactcggacgggggaaatctattgctttgttaaatgtaacgaaacttatttctataaagagcatattccattctaatgaagttggtaataccgtgattaatattcttttgctgcaaaagtgaaaaaaggattagatccttatataattatttccgtaaccaaagattagtttcatgccaaatgttcaaacaaaaagtaaaagaaattaaagttggaacttaaagagtttgagataatacattttttatattttctcctagtatatagcgtgtaaaagtaagacaaagtcaatatttcattatttctttattttattttccctattcatactataatttttaaattcggaatttttttttggctaattagcatttttactctaattttgacatctattaaattatgtcatttcaacttttaaggtcgttaaaaatactcttttaacaatggaaaagtatcgaaattgttagatttaaagacttttgtcgtgggcatgatttattacatgtaaaagttcgagggtagatatagtttatgggaaataacaaaattgaatcatactagacaaagtcattaaatctatttttaatggccaaaaaaattaaatttaaaaaacatgatttagtacatgttaagtttaaaattgagaaaaaaattactaattagtttttttttttttt

SEQ ID NO: 63691 - DNA, 1256 bp, Cannabis sativa
tttaaatcttaatttcactacaaacgtaccttttattttaaaaatgattaatgatattgttcaaacaaaaattaattaatgatatatataaccacactctcctaactacaaattataagaatgtatctataaaatatatatcactatcattattttttaaaaaatatatgtttggacataatatataaaatgtattttgaaagtaattaattctctaatcaaacttaaattttatcaaaatattttctaatataatacgtataacaatgaaattcattattttattgtacatataaaatatgtatatataaccacatctaaagagcacaccaatgtagtcgcaataactaaaaaaattctcaaagatcaaaatctcaaatcctattttacaaattaaaaaataaaaataccttacctaattaaaaaaaaaaaaattgaatatacatgttcacttaatatctcttaattaaacctaatgatacgtgcataatgcattgcacgtaacatcaacctagtatatatatttttatatataaacatatataaaatcatagttatatttttaagacttataagtagcgtttggttggaggtaataaaataaaatggaacagaaataaaataatttttattctattttttttatttagttacatttcaaagtattggaatatcgttctaatagaatgctctttctactatgggtgtttatccaatccaatccatactattttgctcatagtgcatccgatccgcactaagtgcagatttcatattttggatccaatctgatttgcacaatagttcaaatccaatccaatccgtaaaagtacggattatatcggttattttggattagttattttttaatattaaattatttaatatttattaaaaatattttttttcacataactaacgacaaaataaaataaattattgttattttatgtctttaatgacaaaataaaataaataaaataacaaatgacaattttaaaagaagaagaaaaaattgtatgtaaaaagatatgcataattttattttaaattatattctccttatatataagaaatattaaaattttaaaatactatttttttacattaaaatattaattgtatatgtaatttttttttaaaaaaatatataaatatatgtggatttgaacggttacttttatatgtcaaacaacatccaatctgcacaagtgggattttgaatttttcaatccaatccaatccacacaagtgcg

SEQ ID NO: 63692 - DNA, 1484 bp, Cannabis sativa
  modified_base (1127)..(1132): a, c, t, g, unknown or other
aagaattaatattatatgtgcatgggaaaaacgatattggccgctatttaagccaataatagataatctgcatggaccaatgattagggatcgaaccacatgttttgacttatagtgacacttatataattgtcatattcctcaagtacgtactctgagccacactcttatataataataaaattgattttttttatatatataattatgattttttgtagataattatttattattttgtatcagtgtcagattcacatgcaaacattggtagtgccatgtgcactataagccaacaaaatattcaggtggtttgagaaggtatggggggcattaaaataaacaaggagagccaattgaaccatgttctacttttatatattatattatatatagtaagataaggggaaataatataataaatataatcattataatattaatagtattgtatgatctattccatattatatataattatatatatcatcatgaataataatagatgtgtgtaatatgttatatggaaatattaattaatatttgtgtaatgtaaccgatcgtcggactaaacaatggatcttcatgacaatatatgatcttctacatataaatataaatatgaataattcgacaatattaattatacctcttaaaatatataattagttaaaaaatttctctcaacttttacatttatagatttttaatttttttatcaaaatttatctaattattctgtttaaatgctaacgaacctaaactttgacaattatcaaatcgtatactcaaaaatatatctaaaaaaaaatcaatattttttaagtaaattttaaaatattaatttagatctttaaaaaattattttgaacaattaagaaaattaaaaagagattaaaatttaaaaattaattaagtagtttaaaaaataattttttttattaaaaaattcatttacatataaaaaatatattaaaaattcgatttatatgtaaaaactaaattttatgggaacgagtttgagtttattttttttttctctaaaaatatataaatttatttaagtaaacataatatttttttaatttaatttataattttttaataattttatatttttattgaannnnnnattatttttttttaattttttaagataagagtttataaatatataaataaacttgattttttctccaaaaaatttaagtttttttaaaattatttaggggatttccaataattttggtttgattttttaagttacttgtttacaaataaaataaagtttgaaaatatttttgtttaagaataatttagatttttaaagtaaatttaatatttttatcaggtttttatagtgatttttattaatttttttaagaattaatagaacaatataatttttaaaattaatttttttaataaaagggaaaaaaaattgtattggtcaaagtttaaagggtaaaaatactaatttttaa

SEQ ID NO: 63693 - DNA, 1107 bp, Cannabis sativa
tggtgttcaatttatcaaataagtggttgtttccattgcatatggccaatagaccaaggtaatttgagattgaaaaatgagtgctctagccacattaagaatgtgttggtattttctttccacaagtgaattttattgtggagtatcaatacaagaatgatgtgcataattcctgcagtggtgtaaaaggaagttacattaaactcattggcattgccagttcttattgctttaattttagctaaaaactgagttagtatagaagaataaaatgcaggaatgagagtttgaacttctcctttgattttcatcatataagtccaagtaaatcttgatttgtcctcaactatagtgaggaaatacttatagccttcaaggctagggaagtgaaatggtccccaaacatccatgtgcaacaaatcaaataagtttgcagaaaaattgttatgagatataaatggttgttttttctttttttgttaggcttgatgacaagtagaacaatgaaacatagattgttttttaaaagaaaaaccaatctatttattcaatcttgtcgaaagttttacaaatggatgaccaaggcaattgtgccataggtcatttgtttgagatacagtattgacagtacaattagatggtaaagaaagtgatagtgagtagtgagatctggtaaaggagtggacaaagtctaaacaggttcaatgtaggagttatgtgcagaatttgaaccttgaattgtgcctgtctaattggcttgaggagtggattttaatttctctgatttgttcttatcaccataaccaggggaaatccacgaagaaaatagcacttgtcagcaagatgaccaggtttgtgacagtgagaataagaaggcctaggtttcttgcttctaggttaattcagaggctaaacaacaacagccatgggaggaagtctagatccaagtgttctttgttgttcttcttgaacaaccatggaaaaaaaattgaaatgaaaattaaaggatcaatgagaagaatgtgagctctcaatgagttataagattcatttaatccagtgaggaattgaagcacttgatctatgttgtagaattcttgtagacgt

SEQ ID NO: 63694 - DNA, 1076 bp, Cannabis sativa
aaatgggggtggtttttcgtggtggttggcggagagggtttggggttctctggtttgggggtttctgggttggctggtcgaatgaggaagatgatgggctggctagggttataaagccttttggcgtcggttttttggaaataaccgacgccaaataaccgaccccataagtgacgtcaaaatcccttccaaaacttcccaaccccatgtcgtcggttcttaaatattattctgaaaaaaaatatctctaaaggcttgatttgtagcagtgaaagaagataaatcttgttggatctcctacttctttttttctttccacttgtctcttccattctctgttatttcctttaatagtataattattttccttttatttacttgtttttcctcccgcttttttactctattgaacatagttcgaaaagatggaagaaatgatggatggagaagattgtattgtatgtcttcttttacttcgtttagtattttgatagtgggattagaaagaggatcaaaattgttctgttatttttgaagtattttgttattttctttaatatttcaaaagaatttccctttgaatttcggatgtgtagttttagggatctattagtgactttttttgaaaactgattatgataaaaattaagttgaagaaggtattaagaagaaaataagataagatttttatgtatagttaaggaattaataagtattcgtccacgaaagtatgaagtttacaatttattttctagttatgaactaagagaatcgaaccttttgcatggagtaatagtcatatttataggcacatatatttaatgggtcgaacggatccgagtctattagggtgatttgtacaatagcgtttgctggcgtaaaatacatttatttattattataatttgtattattattagatagggtaagtgagactcaagttgaattaagataccttctatacacgatcaaacttttaataatgatatgtgactatgtggggcgtgaggcgttgagagaaataaatgtcaaaatagtaggtgtgcgcccaaaagtatgctttttttttttttttt

SEQ ID NO: 63695 - DNA, 900 bp, Cannabis sativa
atttgtataatggtcggtcagttttcggattaaaaccatgaaaatcgaaaattgaatttcagattttttttgtgtaaaaaactaaccaaaccgaatgttgctcacccctacctctgcctcgaccacgaatattcaagggaaactgaactccctaaccaccactagatccgaccgagttaccctggcttatcatgtttcacctggcatccattctaatataacatcatgtgaaacagtgagctagcctagtcagattgcgatcaggaataaattgataattgccgcttacttgagaaaatggaacatgcgcctattcaactatcaggctactaacatgcttgcttcctaacaagctttttctataatatactaataaaataaactactgaagcaataaagacttactgaaccgtgagtcgagcttatctttgatgatgattgtacatattgtgacaatctttgaaagacaacctgacagctcagataccaaattgtaacaccctactagcttaggcgtgttatcgtgataaatccgttgttaatcaacgagtttattaaaaaacttgtttaaaactttacttaattaacctttacttaaatagaatagactttacataaacagggatcccgtattttaaaagttataactatttacaaaacattaattacaaaaatttgtcacctagcgactattcaaaataaagcctattgccctgaagatcgaacactccagttctaactgtcccgatatgtacaatcttcacttgctcgcactcattgctgctcagtcttagctttgactttacctacacatgtaaataataactgtaagtcgacatactcagtaagaaaagtataatcataacataacttaaaccagattataactaggtgtccata

SEQ ID NO: 63696 - DNA, 936 bp, Cannabis sativa
  modified_base (45)..(49): a, c, t, g, unknown or other
  modified_base (769)..(779): a, c, t, g, unknown or other
aaaattttactttcattttataattaaaaaattaaaaaacaaaannnnnaccaaacggcacctatatttttcaactttttttttttagttttcttgtaaaataactctttttgaaaaaaaaccataattttgtacaaaaagtttaaaaaaaccataaaatttataattttctcgaaaaacaatacataatacatacaaggagtcatcttgatggcaatgaaagatctaaaatttgtattaaatttggtataaaaataagtttgtttgtactatattttacacactatttacaattgtgctccaatacacaagatgccaaaaatagaaaaaaaaaataattatattgacagttatttaacattttttttttttgaatgacagttatttaacattttattgagtatagaaaattattattttttattttaataatagtaatatgataaataaagaatataaagtttagtaaaaatcaataaatcataataattagtagttttatgtaaattaaaggtcaattagaatttttgccccctgaactttgacatgtatcaaatcacgccccttgaactttgtcttcttctttttttttgttgatgtagtggtattttttatttattatatataatcttgttttttttttatatattgtatttatttaaatatattccgacactacaaacaactacttttagtgataactttttagtcacaatataatttttttgcgattaagtgtaacttttagtcacaacaaaaaattacttgnnnnnnnnnnntaatatttagatacaagttgtcaccaaatttaattttagtcacaacaaagttttatgactaaaaacgcatttagtacactaaattgtgatttttgtgactaatatttttaaccatagactttctaatcacaacctaagaatgatgatttataattag

SEQ ID NO: 63697 - DNA, 1565 bp, Cannabis sativa
  modified_base (187)..(187): a, c, t, g, unknown or other
agctctatgagagctttctaacccaagcctactactgctccttcgtacctgcaagacacacaacaagaaacccaaaactagagaaaaactaaagaaaaaccagcggaaaaataaaataaataacacaagaattgattttggagttccctttaaattagaggtacgtctccgtcaagcgaccctcaangttgcttgaatcttcactatcaaaatcaataccaggtttcaaggaatttaaatattccaagctacaaagttagctggtaatctctatggctctttctctcttttcttccttttattttctggtttgtattaaaatatatatatatatctctaactctctctctatttatctctcttgactgaggttatttcttcatgacaaaggggctgctaccactctccttggctgggccaaaaaacacactgtcaaaatgggtaggtggctcccttatatattgttgttgattgtgatttttgttgtgttgtgagctgagaaaaataattagaaaactgttattgtttattccttgtgctgctgaaggttttttggaatcttgaaagttattatttatttatttgtatagtagagaactaaaagattttagcttatgaaacagaaccgactgctccaagagttataattgtgtgttgaggcttgtaaaaaaaaatcttattttattttccttgtaaattgattaaggtattttcccatgtgacagtaagtatggagatttatccaacaatttctacctaaatttccatactaacagtccaaaaaagtctttgcctttgttgtatttatttgttgctgttttgagggtcatagcttgattaagtttccattcaccatcatgtgtcaactcccaacaagtttatgcaatgcttgaacttgttgagagtcaccaccttagttcccatatctgctggattctccttagtaggaactttttccacttgtatctcaccttatgttaccttattccttataaagtgatacttaatctctatgtgtttagtcctgtcgtggaacatagggtttctacacaagtgtacacaactttaacgatctgagtaaactctaggaacctctttaagtagcttgatctctgttaggagtcctttcatccatatggcttctttaatagcttctgtggttgatatgtactcggattttgttgttgaaagtgcatccacaggttggagttgggctttccaactcacacagtttcctcctagtaaaaacatataagatgaagtaaactttctgctgtctctatccatggcagtcggcatcactgtatctttctatattggtgctgaacttttgttgtttgtagatgagtccaaccttaggtgttcctactaggctgaaaacccatttcattgcaagccaatgaatctttcctgggtttgccatgtatttgctcaaggtacttatggcaaaggccaaatttgaccttgtacaaaccattaagtacataatagtccccacaacacttgagtaaggcactttactcattgcttctttctctgctttagtcttaggacattgttcctta

SEQ ID NO: 63698 - DNA, 1902 bp, Cannabis sativa
tttaatttttaattagaaatcaaattttgaaaaattttgaaaaaaaaaatcacttataaattttttttaaaaaattattttttcttaatcaaaattttggacttggaccccaacttaaactttggaacccagaatcgaccccagcatcggacccgatcccaatcctaacctcgaacccagaccttagccccagacccaactttaataaaatcaataaatgaaaataaaaataaaatttacagaacatacttttattttttatttttcaaattggaaaataaaagtggttataaagcacattttcattttatcaaaaataaaagtttatttttatttattttgtgattaaaaaatttaaaactattgttaccaaacggtactataatatttttttaattaaataagtattataaaacatattattgaccttgagagaatgtaaactaaatatgtgtaatataagccatcatactaaaaaataagagagcttgtaggaatataaggagacaaaaatttatattagttccctcttcatgtaaagcgataatgaagtaattacgtctacttaagcttttatatattaatcacaaagtaaaatgcttttacaagtgaacacttaagaagtgtgagaatcatatcagaattctaaaatgagaactctaagtctagagagagaaactatattgaaaaggtggagtgtatatccaaatgcaaagtgtgaatgtgaaaaattaactcgaagaacctcctatttatataggaatgtaagcttggtaaaataataataataaaaaatttgttgatggtgataactcatcaatgatgttaatggctgaaactcaatgtaagtatcttggggcttattcggtaggtcatataacggtcgtattatattaaaaaaaataagtaacatgacttttaaataaaatattttattatattaattattctatcataaattttaatataatgtgaatcgtattatttaatacataataaatgattgacatgtattataaaatttataaagggtccagggttgaggaccgcggcccaagaccaagcccgacctcagaccccagaactggtgcccgccctagatctcgaccctagacccaagctccaaccccaaacacgaaccccgacctggacctgaaccccagatcccatccctggactccaaactaggataggggtcggagttgggatcgagtttatgataaagataatataattttaaaaaagctattagtacaagtcaatacaaaatatagtatgtaataacgaatattaatgcaatgcaatagaatccaacacattacttataacgtcccaacttcaagactccattgaccttcgcccaaagactattgactcttatacatgggtacatcactcttggctacttcatagaataacgactaaccctgcagaccaacatgagtctttctaatgcactttgtgctcattggtccacttatatggaacacttctcaggaagtcagccatcttgaaattatcccacatcaagcacgcttaactttagagttcttttatgatgggctaccaaaaagtagatgaatcttgttgatataaatagtaaaaatcaatccatttaagtcctcttcaactgtgtagtctcatacatacacaatttcagaattatcatcacagttgaccttccccaagcgatgtagaattgtacaactctcaatctttccccttgcaaatcacgagactctaacttaaataatcacctcctttgggagtctgacgtcctcgtcaaccacacttttgacaagggttgaggaccacggcccaagaccaagcccgacctcagaccccagaactggcccccgcttcaaatctcgaccctaaacccaagctccaaccccaaacacg

SEQ ID NO: 63699 - DNA, 1061 bp, Cannabis sativa
cataaaattacgattttacccgtctcatgtcaaaattacgaaaattcccctagtacaccaacagggtcttaaaatgcaacctattaatatagcttcacatattaaattatataataatataatttcttattaatacataattaaactagttagggttgctaatctggtttcataaaccttagggcattacaaataccccccttatgtaaatttcatcccaaaatttagttgaacaactccagatatttttgctgcatatctatctcgagttcctgggttacctcttctactttactattcttccataatactatgatcaatgcaattttcttttttcttaagactttttcccttctgtctaatatttgcactggttgctcctcgtacgaaagatctggctaaagttctaatgcttcataactcacaattgggacggatccaagacatatttttgaagcattgaaacatgaaacatattatgtacagctgcagtgcttgaggcatagccaacatgtacgctactttccctatcccttcaaggatttcaaaaggtcaaatgaatctcaggctaagtttttctttcttaccaaagcgtttactacctttcataggcgatattttaagaaattccatatctttgacttggaaatcaatatcctatcactttggatttgcataggtcttatgtctactctaagcagcgagcattcgtgctcttatcttatcacaacttcctctcacttgtccctctgaaaacaactttgggacccaagaactttctttcacctacttcatcctagtgaactggtgattgacattttcttccataaagtagttcataaagagccatcccgattgttgcctaatagctgttgttatacgagaactcgatcaggggaaggtactttacccatgatccttcaaagtctaacacacatgcccgtagcatgtcttctaagatttaaatagtcctttcaaattttccataagtctgaggatggaatgatgtgcagaattttagctgagtacccatggctcaatgtaagctctcccagaatctt

SEQ ID NO: 63700 - DNA, 1258 bp, Cannabis sativa
tagcacattttagcattatcgctaacaatttataaagtgctacgtctagatggtatgtactacgctaataacaatgttcttttatttatcaaacaaaataaataaatagcaatgctcttttactaattactttctattacacctaattgtaattctttcaagtcttttctgatatgccttagtgaagaaaataattgacattgctcatgaaagccaaggaaagtcttgccacaccgaatttttagaaaatattatggttgattattcaattattatattaaaaatgtaattataatagttacatctttttataatctactataggaaatcaataacaagtaaaaatttaatttttagactcaaattaattatatacaattatatacttaaaataaactaaatttttaatgaaaatatttaataagatatttttttacaactaatgtttataaattataaatatttatcattttttatttataataaactaaataaaattaagttagtatcatgttacagataattttttaattatttttatttattactaaagtaatcacaaccgtttaataatgatccaacgactaaaatacaaataactcatgtggttacatatttaatgtaactattaaaatttcctccatatatatattcccttaaaaaatgcaattatttttcttaaattattgttttggccacctcaaaatataggctaattatcaaaaaaattgtccctcgaactttttagactggtaaaaattctcctcaaattattggttagatttcaggacttctgtccaatttcgttcaatttacaaacatggcaatttatcaatgtattaaatcgtgtccccaaaactttgatgtataccaaattgtatcctcaaaactttgacatatatcaaatcgtgttcttgaatttttattacgttgcgcattcggttagtagaattggacgaaaatccttaaatataacattctcaataatttagaaaaaatatttaacggtctcaaaaattcaagagcgcaatttaatacatgtcaaagttcaaaggacagaaatcttaattagttttttttttttttcattttagctgctccaattttaaaattaggcttcatctctaaatatcataattacaatatacacaaaaaattaataattaaatgtataatcttgggaaaaaatagtgattatttcagaattacccaaaaaacaatcaaaatatatgtttttatggaattttgattttttttt

SEQ ID NO: 63701 - DNA, 1624 bp, Cannabis sativa
ttttatttaagtcgggtttagattcggggttggattcgggttcaagtcagaagccgggttcagtgccaaggccgtgggaagggggtttgggtccaggtctggtcataatccaaaagattgattaagaaaaaaaaaattgtttaaataaatattcaaagtgatttttttttttttgtttttaaaattttgatttctaaatataaaattgaaagttttttgaaaaatatttttacttttccacttttaaaaacagaaaactgattaaaaaaatgttaccaagactcgtctagcattactgtttccttaaatgtgatattaaattacttatcacggattctaagttgcctaattttcttagtttgcccgaaatgcattacctcgggaatggagtttcgtcatttaggagagttgaattaaaaatattaagaatatatatatatattttttaaaataagtatatagaagctcacaatataaattgagcaatattattctatgatattttaatgtttatcttactacaaaaagatattcaacatcctatattggtctattctttttcttcccaaaatggtataggattcaaaaataagagatgcaagtttgacaatatttgtctggtaaagattagtgagtcaattaatattgattgttacacaccacaccaagacataatctttgagaagtgctttgatttgagtcccacatactgaagcagaggtgaagtggcaccttaacctcaacaaaccccctcaaagtcaatgcgacttctacctgaacctcctcccttgtagccatcttgcattgcagagcctgcagttgctttcattgtccctccagaaccaaccatgtccatggctttctttcccttcttcacctctgtcaagaactggtctaatccaaatggatcagcctcctcatcaccacctccacacatgtcagcatcaatatctttcttaggtctgtagagggttgaaagtgtaggctgggcagtaaacaatcccttgtcatacacattgtactggtcatcagtaccaaaaccagattccattcttttttcttggttgaatagcctctggtcatacataacctctccccttccagttcccttagtagaagccatgccaagagcaaccttctcactgatatcacgatctctatctctagagattttactcttctttccaactgttgtatcttcggcttccaatcttctctctctttccctttctctgtgccgctcttcgcgaattctctccctctgtaaccgctcttccctttcctctcttgtctgcattattggaataatagcagctgtagtaattctctcagaacgtgctttttgatctaacatccgcaattcctgctccttcctttccttttccttcatgagcatctctttctgaacttttgatctcaaagcaactgcttctcttgccttgtgttctgcaacatacaacgattcagaaagctttgcaaaatcatcactaatcttaacctcctgaagccctctcccatcagccgtaagacgtttctcaagtgggattgtgtaaccttttgagttcttccaatttgagacacatggtggtatcttccaatcttgctcatctttaacagtcacagg

SEQ ID NO: 63702 - DNA, 669 bp, Cannabis sativa
  modified_base (192)..(193): a, c, t, g, unknown or other
atttacaaaacttaatcatcacaagttcacaactatctcaatttactccttaacttagctcatgtataatacacatcactttttatttcagtattgctattattgctattagtcactagtagtgcttagtactttctcgatatattgtgttgcgattggttagcgatattttctaaaaattattatattaanntatatgagattcgatacttaattagaccaataataatattgacatataaaaaagcgcagatatataacaacatagcttactttattcaataaattgattctgtgatatttttattacaattttagagtattcttaatagattttcgatctacacttatttaaaatagtaaaattaaccgcacaagatttatatagtacaaagaaatttgaaatctgaatagcaaaatacataaacaaataacactatatgagatggtgatttttgaataatattattctacataaatttaatgtaaaaatattacattatatttaagaatatgaattatttcacttattattaattaattttaatatacaattccataatttttgtcaagcttcaaagctataaatatgtgcgactcaacattgagagagagagtgtgaagtttctcccaaacatttgtagttagtatttttttcctataataaga

SEQ ID NO: 63703 - DNA, 900 bp, Cannabis sativa
cacataatgaatttgaacagattcgaggatctagttttttttttctttaataggttgtaaattaatgaatttcattttacaatatgttggaataatattgtctaatttaagagtataccaaacaaatttatgtgccctcatcaaaattatgacattatattaaaaaagaaaaagagagaatttaaaaatttaaagaatcaaaagttttttattaagggaagaacatttattcaacaatataagatgacaagttttacaagatcggaaatcactcaaagaattacccaaatttcatagtggaaattatccgaactatatcgattataataatagagcaaaaacctcataacaatcacacttcgaaaaaaaaaataaatagacaaaacaatcgtaaaacaatagtatctttttaataatcttacaattatgagaaattttaaaaaaatttaaaaactgtattaaaaacatgctacagcaaatgctctaaatttttttattttaaagtttttttaaaatatactattcatgttctacatttatagaatactatttattgctctaaatatattttattaattatttttcggtttttataattatttttgcatgagaatatgtatttatattaatattatatatttgaaataaatcaaattaaaaaaaaaatagtaatgtattttaaagaaattaatatatggtataatataaaatatactgtaaaatagaaaaagtaaaattttgataaactaggtagaatatttatctaacatcaaattggaatgaattaacgtctcaataaaggtggaaatcattattattgcaacaagcagaataaactaacactaatatcgaacaagtctcatcgatgaagtccaacaaacttaatacatatcaaactta

SEQ ID NO: 63704 - DNA, 973 bp, Cannabis sativa
aataatacattttattaggttctcgttatccttttataaaaactatttatataatatatagtaaaaactatgatctgagcttaacagaccagtcatattgttcaccaattcccttctttccccgtaataagaacctaaactaaggttaaaagtgatactattcaaaactttaaacgaaaacaagtctaaaagcataaaagaaaatgaattgtaatgaaagaataagtttggtgctaacatgggtgtaaaatagatcagtggaaaaacctttccacctaaagcatcttttgcttcaactaatatgacactaacccctgaagcagtaacaccgaaatgttttcagcaccgtttgattgctattatgtaatcttccgaactcattacatttcatcggaatctctacccgccacgtcctcggtcgccagaaaggaaacttttgaaagtctttagcacgttaagatcgatttcgccgcaaaagtattctccacctccagagaggacgacgacgttgacattagggttttggtggagggatgatcgggctctgggaaatcttctttgttcacggataatttcataaaagtaaaatgggttgaaacttaattggacccgaaaaaaagataaaatatgggaatatgaaaatatattataaaaaatatggcatatttcataccataaaaatgtaaatatatataaaagtccatagcctaaatgccattaaaaaattgtgcccataaaaaaattaaattcttataatttttccatatattgtgtaatttctactaccgaaaatggagttaacataagcccatctgactacattataagccaagaaattacaagttctggaaataaacaaaaaattacaacttaacataaaaagtagagagtcttttacaccgacgcgcgtagttatcaattccccaaaaggtgccagtgcctgttagagtcttgataaccgtctctgaatcac

SEQ ID NO: 63705 - DNA, 1097 bp, Cannabis sativa
cttaattattaactactagaaaaaggactttctcttcagtttttaacttagtttatctttgatttttaaaaagactcgctactgaagtcatttgaggcaaagatgtagtgtcggaataaattaaagagtgcctatgtcttcagttattacaaaataagcgaagacaaaggtgaagtctaatttcaaggttgcctcagggaagatcctacgtcttcgattattacataataaccaaagagataggtcttttttgtcttcagttattatgtaataaccaacgacgtagggctgctcgtatgtttttcttcttttgtaattatttgtctaaatcagaatattattttaattttaattttaatatattaattttttttgaaataattaaaaactaattataagaataaacatttattttaaaagaaaaaaatcaatttaattatatttcaaagttaaaggttacaaaatataatttaattatattataacaaagttaaagtatactttataacatgctaataagtccttactaataaaaacagaaaaaaagtactattgcctaaaattaaaagtctaaatctagctagtacatgtgctgtgtatatttcgataaccattgatattgcaatagtagcaactctgtctccacatcgtatttttgcttctttctaaactacaatattaaaatgtacattagttatataacacttaaatataaataacttacccaagtgatgcattaatgtttgacacatggcaaaaaaaaaaatatcctggagttgagtagtcgagtcatagcagtcgacttcggaggggtccttagtcttgcggggaggttgactttggaaactttggaatgggtgtttagatcgcgccaagttgtttccaaattactatatttcagtattttgtaccatgaagcatccaagtccaaggcccgcaagctgaaaatacacgaaacaacacctcagaagtcaacctaggagcctaggatttcacctagtgcccaagtcgacacccctactatggtttcagtttttgagaccgtcttagtgcaattgggtcaaaatttatattgggacatgaatttaacatgtcac

SEQ ID NO: 63706 - DNA, 852 bp, Cannabis sativa
taaacagtttgaagctctgctagctagatatgaagtgcgccataggacttctctaccttaccatccacaaagtaatggccaagctgagattcccaattgggaaattaagctgatactggagaaaatagtgcaaagattgaggaaggattggtcaaggaaactagatgatgcattgtgggcttatagaatagcattcaaaacacctatcggaatgtcaccgtataggttggtgtatggaaaatcctctcatctaccggtggagttggagcataaggcctatagggcaatgaagaccctgaacatggatttagcagctgcaggagagaagagactgttacaattagatgagttggaagaattcagaaacgaagcatatgagaatgcaaagatatacaagggaaggacaaagaaatggcatgataaaaatctgtttaggaagaaatttcaacccgagcagcaggtcttacttttgaactcaaggttgaaactttttcctgacaaattgaattcaagattgtcgggatcgtttaaggtggtcaaggtattcccatatggagcggtggaactgaaaggtgagagtctaaaaacttttaaagttaatggacaacggttaaagctctacttgagaggccgaattgaccaaaccaagtctgccatcatattggcgcctctttcaaagaaactcagcgtccggctataagacaataaagacagtgctcttgggaggcaacccaagtgatttagttactttgatgtttttttttgagacttttgtttatttgtttatttgtttttagcattttaatgttttgtaaactttcagacgtctgttttaagttaaaccgtgcaaag

SEQ ID NO: 63707 - DNA, 1033 bp, Cannabis sativa
gataacaaaacctctggatttctatgctaaactcctcaatatttggcctgaatggtgaaggaaaatctaattttccttggtttcttggtttggtcgaacaagaggagagagaaagagtgaagaggtttgatgagtttcactttctgtgtattaaagtttattttaaatttatatatttaatattatatcagcttatatcatactacactaatccaaggatattctaaaatcctctaactccaaaagtaaaacatataagagcaaaagataatttttccctttacttctctaagaagtaacttaaccatataggggtaaaatgctttaacaccataacccaaacaaaactcgaaattttaaatgtctaactatcttgtgtcgtcaattccaagagacctaatcttataaatgtaacactaatagccaaaacgtcgcattccatcattactgggcataaaatatgaaaattataaaatttcatatacaacatatataatgcatctagaattttaaatatatatcttcgcgtaattgaaaaaatattttcttaaggtttatttctggcaataagtcctaatttctactaagagacatataatcatataataacaattaaatccttaattatctgctaattcttttgatttaactatgtggttattacatattttgtattattttgaaaaatacatggccaaatttattatttaagaaaacaaaagatctaatatataacttttgcaaaacataaggtccgaaataatatttacccttgttattttttattacttttttcatacattatatgtcatatacttgtactattgtcatttttctaaatttattttttaattaattattcaatattttttatgtttcttaactattttttattgagttatgtcctattttttcaatatattatgtaattttatcaatatcaattagctaatatactactctacaatctaattgggacatctccacgttagagacacaaccaagcttagaattagaaaaataagccaaataa

SEQ ID NO: 63708 - DNA, 619 bp, Cannabis sativa
ggtaatacacatagctttactttggcctgacattttaacatagcagtaaacagattgagggtcttctttaatgacaatgactcgagcatagtttttcctccacattattagaatacgattttcaattgtaggactagtatagtatccccaattagaaaatttcctatttatcatatcctttattctatcatcatttagctttgtttcaagcaaaccacaaactccaaatttattcagctgacaaaactcatacacagcatcttgtttctcttttttattgatgccccttacattccaacaagctatgttagtgttatccatgagcaaacaaggtctgatctgagttacttacccccatccctttcggctgttcctctccatacactgccagctcttccttttgctcatccaaatcatgtccctgcttgtttagaattgtgaatgagttgctggttgtttcagctacctcaacccccttttcttcttgcaaattcagaggtctcttggtagcttttttctttgggataacccaattctgatgatcatttttaccttgaatctccccctcccctttctcattttgctagtttttttgctcttgcaggttcttcccctcctt

SEQ ID NO: 63709 - DNA, 1088 bp, Cannabis sativa
  modified_base (1026)..(1044): a, c, t, g, unknown or other
gagagagagagagagaaaggaaattgattttttttttctcatttgttcttcctcatgtgttgagaactcaacaagaacaaacctatacaatttatcctaatagtccacagtattctttgtgtgtggtaaatcgattttgaagacactggtgtgagtttaaattgcattatttagattaaggaatacaacatacgagaagttttgaggatatcctgatagacttcaagatgtatttaatacaaacttactatttattgttttgatttaatgtacacacatctggagatcttttaggctatggtacaataataatcacataatatgaaactcttccgctgcatacctgatttagtactataaaccaacaattggtatgaagagcagttccatgaatgtgtatacattaaatgttgtgtaggttttatgcattaatatatatgtgatatgtatgtgaatggatggttatattattgtgaatgtatgagaggtgatgaatcattaattatatggtataattgggtgtaagttgtgttgttattatttttaaaaaataatatctaagttaatttgggtaaaaattttatgtaatttattttatgaaattattttacgtaaaaaaaattgtacctatgtaatgttcatagcatgtgagctcagattctaatcttaaaacttggccatagacgtcaaaatcatatgcatgtgagctcataaatttttccctggccatgcacaaccacctgagtggttttaggtaccgtgcccacgtgaaaaccatgcatgcatcatatgcaatagggacgtgagttccttaacgaggagcaaacatagtcgggtcatatggcctgtgtgactgtggctaatagagtaagaacccatgagggttctagggtggtcgaaccaccatcaagcaccacgagggactcattccctcctcctatgctccaccatcatacgacgaagacccgaggtcgtagactggtttgacccgtttaggtcgtgcaacctgttgggttttatgccctnnnnnnnnnnnnnnnnnnnataatcagatttacttattgatatagatcagaaataacatttaa

SEQ ID NO: 63710 - DNA, 1322 bp, Cannabis sativa
ttgactttaaattttagattctaaatagaaatttaaatttcagtttcctagaatacattggacaatacagtatgactttcacaagttaacttccttttcttcttgttcccacttttcctcattttatcattttttctaacttcgagtggccttctcctcgcaggcttctcttctctcctatgttacccatcaacaattgtctcagcgagttgatatgctcgagactgagcttcggtagattagggagcatagggacgacttagccaaaaagtggaatgactcggtggtcgaggtttctcgcaccaaggacgaaggagaaaagcagtctaactgaccaaaagaaggtcaaggaactcgaggactctctcaagtccctccaagctgatcacgagaagaaactcaaggagttagaagctgaaaccaaagacagggtaaacaacatcagcagaaggaccatctatcaaatttggtcagccaacctcgatttggactttagtttcttgggcgacagtgctgatgccatgcttgccttctgcgagaagaccaggagagaagtattaggcgaggaaggagaagttgaagcagaataagaagatccaaccaactctcctacaatgtaggcttggtttttaagtattaggaaaatggccagatggccgagacaataatatgccccatgtgccacttttataagaacaaatttgcaaagtttgatggccaactttactcttattttatcttttattcattgcctcgtatttatgcattcaaacttaatatatttgcttacttgtgttttttctcacaatttaaacaattatactttgatcaaatttaaaatactttaagcctttccattgcttttattttcttttgatattatttaagtagttagtaatctactatgtgcgtgagaagttattatctgatatgcttttgatttgcgagcagttatcagttctgctttgcgtcagcaattatgatctattttagacaaacttaaacatacttttaataattcatctcgtgaatcactttgtatattttggattgcttgtatgaatagttaatccttctattcacaccttagcttaagtatttttttgagacatctttgcatgtagcttatcgttgttttatgagttaaatctcatttacaactgctacttttgactttgcatcatccatagatgactttaatcaaccacttaaaaaactatgaaatttttttaaaatggagggtttgcaatatattatgtattttcagataatttccagttgatcatacacatatatatgccccttaattaattttaaagaat

SEQ ID NO: 63711 - DNA, 951 bp, Cannabis sativa
tcataaaaccaacaaaaattcggttatatagctacactttatatagaatagatattgtcacgagaaaaatgagctttttttagagtcttcttgtgaagttgattaacctacttataaaattgggttcaattttcttttcggaaaatgaaagaatattctatgaaatgaaaatttattagtttacaattgacaactagctacttgttttcattttctcccccaactttctttggataatttttaatataaagttatttgttaacaaaaattaaaattccgtacgtacttactgtcttataggaaaaagttaaaacccaaggaaacataaaaagaagaagagaagtataacttacaaaaaacttccatttggttagaacaatcgagagataacaaagtgatgatatatattaattattttctttgttttaatatgtttttttttatttgattttaaataatagaaaggtagatagatttatgtttgtggaaaaaatattgttataaaatattaatagtgtttagtagctaggttagttcgggctatgatccttcgaacaaggcagttcatgagctgttatctccgaccgaggttaggtcttcttttgctttgctgttattattcctccaacctacaggccaaggcttctcgaagtcaaatacatcaaatatctattatcttgccacttaatatcgtcatgaatagttattaatattttataataattattattgagttaaattgtatgagattcgatattaaataatataatattttagatggtactaaatactactagtatactttactagctatttctttatggaaagtgagcaactattaagagaaatactaaacgatgctcataaattattagtaactagtatttttatgatgagtaatattattattagtataatttataatatcaaatcttatataatttattttaa

SEQ ID NO: 63712 - DNA, 669 bp, Cannabis sativa
ggcatgatcgatgagggaatcaatctaagaattgatatccagatttgtaatttattctggtgatagagtcgtaatcattagggaggagcgtcttgaaattcttttgccctaatttgaagaagaaggtgaaggcaataatcaatgtcttgccctagagttttaattcatgatttttaccctcaatgattcttggtttgaaacgagaaaaattgaaagattcagtaaaaatagtaaaagttggcattaagagctatttataccatcaaagaataatctacgtgaagctaggatcaacgacctaatttcatattccaaaaacacagaacagatccaatgtcatagaagcccatccatcaggcatttaatcttgtagctagaatcaaggtatataaatgatgatattgtcctcgagaatcgcactaaagtaaacagttgccacattcaattgatttgatatgcacactttgtcaagcgaatagatgcttcgccagctagtaagataactccacacaagactttaagttcgaaaaattgaaagatgtctcccattcatagaaagtattagaatttataaaggtttcacttttagcatccacctgtccacatctatagactgaagccagactctgcagtccaaaacattcgagaagcttggggggtaaatgttat

SEQ ID NO: 63713 - DNA, 1870 bp, Cannabis sativa
agtagtgacatctcacatgaataataaggtcttgcttaatttgagactcgaattggtaacttgtacaccaatatcaatttagtatatataaattaaagctgaaaaatactagtggtatctactatcttttaggtggtataatattgttagtataattaagtattgagtctcatacagattaattaaaatttagggaatatcgttaactaattataaagtgttacttataagtggtgctagacactactggagtccaatatttatactctttaatataacatttagggcttgtttagtacgtcgtgttgtattgtattgtgttgtatcctattatattgaattgtattatttaatacaatactcacttgtattaatagtttgtgtgaaattatattatttttaccataaactcgacaccaactctaatctctgtccaggtcagggttcgattttgggattctagatcaaggtccgagttcggtttggggtcggggcccgagttgtcacaaggctaatttcttcctcacaaattttccctgcgatggcctagattcaccccaatctagtcagtcaatccaacacctgtttgcatgcacacacacactcacggtttagtttgcccagcgtcactcaacaacccacacttgttatcaaactaaaccgagactggggtttaggtccaagattttggtacggggtccggagtttgggacaggagactggggttaaggattaggaccaggatttgagaccgaagcagaattctccaattctgaacattttgtaaatattataatacaaactaatatagataatctatataatatattaaataatatgatttatattaaaatctatgatctaaataattaacacaatacaattatttaatacccgtttagagagcctaccaaatgagttgttaatgattaacaataatcattatgatatcattagttctgaaactagactttttgatccataatttccatcaatagaaaattattatagggtcgcaacgatatatagcagttgagctttattttccaattaatgactcaaaagttgacatttaacgctcatctcaaatcatataaatcaaattttgaccataaaaatatcatatgattaattataaaatgaaagacgagaaaaaaagtcattataaattgtaatgtgccacagcagaattcagaaaactaaactgtgatgtaattaaggtcaaagattaaacattataagaccatcaatatttcacaaaaatatatataaattaagaacaatagtattattaaccaaaaaaataatgatgtcaactttgagccatcatttcaactatatatatatatatatatacagtcattcattatatacataacaaatgtatggtacaatctctctcaatgtatatttattgagagataaacacttcaaacaagccttaaattcctggttttcagaccaaagaacgtgaatttatggcaatatgacttgagagtgcatttagtagcattcaaaacaattttttaacaaaaataattttaggtgtccacctcttattatttaagtgtatgttgtagttatttaaaattatttataatttttttagaaaatatattataaatagtttacaacggaaagattaagttgaaatatttagctactcgtgattatttttatttatacatatagtttacgactgtttaaattttatttttgacactataagatatttgaatttttttgaaaatttactaaataattataaatttttttttgaaagaactcttttgaaagtgtaatgtggacttaccctataacttttgtagggtaaaaataatataacataattttggaggacaaaaaaatt

SEQ ID NO: 63714 - DNA, 627 bp, Cannabis sativa
aacccgttggtctttctctggggatatatccttctcctaatctttatacagtactgcctaatattaggccatggctcttccaagaaacaagaagaagaatcttcaacctccgcaatcgattatgaggagctcacagaaacgtgtcagagccggaacgaggtggttcccagggaggatgatgaagacgactatgataaggaatacgaagcctttcttctgaatgaattggggtattatttttacgaatcacatgatgagacccttcgggcgatgaaggcttccgaggatatgttattaaattcgaactcgaatacgtgcgtggtgtgccttgaaaagttcacgttaggggatcagattctggaattgccttgtggaaggcacctgtgtcatcgactgtgtgcattgccgtccaacgattgtcccggatgctggtacgagcttcccccgtggaatgataagaatgtctttgccggtaccgatgatgataacgaagacgaccacgactatgatgaggaatacgaagcctttctccaaagtcaatcgagttctaaataaacaaaagatatgggtaataatctccattcaattcaattattttctttatagaaatgctaagttcacgttaaa

SEQ ID NO: 63715 - DNA, 921 bp, Cannabis sativa
ggtattatgagttttgaggataaattttaactaaatgcaagtatacaaattcaaatttccctttataattcactgttcgcaaagtttgatcacaattccgatggagtgataagcttgtaggagtatatgacagagacgaagaagatgatggacatctccaccgcctcgtgagaaaatcactccgttgactggtcaacaatgttttatggtatctagtaccctttattatttttaaattggcggtaaaattcaataatgaaggcgtcttttgaattggaattgggttagggttttatgggtttaatatattgtatataaataaaaagtcatccaatcgtatttttggatttattttatttttattttattatatataaataaaaagtcacccaataatttcttataaatcaagaattctgttatatagccacattttatatagataaatggaatagataatagatcgtttaagtttttatttgttattgaatcttgtatttgttaattatatgaaatctaataatttagtcttaattttaataattatctccattattatttttaatttggtttgattggtttgttacaagaatcaaatctctgtttaattgttgttatatgcatatacatataaatgaaaatatcatacatgtatactattttactcttttctttctttttcttgttttctaaagaagtattttattgtgaatcttacataatatatagctatatttcatcttttttttttttcaatcttcttcttaattatataatcacgctatctactaaattttgtcattaaaatttatagggaaattctataatgcatctatttaaaatagatatactgatacatttctctttattttagtatccgaaataatattttagtcaaattttttttctcatggtcatgta

SEQ ID NO: 63716 - DNA, 2447 bp, Cannabis sativa
ttatttttatgctttaaatatttttatttataaaactacttcaataaaaataataaattatttttaattattttataatttatttacaattgtattatagttattaaaatgttatttttttaattatttttggttgttttatagtttatttatacttaatttatagttatcgtgagattaatttcttattattttttaattgtggttttattctttttaaacaaaatatatttttgtaattttaaaattttatgaatatatttttataaatatgaactcgactgtaatacataagcataaacaaaagtactttttctaaaaatcttcatatttttatatcattaaaaattcataattttttttttaaaaaaaatcaattaatgttaaagttaatgtaaaaaaaaaaaaaaaaacaaagcccaatgtacttttctgaaaacaaatccttaaaaagaaattattttgtcaaataagaaacatcaaatttttttactctattttttaaaaatatttcactaaaattctacttttttttttttattttacctcacacatttatagtagatcatacatcacttctttataattttctttaaaccatttaaataatatatttataatacacacaaataataaaatattaggatatagcagcaaaattactcaaattttatattttttaatatttaatcacaaaaactgattttttgatgacacattttgttttgctctttacactttcgtccaaaaccctcagttaaatatcacggtagatacgtgtacacaagagtacacgtggtaaaattttagtagtccacgtatttttaattttaaatataataaaaataatttaaaaattataaaaaataatttagaaaaacaaaaaaaaaactttttttcttttttttctttttgtcatcttttttttttttcttttcttcttctgtctctttattcttcttctgcttccattaccatcaccagagtactaccatctcgccacaacaattgtcacacctcaactaccattaccaccatcactatcccaccattaccaccacccttatcccacaataccattatcaccaccaccattattcccaccataccaccatagccaccacaatcttttcattaaacctaaaatcacaacaacaaaattaccaccgctaatattaatatcctaaattataaaaaattaaaaccctaaattaaaatcacaataaaaaaccacaataaaaaataattaaaaaaatattaaaaactctaattttatcattaatcatacaactccctctccccatcttctctttacaaatcaatccaaaaaacaaatacaatatcatattacaataacaaaatttatttagacatctgggaaaaaaaattaaaaatagaaaatagacatcaaattatgcaggaggtggtggtttgtgctagaggggacggtggaccgaagctaggcttgattgtggagggcggcgctggcgatctgagagagagaaaatatctagagagagggggtttgatggtggcattgcgctgggctcgggtctgacaacgtaggagtgtccgattgtgacaatggttgggttgactacagttgaggtcggcgatagaataaggggaaagatatcgagagagaggagggtctgacattgtcgttatctaggcgcgactctgatggagacatcttggctaaaaaaaaattgaggtcgggggctgcaaaagagaaaaagatctggtaatggcagaagaagaaggattgggggtactgggatctttcgagaagaaagagaaagtgaaagagaaaaaaaaaagaaaaaaaggaaaaaaattatttttattatatttgaaattaaaattacatggaccactaaaattttgacacatatactcttgtgtacacgtagacagtccaccgtgacaattaattgagacttttgaatggaaggggtgaatagctaacagaaatggggtttgggtagttttcctaccaaaaaaatgatttaggtggttaattgttaaaaaagagatatttgtggcaaaatccccttaacatttataattgttacacatatgatcctaatcaaaagaaaaaagttgcgacaagagtacattatcttacaatttttttacagtcataactttttttggccattaagtgccaactcaaaaatatgtggtgacatattattggactatgtattaaataagctaaagaaatatgtcaccacttgtttttgagctagcacttaatgggcttaattggtatttatttgatatttgccacgttacacaattagaactcaaaagcaaaagaacacgaagattttatagaggtgggatctgatatagctcccttaaggttacaaagtatgaatcaaagatggaaaatctcaagtgttgagagatgttatagtgggatagagagagagagagagaga

SEQ ID NO: 63717 - DNA, 592 bp, Cannabis sativa
tcaaatacccaaccaaaagatcatcgtcagtgacctaatcttttttatgcttgaaaatctcaaaaacttcattaattagaaaggacttttttatgcttgaaaatctcaaaaacttcattaattagaaaggatagtggtgatcacatggggattcacctctcaatagctaaaaaacccgaacaagtgttgtgaagcccccacttagcaagagcgtgggcactaaaattagcattcttaggaatccaaagcacattataatcaataccatcaagagcatctaacaacttaccaaaagaagaaccaacaaaccatgaaggaacaaccttgcttgaaatggccttggttagaacttggctgtccgtaaaaaggtgcccgagaatagacccaaaccgctgaaggactttgaccccatgaagtagggcctcgtaggactgaacattttgagcgagttcgacccgaacctgaaatagtgaacccgaaatttgtttttctaaaaaaatgttcgggcgggtcgagtttaacccggtacccttcagacgagttcgcaggttgagtttttaggagtaccgggtttcaggttgaacccgcgaac

SEQ ID NO: 63718 - DNA, 1544 bp, Cannabis sativa
tctatttttgtgttgttttagagtctaatttaattaattttttagtagtttttatgttttattattcaggtttacatttgttttcttcttatttcaggttttaatggtcaagtacatcatatggactgaaataagagaaaacatatttgaaaatatgaatatggtggatttatcatgaattttaggttgtaagaaataatacaaatgttgacatggtaaaatgattggtcaactgaatatttaaagaccaaataggtaaaaatatggaggtatgctggtcaagtttaacaaggctaagggcacattaaagatttgagagatttcttcgttatcctaaggaaatataggatgaagctcaatcctttaaaatgctcctttgtggtaagctcaggaaagttccttgagttcactatgaactcaaggggaatcgaggctaatcccaagaagataaaggccttgatggatatgaagtccccaactaagatcaaagacgtccaaagctttatgggacgaattgcagccttgagcaggtttgtctcaaagtcaattaacaagttcattccattctaacatcctacgaggaaacaaaaagtttgaatggaccgaggaatgcaagcatgccttccaagctttaaagtaataactagctcaacccctggtcctatccaaacccttagatagtgaagaactaagcatatacttggtagcaacggaacatgttgtcagtgctgtcttagtaagggaagaagacaaagtataacacctggtctactatgtaagcaaaaggttaataggagctaaaagtaggtaccccctcatagaaaaattaacctaatgcttactcttatccgaacaaaactccaactctactttcaagcttaccccatcacgataatcactgacaacataccatccaagattgaccatcaaagtccaagccctagccaactttgtagctgagtgtatcgaggtacaagacgttgaagataagacgggggaacaagaaagtgaaacagtagacccaaatagtaccaccctaggtactaatctgagtagcttgcttaaaccacatatattagactcaaagaagaggcaagagtaagagcaggggcatccaaaagaaacttagaagctacacgtcaatggcttttctattgaccaactatcaagagctggtattaccctaattactcctgaaggatagacaaatgatttttacatagttctgacattaataatctctagtccacgagttagttgtattggccctttgagaaagtatttgaataatataagtgtttacaatatataccctaactctgcactccttttgcttttcttgatgaagacgaaagcttgtaggaatttttgcagaggttcggctagtataaaattgttcatcctttgtacataaaaaatgacactacaagaaagaggaccttttatcccacttttttagttaacaaaaataaaaaaatgggataaaagatatattgagactttttatcccacttttagatttggctcctcaaatatgcagcaaa

SEQ ID NO: 63719 - DNA, 2310 bp, Cannabis sativa
gtacttaggatgaatccttggagagtttcttagtgattaacaagtaaactcactttaaaactcacttttgttgtagtggccgctaatagccaatagtcgcgaaatggggacttattagcggcagacccctccactgctattgataatttatgttgtagtgtcataacaagtaaactcaaataacttgtaaaattagtacatttaaattggaaatttcagtacttaggatgaatccttggagaatttcttaatgattaaggttcaactaccatgctgtattttctcattattatgggatgtttgttctagtggaagataattaatgtagttcctagctattaaatgaatcggcagaggcgctagaaaatgacccaatttgaggccaattctttcgtggactcattacgattcacattcactttcatagaagtcagatctcaacattgccctattcaatttttcagtaaatatttttttgacttgaaactacaattaagtatgtaatattcaatgagtgatttgctcaaaggatgacattattggataagaacaaaaagaagaaaaaaatacttcaaaacaacaagcttatgcagtttctattggctaacccttcattggaacttggattactcagacagaaagctcccgtgatgacaataagattgactggaatggtgcatgaatcatctctctcttccatgtatttgaatttaacaattttttttttgttgttggaatatttctatttattgacataattgatcatcttagataagtgaagtgagctttcataatcataaatttgataaattaacaaatgaactttctttatcttctttttgtccttcatgcttctatgttatttatattttatgtatgtgttcctaaatgccacatcagaattatagaaaaaaaaaatttacaagttgaattcatgagaaagcctcttcaatcatttggagttttcattttaaaaaatgtggagcttggtctagcctttagtataccaattatataaaaaagaggctttttaatatgaaaaaatcatacaatatggcagatctagctagaaattattaacagcagatctagtattttttttttggtggtgtcggtttataatcgaagcaaaataccaatttgtgacggttatagtttgacgcaaaggtatttgcttcacttaacaaccgatgcaaaatgtgattactattagcgttgattattaaatgaagtaacaaattttttgcgtcagttaagaaataaaataaaaataatagtatttgcatctgataggctagttttaggtgtactttataaagtattttacaagtgtatttcaattgattatattcattttatgcagaattacgcttgtattctacttatttcagatttaaatgataaaattcataatatgaattgaaaaggagaaacataaaatgaatatgattatgatgaatttatcatgtgatttagagttctaagatataatgagtgaacaattctaagttttgtatgcttaatacgctccgtttgtgataaaaaattaagtctgaaacttcaaaccaatttttgactatgatgtgttcactttcaggaaaaatgatgtggataaaagttccagatccctctttcagcttttcaaaacatcttgaatcgtccgattccaagcaatattaaaagtgttatgaccaaaatattatcgatcattgcactaggcacttcgttgcccaaaaaatagccacccgggccgcgacattggaagcaccatgccgcggcccgctacccaatttcaggccaaatgggtttttaaaccctaatttcgaaaaataaaagaggcttctcatgaggaaactttggaggcacgaaaattaaagagaaaaggagatttttcaagtacaaccagggttcttcatcagtttttcttttctatcttttattttatgtttccaatttattatttgtaattgtttagaaagacaatgaggagctaaactcctaattagggttttcattcgtttttaatgcttataattgcatgatcactaactatttgttttatgattttaatgaaaaatttgaaaagtgagtattaattatgctatagcaaaatagacatagattttgatattggacaaaaatacttgtatggtttgtttatcaattatgatttttatttatataatgcgaattatacatgtaatttactagaggggtgtaggacttagggttgtacatcggtcggtttgggcggtttatcttatatattttctaacccaatctaaagttcgggttgctaaaatttaagtg

SEQ ID NO: 63720 - DNA, 1519 bp, Cannabis sativa
gaaagtgactcagtttagacctatatccctatgcaatgtggtttataaagtgatttctaagatcattgctaataaaattagaccgattctcccgagagtgatatgtcctacccacgcggcttttgtcctggggaggagtattaatgacaataatgtgctggtccaggagatcatacactcgtttaagctcaagaaaggtagagaggggctatttgcaatcaaaattgacctggtgaaagcttatgacaagctaagttgggcgttcattgatcatgtgctcagcacctttaaagttcctttataagttctgccagtgggtgcgccagtgcatttcaaccacgtctttcaatttgctccttaatgggggaaaagtgtgcagtttaaatccagaatgtgggttgagacaaggggatcctctttctccgaatctatttatctgggctgcagaaattctctctcgcctcctggagagtgctttggagtcgggtagcataagaggtatcaagctgagtaggaatggcccacgactctcccacctcttctttgctgacgatctcatccttgtaggaagggctaccgtagctgaggctaagggtttctggaattgcttagagaaattttgtgagtggtcaggacaacgtgtcaataagcttaagacgtctattttcttcagcaagaacaccagtgacggcatgagtagagggatcatgcatgaacttggtgggaatatggccgcttccaacatcaattatataggcctcccgttgtttaggtccaggcagaaaaatgctgatttcaacttcataattgagaaccttgtgtcgaagcttcatggatggaaactgaaatcactttctaaggctcggtgggctacattgatcaaatcagtggggatggcattacccatttacactatgcaaacaactatgctttccaaaaagctggcctcaaaaatagatggtatgtttagagatttctggtggggctgtgagcaaggtaacataggtgtttgccttaaggcgtgggaccgcctgtgcctcccaaagtctaggggggaatggggttccgtaaaactttggaaatgaaccaggcactaatagcgaagtgggggtgggatctcctgaatgataagcaatcgctttgctgcagagtgttgaaagccaaatatcttaaaggaagaccttttttagagggttcttataagggatctgactcttggttctggaagaatgtggtgaaatccaaagacttactgcggaaaggagcttgcaaagttattactaacggggaagacactaatgtctggtcagatccttgggtgctacatagcaaggatttcttcgctaaaccaaatggtttgacctgcgggagtgtgacgagagtcgctgagctattaaaggaagggggattgggatattcctaaacttcagactctctttgactccggaactgtgcgggacataatcaaaggaggtaaacctggtggagtaggagatgatagatgggtgtggacaaaaga

SEQ ID NO: 63721 - DNA, 600 bp, Cannabis sativa
tcaactcaaaaatgactcgttttataaacgggtagccgtgttgactcgaaaaataactcaaactcatttgagttaaacccgaatctgtttattttgtacgagcttcgaatcgtgttatcatgtctgacccatttaacttgatccaagttttaagtttaactcatctttcactcttaactctaattttgattctactattggagtgagtggggtgtgcataaatcgatctaatctaatgacaaccgaccgatccaattataaccgactgccaaatattggatatccaattatgatcggatcatattggatcttatttttgaatatacaattggatcgaattggatattagatggagtgtccaacaattcaatacatcccacatccaattgaattaattaatattttcatttagattaaatgaaaaaataaattttatattattatacgtaaaaaaaatatatgtatatatgaaaattaataataaaatttcacttttttattttggattagatggatccgatccaattcaattcaataaatactgaatctaaaatattagatggatccaatctgatccaataaatactaagtctaaaatat

SEQ ID NO: 63722 - DNA, 971 bp, Cannabis sativa
  modified_base (54)..(58): a, c, t, g, unknown or other
  modified_base (596)..(598): a, c, t, g, unknown or other
aagggaagggataaagagttgtataatattattcgaaaaaatctattttgaatnnnnnaaatagtaattatttatttttataataaataaataatttttcaaatttattaaattgagaaaaagaccaaagttgttaagacaaaatttgtcaagataatatttattaagacaaaagttgtgaggataagacaccatctttgtcttaaataagacaaggtaggtgtctaccatatagtagagtgtccgtattgattctattattttttaggttaattaattcaattagataaatatttgaatttgaaaagtgattaaagatatttcaagctagctgagatattccctcatctgaaatatcaataactgaattcggttatagatttttatttagataattaatcacgatttaattaattgggagtgaactactataaatagaaatctaatttgagaaatcagaagaaattttcaaaattaatagtggagaaaaatgaaaactatttttttctcttgactattctcgctcatgtgttgaaaattcaacaagaacaaatacaatttatcctagtagcccatactattccttgtgtgtggtnnntcaatttggaagactacggtgtgagtttctaataaactattatcatggttgacaagagctcctgatgcctttctagcttttgaactgcgaggccttcctcgatgatgccttgcaggctagccgatttgagtaggaggtgcgtctccctgtgctgctcttgctgcatccactttgcgttctaattttgcattaatctgattagactcgaacaatctttcacaaagttaacagttttctaatttcaccaatggcacataacggtttggatcataagcaccacgattccatctttttggaattttatcttcattaacatctcgctcgagatcccatttagtaggaccttttacagtatttctgtcttcatgagggt

SEQ ID NO: 63723 - DNA, 1568 bp, Cannabis sativa
tgagctcatttggaattttgtgccattttgtatggctttagaattttaccattttttttgtgataaaattgaactttgggatctttttattatttttttataaataaaaagattgcttggctgacattttaattatttattccaaaatttgaggaataataattatcttttatcaattactatcttaaatttaaattttagttaatcaattaaaatttaaaatagtatctaagatatttattttacaatccaattactattttattaagggaaaccgatacaggttaaaataacaaaggtaacaaagttacgcaaccaaaggaggattttcttccatctataacaattcattatctatcctaaaggcgtgcagagataccccaagagaactagacaataaaactataatattagaaaagaaaacctcaaaactgagagttgcaacttccgatccactagtagaacacctgtaaaataaagagaaaaaattaatacataatatatatttattaaaaaaatgaaatttcccttacaaataaaataaaaaataaaatatgaaattttataaaagtagtcacatagaattctctgatgtagatacttatctattttcatctccattgctgacggtgactacactacatttgatgtgttattattagaccaaactgaccttacaaaattaaaactggccatataataactttacaaaccaaaactagtcatgttagttttacaaaaactaaaactagtcatactgaccttacaaaattaaaactagtcatactggccttacaaaactaaaaactagccatactagctttataaaaccaaaacttgtcatactggccttacaaaaccaaaactagccacattggccttacaaaatcaataaaaacaaaccatttacaaaactagacatattgccttacaaaaccaaaagcacattagccataaaaactaaaaagtcatattagtcataattaaaataacaatgatgataataaggtaggttatcttaatttttagtttaatttttataaaataaagttataattcttactttatatatactttacttatgtaaagtaaattaaaaaattaccattaaacaatttttctatatatataaatatacaaaaatgaaactcaataaataaaatttatatcaaaagatatataactgacattaaaatcaaataatcaaaacaaaacgaattccattaaagatagactatccaaaattaggaaggttaataaataattaaaaataacatgtggccatttaattttaatataacatatatatatacacgtcatatattatatattggtctgtgagcttctttatatctattctctataaaatgtggctatataacagaattcttgatttatgagaaattattgggtgactttttcttaaataaaaaaataacaaattattagatgttgtcatgtaaaaagtcagcattagttagttaaacctaaatataattaatccacctaaagtgttacaattaataataaatttgttcatattgtttatttttttattaatttttttt

SEQ ID NO: 63724 - DNA, 909 bp, Cannabis sativa
tattggaagagaaaattctcattaattagttgtaagttttagtcgacctgagggtagagtgcacaattttattaatggtaaatgtggttgaatccagagagtacattgaatcatatatttcataggggaattcggtcgagcacctagtgaacacaaaataatgtgttgattataataatgacatggttcctgtactaacaccatcttcatgaatccaatcgcgttgagaccatttaagatcgaatctgattaaaacattagagaatattcttcaattacatagatctggaaataccccattgtctagatctatgcaactgcaaattaatggaaagagaaaatcctcctttggtagtgttaaactgagagtttatatagttttgatgcccctgagcgcggagattgcagaaccagagaaggccaaccattcatctcttaataatatgggctaatatataatagataataataactttttcaattagtatggtgaaaatattcatcggataaatctggtaagtgccttaaaaaataactttcttgcaaaaaaaaatattgacttaagtgcatttagattttaatataataaggaaaatttgaataaatatgcataaaataccctaattttttttccctaaatccatatgtattaaaattccccatatatgaccacattaccatatttcccataatacccctcacatttgaaatcccaaacccaaactgcctcctctctctttctctcgcccaaacccacggtgaactcatcccaaacctatcaaatattaaacccacggtgacggctgtggaccgaatctcaaatccacggtgacggcggtggactcaatctcaaacgcacggtgacggcgccccctgctctcgacacaatgtctaaggtgtgtccctttt

SEQ ID NO: 63725 - DNA, 1953 bp, Cannabis sativa
ttcacatactcacttttttttttggacacctactacgtacaaaagggtagaggtattgaaagagaagagaagagaatcatttatttagaaaaaacgtgtacgagaaattttgtaagaatttcatcattagttttaataaaaaataaattgtcacacgtgacaaaataatctatcacttttatcattagttttaataaaaaaaattatcacaagtgacaagacaacccatcactttcatatcattagttttaataaaaaaaaattgtagtaagagacaagacaatttatcattaatttttataaaaaaaaatataaaattgtgatgaaaaagataaatgagtctggtatgagataatatgaatttaacataaaaagaaaaaagactcgaaatgacaactcaagatagtaaaattttaaaaattttgtaataaatatatactgtaaaaatgtaaaacataaacaggataaaagttaattatacgttgtaacaatataaaagtatataaattaatatacagtgtaaatttttatttttttttttaaagaaaaaaactacttttttttggtaggcccgaattcccactctattgctcctccttaaagctaagaataatcattttcctcctttcaaatcctcttattaataaatataggggtctttttatttaaacatgatttgaatattactttcaaagctttggcttgcgattcatccaagcaaaagtcatttctcagccgcttcacatccattgtggtagattatttgcatcaatctacagaaattctctctctttcaactctatcgccatctctttctatacatatcaatttggttaatatttaatattaatttatctacgtatatttacatatatatatatagagagagagatgatttaaacaccatatattattataaactatacaatgaaaaatacatatcttttgtgttttttaactaatctcttcggctatcataaaccctagataataaagacccttgattaagtaacacgtttgcacgagacatattgcaaaacgtttcagttttgtattatatatattatataagtcggagaagaaatattaaggatcgatttcctcgtgcttgtaacttgttatatataaataattaaataaatatagttttatgtttattttttcaactatacgaatgatgattgataacatcaagcaaagaaagtagcaacgggtgcatgtattagtacaaaatgtaaattacaagtcagatacaaaataagtatataggaccaatttatgaaaactaaaaaactttacactaccggacttgattagcatatgagctaatataatttgtgaaaagataatattatatgtaagatgtatgaatttattttaattaacattgttagtatgtaagctatttgtggttcaatgaacatgactttatttcaaaaattgttgtttttagtgataacttattagtcacaatataaattttttgtaattaaatgtgacttttagtatgacaaaaaactatatgtaactaaaacatagcatttagacacaagtgttaagaacactgtaaaattctaaatatagctataattaattcaagagaatcaaataataaattagagagtagcggaagcgtaccggagtccattgaattgtttgaagaaaggtatgatgttccaattttgcatcaaaacctttgaaaccttattttcctgatgatggggattcaggaatactgtaaaaaatatgatacgatgcaaaatggggacccatacttgttacattaccaactgttacagttggtaatatttattaattatttctaatttggcccctcatcaaatcaaaaactatctaattggtccacatattaaaagggaaatttcattaattgaccctaataaaataccccattttaaaatttataccctccactaatttatacaaattaat

SEQ ID NO: 63726 - DNA, 946 bp, Cannabis sativa
taatctcctcttctcctggaatggtgtttaagttgtcatctaggctttcagttgacttcagctgaggccaattctcaggcttgaaagggatacggttcaggctcttagtgaagatactggagaatttatcaataaacagcttggcgatgtcttttatttcctccactgcatttccatcagcatctttgagttgttgaatatagtttcgccttcttcgcgtgaccgtacttgccatgaagaatttcgacgctctgtctccttccttcaaccaggaaactctggacttctgacgccagaatatttcttctctcgatagggcctcctctagatgtgctctagcttccttgtgggcttcaccatcaaagactagactgttttccagcctttccaatttgatcttagcctccgcgatttgcatagaaagccacttgaaatgcgatttgttccacctggagagatgctcttttgtagattttagtttgcggtataggttgaccataggatccttgtgttggatgagattccatgcctttttaaccacccaaaatacccgcgggtctcgttcccacatgagttcgtatttaaacattgctttcgtacaaaatcgtcctccttctgtgtctagtaaaatcggattatggtctgatgacgatgccgtgagatggttgagaattacattaggccatgcgattctccaatcagctgaagccagggcacggtcaagtctcgctcttttaaggttggaacccgcagaggcagaggatcctctcttgaaccaggtaaattttacacctaggaatcccaagtcaatcaatcccgtacggtggaccattcttcgcaagtcgaacgagtatctactggtgctagatgaacctacataattcaagcattccccatcttttagagttccatttaggtcccctataatgaccaaagggagggggca

SEQ ID NO: 63727 - DNA, 969 bp, Cannabis sativa
  modified_base (44)..(44): a, c, t, g, unknown or other
ttaccaatgcactctgtattgcaaccgtacaagtgttggtagtntatgaatcacaacatataagcatgcatatacactaaacatatacatacattcgcatatccatattacaaattatacagttcttaccttctttttggattcaagtgtgctggccgacctgaatggaaagtctcgtgctagatggatgccctaaccacataacaaaacagggtaagtcacatgaacgaaaccctaatccaggaagcccgaatctacaactctaggttttgttatattcattgagaaaatggtttgttcggggatcctgccaaaactaggtaaccagttttacaggtgctggcaaaccggttacccagtttacaccaagtctccccaaacaagctccaacttgctcaaaactcatccaattgccaccaaactttctagagtacctaatccgtgtatatgcaacatattccaaccaataattctcagaaaaacacattgaatcaatattccattaaagactaaagcttagggttcaaagcccaaacttgcacaaatccaatcccacacaccaaaatgaggtgctagaagctaaatctaactcaaataaacgctataattcaaacccaaacaacccctaattttcaaaatcatattttcaatcaaaccctaaaattcaacaactaagagatagagattctagggcttgcattggcttgatttcccttgaattccttgctgaaaacaccagaaatcaacaacatttcaccttgttccaggctggttcgaagagagagggaaggaaagagaatgttttctcttgaattttggtttttctcttgtattttttctaaatgaaaagggatttactacattaatcattgctgaataatagctgctaggtgtcaagttcctaggaagccagcaaaccacttaccttggcaaaagactaaaatgcccttaatgattaattctagctta

SEQ ID NO: 63728 - DNA, 2044 bp, Cannabis sativa
aagctgagaaggcaaaaaaggaggttgagaagaccgtcaaagccaaagtcgatgagtatgagaagaagcttgctgaaaaagaagtcgagaccgtagaacggtgcaaaaaggtttgttttcgcacaatatattgggcttggatgaagaaccctaatatggacaccaacttcttggaagagaaggaagaggaaactttagccctttgcgagaagaccaggatggaggaggaagatggcgaggtcaaggaagaagaagaagaactgtcaaagtctcccagcatgtagacttggttatttgtttatctcccttttctcttttagaaaatggccccttggccaagacaatggtttcccctggtggcacttttttttttttgtaaagacaaatttgcaaggttggatggccaactttgattttttaatgcctcatacttttaagtttaaactttaatatgtggatgtttgcttgcgcttcattcacaatttaaacaatcacatgtataaagtttactagggatttccattgctcgtattttcctctgatgctaagtagttaatttcctactttacgcgtgagcagcttttctgcccaaccctcaacctgcgagccatcattgattccacctcgcaatcataaaaaatgatcttattttaagaaaactcaaatatatttttaataaacttgtcatcttgtatatattttcattgcttacatgagtagttagatcttctacccacgtgttaggtttaagtattttttcaagacactttgacgtctcgtttaatactttcccttagcgcgagccattagtattcaactttatgcgctaatcataacttttgattttcctttctcgtcagatagattttaaacaaaaaattacaattttttgatccctttctcctcagaaaggtttgatcaaggcgttataacgattcggcccctcttccgtaaaaaaggtttggtcagggagttataacagttcgacccctctttcgtcaaaaaggtttggtcgaggaccttttaaaatgttttcaatttttttttttattttttgaaatgatgggtttgcattgtactatgtatttccagattaatttcggttaatcatacatatatgcccctcaagtaattttaaggggtttatgctttataattacttgtttgagaggaatgattattttattcacaacaaaagttcaaaatatttcatgagcaatgtgattaacaatcattaatctcataagaacttccccagttcaattatttattttatcaatcttccacgagcatctggttttgataaaacgggttttgacattcaaggtcaatccctaacatactcccacaattgtttcaatatcatgggtcaatccttgacatatcccggggttcgaggtgaagtaatcctggttttggttgtttgtctttgaattctcctagttaacgtccagctttccaagcgacagcttgatatggcaaccatagcaggtcgatatctactcacatcgcaattttcttatttacaaaatggctttaccggagtaactgtcccttgtattcttgtgactcgctccctctcgagataattgaggtgtcccttcctcctacagatgagggttataatccttggtcgctcgagttattgggcagatcgagctgatcatggacatcgtcctgcccctttacatatcattgaaagtgtccttacgatatgagaccttttatctcatctttcagctgacaacactcttccgtggtatgaccaatatcctcatgatattcacaccgtttagttggatcccttttatgcctcgcatgtttcataggttttggctcgctaaaaacaacttcctgtacatgcgcgaggtagatattttcttgagttttattgagctcgctatattaaccataaagagtaatatatttgttgtgtttcttatccttgggcaagcttttggaatcgtcttttctctttgattctggggcttccgaatcaaattctccaacaatatcatgccccagttgttgggttttatgccct

SEQ ID NO: 63729 - DNA, 2228 bp, Cannabis sativa
  modified_base (441)..(444): a, c, t, g, unknown or other
  modified_base (719)..(724): a, c, t, g, unknown or other
actacaaaaattatataaaataatgggaaattatagtatatagtttcaaattataggactacgttagtaaatgtcattattttaaaacttataacaaaacgatcctttaagattatttattatttatattatcttttgttatacataaaaaaattaataattcttttttcatataatttttttttagaattagaaataaattacttaaagattatggtatatttatattaattttattaaaatcttttttatttgaaagttatgtcgatattttaattaattttatgagttgttaagggttgttggtatatatacattttgttgtacagtataattttattttgttgtatgatatattattatttttagaagatatttattttttattttgctatgtataataatggtatataattttgttagcataatacaaatattttnnnntatgtatataattttattggcatgctacatatacttaattattatttttatatattttaattatatgatatattatttattttaaataatatttaattagtttctactttattatatacagtggtagtatataattttgttgtcatggtatatatatatataaatattaaatgtggtatataatttagtttgtatagtatatatatatatgttagtaatatatattattgttattattattgttagtatatatatgttttggtgaatggtatatnnnnnntttgttatacggtatattattttttaaaataatatttaagttttattttttattgtacgtaattgacatgatatataattttattagtatcttatatattttttgttatatggtatataaattttattgtatagtatatcattttattttagttcatgcatgtttagtttttatttaattttatatggtatatataatttttaataatattatattattttgttttattttttattataggtatatatgttttattgtatggtatatgatttttgttgtctataataaataatttatttaagatgatatttagcatctattttattatatataatttttttttaatatatacatattttaatatagtatatataattttgttagcatgatatatatattttttaagtattaatttaatattattatcatttttttgtacgtggtgtataattttattactacagtatactcatagactaagtgcaacaactatattactaaaaaaaaataaacaagtattatattataagagaataataccttaaataataaattatgtcaaatagatttaatatgaaattgggtttataagctcatttgtgttaattaatatgtcaatttgaatcattcatttcaattaattataaaaataactaaaaaaaaagacttttgactagtttaaatatctttacaaatataataagtactcttattatttagtttttatttttttaatgaagtgattagaattgaatccacaatgaaaatatgaactatcagtgaactccttgaaacaaaaataacttatcatcaaattaaatgacatattctatcaaaccataaattatagtattattgtggtgaatcacaataggtaaaactagctacaaaaatttaaacaataaaattattaggtcgtcaaaaagagctcatttatatacacctttccaatattaattagaaaatggtaagttattggataatcttattaattagttcatagttcgtttagtacgccgtattataccgtattgtattatatagtgttatattaaattaaattttatacaatatttttatataaaactatatgtagtatttacttttatgggcacttaaatatataataatttagtattatataaaaaaatatgatataattgaattcaatacaatacaatacaaattaatacgatgttccaaacgagccagtgcataagattaggacctagacaaattaatagtctctagtatgggtccttttcaatgatgagaatgtccttttaattatagttgaaataaaggatttaaaatggtatttatcatctaaaatagtatataatttatagaaaaaaaaatgaaatgaaaaattatatttttttatacttaatttttgtgtaaaaatataatttttatgaaaaaattgaaaaaattttctttttttttttctatattttttttcttctaaaattttctaataaaataatattttttaagaaaaaaa

SEQ ID NO: 63730 - DNA, 1512 bp, Cannabis sativa
gaacgagctagaagaagttgaaattaaacccaccatatcgaccacggagctcaaaattggtaaggatttgttgctcaaaataaaaattgctttaataaaatttccaagagcaaacatcgacatggtcaataaaacctataccctttctgaagacgagaataaccaagaaaggcacactttaatgacttaagatctaatttggtgacatgtgaactaacatctcaagtaaaacaaacactgacaaatacctgaggagcaattggaaataattacttatcgggaaaaagaattttaaataggatctcaccattaagtgttgagatagcatgcaattaataagaaagcatgttgtggaaactgcatcgagcaaaaaaggtttaggaactttcatttgaaacaagagggcacgctcagcttcaagaaaatatctatttttacgttttcctacaccattttggggtgtaaaatcattataaaaagtttcatgaagcatatcattagagatcatataagattgaaatcaagcatatgtgtattcctcagcattctttgcaaagtacaaaaaaacacattaaattgatttttaatctcggcacaaaaagcacaaaatatagaaaacaactcataactatttttcattaaatataaccaagttacatgagaataatcatccataaaagtaacaaaataattgaatctaagttttgacaacataagagaatggcccccaacatcagaatgaactaactcaaaaggaacactagcatgtttattgactcaaggactcaaactaacacgataatttttggaaaactggcacgactgaaaatctaatgaagacactttactatactggggacaaaatttctagagcagaggaatggatgaatggtccaaatgacaatgggcctcaaaagcaaaaaaaacacttggacaagacatagagattggtggaagtggatcaagaacatacaggccaccagattcatgtcatttgccaatagtcttttttgtcataagatcctaaaataaataatgattgggatagaatgagatgcaacaatttagattacgagtgagttggctaacagaaagaaaattaaataatagattaggtaaatgtaagactaatgataaagtaagtagaggtgtaggagtaatggtgctagatccaagaacataagaagaagatccattagctaagttaacagttgaagtagaactatgagattaaaattaaaaaatagattggaattacctatcatgtgatatgtagtgccagaatcaatgacccattttaaggatgtggcaagaaggaatgcattagatttacttgaatcagctatagcagttacagaaggagatgaagacttaagtgattcttggtaccgtgagtacttggcaaattcgtcagcagaaataacgaccgatttgtcagatgcatcaccagtgcttgcaacattagtgaactgtctttactaattttttaattgaaactttctacactcaaat

SEQ ID NO: 63731 - DNA, 1033 bp, Cannabis sativa
attttaatttttgaaacttaaaagaacaaccacacgaattatgtaaatatttctcaattgatagatggaacccttgaagcttttgtggcctatatatttgacctagtagggacaatcctattcttatttgggttaatagtattttagaccttgtattttgcaaaaattaccaattaaaccatttattttgtaaaataacaaattggaccttttattttctaaaatagtacaaaaatagtaccataagttcagtttttgataattttttttttaatattactaacttaaagataatttttagtattaacaaatacaaaaaatgtactcagttttatcataacaactctagatcaaattattattaacttttattttaataaaaaaaatcagttcaggataccatttgtattattttagaaaatacataatccaatttgttattttacaaaaaaaggggttcaatcataacttttacaaatagggtccaaaatgatatttactttctttttgcattaaattatcttgatttggaaagaggccccggcccggcccatcaaaagaagtagtgagcttttgtaaaactaaagcccaaagacataattggaacatattccataccatacacacatgctttgctgtattttccattaaataatgaatatgttacattagattacacaccattgattcacatgcatgcaatgcaactcattatcccctaataaaatgaattaagcttaatattcctattacagtcatgtggtggtggcaggcaggcagagccaacccttccatttgtgtgagattattctttaattttcttcattaattaataataatggcctcatgcatgcttaaattcatgaaattaattcaatccatatataaaccgcccaaagcaagtgttttgctttctaattaattataccactaattaataaaaacaattaattagaatatattccaaactctacacacacacacactcactactctttgttttgtcacttaatgcaataatatcaatttttat

SEQ ID NO: 63732 - DNA, 631 bp, Cannabis sativa
tcaagatgcaggcagtacctatgtttatgagaactggtggtctaaattctggaaactaaagttgccctctaagcttcgcatttttgtttggaaggtttttcataatgcggtcccaatagctgcagaattacacaaaaaacacattgcaaataccccttactgccctttgtgcaaacagtagcaggaaaccatacctcatgcactctttctgtgcaccatggccaaagaagtatggcgtctttcatcaataaatctgaatttcaagttagctgctacttcttcagctaaggagttcttattctatgcctcggacaacacatcaacttcagattttgagcagttcttaaccatttgttggagtatctggtatgagaggaatgctgaataccatgataaatcccctaaacaacctgctgcagtcctggcatttgcaacagactatcttggaaaatatcaatctgctcaagctaaatcagtgtccaatagctctgatgctacttcaattgaacctccagcatctcgttcacaagctgcaacatcaacagatcagtggattgctcatcctgatggtaaattcaaattaaatactgatgcggcctgcaacaaagctggtaagataattggtataggt

SEQ ID NO: 63733 - DNA, 1052 bp, Cannabis sativa
ttataaacattttcctattagtgacgtcctggattgcagtcaagtaaatttttgtgagctgaacatgatgttcaggactatacgaaataattcattaaagaaactgaggaaatatttttttagcactcgattgagatttgccagttgaaaaggatttaagctctaatataatacctttttttccctcctttttcattaatcgttttcctttgagcgtcatcctaacttatattatatcttaattttcattaaaaacattataatacagcagaaattgcttcagtattagacaataacaattgttttttattgctttacacagatggagggcatccatttctatatggtcaatcagttaacagagaatgattagaggaaattcaagtgttgaaaagtgaaaacaatagtgtgaacccgagactgaaatctgggaaagggagagtagcattgaagttgtttttggaaaattagcagggaatagataagaaattgtttataagcagcatttgactggaagtagtgatgaattaatgatgttgctaaggttatgtctattttgttccttttagctttgtagatatcatctctggtgtaatttcgtgaaatcccaaattttcaattgagggctaaagatttagaagattcagtaggaacttcctttttctatgaatatgtctattttaagcattttcattggcttattttgacaaaagaccaattaaattgtggatgtcactttactgaaccagaagcaaatatgagaaataaaataaaaatagaattagcaagcagataagtcagcctcaggactgtttcgtgtactttacatttcttttatttgtttttaaatatttttaatacgtattcttgagttcgtatttatgaataaaaaaatattttgaagggttattgggtgctaaattcataatttttacacgtgataactaatctctagttttgtaatgtatatgctatttttgtaatttgcaagttttttttttttctttttataaggaaaaattgtattttattaaagataaatttactggtag

SEQ ID NO: 63734 - DNA, 999 bp, Cannabis sativa
  modified_base (26)..(29): a, c, t, g, unknown or other
  modified_base (369)..(382): a, c, t, g, unknown or other
aaaccaattggcaatgagtggagtannnnatgttcttatatatgactcaattctctactatttattctatgtgggacaatgtccacaatagattgggtctgaagcaacgagtcttcaacaggaccttatggtgatttctaagttgaccaacgaggtttgtgatttaagaattaggttatatattgcttttgtcgggatttgatttatggagtttgggtttgacatttagagatggctcatgaattggaataatttataatttattctgggagaaatgggttcaagtggttctcatgttctcattctcattcaaaaaaaaaaaataaaaaaaaaataagagacataatcattttttattttttatttttnnnnnnnnnnnnnntttattcatacattaaatagttgtaaattatgagttaggttaacactgatttgatatgtaattttttttcctaaatttcattatgtatgttgaatatgatttttaaacaagagtataatttatgggtttataattattttttacagtagaacagttgctacccaaaacaattttcgcatctcaaatttgaagaaaagtgaaagagaagataaaaagagaagatagagtactaatgaagaggaagatgaatagtaatgaaattaaaaaatagaattgtctattttaaacaatgaaaagtagaacaatttaaaaaagacaattttgaaatgcaaaatagaaaataattcaatgtttctccactttacaaaattcatacttattaattgatgtgtcacatttttattggctcttcaacatccttacagatagggtcttaaaattgttctaaaagtattaaatgggatcacttaaccacataaatttaattttttatggcaaaacctactgagctctcattccgttttgctctatactccttcctccaaaaatcacagttaagtgctacggtggactttccacgtgtacacacttgtacacgtggcaaatttttagtagtc

SEQ ID NO: 63735 - DNA, 759 bp, Cannabis sativa
atctacaaatgagatgtaaaacctaaaattggtctaggacataattgtagcaggaccccaaatgtcagtgtgaattaaattgtaggaaaattgagctttttcaagattttgcttgaatggcaatgtgtgagattttccatattgacatgcttcacaaaagtgacaatcctctttgttaatatttttaagattcaaatgtttcaatacaagccttaacacaaggttttatggatggcctagtctcctatgccatctatctttgattgaattagaaaagacacactcccagttcttgactgagttacattttgattgacatgggaagaaaaactagagagacaactatgtttggtttcagcagaggagcagacaagagcactgtgggtgttttgagtagtagacttgacataaattagttcaaactgataaagtccatccttaagagtcccttgaagcaccttcctctttgttagtttatccttcacacaacaatgatcagatgagaattcaacaataacattattattatttgttagccttgaaatactaacaagatttttagtgatttcagggacatgtaatatttcttgcagcaataaaacactgttattttcagtggagagagtactagatccaacatgtttaataggcagctgatttccattaccaatagtaagagaatccttaccactgtattttgttttctggttcaggttgttcacatcagaggtgatgtggttgttggccccactgtcagca

SEQ ID NO: 63736 - DNA, 5195 bp, Cannabis sativa
ccatgagttcgagagcttggcggtgcttgtacatgtttgggccacactagaccaagcgggtcgggtctaccgatgattgtattttgtaatctcagattttaccgcttaggttggcacgtaaattaacttgtaatatttttgtgaagttttatgggatcccgtgatacgttaactttttggtttgtttataaagctaaaatttattacaggttatattttcattcttttgtaaaatgaagtttaattttctcgctcttatctttctagtaatcccgaattagcgggattacggttttgaagatcggttgtcgtagcttgcctaattgttagggtgttacacatttgctccgaattcgaaggagcttggggtggatactcatgtctaccaccctgaaaccttccacgacctctgctgcgtccacaaggattcaggggattttgaccttgccgaccacctttggtcatgttaccctaactcctcgtatttcgctaggtgtccatttaataggacttagcctgtgaacccataagtcaggtaggtcagacagcgatcacataaactctatataccgcactttatgaattttaaggcaatgcatttaaataaataattataaattattatattccaaacatgctttttttaatcacataaattattaaacaagtaaagacttactgaattgtaagtcgatcttttctctatgtctaaataaattaaaaaaaaaagtatattccacaaattaaataagttataatatttatttcaaattttagtttttagcgtaaatttttcttttattttactaatatgtactgaaaatgtctatgggttgtcttctttaattctcattttctgcaccattaaattatctttttctttttttctcaattttatgaaatcaaaatacaggggcaaatttatcaaaaaaaaaaaaaaaaaaaataaataaataaaatcatggacaaatgagaggaaaaaaaataaagaaatgtatagattaggaagatgcgtcagcatttatttaccaaagcaaaggactcgatcgtaatactgaattgataaagtatccctagtaaaagaactggactattataagttagagtattagttagtcaactctcttttacattatctttcatattaccaaccctctatagtattggtcaataaaatctgaaaatggaattatttcatatttaactaagaaagtcaaaaaattgtttttatataaaaatatggactattcactttattgcattttcttattatttacctgttatttttatattgtttttatattccttatatgaggctccatggaattataatttaaataaaaaaaaatcgtaaaagtgatctttgtagtttttattgtaaaaatataaaaaatttattttaacagtgtaaatattaaaattagcctaaaaataatattttgggtaaaatatcataataaaagacaaaatccgattaaactaattattcacgaagaggctataaataaagtagtatactcaaataaaataaatatgaataaataaagtcatgattcatgaacttctcctaatacactgctatatgacacaaaacaattacccaaaaatccaaattccaaaaccaagatttgtccaaatctaaataataaataaaaggcactcaaccggctctgttctataaatttttggtataaaaaaagatttttataaaaatattaaattttgagtaaaagtatataattttattgtgtcacaacatttttttacaaaaatactgttctttttataaaacaatcgtaaataacaaaatagaataattaaaacagaaacaattaaaaaacaaccgtggaacaacagtgaaaacttaacacagtatatagtataaaacttacatagtattttttctttaaaaaaatatagcattttttaaaaaaattccgtcttacaataaaaaataaaaaaattaaaaattatagtatgtggtgtaaaaattctattattatttaggataattacataaaatataattttttgtatatatttttacgatattctataaaaataaaatgaaaagaataagaaaattacataaaagtaacaagaaaataatatccacacaacaacaataaatgacatacaaataataaaaaattaacaagagtacaacataaaaagaccatattttttgtaaataaaattataaaataattaaaattccataaaatcgtatttttataatttttttattgattttgtgtatttgtgaaataattcctattatataatacgtcgggtcgggtgccatataagaaaaaaccaagcctagctttgactccaaattccgattgctctgcaatcaaggtgaggtttcttattttcattttgagttaattttctgaacctaaataccattggattggatcatagttttaattatgttggttggaattggagtagatgatcttctaatgtcacatgtaatgttttcttttctttgtcaggtttctggattacaagttttgcatattgtggtatttttctaagtgaaaacaaaacagaagtataatataatatatcttatcttgtactacttctaaccctgcaaaggaaatttctgtaataaattgaatacgatgagtgtattgcttcttattgttgttgttctccttatacttctaatcttcgtaagccttgcaaaattcgcctactccacactttgggtcccattgaaaattcagaggcagtttaagaagcaaggtgtgagaggcccaggctaccgtgttttgtttgggaacacagcccaaatccggcgtctttacaccgagattcagtcaaagtcaactctgaccgacaacgatgtgcttccattggtggcccctttttaccataggtggtctcgcatgtacgggaagactttcttgtattggtttgggcccaagcccaggttggcaattgctgaccccattctgataaaggaggtccttaagaacaccagtgggcattttggaaaggtcgggtttaacccctccaataagcagttgtttggacagggccttgttgggcttgagggagaccaatgggcttttcatcgaaggattgcaaaccaagcctttactatggatcgtgtcaaggtactaaacacaaaatggaatttgtacacacaaatttttaacttttttgtatttattgtggggtggaattttctttaaaactgtctaagtttcatgtgttaaatattttgtaaatgagagttttagatgccccactaaattcactctctcctccacactttcccatataactcaaaggccagaacaattactatgaatcccacaaatactaatgtgaaaccaaatactatttgctctaaaaaatttaaattgtatagtaatttaattacattagttattattataacaatgggtgtatttttttttttgaagaaaaggcatcttattttcacgtctacattattttggctatggcacaaaacttttatcccaaaactataatgttatctatgcaatatcttcatgatttgtttctttgtttttcgttttttagagttgggtgccagatatggtaacaagtataataagaaaagttgaaaagtgggaggaaacaagaggaggaagagatgaatttgaaatagatgtgcacaaggaaattcatgaagtttcggcagacattatatctagaacagctttcggaagtagttttgaagaagggaaacgcatattcgacttacaagatatgcaaatgtatcttttctctaaggcagttagaagtatctatattccaggattcaggtaatttatgtcttgttttttggctacaaaatctttataatttaatattataagcattgttcaatggtgtacatgtattgttttgaacgaagcaatggtgtttacaattacaaacacaggtttttgcccacgaaggacaacagagagaggtggagactagataaggagactcgtgattcagtgaagaggctaataatgacaaatagcaagacaagtgaaaattcaaggaacttacttactcttctaatgtcttcacataaaaatcatgatggcaaggaaaagaaactaggagtagaagaaatcgtagacgagtgcaagactttctattttgcaggaaaggaaaccactgccaatctcttgacttgggctctccttctcttagctcagcaccaggaatggcagaacaaggccagggaagaagtagttagagtttgcggattcaatggacttccacttgcagataatttaagtgatcttaaacttgtaagtgttctcagtcttgatctataggtctttcagagtttagtatttataaaagaaatttatctttacttgaacttttgctcattgataaataaataatagctgacaatgataatcaacgaaacacttcgactctatgctcctgctgcaatgatgatgaggaagacattgaagaaagttaagcttggaagtctagatattcctgctaacacacagttgtatttggcattgactgcggttcatcacgaacctgagatatggggggaagatgctaatgagttcaatccatcgaggttttctgagcctcggaaacatgtagcttcattctgtccatttggcctcggtcctagaatttgtgccggccaaaatctagcaatggttgaggccaaaataatcttggccatcctcatacagcgttactatctcatggtgtcaccaacctacgtccattctcctatgttgtttataacggtgcaacctaaatacggtgctcaaatccttctgaggccgatttcaacatgaagggttaaaccggaaagacctaggaaagaagatatgaagtccattccactcttttctaaacttgtacttttgcaatccttgtatccttgtcatttattttggtttattaataaggtttgagtagtgttgtttcttatatgtgtaataaataattatttgaatcttatttttagtattgtaaattattcagaatattttaaatatttataagtggttttaaacaagtacaacgtacacgattatagaaaaaatttagactaaaaagctctcctgaatacgaaaacaaataaacgtgaccattttgagaggtgtatattgaaaagactatagtacaccccaaagaaagggtatttcaataaattcataagtgaattagattca

SEQ ID NO: 63737 - DNA, 1505 bp, Cannabis sativa
gtagacaaactcaaaaatgaatatacaattgccgttcggttggaagagattttggtgtgatatcacactgtatttgaggttttgcaggcccgttggaggtggcctaagtttattagtgagaaatgcaaatcgagagtaaaataagcctttggtcagacattcaaccacttgattgtacaggggatgtatcttacttccaactacttttgtagtactttgtctctcacataatacatatctatttcaatatgctttgttcttgcatgaaatattcaatttgaaggtaaagcactagcacttaagttgttccaccatgttatagatggaacaaccacagagaattcgatttctctgagtaaggactcaatccaagatatttcatcagctatacatgagcaagagccctgtattcaaactctatacttgatttggacacgacatgctgcttctttgatgatcatgactgtaatgccctactagctgaaggattaattattgtgctatcatttgctaatcaaagggtttagtataaaatcatgattaataaaaacttttctaatacataaaaacttatacaaaatacagcataactaaagtgtcgcccaacgactaacaaaattgaacttatgctgtcctgaaggtctaaacactccatgcctaaccattcatatatgtacaatcttcattgagctccactctcactgctgttcagcctttgcttaatttgcctttacttacacatgaacaatatatctgtgagttgacagattcagtaagaaagcataaaatctaatcatataaccgacttgtaattagccgcccataaacctaattacgatgagtctataaccctcatccaacacgtaaaatttagtctcaaacgttcttaactatagtacgattgaccataatatcaacctatagtcagcaatcttgtcgtacagatgtgataggatcaatccgtactataagtacaacaaaccataataccacatgagtactctaggtatactagtgttggtagcattagttcgtactttctgaaaattaccaaacatatatctgttaatatttaggtgcaactctatgtcatcaaaaccgttcttactaatatgttatctaattggaaaacataaaatatgtacgctaaacatgtacatatgtacacctattatactaatcttaccttaatttcataatcaggtgtgactgccaacctgagtggaaaacctgctcgacgattagagaccctacgtcacattaacgtaaagctagtaagtctctcactaaaacacttttaaggttttaaactcttaatctaaagttttcctatagataaaaaaattgacaataccctaaatatcgaaaaaatataaaaattgacgtacccgaaaactaccctaaatattatacggtgattaagcgatttgttataacctctcactattgattccatgtgaatcatgcatgccaaaatatagtgttcactttgtgaccacttttct

SEQ ID NO: 63738 - DNA, 525 bp, Cannabis sativa
ttattttttctaaaataatatattcatctctttaatatatttagaataatattatatttaactaattaataaggttttatctaataaaactaaatagctaaatattatttaattatacaatttataattatttaaaacaataatttcataaattactattttgccctaagtaatttatttctcatagaaattaattctcaatcaaagttactcatcaaataaaatctttccctgcacagtgttgtatagaagtgactcgggaatcatggaactatatttcgaagctccaataaatacttgattatcatccatctcatcaatagaataatgtggcttattaattccattattgctccactataaaattgcactctttgacaatatataattatatttacagaattcttatttgtagttcattcatatactcaatagaagtagttccccctccaattattagtttataattagagttggtcaaatttaccattttacagttagtctataacttattatagatttaga

SEQ ID NO: 63739 - DNA, 2165 bp, Cannabis sativa
  modified_base (1236)..(1241): a, c, t, g, unknown or other
ccatccataaaaagcatgcatatacatttaacacatgcatatattctcatctttatatcacatattatacgctgttcttacctctttttcgaatcaagtgagttggctaacctgaacgaaaagtctcgtgctggatggatgccctaaccacagattaaaaccaggtaaataacatgcaaaaaaatcctaattcgggaaacctgaaccaccaacctaaggttcagttaatactaaatggaaccacaataccctatgaaataggaaataacccaagtggacacgagttgagaaaatgaattgttcggggaatctgccaaaaccggttaaccgattttacagctgcttgcaaaccagttaaccggtttgcaccaggtatccccaaacaattccaaacttgctcaaaacttgtccaaattccaccaaactttacagaacacctataataatcttccacaatatatttcaatcaataaaaaccagaaaaacaccctgaatcaaaacatgacattgatgactcaagtttaaacccaaacttggtcatccacaaccacatacaacaaaacttgcagcaagaacctaattccagttcaatttaaacttaaaaattgattataacaccaacaaacgctaacatcccctatatctcaaaatcacacatccaaacaaaactaaagcttcaaaaacaaagagtaagtgttctaggggttacgttaacttcaaagtcacttgaatccttgctctaaaactcagaaatcacaagaacttacttagtgctggtttcctctggttggtttgggttggccggccaaaacaaacaaagagagagaaagagaaatggaatttctcttattttttatttttgattttttttcttgtttccttatttctcaaaatagataattgatcaattatccttggattttgctgaaaataaattaaaaagatagctgccatttacccatgcagacacctaaaccctctcatcaaaattactaaaatacccctcaagcctaatcttaagcaatgtaaagtctaggggtaaaatggtcaaaaaccataaccctgcttcaaacctggtattctattttctctaacatatatcccactaacaaaaaggttcttcacttacccatgttattaaaatagccatccatcgcattttctgttatcgccgagcaaaaattgtaaaaataacataattcatatataatacaaataatactcctagagtttaannnnnnctccagaattgagaaattataactctaatatccacttttgataatgggaaccacaattaaataaattcacaaataattataaaaatatcgataattagtgttaattgtctttactaagtcatattataaatgcggtcattacaaaggagcacgaaatttcatgacgacatccaagagaaaatagtctctgaattttaaaaaataaaagagaagaagaagtgacctttttagggttttatagcttaaaatatcatcatctgacaaagttcactcctctttctatttatagtcttcacttagggttaggattagatgagatagacttggaataaagacttgggttgaatcttactcttagcgttgaatatacatatgggctttagagttagatttttgccgttttattttaactaatgaaacaaaagtgtcttttctaattttagcacttttgtcatctaattatttaaatactaattttattttaataattatgaaataaaatacaattttattatatttattaattagacacacaaagtgtactaattatcaaataaatccctatttctcttttcttctcaattgtgcccttacttagtaaaattcataaataacacatagtcattgtttagaatcctaattaaataattaaagcaattaattgagattacaaaataatactatcccaattattgtggggaccatgggcctatgtaatcaagctcctaataagtagataaaaaatttaccaagtaaatttcttaacttattaattccttttgactctactatacattcaatattccactcctaattaaataatatcctctacataccaaatataaaatatgctatgaattatccatttttacaatctaactaatcaataattccctataaatggtctacattgaatagggacta

SEQ ID NO: 63740 - DNA, 741 bp, Cannabis sativa
aagaaactatacctgacttcaattgtatggctctcagaatcagatgacagcgtgaagagaaggatgagaaggtttcagttcaggggttcttgaacggaggaggaagaagatgttgaagaggaagagagagaaggatatgtgcttatgtctgaaaatagggtttaaggtttttttttttttttaatatgaaaatagggtttacggttccaaggcaaatccaataggcaatttgggcgtttggtactcaggtttcatttcatgagaatagatttttaataggaatatttacacaaaataactaaaaactttatctatttacatttttactttaattgacatattttttcttttatacggtttcagcataaagtgtgatgggtcaagcagggtcaacttgctagtggtagaaggttgacgcgccatttgacgcatttggaggttactttatttatttaattttttttttaaatataaaagatatcttccacacttagatagatttaaaccctcccaaacaaaaaacaaatgtaatactaattaaacgacttacagtatttaacataagaaataaggagaaaagaaatgatgtggctaaataattgcttattttaaataatattagaactaatataaattaaatttatgtttcattaataaattattattttatgttgaccaagaccttatttttattatttttaatttaaaattttactatttttttccaaaataaaaaataaa

SEQ ID NO: 63741 - DNA, 987 bp, Cannabis sativa
attttttattattatagttaataaatctatcaatccttcattttttttttcaatttaaaatttctaaattatttatttatcaacaataatttttttggtattcgttctccttctttataattcttaatttatgtatttatttttaacgattaatgtatatgtttaaatcaaaacaaatttactaataaaaatatagaagaaaaatataaaatttgttaaggtaggctttttattattattaatttaattacttatcatataataattattattttgatgactaatttataagttttgaattttatatcaagaaaacctaaattataaaagagaaaacaaataaatttttcttttctttaatgattaatttattgtatttagcagagttctttaagcataaatattttttcaaaatgtattattaatgtaatgaaattatcaacaaaatatattaatgtaatgaattttcgagatgtccaaaatgtagtattaagtaaatattattttgaatcttgtattttaaaaattaccgactgtgctatctgttttatcaaataatttatattttttaaaagaaaatataataatactatgcgcccaactttagtcaaaatagaatataataatactatgacttggaagtgttatgaccaaatttactaaacactttgtacctctttgtgctagaaattgactttaaatttgttatatcttaattctattaaaaaaaagttggactaaaattatgtggagtagtattatattttatttttaaaaataacatgtcaaattaataagtttatttatgttatagattattattattattattatagaaaaatagctataaattaataacataagatttgaaaaaatatgtaatttaaataatgtttgattcattctgtattttttttgctacaaaaaataactatttttagtgacaactttttagtcataacataatttttttttgtgactaaatgt

SEQ ID NO: 63742 - DNA, 576 bp, Cannabis sativa
atccctccatgccgaccaagaaactcaaaattggtcgaggcttagcgcaagaaataaaatccaaattgatcaaatttctaagggcaaacctcgacatttttgcttagtcgcagaaagacatggtgggaatcgaaccatcagtaatttctctcactctcaatacagatccaaactttcatcctctacaacaaaaatgaaggctactgaataaagagcgagagtaagcattgaaagatgaagtcaaaaagttatgcgtcaataacttcatcaccaaggcatttatcctatttgggttttaaactcgtactggtgtccaagccaaacaacgaatggcaagtttgcatcgatttcactaacctcaataaggcatgtccaagaaattatttcccactttcgaggatcgaccatcttgtggataccactgttggtcatgagatcctaaactttatggatgcatattcaggttgcaattagagcaagatgtaggcctatatcgctacaaacgtctgcctagatggggatttttgatacctgtacaaatactggtaggcatgcgagctccacatggttggtatt

SEQ ID NO: 63743 - DNA, 1323 bp, Cannabis sativa
  modified_base (1221)..(1224): a, c, t, g, unknown or other
tgttgtaccactagatgtggtggaatatatgaagtcaacttactagtagatcaagaagcgaaaactaaatgaaccaccgattatggggcatgacaaaaatgttccaaggtggttaagatagcggtcaagatgaaaataagaaatggtgaccttatcttgaatgttcaagatgcaaaaagacaccatttgaaccaatgtagagccagatcttgttttattgtgggggtggtgggtcatctaaaaagaacctacccgtagttaagaaagactgatgttaaaggagaaaagtgtacgagtcctacttaagtgctgattatgactcaagggaacttgggtatcggtccttcagctgactcaaattagaattttatgggaaatattacaattattgtttcaattgatattgatattaaacattgtacattcagttagagacatcaagaaatctaaatggactgtgcatgtatgttatttagtggtaacccatttaacggggtagacaaattagagaaatgacaatatgagttaaattgctggtattcctaagtggaatataggacatgagtaggacactagaaatgacactgaaaccttccacgtcctctgctgtgtccatggggattcaggggattttgacctccccgatcgcctccaatctcaactctgttacccttactccttgtatttcgttgggcgtccatttaataggacttagcctcgaacccataagttaggtggattagacaatgatcacatacactctataccgcgcttatggattttaaggcaacgcattcaaataaataattataaactattatgcttcctaacatgcttttctaatcacataaattactaaacaaataaaggcttactgaaccgtgagtcgagcttttctctgacgatgattatacatgtcttgacgatctttggtagacaaacctggcgaatttgataatcaaagagtttttctcgagaatcatgtcaaattaaaactttaattaaaattattaaactttataaatatatatttatttatataaaccgcaatcccatatttgaacttttacaacactatcaaaatacttttataatttgtcgcacagcgactacaaaatactgcccaagatatcccgagatcgaacactccaggtcgtaccgtcccgacatgtacaatcaccatccaaacttggaactcactcctgttcagtcttcgccttnnnnttacctacacatgaaagtagcaactgtgagtcaataaactcagtaagaaaagcatatcacaaataatacattactgacttgtgtttaggtgcccataca

SEQ ID NO: 63744 - DNA, 785 bp, Cannabis sativa
gatatgtcacgatgcagggcacaatagagttacatgtaaagctcgagtttgaaccgtttctctaatatttagatgcatatgtgttgtattgctggttgttgtttaacaggactatagcttgaatatttaacaatatgcatggatatttttaatgtgtctgcgactttgtgcgtcatttatgcgatttatgtgcgattttatttaatatttcataactgctgttctgtgcaatttttatgcgatatgcatacgactttgtgcgattttgttgcaccattttttatattttctttgcgatttctgtgcgacatttggcgattttactggtaacatgtctaatattctatgctgtctaattttcacgatgtctatgtgacatatgtgcgatatttttagggagttaattgtctttttctgcaagttatttttacaactgctaaattatttgcgatgtctatgcgatataggtgcggcatttgagcgattgaacatttcacagtataatataatataattgcaaaagattatgtgtatatatgaataacgttacagaaaaaaaactatgtcaagttttggtaaaataagttcacacaccacctatgtctaaaggtgagcatgttatcatcattaacatgctcaaacgaacgatccaacatgaagtgctcaatgtactccatggcaaacattccacaatcgccactacgagatttaccttatattcgtttgtggtacaacttcagaggtaactcttctataatgcagtggtaggagctggctgagatcac

SEQ ID NO: 63745 - DNA, 1613 bp, Cannabis sativa
  modified_base (605)..(607): a, c, t, g, unknown or other
actcagttaaaaaaaactgatctcacggactaaatatatatatcgtaatattttatttataataaataataatattattggtatttgaatttaattattaattcaaaaatattattcaaattaatataattaaatgtaataattcaatcatacccttttttaaggtatgaacattaccctcctcaaggatagttatattactaggggaataacattctaaggctaaaacctccaaacaaacaaggtaatgtttcacattaccattcccttactagcattaacctattccgaactgccccaaaatgggaatgaaatattaattaatttacttacagaaaatctctcaagaacacgtttaggcatggcagtttaggactcagttattacctaattattaatgtaaataataatattaaaactaaaactaatacaattcagttatattttttaaatgtataaaatttaatctagttgtaaatttatttttaaaaataatatatttaacgaattttattaaacaataagataagtaaataatatattttccaatgacaaaagctcactatggttgggaagtagtttctgatcattgtgtatgtattatnnngatgagggtggatgagaatatagggaggaaatcttttcggtactttaatttctgggcagatcatccagagtttaaaaaagttgtgatagaagattagactcggctagttcaagcagttgggatgaaaagtcttttcttgaagctcatgcgattgaaacacaagctaaaaaagttcaataaggaggtcataggagatattagaaacacttatcaggaagccaaaaataggtacatggaagccagaatggacacccaagctagcccgcatgatcagttgttgcaaaagaaggagaaagaagcggctgtcaaatttagtgagcatgagaaaatgtaccatagctttttgatacaaagaagcaaggtagattggctttgtaagggggatgagaacaatgctttttttcatgcctttttgaaaaaaaggagaatggagaatagcatagttgcttatacaaatgagcaaggggaagtcattgacaagtttcctgaagtggtcaaccactttttttatcaatttcgaagctacatggggactagtgaaaggctaacaatgactctcaggcaagactgtttgaatcaggggaattgtctcaacatagagcaacaaataagaatgataaagctgttcacaagcaaggagataaagaaggccttcttcagcattcctgattcaaaatcgccaggcccggatggatttggagcaggatttttcaagaaaatgtggccagaattgggagaagaatttactaaagtagtggaaagcttcttccaaacaggaagtatgccaagggatcttcataccagaatgcttacgcttatcccgaaggttgaatccccctcaaaagctatagactacaggtcgattgcttgttgttcagcagtctataagtgcatttcgaagcttctttgttcaagattagcccaagtccttccaaccttagtgaatgaaaatcaaggagctttcattcaagggagatcaatagctcacaacattatgattcttcaa

SEQ ID NO: 63746 - DNA, 663 bp, Cannabis sativa
  modified_base (473)..(477): a, c, t, g, unknown or other
tttttttttttgatgattacttggtttctaagttatatatagtaagggttttattttttttttcttttttttttaaagaatacaatcagcccataaaattaaaagtcaaaatacccaattaacaaaatgactaatttacccttcaaagaaacttaaattttaaaaaataacctaggagcattttggtaattttactaatccattaaaccgacattctaaaattctaaactagtccggaatatccccaaaataattcttccattaatgtcgtgacatttctcaccataatgctaaatttccacagtcgtcgggcttgataaattttttttattattaaatagtatccccgatacacacatatcccaatataatctccgtaattaataaattacgctttatgatcattcaatgaacccttattcattaccctaagtaagttcataatcttacttcattaccaaaataattacatnnnnnataaaatatgtctatttaaatatttttattttctgggatattacactatacccgacagtttaaaatcgtcaagaatttcctttaaaatgctccattttaatttttttttctggtacctagtttaaacaactgagaatattaaacgattgtttaaaaccattggaaatactcaactatagcttacgg

SEQ ID NO: 63747 - DNA, 1138 bp, Cannabis sativa
  modified_base (183)..(183): a, c, t, g, unknown or other
  modified_base (498)..(499): a, c, t, g, unknown or other
gatgctctggaaagtttggtggtgcttgggaaagatttgagtaggttatggggcttaaaaattgagattttttgtgttgtttctacccagacaaccggaattccggttggttcatggttgttccaaccggaattctggttggactgtattggggaaaagctgaattttgttttggccataacntttgactcgggactctgttttggatgttctttatatcgttggaaagttcgttccaagatctatgtgtttatctgtattttgaatgccaatttgatattatgtgaaagtggatttagggattaaccctatacttgtgaatcccaaaaattgtgactagaattaccggcacttggtcaggagcacccagggatttggaatctccacgtttgcgggacatcaggtaagaaagtagtttgcacgtagagttaagcgtggtggcgctcatgttgtatattatggttgtgattaattaagaaccaggattagggttattannctaaagtgagcggttatatgacctagggttattaccctagtgatttaatgattttgaatgttatgtcatgcttaatatgttagaataaagaattatgcgcctaacacataattaagctggactcgataaactagcaccttgagtttaattaaatgtggtctaaggtcattaccctagaatattatgaaggtaagaaagcgatgatgtatggtaatattgttgattaagtgaagacatgagttagggttattacccttaataggtgttatttttagcatcctataatatgctgtaggagtgattatttagtatgcaagctagggttattgccctaagattctatatgttatagtatgtattgagtgtacgcatttatgttaagagttatgtgtataagacataactaggttagacatggtatatatctgtaacaccctaatctatagggacgccacatgtgtgattttataaactagtttaatactaatagaataattaattattaaaaactgtgataatactaaaaacttgactaaaataaaaaactaaaaacggacaatataacggcatgaaaagtgtgttcaagggatacctgttataaaaagttttgctaaagaaatatatacgacaaccatttaa

SEQ ID NO: 63748 - DNA, 1017 bp, Cannabis sativa
agtctcctcttgttttaaaattcttttgactaagttgttgagttcttctttgaatttcttggctcgcgccctcgtcaccgggccaactggaaccttacttgtaattttagccttagtgttctcatcattcctccactcttgaaaaagatttgccctcaaatcttcacttgcatcaaaacggctcaaatgagaaacattaaaagtagcactaacattatattctccaggtaaattgagtcggtaggcattgtcattgatcctttcaagcacttgaaacgaatcatctgctcgaggtagcaatttggaacatctttgggctgggagtcgttctttcctcacgtgtaaccatacctaatcaccgggctcaaaaacctgcttgtgacgactctcgttagcttgctttatgtattcctcggtccttctttgtatattgagtcgtgccctctcatggatttgcttcacaaattctactttcatttttccatctgaattcaaatgctcagaaataggtaaaggtcatagatctaaaggagtcaaaggattaaaaccataaaatttttgaaatggtgaaaatttagtcgcagaatgcatagaacggttttaagcaaattcaacatgtggtaagcaatcctcccaagtcttaatatttttactgatgatacccctcaataaagtggataaagttctattaactacttctgttggaccatcggtttgaggatgacaagtagtagaaaacaaaagttttgtcccaagttttcccccacaatgttttccaaaagtaacttaagaacttagcatccctaccagatacaatgcttctaggcataccatgtaatctgacaatctccctcaaaaataaatcttcaacattagaagcatcatcagttttatgacatgggataaaatgagccatcttagaaaatctgtctgccaccacaaaaactgagtccctcccacgtttactcctaggtaaacccaacacaaaatccattgagatatcaacccatggtgtaa

SEQ ID NO: 63749 - DNA, 1198 bp, Cannabis sativa
ataagttttttagttgttaaattatctcaattattattttacttgtacttaattctctaaactcaaattttaatagtaaaactatccaaattattaaattgttaacaaatataaaatattatctattttttatagttaactgtcaatataatttgttaggtttatactcttgtacacgtagcacgtttatatggtacatctaatataattatttaaaaattacaaaaaaatattttaaaatttataatattttttatctttataattttatttagttttaaaataaatttttaaataataatattatgtgtaccaatataaacatgacacgtgtacaagaatgtacatataagcagttcatagttgaagttaattggatgacaccttaaatttactgaattcagtactttagaagattttaccgttgaaattcaaactttgaaaattaaatgcaagtgaaacgataattaaaaaaatttagccataaaaaactcattaaataaatactgaaatgaaatattcaacaaaaaattataattaagtctctaacaacacatcaaagtatacaaaataataataaaaaataaataacaagttcgaaattatctaaatagacaaactccaaatccaacaaacaacacctatatatatataaaaaaaactttttctatttaagtattatataaataaataggtatattttcaattttctaaattatgctttttaatttttattatttaaaatgggataaatattattttgaatcatatgttttgcaaaaattattaattagtttctctattttgttaaatgacaaaatgaacgttgtattttttttaattatcaaaaaatgagcttacggtcatatttttaccattttagaaaatatagggtccattttatcatttaataaaatagagagtccaatcaataatttttgtaaaacacagggtccaaaatagtatctattttttaaaatatgtgtaattttcaaatatacgcaatttacggcctaatttttttttttaattacaaaagtatacttgtaaagttttaaaattataaaaatactctttacgcagaaaaaagtaaaataaaaaaaaatgttttattatttttaatgaagatgtatttttgtaaataaagaagttgaaggaataaaattaaaaaaatttccgtgttaaagtatttttgtat

SEQ ID NO: 63750 - DNA, 772 bp, Cannabis sativa
tcaatatttttataaaaattccttaaatatatgattaaaatataaagtaattttaaaaatacattaaaaaaatctcaatgataagagtaatttgcagttaaactcacttatgttttaatttgtatatagttaatgtgtgattttttatttttgtgataatatcccattagcttcacttttatttgtaattttgaggtatcaattaataacattaaatgtcaaccaagattgtcactatatgtaaagtaattttaattattcaaatataaacattattttaaatagtttctatttaatcgtgaaatttaattgatattttaaatttgcaaataaaaataaagttaaggagtgttgtcttaaaataaaaaaaataggaggttaacagtatacaaattgaaatattagagagtatgatcgcaaatcaccttaattataaaaatattttttttattaataattataattataattatatcttacacgttgtgagaaaatatctaaatgttaaactaatatatttgagctatagcatctggtttcataaaattatataaattttctgagctaaaaaaagtagattttacatgaaatttgaatcactttagtctattggatactagtaaaataaaagaaaagtccaacttgttattctttaaaataaaataaagactaattaagatttttactccttaaattttaacatgtactaaatcatgctttgtgaacttttcaggccgttaaaaattctacatgaactatttaaattgttaga

SEQ ID NO: 63751 - DNA, 4622 bp, Cannabis sativa
ttttttttttttttttatgtgtgttgctttgtaaatataaaaatatttaatttatttttttgacatatttttttaaatacaatttttttcatttttttaaaatattaaaattatattgttgtctaattaattttttattgtttaaattatatattactcattatattatatattttactttaaaattataaaatttattacttttattattaattatgtaataattcatttaatttctaaaaaaaaagcataatctagctgtcaaaattaaataaaaaataattccataatacaaaatattaaaaaataatttcataatacaaaataagtaaagaattgacattgatttgcatattacaactaaattgatgtttaattttattttatttttttttaattattttcttgttgttgtccatgtgctttatagttatttttagttttttatttttactgaaagacaaatatttttataattttaaaactttaaaataatatttttgaaaacttaattttgtaaaaaaaaaaaattgacaataaaaatataaaaacacctttagttaaggttaatgcctcaactttatgatggcataatcacaagaataatgcaattgtttaaaaattagcccaaggctattgtcactgcacttttcatttgggtttgggagagaacataattacaatatccagcaaaataaattacagaaggggagactgaggaaatggatctcaaaatttttgggtttctgcatctaacacacattcacacatatggtacaatgaacagtatagtagaaaagaatgccctttattatcttgtgtagtatagcttcggcgaccagaaaatttccatatggtcacgcactcggtttatcaagcagtttcttttctttgcttgtcatcattctttgcaaccaattattaaaattttgaaccgtgaagatacattgccatcaaggttaacaaggtcatgtgccttattcttcctctttgtgggccaaagaattcaattgtctttccaactgcacaagaaatagacaagaatgtgaacaagtatgccccttctgacaaggaatgctaggttcataatcgaaatatatagacagaaatctttaaatcataactagtacatgagctgttttagagcatttttgctggtacaagttgtcaccaaccagtcagtaggggaggattgtctctatcaaatttatgtagcacacttttattattttagcaagtgatattataagattcagtccataagaaatcaagtaatgtgtgacattttttccccaatcagttaattatctaaaaaggccttatttcagaaagacttttccatttcaagaaaaaaaaatgccaagttcaacaaaaaaaaatatttaaaaaaggtaatcaatgaacaatccagaaaccaacggattttgtaatatgcaaacaattaacactaacaaactaaacagtcttgcatttgaagacaggttagtgcacaaacctgggcatttttcattttctgtctctgcaattcctcaataagactcccaacgctgacattaaaaatgggtatgagtcgaatgtaaagataaaaggtaagtagaatttatttggttctgttatgtacctctgttgcaaattgttcacctggttctgcagctctctctcccgggataaagcataagatgtctgttaacaaagaaactagtttagccattttaataaaacatttaacctgagagctcaaaaggggtttgcgtattagacagctataggtttaattaaatctagtaatgtgctactacaaaaaaggattagcagcacccccagaaagtttgaccatgtccccaacgaaaaaattaaaaaaattaacaatgttagcaagcaattctaaaaatgctgaacgattctatgcttgatataaacaagctttcccattcccaatcttttcaaaaaagggtcaattatggaaattttaacagaaaaaggtaatgctacatcaatagaaattaaacagaggttttagaaagaaataacagtcaaagcacaataataggcataggtgcgaaattaaacattcaaaacagaacgagagtttgatctatacctgcgaaaggtcagaagttcctacatcagtgaactctgcttgcttgcctatatcaagttaaatatgtcaaaaacaataaaaattatggatatggttaagggaaaagcataaacaatgagaagatgagaagctttaccagaggtttgttccacgtacttcattaatttaattatttcatcctgttcaaaaagaagaagaaactgagacttaattatcactagactttaaagcaaggtaaaatattacagttagtgacaaaccctttgcatagtgttctgctgcaaaatgcattgcagtgatggaagaacggctgaggctgtgaggtttgcagatgctggactggttaaaccaccacagattgggttgaagtaacaatttgtaagaccctgtagcataaacaagaatggcaatcgttatacagccatacctagaagatatattgatcagattcgttttatcatacattagtccagcgttaattattaacagaacatagcacggcactaaacgtaaaactaagaatgaaatcaatgtggcaaatgctaagacataggaccttcatgcacgtataaagcaataactttatggtgaaaaaagtaacaacagacgtgaaaaccaaaaatcacagcttcagaaaagatccaacttattatactaacactaacaacatcaatcatgatgactgataacttgtttatgaatttgtaccttgggactcaattccgctgaagtgactttaaaccgacccttatgttggacaatcgctccgtctgatgtatcctcagctgcaaagagaggataaaacagaatgtaaaatttattgttagaattatgtttgcaatataatatagcattcagaattgaatttccaatgaaaaagaaaaagaagatacgagtaaagacacaccagatggaggattattgacatctcgcctctgccgatacgacagtgaaccactataatttcgctctgattgaaattttgattgtggataatcccttcaaaataattttagtatacacaaatcattaaatattatttaacgaaagatcagcagcaagcaaggctcgggtaataaaacaagaaccaggtaatacaacaatataacaaattacagtagcacataagagataataaacacaaagatattgtttcatagctcctatcatttccccacagtaccctctcagtagatacctatcactaagttttacaaataaactagatcgacgacagacatgtaaggggaaaaggatctctgcactgattttcagaaagaaaagaaaaaaaattaattttaatttaaagaaagcttacctattaccttcaccaacaacccttttaggtgaaacaacattatctggaaggagtgtaccgctcaaaaactttttatgctcagctacaatatgacgtgggatagatgaactttgcccagaacattcaccatcagttctaccattttcttggcacatagttcttggactagtggcattctcatcatcctcacaaatatcaaagcaacctctgtatcaacaatggaatacttataagatgaatagcaaggggttttggaaattactaaaatacacaagaaaagaaaacaaaaatgaaaactaagatagaatgcacatggttaacaaatagaagaatttaatctcctgctaacgcaaacaaattgaaactaataatgcaaacattctattggaaaatttatggtgtaagaactatagtaatggatatggaactaagatcgacacattgatactaataatacattctattggaaaattaatgctgtaagaacaatagtatgcaatgtacaacaactatgactgccccagaccagattgaaatatagtaataaaaaaactagcataacaagcaatgtagcaaactcatcatacttaagtgcctgaagaggtttaataggaaaggaagcaagtgaactctccaaatccttaagatcattaaacccatcctgaaaacaatgaaatggtaccacttgttaattcactaatataattaaatatcagcataaggggaacataaaaataaaaatagatacttctgagagtctctacacctcctgattagaagtaggatttgattggttggccatttcaggtgacagcctctcttctggaatcccaacatctttatgctcatctatttgcttcttcatcatctcttcttcatttgacaagtcatcatcctgaatctatgggcaattaaggtgtttttactacatgacaagaaaaacagcaaataaaagcaaaaacagcgtataccaaatttattttaataaattccacttaaaaaataaaaacatgtaaacacaactaggtaggtaccaacaccacttacaagggcagcctgattcctcaaatcctcaaggttaaaattccaggcactgattcctcggatgtactcttgctgcaaggtaataattaagttaaattcaaagtagacagaagtttggtaaagttacacccccccccccccccccccacaaaaaaaaaa

SEQ ID NO: 63752 - DNA, 929 bp, Cannabis sativa
aaagtccttaaatttaacaatcttaatagttcaggaaaaatttttaacggccaaaaaagtttagaaggcacaatttactacatgtaaaagtttagggaaaaaataactaattagcaaaaaatcaaataataagaaatgatactttgtaaagttaatatttttattaaatgcattgctattaaaccttatgcttaacaaaatattgatgcggcaatttttagtaatttttcatactatttatttaatttaaatatgtaaggttaaataataaattgcttaattttacaacacgaattattaataacaatcaacaacaaatcatgttcacattaaccaagatgaaatatttaattttaaagcattaatataataatagatgtgcctccaattttgaccttgatctccaatgaccatattattaattacatatttctttgatctatggagaaaagagagtttgggtgtaataaacacttacccatccatgccattcttctacaccataactacactcattccttcttaatcaccaagtaacaagacaatcatttttaggatgaggaattataggccaattgggcatgcatatgcatgcatgctcaatgtgagagaattagttgtattgacccaatagattgactagagcctttttaaagtgtgtatgagccccgaacaagttagtacgttatcctcattttattatggcccgatagtaatattatgtattactgattctatagttatcattatatcactactacaaatatcagaatttacgacggtactaaaaatgatttttttcggggaccgtcgctaaaaacattaactatttaaaaccgttgggaaaattttagtattcccgacggtttaaaaatgtagtaatataaacaaaatagacgacattttttaataaaatgcaattttttaat

SEQ ID NO: 63753 - DNA, 3182 bp, Cannabis sativa
ttttttttttttttttgtaatgagaagagttgtaagcaggtattatttaattcccctatcttaaatgtattaactttgtctttctccgtttgcattagcttgtcccagattggttttacagttatactgaaaaggacttacatactgtgactctctcaatcccaattaagcctagcctctcgtaaggatgtacggccatcctttgtccttatttatttattttttttgttgggaacggctgtactttggaataggaaaacaaattacacctgcggtgttttttttttttttttgtgcggctagagttttcaaatttatagctgaatctgaagagagaggtgagttgggtaaaattatggaatgaacaatttgggccaaaacaggttggcgagcttctcaattctcaattctagcagtggagtactggacccttcttgaaaaaaggttcgtaatactgatcagaatatttatgggatgtacaaatgcatatgattcgtatgttgataaaggattgagtcaaatatatgtggtcaagaatgaaacacttgaatgtggctagtgggacattcatgtctactgcatttaattcacatatcccttccaactgataagttgaagttctactctgttttcacatataaataaatatttgaattaatcaaataatcatttctatagttataactcctaacaagatatatatttatttagacttaaataactagagtagactttagcttatatgggacatatatacaaaattaatctgaagtggataatatttggatgcaataatgaatgagattaacttctttgaaaggagttctaacttttaatgaggaatgatgacactgtttattgattcgatagctaaaatctaatttcaggtattttaaggtacctaaggtcttattttgttttagtaatttccattatataactatattgaagtagaaccatattaattaaataaaatatagataagatgtatgtgatagaaaaagcaattaaaaagttgattgtttgaagtttacacacacaaggtctataactaatgaagatttagtaaagcatcattggaacttcataactagtcccccactcccaatccaaccaaaactacagcatggagaaaacgtggcagcgccatagccaaaagaaaattagctagcttcacacttaataaagatctaattggtattagaatacccttttttatcgcgagtattgttactgggcactcgtcctctctaatattttttagagatagcattgtacgattgattagtgatattttctaaaagttattagataaattatatagaatttaatatttaattataccaataataataggagtttttacaaaaaatattaaattttaggcaaaaatttataattttactgtcacactgtattttttttataaaaatattatcttgttataaaataaccgtaaaaaaataaaatagaataattaaaacaatcgtgaaaacttaacatagtacacagtataaaacttacacaatatttatgaaaaaaattctactccacagtaaaaaaataaaaaaaaaaataaaattttagtatgtggtgtaaaaatccttaataatatgatacttatgaggatactaaatactaataatattttttagtatttttctttaatcacgataaatattatattgtgtaatgatatattgacgtactaataatagttaatatcatgtaatatatataatatttatgatattttattttaagtagggatattggcggctaaaccacctgaattttaggttttgtaacacttaactataaaaatcgaaattttggccgcaaaacctactgaactcccattccgttttgctctgtacacctccgtccaaaaattacagttaagtaccacgatggactctccacgtgtacacacttgtacacgtggcaaattttcagtgggcaacgtaatattaattttaaaaatattataaaaaataatttaaaaaaattaaaaaaattaaataattattataaaaaataataattttttttaaagtaatttaaaacaataaaaataaataaataaataattttttttttcttcttcctcttactccaatcgcccaaacccaaatcacccaaaccccaacccaaattcaaagctaaaactcaatatagaaagaagacccaaataacaatgatttgtattgattttatgtaaaaatgttttaggtcttctttgttatgtaattaaatcgaatagaaagtatatcgaaaaatgcaaataattaaatcgatctcacaagaattgtaactaagtatcaaataattaaatcaatcccattctcgtcttatatcgaaatctacgtctattcactatagcataataacactcacttatcagattttacattgaaatcataaaacatttaattggtgatcaatcaattaaaagtaattaagtacgaatgaaatatatgcgcataaaaaattagacaagaactaaatcatattaaaactaaaataaagtgtcaaacaatctccattaacaacctagtaaaaattaagctactcgtaatcattgaaaacacccgataacaattaagtaagaacataagaaaaatagaagaaagtaaagaattattcaaaaaataaatgttgaaagtctttagagtcgttttttgtttctaatttttgtactcctttaaatgttaaaaaataatctttatattgctaaaaaagataaaaaaaatatatatttatatatattaaaaaaataaatatttaaataaataaattataataaaataaataatatttaaaatatatattttttattttgtattttatatttttaatattattattccacatatatgtttgagtttgtgattttcattttttttttacatgtaataaaaatataatttaaaagtattataatttattaaatactgctaaactttttttcacagttctattgcaactcttttcttacaatacaactgtgccaaactatccctaaactacagagcactctcaacaacttctttactttattctttaaaatacctcactaaaacttcacttttttattttacctcctacatttacattacacctgtaaagtctttttttggcaagttagttgacaaaataatttttccatttatggtaagatt

SEQ ID NO: 63754 - DNA, 1779 bp, Cannabis sativa
tcaaaatttaacttttttttttttgtgtgtgaatttatgagtgttaaacttgcttcctaatcatattgttgtaatgtggaatggctttcccattctcgtgagaatgtgatttcttgttcatcctcaaactcaacaaaagaacatataaagcaggcaactcaagcgatcaactcggtgaaaacttactatgtatttcatgtgggctagttgattttgattacaccaaattagtattgtaaatacggttcaaattttttgacacgatacgaaatcgacacaagttcagaaggcacgagcacgactagacacaaaaaaatacggatttgagcacgacacgacacgatactacaaataagcacaacatgatacgaaaaatatatccttaagcacacgatactacaaattgacacgacataacacgaaaaatatatccttaagcaagatacgatatgagaagcacaaaaagcacgacacgtaagcacgaatagactagcccgaaaagcacgacacacgacaagtccaaaaaatacgacacgacatattaaaaaactttataatttattattattaagatatgaatttattaattttaaataagttaaaatattattaaaaattaaatataataccgaatattataattttataattaaaactattaaaacatgaaaaattaaaattatatattaatttatttataagacgtgatataaaaatttgagtatttataagtaaatattcaaatatattcataattttttttatataattatttgtaaaatattgttcaaaagttatataaatataattaaagttttgaaatatatatcatttagtaattgtaaaaaagaaatataaaaatgtaaagtacgaattcaagtccaaatataaaaatgggctgcctatttaagaaatacgggccggaacgagcaaagcacgacagggatctgagatgaaaatatcagacctactctttaaaaatgttgtcacgacacgacacatcccatattgttttttgcggtacaacacgacacgatacatcccatattttttttgcggtacaacacgatacgatctaagaaaaacacaaataagtaacaagtcaggccaacagcacgcacgaacttacagcactacaccaaactaacccattgagaaacgtgcacgtgagcataggaactaagtggtcaaaattggggatctaagggtggggagtgaaagtcgacaatataattaattggcccaagcgattccatcttgactatgccaccttctattacactataattttgatttttttggcatacctcaaattttagttgtagtaatcaagttcgacaaattaagttttaaggaaaatgtaattcctagttagaatgttttgtttttgtgtctatatatatcaatttttttgtgttttgtattagccaaattggtcattagactatttattattattattttttccctctaaaaataatggttttactaattttttaaagtctcatcaattgaattaccaccaacaaaaggaagacaaacaatttttgtaagtgacagtagtagaaaagaaggcaggcagctggcaagtgcatttgactcatttcgtcccacattgattaaatagagaaggcctatttgtatgtgtagctatttaatgggaagtctttaactttccaattcatacctttctcggccttttggctaagatcaagtgtagtatctgttcttatcagtttaatatctgatatgtgggccaatggtccacacgatattaaa

SEQ ID NO: 63755 - DNA, 1061 bp, Cannabis sativa
aaatggtatttaccatttttttaaaaaaagaaaaaaaaaagttgagagattaaaaaatagaggaaaaaattataaatattaataatttgtaaaaataaaaacaaaacacacataactctaaatatagcaaataaaaaaaaattaaattactaagataatcttataaaatttttgaaaatataaaaaagagcaaagattgtaggaaaataaatataaaatttagagttatcataatttaaataacaaaatatttatgagtcaatacttatttattttagagataaaagagttaattgcggtaaaactttcactttgcttacacttaactcccaaactcaaattttggcggttaaacttccaaaaccgtaaaattgttagcaatttataattttcattcattttaggtgttaagtatcatgttagattgttcacctatacatctatatgaatacagcgtacagatgttatgcagggccgaccctgagttgaaatgagttataggaaaatttaaggtaaggtttaattttgttttaagtttaaaacaattggtttcgtataagggttttgtgaattagaatagttatgaaagttctgaccttatagaattgttattgggtagtcatggggctagtttcttgctgaaattgaggtgattttgggttagaaattgagtttagagttttttatagcttaagtctaaaaattagtggcattttctaattaagggctcgattttaatttctattatgcaagtatggtagtatgtatggtatatatgtgccctgtgaagtttggggtggtttggacaggttcggtagcatttcggtgagtgcgtaatgttgaaaaatcacatttcttacccttgaaaaactgatcaactagtttggaaccggtcaaccggttctggccaactggtttaccgtttcgggcagcctcgggaactggaaaatcatagttttgccataacttttcactaaggtgttagttttagacgttctatataccattttgaagcttgcgatgagctctaccatattatatatgttttagagctaaaatat

SEQ ID NO: 63756 - DNA, 1203 bp, Cannabis sativa
cacctacttttatgtgcacgttttttcactgcgagggaaaattgaccgcccttttttccacgacttttgtcggcgcagtttgacgccagcaaaagtaaataataattaaaaaaataaataatcgttttgccggcgcaagtaattgcgccggcaaaagtttcccaccttttggcggttaggtgccaacttttgccggcgcaattagtgaaatttgccggcattattacctattgccggcgaaattaagcgccgacaataggtggaggtgggaaaacaaagttgaccacctatgccggcgcaggtcaacaactgcgtcggcataggtggacatttgtcaacgcaagtactaaacagcgctggcaaaagtgggcattcttgtagtgaatgcagtgagagttagcgagaaaaagataattgtgcatgaaactctgaggagaaggccttccaagagttgaaccttcctggtgtcaacttaaagtaccattgttgtgcggcttctgaaagtgtgatagggaatactctacaacgcacatctgctcataccccttccaggtccatttgcatttcaaaataattgagatgtgataagggatcttctttccctgtgtacattttccaggtcgacatcttgaacttgaggggtagctttagaacattgatctcatgagtaaatggggattcgcgtgttcggtccaactcgagatcattgagcttttaaccgtccaagccttggaacatattttttagttcatccaactatgcttgtacagatggatgaatgcagattccaggctgagtggctagttgaacattgttcgtctaaacctctccttctatcatccctgagatcatgagctgtttccagtctgttaaatactgaaacaccaggttgtctcagcaactggttggtttggccgatcacttggcaagaactcctagtttggacagagttattgggtataaccccacctgatgagttgccaaataaggtctggtagcctaccacttggcccacaggtggaacctgtgatcggggatcggacggctgaccgttcagagtttgggcagagtgcctgcaagaatttctttcgagttgcctagtaaaatgctggacacaggttgctggttagcaacttggtagtcccgcaatactagtacggtggcctctcttgttcgatcatcgatggctgcctattgagcctt

SEQ ID NO: 63757 - DNA, 945 bp, Cannabis sativa
tatatatatatatgttaagtgtgcattaccgtatttctttttagaagttattttataattcactaacaaattaatagtctcgaaaaaaaaaagctaattgtaataactaattagtaagtaaaattaaacattatttaaatgatgacacgtgttatcaaattagaattagggatagactataatagaaatgcataatagagtgtccttagcacacctaattgaagatgttggattacttacaacactagtagaagagcaatgtcataaggcactattggtgtctaacaccacctaaaggcggtgccttgcgattggttagcaatatttaataacatcaccttgaggtggctcttcccgattggttaacaatatttgataaagttattaatttaaagaataagtaatatttttaccccctaaacttttaacactacctgatcctgccctttaaaatatacggtttgtttaaaattcctcctaaaatataccagttacataaccatatcccttttgttaggttccgtttcttttacagttacaaataagtatttttaccccttgaatttttaccaattacataattttgtcctcttttattataataggttaattttaaaaattataattttctattaactctgaatatattattaaaaaaattgactaaagtattaaattaataaaaaatatatattaactttatttaaaaaaatcttaaattattcaaaaaaaaaaatatatttttcaataataatttaggcaaactaaaattttgtgaagaaaaattaagcttatttatatttacaaactcatattttaaaaactaaaataattattaaaaaatttaataaaaataaaaaattattaattttaaaaaaatataaattaaactaaaaaatattatgtttacttaaacatatataaatttttggaaaaaaaaaatag

SEQ ID NO: 63758 - DNA, 968 bp, Cannabis sativa
  modified_base (32)..(33): a, c, t, g, unknown or other
tgattaacataaataactgctaatttccaaannaactaagcgggctttacatttgcattgtcaattctaacagattttatatttgttttgtaatgaactttgacatatgtgaagaaatttttaaattattagtggggatcccgatttggctcgtaatatgtaagtccatgtatatctggaatgatcatcaacgatggtcaaaaaatatttttatccttcaattgaaggtaagaggtaaggtccccaaatatcaaggtgaattagatcaaatagtgcttttgcaaagttattgtttgaaatgaatggtaatttcttttgcttggataaatgacaagtaggacaatgatatgtagaggcaagattcttattaaaatgtaattgtttattgattttatttgtaatgagtacagatggatgaccaaggtgtgtatgccattggttttgagatagtacattacaagaaaggaaattacaatttgaagttggataatagccacaataatgtcgattggaggaagcaaaccggcgtaatgccgaattagagcgtgaaatagccacagtaagggcagtgcaggagaatggtacccaaaatcaacctgaccttgggagaagagattcacgaggcaaacctcgtagctcgcaaaccaaggggcgggagacaacccggagatatactcagacctctcaggagatgcaacttgagataattgaggaaaatctagggacacaacctgggatacgtggaacatcgaacaaaaatcaccaaccctctcttcaggttcatcggaaagaaattcgcacaaactcttatagggaaaataaggtgaatcaacccctaagaggaagagtaaggtccgaccgcagtcacgacgggagtgatctacgagagcatttgaacttgaagaagcctgaccttcgtcgacgactcggtccaaagcaaaagaattcactccatttgcaaatggacg

SEQ ID NO: 63759 - DNA, 927 bp, Cannabis sativa
ttaacaccctactagtttaggcatgctatcatgattttatattaaccatgcaacttgttgcaaataaacgaatttattgcaaaattatgaataattagaacttttacttaattactctctaaatgaaaataaatatcttttccataactgaattctgtatctaaaatatttacaattgggtcacaaactattcaatacaaaagttgtcgcctagcgaccattttaagtacagtctactatcccaaagattgtacactccatgtctaaccgttccgacatgtacaatcttcactcgctcgctctcacggctgctcaaccttagccttgctcttacctacacatgcaaacaatatttgtgagtcgatagactcagtaagaaaagcataataataacatagatgtaaacaagattaagattaggcacccataactgtaacccatccccgcgtcctacacggtactgagtaaagaacgttcaaatgacaatactattgaccataatattatcctatactcgataagctagtcatactctggtcgtatcgatgtaatactgtcaagtagtatggtacaattgacaataatatcaacctatactcgtacgctagtcctaccctagtcgtaccgatgtcatactctcgagtagtacataagctaatatacatttatcgatatctaatacagtactaaatatattgataccgctattataatgtaatctaccaggcttaactaacatttacgctaaacatgcaaacacatatgcatatcattatactaatcttagttcgtttccaaagtcaagtgtgacggcgaacctgagtggaaaaacagctcgacgacttataggcccctaaataacattatttgtaaaattggtgagtgacacgctaaatcactttttagggacttaaacttgaaactaaa

SEQ ID NO: 63760 - DNA, 1304 bp, Cannabis sativa
gagttttataaatatatgaagtttgaagagcttgactatgcctcgaagttagggagctccaacttttgtgtcatataatatggattatggaatgaatgattggggttctggtggaccccacttttctttatatgtctttctctttcttaatgcctaagaagattttggaaccaatatttccctcaaaagtcttgaaattttaagtttgtaagaccatttttaatgaaaattacaaaaccaaaaaaatgtttgtgatgtattttcattatcttttagccttgttacaaaacttatacaaaatttaatgtttgattagtatatttttattctttttttggtttaaattaaagtaaaacattcactaaaaaagtgaaagaagttcctcaatctaaaaaaaaaaaattgtctatcttaaattgttaacaagttcacgcgtaaacacatttatttgtcaacaactaatctcagtatcactcatttcacaaaaaaaaatgaatagagtgtaataaatggactatgttaatgtaaaattttattttgaaaggtattactaataaatcgtatagtaaaatttaatattgtaaaaaatttaggggtaaaaattaacttttattatgtgataaatttgaatcaatttttgcatattattagaacaaatttttttacaaaaaaagtaatattttaataataaatcacaaattttttactacaagatattataatgactaatttagctatttaaatgaagttacttaccatttttcaaaaaaaaaaaaaaatccaacgaaaaaaacttattgaaaatgtaattttgtttacttaatttttgttggatgtaaaattaaaagacacgtggcatcacttaattatgtcacataaataattagtttttaaaaatatttatgagttagactaattaaatagtgacacatgttattgtatgtaccatctaataaattttttattaagatttagactaaagcatctttaaacaagcaacattccaagttcatataagggactcactataattctttagccaatctcaaatggccataaatggtacacgtggagtggcggactcagaatttaaagtgagcaaagctcgattttttttttttttgtaaaaggaaagagggcataaataaatttaaaaagaaaaatataaagtgtagttagtgaaatttgaacctttaccctctaccatatttgtatctaccttaactgttacaccaagcttacttttatgtctataaatatcattttttttatataaatatatgttgtaactaattaaaatacat

SEQ ID NO: 63761 - DNA, 784 bp, Cannabis sativa
ccaacaatagaccaatacttttggtaaaatttcgaattcatcccgtcaggtcccgacgatttatccggatgcatttgaaacacaacctccttgacttcttgatctagaatagggcaaagcaactcctctttatgctcatttcgggcagtaggaacaacacaatccaacacctcattccaacttgtggcctcggcagtaaagagattttgatagtagtccaccataacagtatcaagtccagtatcccaatgtctcaagatgcccttagaatctttcaagctagaaatattattattctagtttctagctgaggctttagagtgaaagaacttactgttctggtttcccgcttgcatccatagctgtttagatctttgtctctaaaaaacctctctttgattaaaaacagtaaagagctcctttttagcttcaaaaaacaactttttaccatcctcatctcttcttttcttaaactgcttcaattccctattgcatttctttatgcgtgtagagaagttaccaaaagtttcttttccccattgtcggagcgcacaaccacaaaggctaattttttgaactatatcaatcccccccattgaagaccaatgatctctaactatgccttcacaatcttggtgagaagtccaaatattttcaaacttgaaaggcctctcttgaacaacaatttctctgaacataacatccaagaagagcggacaatgatccgacgaaaaaaccttaagattaagtagtttcgaaaaagaaaaaaatacttaaccaagag

SEQ ID NO: 63762 - DNA, 1239 bp, Cannabis sativa
agagtcaccatattacatgaaatatattttaaagaaaattgtaatgattgtattaagtttatattctcttattacatgaattatattggtcatatataataattattgttagatttttggtatattactttttctctaacaaaattgatattatttacatttcttagtatagatatgtaaacttctctactttttaactctattatcactcattgacaaactatattatactaaaactttaagaaaaaattacattgtatatccactttactgtaattttttataattttaccttcatttccaaattcttttaaaatatagtcacttttatagatgatgtccatattataccccttagattaatgtaaatcatgtgctacacttaagtgaagagtaagaatatattagtcaatccattcataaaagtgagtagattttaatgaaataaaatataagggtatttttaattaatagatacataaaagaggtattcctcaacttaattatcccaaactttaaccatgagaacaagacaaattaagaatgggagaacaaataactaaggaaaaaaaaagtgaattcaagagatgctaaatattatttggtgttcaaagaaccatatgatatatcataaaaaagaagttcatcaatttcaatctttgcaataagaaaaatactttgttataataaaatttaaaaaatatcatactatcatattaaaaaaactaaaattaattgtaatccatgaaaagctcttgggttcatttacgacaaccaatttatgagaattagaatttggtttctaatcctcttatagtgacaaaatatcatgatcataccaaaactacaaagcaaaacttattgtttcaaatataatttaaccatctttttgttttgttgtttcattaattatcttttatttttattttaatcaagtacatgttatattagcatataaaaaaattatgtttttttaacacataagtaaactttttatctcataaaaatacacaaaattaatgataatttattaaaagttataaatgcacattacattaacatactaaatatataaatatatatattttaataaattttttaacacaaaattaataatagaatactaaaagttttaacagatttaaaaataattaatattgataatatatatgtaacttatatattgtttaaataaaatatgaaaatcttatagttaaaatagtgaaaatagttaaaaaa

SEQ ID NO: 63763 - DNA, 826 bp, Cannabis sativa
attgtatcataaacaaccacattatgatcatttaaaagcctttggctatttggcatatggctccactcttgctatttctaggtctaaattctcaccaagatcagccccatgcgttttcatagatatccactaggtatgaaggcttataaacttcttgatctcaatactaatagagtttttttgtagtagagatgttcaatttcatgagcatattttttctttccttaatacttctccacctgttgattatgacagttttttccaacttcctattagttttacaccagttgctacttcttcccccatcacaccgaaaattccaaccttaaaccagattcctactggttttacaccaactgttatttctcccagttctgtcatccctcatcttcccatatcccagcctcaaaatgctcctacaaatcatgccccatactctactacaagacctattcgaaacattcataagccttcctacttgaatgattatcattattttttgactaattgcactaatgctgttttttctcaagatcttgatcagggagctttgtatcccctctccaaggtcattgatgactctcggctctctccaacatattgagctcttgttttatccatttccaggcttactaaaccttcttcctatgatcaagctcatggcatgaatgggatgccatggataatgaaatcatagctctggaagcgaatgacacttgggtcattgtttctcttcctgctcatcgacatgcaatcgggtgtaagtgggtttacaaaatcaaattcaatgttgatggcagttggaacgttcccgcttcaagcctct

SEQ ID NO: 63764 - DNA, 813 bp, Cannabis sativa
aattgttgattatttatttggcattattattatttatgagtgataatctgaatttttattttaaaaaaataaatgtgtatgaatgacaattatacccttgtgtgggtgagtaagtgtgcactggtcctaagggcattttggtcttttaacctttatttactttatttgttaaagattgaattttttagaaagaaaggaaatttttctgggttgttctctctcaaacccgaaccgcctctctccgtttaaccctttttgaatttcaacttgaattgaagaatttgcttggtgttacttgattttgaagcttgatttggggagaattttaagcttgaaattgaggtaatttcttgctgagtttatgtgaaacttattgttgaattcttgctgaaattattgtggtaaaggcatgctataggttgtttgatcttggttttcatgtttagtgaaatggatgtttaatcttgataatttgagtgttaatctcttgatttgtgttgattcatttggttgatctatgaaagtaaccctaggagagggttaatacttgaatttgatctctatttgcttacttgttgttaaaatgttagggattgaaggattctaagcccaagtttttaacttgaagttttggagtttgagcatgagtttaggttggtttttacaatctgaaatttgggttaattatgggatagtgttgcatgaaatatgttatttgagcatctattaatggttagtaatcctatttgttaatttgaaagtttggttgtgaatttggggtgaaaagactggattttcttgctgaaaatcgtg

SEQ ID NO: 63765 - DNA, 1018 bp, Cannabis sativa
aaatcgggtagagaaggagctgttgaatttgctcaaatggaaaaggagtctgaactttttcctagaatagaaccgcctatcactgaagctatagaagaccgttccttgatgattgtgcctaatttgaatttgtgtgaaaaagatggtgttaattctttagtggatcgggcccaagtggagcccatttctgcaggtgggccgaatgtgggtattgaaccaattggagttaattacttgaacaaagaaaatttgaatattacttcttttggagataaaagaggggatgttgggcttattgatgttgggccgtgcgtgaaggacagtgggctggccgcccatcatgtggacaaaattattagcccaatgctccttgatgtgaatatgggtaatattgttagtgggcctcctctcattaataatactcctatttcatgtgggcctactttggtggagtctcaagtcttgtctaatcctagccattggttaatggggccgggttctttgggtgttaatgttaatagcattgggccaaataatccatctcaagctaatattgggcacgtggaggctacttctatttcgcctaatgcttcccatggtgccgtggaacaagctaatgaagaaaaagcattaactcaattttttaatgctcaagaaagcttattgcatgacctcaaacactttcggaatcttgatttgtatgaaatacggaaaatcggaggggacatcggggtcccggcttcgtctgaagttaatgagagaacaactccattcaagaaaaggaaatttgaagcgtctgcctctctgtgttctcggcctcataaaattcctcgcaagtatccagaagttgttcgtgattttccttgggacactaggcacaaagctaatgattcaaatttggtgattgatgacccgtctgaggatagttctagctccccgagctgctccggaattctgaagaatgccctggttggttcatttgtgatcgatgactctgtttcgagtgggtcctcttact

SEQ ID NO: 63766 - DNA, 1731 bp, Cannabis sativa
acgggtgacacgaatccaagtgatcacctgtctagattcagcaaagtcatgacagtcatgagggtcagcaatgatgccaaatgcctatgtttcccactgacattgggaggatctacagaagaatggttcaaaaagttccaggatctgtagattgttggaataaattgcaaattaattttaaaaaataatttgttgcaacgagaaagataaaccttgagttagtgccttgactaaaattaaccaactgccaatgtaatcttgaagagcttcatcaagaggtttaaataggaggcttccaagactaaaaaagtagatgacgaataacaattagctctactgcaagttggaatccgaacggaaactctgttatagaataaattcaataggaaggtgcagctagccttcaagatttccagaatagagcccaaaagtatattaacttggaagaagcacaaataatgactttcaggggatactatcctaccagatgccctaggtatgttttcagagtgcaattcccaagtatcacgtttcctactgctccccaaacgagtggcatgcctagtgtgtgcaatttcaagcaacacttgagtactcactaaattctatcatggcacctatccattttgattatgggctgccaaaaagtgaccctactcatgcagatgcacacaatatcctcctcaatccgcttcacttgtagtgagtgcaactgcagctcccaaagcttctcagagtaagtggtcatccaaaatgatttttttatatatatttttatggtagtaaaaataatccttgttaatatgtggaaataatacatcatataagatacatgtgttactcctctcattgacaattattatataaaacatcatgcaccttacataaccacaaacttctaaattctaacatgacatcaaagcaattaaaagtttttatctctccctttgacctctattttggatctttcgaccaccatgtgctagttttctagtgctagccctttgacttgttaaaaaaaatccacaaattatttccctaattgaccttatgagattctttcaaatgttacattcggctatatagtctcttaatgatagtttacccatatttttaagcccaacataaagatagtatattaattaaaatatataatctctcattattaatttaatgtgtaaaaagattataccatatataagatgcatgctactctaaattatttgtatcttcatcccaaaattctaacatatgatttaaaaaatttaaaattaaaattttaccaaatgcaccttaattcatcatgttaaaattaattctaactaaaattaatatatatatatgtgaagatttttttaattaaattttttgccatattttaacaaaagacagcaagtgataataatgtaaaacatccaataatattatcatacgatttcgcttatacttttaagatttaaaaattgttgtatatgtttaagatttttgagttcttctgtaaatttgatttactttaatagaatatttttacacaaaaaaatatatatatgattgcggttgtttaatttttctcgctcatatgttgcataacaaaatcacataagaaaaggttattaatatattagggaaatttaaatttgtatgcttaataaataataaaatttgaatcctaatacaatactaaacataatttgtaaagtgggatacattttccctaaatcccaattttac

SEQ ID NO: 63767 - DNA, 2912 bp, Cannabis sativa
ttttttttcatatctcgatcattcaaaactattgttattattgtatctcacttgttgtcttattgtatctcacttattttcatcaccgtatctcacccgttgtcataatcagaaaacagagaaaagtataaaaggaaataaggcagagaaaagatgcagaaagaatgtaaatcttagcacaccacaatcattggttgctggagtatatttatagatttgaatgtatccgtacaaaaaatgacctggacctttttacactaaataacagattaatcattacacaataaataatatcctaacaagaatttgttacactgggaccacagtggtaatacagtgacagcacactaccaccaacggctagagtataatttcatttcttcacagcccatctcaaacttgagggtgattcaacaacttcaagtttgtcaattaagaaatggaatttgtatggagttaaactctttgtcaagcaatctgcagtttggtcacttgaaggaacatatctaacttcaagtttcttgttgatcaccttgtctctcacaaaatggacatctaactctatgtgttttattcgagcatgatacacaggattggcagccagcgcacttgctcccatgttgtcacaccaagtgtcaggagtggaagataaagggaactcaaattctttcaacaaggcttgtatccaagcaatttcagcagctacatgtgcaagagccctgtactctgattctgtactcgaccgagacaccaccgattgctttttagaggaccaagacacaagtgtctctccaagataaacacgatatccagcaatgctccttctatcatctggacaacaggcccagtctgcatcagagtagcctgtgatggcaagtctatctgatggtttgatgtgaagaccatgataagctgttccctttaagtatctaagaactcttttggctgcactccaatggactgtggtgggagattgaaggaactgactcagtttgttaacagcaaacgacaagtcaggtctggtgtgagtcaagtactgcagcccccctatgatgcttctgtattcggatgggtttgctagaggttcaccattagatttggatagaggatttcccactgtcatgggtgtactgcacggtttaagatgcatcataccagttcttgttagaaattctttgacatactttccttggttcaagtagagacccgtctcatctctgtgtacttcaattccaagaaagaagtgaagtggtccgaggtctttgagggcaaagagagtgttcagcttttcaataaaactcttgagtatggtagctttgttgcctgttacaataatgtcgtaaacataaattagaacaatgacaatgataccaggacctttgtagaaaaataaagaagaatctgccttcgagttagtgaatttccagcctaataaagttgttcttagtctctcataccaggctctcggggcctgctttagcccatagagagacttggttaatttacatacagcatcaggttgagtttgatcttcaaagccttggggttgtgacatatagacatcttcctgtaaggtgccattcaagaatgcattgtttatgtctaactgtctgatttcccaattctttgacacagcaatggacagaatgattcttagagttgaagctttgataactgggctgtaagtttccccaaaatcaacaccaggtctttgattgaaaccctttgcaactagccgtgccttgagcctttcgagactgccatctgcatttcttttcttcctgaaaacccatttgttcccgatgatattcatgccagcaaattttggaactagaaaccaggttttatttttcttcaatgctgtcatttcttcacccatagctgagttccaaccagggtgatttaaagcttcttcgactgtagcaggagtgtcatttttccaatgccattgtgcatgtccaaggtagactttgggcttgaatatccctgctttggatctagtaaccatggggtgaaatggttccaaagttgctggtttatgtgggacaatctgatctggtttgtctgcatgagactcacgactgttgttgtgattaagagtagcacctgtgctatttctatgtcatgcacattagtttcatgagaaatgggagatgtggagatatcagatgagtttgttacctgggccgagttttgaccattaagatcaattgtagcagaggcaatttctgagggtgcatctccagggacttgcgaagtggctgtggactttgagtttttgagagtgtgttgtagggactggaacaaggtggaccatgagggaacactcacacacacagactgttccgattgatagttgtttaagaaaccagattcaaaaggaaagacatcttcattaaatattacatttctcgagatatacatcctacccgtggagctaagacacttataacctttgtgggcatcactgtacccaaggttaacatatttcactccaaagattttaaggaagttgtaatctagtttcttgttgtaaacaacctgaaatggtgactgaaatttcaaaattggtgttggtagtctattaattaaatagacagccgtttggaacgaatcccaccaatacttgagaggcatgtgagcttgggcaagaagagtcaagcccatctcaacaatatgtctatgttttctttcggctctaccattttgagcggaagtatgaggacacgaatgtttaaaatcaataccatgctcaatgacacattttgaaaaggcttgaaattcccctccccaatctgtcttgagagctttaattttcctatcaaattggttttcaaccaatgttttgaattaaataaaagctgcaagagcttcatctttggtttttgtaacgtccccgcttcaagcctcca

SEQ ID NO: 63768 - DNA, 687 bp, Cannabis sativa
tgtacacataagtgtcattttagaaccgtcgcaaaaaacacttattgcgtcggttaaagattgacgcatagcttgttatgtcactttaaaactgacgtagaatgttttatttttttttttaatgttttgcgtcggttataaaatgacgaaaatagttttttgtgtcattttagaaacgacgcaaataaattacattttaaaccgacgcaaaatctttgtttgtcacttgaaaaccgacgaaaatacccctttttgtagtagtgagggatactaaattacttataggttgttaagtgcatctgaatgtacagaagacacgtctctaattctatccaaaatggaatagagataaaaaatagtcaagaactttcttcagtttgaataactttctagttcctttcaaaagcagctaagttacttagcttcactggtggaactaaattattatagatggattttttacatcattctagaataattccttcaccctagagtaaccatcatctctaataataagttctgacttagtgtagatataaggtttctaatatacacccctgtcatctaacacaagtcacttttagagattctttcttgattgtctcctaatattccttgtttgattacatcttagatggcccccactcaacattaggagtctattttaatgcatacacaagtatgcat

SEQ ID NO: 63769 - DNA, 1270 bp, Cannabis sativa
ctcttcttgggatataaataaaggttttactcagttagttcagtggttctttaacacctctgttctagcttgtgtatgattcaaaaactctctgtttcatcttcttcctcttctcttacacaaatttaaaattttaatgtatatttttttaataatatgagtaactattttactaattttttttattcagaaatgtaaaaaaaaaaaaataatcatcatacaattttttatttaataaataaagaaaataaagatatatcttcaaacattatagtgaaaaaaaatttaaagaatccttacacaaaattgtggtctaaaaaaaagataatcaataaatctataaaaaaatgactatatatatgatctcaaaattgttgtatcattgttttatattcgagactatgttaattaaaaatcattgtcatcaccgtgttttacttatagttgtcattatatttaagttcattatagtcatcgttgtatctcactccactatttataacggattacatgagttgtatttggattttatttttttgacacaattattaaacgaattgtattcaacatatacttgtaatacatgtgttgacacgacacgaacatgactcatgaacacaaattgccactccttttgatgagatcgaactatcatccaactatttgcatcattatttaagtcggtaaaaaaaatactttaggataaaaaaagagaaatattgttttgaatttttttttttttttttgaaaagtttgagctttaatagaaagagagtacaagcacaaagctcacaaatacaaggtaaaggaccattttagattaactcgctatctaatcctagacccaacttggctaagttgtgagcagttacattatcagtccgctccacatactctattcaaagtctaggactaaagaataatgagtttttgatacagataagtaaatcatcaagtatactaacattccaattacaaaacttaagtttatctactacattactacatttttacaatcagtcataatagtagaaacaagcacctgaaccagttgagaccattgcacaacaagaagatcagcctttgcttcaacaatagcaggagaaacatatccaacaattggcttgataattcatgctacaatttggttcgagtcattatataccacaattctgaagctgtgcttttttcttagggctcatttggtatgttgtattaagtcgtattgtattgtattatattaaattggattatatatcatacttttata

SEQ ID NO: 63770 - DNA, 946 bp, Cannabis sativa
tatgatagttgagctccacatttctcacttcatacctattaaacttcttgagaacatgcttaagctacatcagatttttcatgattatgttcaacccctcttaatgcattggagcacaccagctattcatcacagtatctttaaaattcacattgctggtccatcaattaaagaatctaaaaggctctatctcaagatcccccaattgatgggccttcacaacacaataataatgattcgaacaaacttcccatagaaactcagctgtcaaattaggaaagaggtcaagtcaatcctcattcttgaatacatgatcaattctagagtaaactctatctcctccttcttgattattcttccaagagaactaagaaacagagctttatgggaaatatgattttgttatatataaaaaaaaaaaaaagttattttatgggaaaaataatatgagctggttgattactctaagaaggtaatattaggatttataaaacaattaagaaatatataatcaccgatttaattatattttcaaaagtactttaatataaaaaaccttaaatcatatttctatagagccttttgctaaattaaagaagaagaaaatgaatactagatgagcagaatcactaacttgaagccattgttggagattactaagaaggttataatcttccaaggagacattatttcttttaagtattttctctgatggggaagaagagaatacaagaaacttagtgtttcatagagaccactacctatttaaagactgattttagaattagtttttggtatttataatttggcccctcactaaattacaaactaacttatgatatctacacattatttccatgataatttaatatccttttgatacctatacataacataattggtcacttaattttgtatcacactttataatagcatatacattata

SEQ ID NO: 63771 - DNA, 836 bp, Cannabis sativa
tgatgagattcaataaataaatttagtttattagagcttagaattataggttcatggtccccaaatcgccaccataaaatattgtcaaggggtgggataaatgttgtatatagaagtttagaaaaatctattttgaattagcaaatagtaattatttatttttataataaataatttattttttcaaattaattaaatatggaaaatacaaaatttgtcgagacaaaaattgtcaggacaaaaggcacgttccttgtcttaaatgagacaaaggaggtgccacatgcactgtgttcagacacagtgcatgcgccccatacaatggggtgttcctattggttttgtctttttgagttaattaattcaatagataaatatttaaatttgaaaagtagttaagatattctcttaagtggttgagagatttccttaatcgattattagatttaaatatctgtaatcgaattgagctatattatttatttaattaattaaatatgatttaatgaatttgaatttaaataattaattaaataaaatatttattataattgtttatatataccgtataacaaagttctaaaaaaacttttggaatagaatttcttacataacttttctgaaagcttaaaaaaggattttttgcaaaaaaaattttctctctatcacataagaaattgttcttgttcatgtgttgagatatatataagaacttcatgtacactttatcctagtagtccacattattccctatgtgtcgtagatcgatctagaagacaaccgtgtgagtttccaatcaacctaaaaggatacaacttacgaaaagaatcaaggat

SEQ ID NO: 63772 - DNA, 2134 bp, Cannabis sativa
atgtaattataagtttttatttctgtatgaattgagctgagttggggttggattctagggttgtttttgagttgtttaagctgttttaaattgattttgttggttgtagtcttttttgatgaaggttttagctttcaagctcaaacttggttctttaatggtagattttgcctcagttgtttgatgatgtaaaattttattggattatgttgtgtatggactttttaggtgttccggagcttattagaagtttgggatagatttgtgtgagaaatgaggtttttagaagatttgtaattaaaaatagtataccattttctgagaacggtctaccgtttttagtaggcagtgaccaggaaaaacgacctactgtttttttagggtgttttcctaaagtctcatttctgtattttatcaatatttagggtatgttcatgctatttattgataaggaagattttagttttgagtttaggtcctgaaaagtgattaagcatatcacttaccagattatgtatgttatgacttagggacctttaaattatcctgcagtagtttctactcaagttgaccggtacacctgaattaaaaattgaggtaagattagtataatagtttcatatatttatacatgtttagcatgcatgtaagttattagaatattatatcaaggtatcaatgaggtgtacatagagttgcactaagataccaacatatatatgttacgcaaatcaatagccatcaaattagcatatcagaatattggtaaagtgtacatagaattgcactgagatatcaatagatatatgaaaggctttgttgtacgaacgttctagacttagtgtgcgttggaccgggccatagggttgtgattaggtgtatgggtgcttggatataatctggtttatgtttatgttatgtttatatttttttgctaagtaggtaaaagtaagaatctctaataaattaatgggaaaaaaacatcaaaatagtacaaccgttaaaaatgatatatatctaatttgctaaatggatgaaccgcccaacaataagagagacattgtctttgaataaaactaataataatttaattaaataaataaataagtagggtacaacctaaataagtattactattttattcaattaagaaaaatatcttagaagtcttattcatttatttattttgaatggaataatcttattaagtattagtcttatggatggtgagttcaatagtttaaaatgtatgtatttggtgaaaactacatctacatggagtcatatgcgtacgtaccatctcacactagcttctcttcgtcaaaggtcggtttacttttctctgcccttttcctgtgaaaaataaataaataaaaatgggaccaatattatgagaagaggaatggtatgaccaccaaatttatatagcaaaatcctttgaaaaatttatataaatgtacacatatataaataccaaaagattacatagtaacttcagttctttctagttaatcgagttttattttttagttttttaaacaaaaaaatgtttggtatgtttttataacataccaaatatgtattttgaaattgtcatagctggtactctaaacacaaattttataaatttgaccaaactaatttcagtaatatgccactaattaataatcaaatttaaatatgtaactaatatgattaattaaagacctaattttagtttactatacaaaatactgaatttcttttttttttttttgaatagtactgaatttctattttgataaaatataacagcaataaaaaatcatcaactatttataaagtggcaactcgtatagacatcattaatattttataacaatattattgtataacattatatactaatgaaaaaagcaattgcttcttaattaatccagtttacaaaacaaacaactatatacactattacactattcactttacttgttcttgccccttggcgaccaagaaaaggaaactaatatgtgaatctctttttttaaaaattgacaacaatactaattaatttagttcaaacttataagatgtatacactactacaaaaaacaccttttagaggcggttttaaagccctttaggcgtcggttttcgc

SEQ ID NO: 63773 - DNA, 1220 bp, Cannabis sativa
attgtgcatttagttttttttttaataaataaattattaatagtaatatgaaataagataatatatttataattttacttaaaattatatttttaagtaaccgtttattataatactactcatttttttactatttttgagtaaattattaataataatattacctaattttatatattggacatttttttcctcacaaacatgccataggacctaataacttcaacgaaataatatttatttaataaaaaactacagaaaaatcacatatgcatatatatatatatatatattatttaattaaagaaaataatttcatgataacaaaataaggcaacatagagtataggtagggtaaatttataaccacaacccagacctgtgtaataaatagaaaaattgtatgtacccatatttgttaggtactcattagggtgggcatttcatccaaactaatgtattttaaattaatgtctaatctatctatttaaaattgaatatcgaatttaattcatcaatccaatctaatccgattaattttaaaacttaacagaatattattcaataattatgatgttactatagaaattagtaacatgcaatgtatgtttgtttaaaattatattaaagtgttaacttaattattaattctttttttgaaagaacctcaagttcattagcaaagaaaagagttgggatccagagagagtaatccctccccaattacatgggtaattgtagattgacattttctagcctcaatggcaatgttattgaccagcagagtgtgttctctgttaacaaaaacaaaaaaacacaagattcaaaggtagctgaaatagagagacagtcataaaacaagtgatggactttccaatccggcaaggacgaggaggtgaggctgtggaccgccacttcacagtccgagtaaatggttatcttgttccattttagatccttcgcctaggaaagagccaagtgaatggcagagagttcgaaaggaagggggaagtgcagttgccagaacaggtggaaagcactactacaaaaatggttttttctgacgtttttaaacagtcgttcaaagtattctcgtcgatttctataaccgtcacctatacgaatgtcgtaaaacgggcaaaataggcgacggttgaaaaccatcgctaatgtggacttcctgacggtttaaaattggaagtatgtttcattaacatcct

SEQ ID NO: 63774 - DNA, 1690 bp, Cannabis sativa
cttagcctatttaaactcagcaataacatctcccattgtttttctgctaaaccttctcaaagtctgtttgactcgaacaagcctctgcattatgccaacaagactagcttggttaagggaatttgtccaactcctccacactggttccttgaaaccatggtagtagagccaatggttatagaatctaaacggcttgaaccccacagtctccacatcattactttttattacacaaaaactgtgatctgaaatgaactcccatttaaagcatgcctctattttgggaaatgaaataagccaagtgttattcgtgaacactcgatcaagcttagaaataatcttgtcaccagcctcacgtttattagaccaagaataatgaacccccaaacatttgagctcaaccacttgaccacatgaaagccagttttgagcgtcttcaatttctttagttgaaatttgctttcccccaactcggtcttggaagttaaacatagcattgaaatctttaaaaatgatccaaggatctctaaggtgacaaatattagaaatcttattccagagctcctttctatcgactaacaaattgtagccatagacaagagtagcaaaaaattcttgctgtagaccactattatacctaaaattttgctacacttctgaggatgacacatgtcagatggtggagtataaccacctagtataattgttgttgaaggaatttttacaacaccgaagataaattataataataacaatatagaaaatatatgcgagtactcaacccagaatggcgagtattcaaattagggacacaaaatacttagcaaaaactggaaatacaaagaacacaagagagtatagtggttcaggcagatcacggtcttcttagtccactgttgcaaggatttctgttttgtccttatttcatgatggatcactcctttatatacaaagcaagtgtcctatgatttacacatggattaaattcattatcaatacgttcatacattgaattataataattaaactaaaaaacgtaaacataataaatgaagaacaatttctagcttaatttactaaatacaacaacatatgcgacttctatagtgcgagttggctattcatattcttacataagctcgcaggctttaagatgcattcgagactagccgagtctaggatgtttgcatcctcgtgaagtcacttatatggacatcttataacaagctgatagaaccaagacatgcgagtctatatcggtttatcaaggttattgggtcaacgggaccagctcgtagaatagagaatcgatctctatgtttttgcaggaggatcacggggatactcgcatacaccctggtatatgcgagcttaaaaccgttccttggtcctacattatgggagccatacgaatgcaattagactcggtcatgttcgcatcatctcgctgagtctggttcaggcgaggttcgtactcgaggggtctctcatcgacatctcagctctcctcgaggaaagtgaaaacacatgtctttttaataggagtccgatctcgagtttctaggtgataaaatctcactataacacatgtccctagtttcgcggttgacagatgaggtcatgagggaaactataatcgagaggcaggcgaagagatgtcacgaggtggtgacctttggttgtcccatcg

SEQ ID NO: 63775 - DNA, 1202 bp, Cannabis sativa
aatttgacaagatttttgagaaaacccttttaattagcaaaggtagcaaactaatattagaaaatctctatagcgcgcctaaaaattagagcgctacaatttttttttttttttttatttttactaaacaggtttttatctttaggttgaacaaaaatattactttagttcttaaaaaatctccaccaaacaggtataatgttatattaatacagccaaattataaaataaattaatgtcaaatatgacaaatagtattgttacaagtatttcattaaatttatttaattaattcctcaattgattacaacagtattataaagcgattcacattaggtgagttaaatttgagctattatagtccattctctaaaatataaagaaaaataaataaaactagtcttttatcaatgagttagacttgagctataatatattattcttagctaataaataatatttctctttttttgaaaataagcgtaaagttatattgaataaaattagacttcatggtcattacatagaatgttttccggaacagaattgatcgggatcgatccaaacacttggtgggtaaacgcccacttagcgacattgtgtgccgcataattacatgtcctactaatattagaaaaattacaacatattaaagaaggagaagacttagaacaaaaggagacatagttctcaagggcccaatgggacgccttcccattgagagcgttgattactaatctcgagtcactctccacaattacataattatacttcaaatctaaggcaaccgacaccgccaagcaacaggccgccgcttctccacaaagagcttccgagaaatctaatcgggacgtgtgaatagaaaccacccttccgagatgatttctggccacaacagctgtgcacatactctccaaacccacgcgaacatcacaatttaactttatccagtccagaggtggaggcgtccagctatccttcacaggcggcgaaggactaggcaagagagaagtatgtgcctctgcaaaagaagaacaaatatagtcaatacattttagaacattaggagtacagttattatgtatcacgtcgttgcgcatcctccatatattgtccaccacaatcaaggcataaagaaaaacatcctctactcggatgcctcgcccattaaggctccaaatgaacttcacccaatcccaaac

SEQ ID NO: 63776 - DNA, 739 bp, Cannabis sativa
  modified_base (439)..(448): a, c, t, g, unknown or other
atggttgttgtgattgcttgtatgaactgttgaaggagaacaccttttatgacagttgctttgtccactgtattcttctccatctcatctctttttgtatgtaatctataattttcacctatttttaaatccagaagaaggtacattccacaatatacctagtaaactagaattggaacaaaaattcccaatatctcatcagcaacaattccaaaatactccatgttgatcttgtttatattaattgtacctaagaagcaagaagcctaaagatatattaactttacacagggccagccctgaaaatatatgggcccaagacggattaaattttgggacccttaaaaatatatatataaaaaaaaaaaaagagtgttatgggatttgaaccatgaccttgaacattatgccatccacctcaaccaattaagctatgaannnnnnnnnnttatgttacacttaaattttacttaaataaaagcctaataattttttttattttttttattttgggcccccgaaaagtgtgggacctaggcacaggcctagcccgcctatgcctaggcccggccctgactttacatatataataataatatacaaaacaataagtgttaatataaatatatatatatatatttatataaagataagagtatattatatatatgattgtttgactaacctcagaagatgacgaactgaaaaagagatcttaataaaccttctgcctcaaccc

SEQ ID NO: 63777 - DNA, 1072 bp, Cannabis sativa
aattcaaataaattaacataaataattatttaaatatcaataaataattttcataattgaacactgattatctgctaatttccaaattttaaactaagcggtctttacagctagcctgctccctacatgggtctggtcagctagggaaaggcctgcatggttctccatgcaattccacacatggaatgcatagtttgggctgcgaattgggccctgaaagctcaatagaatagctgaataatatctagattcaagggaattttagtcttttgtaattaattaatttaatatgcaaatatcctaggatttcagatgtaaattagggttttaggctttctatataaaggccttaactctaacctaaaaagtctctaagcctgatactagcctccaagctctaagcctaagtttgataactatcctcttcctcactctctctcacacgcctatactagcactctcatcacttcaaatttgccatgattcctactgtgtatccttaagggtgctatatcagatcccacctatagtgatctaaatagtattaactctcgatattaatacaactaaaaggggagtaggtcattacccgctatgaaagggggtcgaacctctataataaatctttgtgttctttaatttattattctatttgtgtaacatgtagcaagcattagatctatatgatcccgctgtcggttgatcacttttcgaggtcaacacacaacaacccataaatatatatatggaggaggttccaatagttacattaaatatttaactaccatggttatatttttttagccattagattattattgaatagttgtgattaatttgaaaattaaataaaattaaataataattaacttataatctaatagtcacctaataatttatttccttataaaattttaatgagaattaattatattttaaaactaaattaattataattattaattagtttttcttaatttattatttaataagaatcttttagcaactttttttgtccttagattattaaaatttttaaagcaactctttataatttaaaattagatcggaa

SEQ ID NO: 63778 - DNA, 1756 bp, Cannabis sativa
  modified_base (285)..(292): a, c, t, g, unknown or other
agctatgagacctacgcgctagccaactgcgccaccgcccctttcgttggtgtagttataataaatacaaatttatataaaaaaggatatttgtctttggattcctcattaactaatttgtggctaaaatacttaaatttaactattgattctacataaatacctaagtttaatatttgacaataatacttcagttatatttttcaaacttccgtaagtacctagccattacgtgtcaagttattcttcacgtgttattttcttattgatatatttaaattaatnnnnnnnnaaaaaataaaaatttaatgatctaaaccaattaaagattgccacatacttacgaatgtttcagaaatataacttagtattattattgtcaaaaattaaaacttaagtatttatttgcaacaaaaaattaaacttaagtatttacgtcgcaaattactcttaataataatacatcataatcatttaaataataataataataatataacacatattttttttaaaaaaaatccactgaagtagtacatatgtcaaattgtataaataatatgaccgagtcagaacttaggcaataaaatccgtcaaattcaataaattgttgaaacaaatttatattaactccattgttagtttacataggaaaataaaacttgaagaaatagaatgaattaaaattttcagttatttaattttctgaaattttgtttgaaggcaattttaattatagtattcttttattttatttattaaggttaaatttgattgtaatataaataaattttaccttgatggtggtggtttttctttgagggaccaaatggtgaagatacaccgttgtgtttgaaaatcaatagaaggggttaacaatggtgatggataacgtgtttgcatcttctgtttttattgtaattttttattgttgcactttctttctaattgttttttatgttagtgtcaataatggtgatttatttattattctaatatttttgatgaaattttggcttataggtattatataaattaagtttcaatctttctatatatatatatactaaaaaaaaactacgtgtgtgagccacgtatacttagttttaatttaatgcacgtatatttagtcatatatttaattttatgtaagtaatttaataaattatttttattatatattttattcgtttttgtcataacaactctagatcgagttattattaactttattttgacaaaaaaaatcaattcatggtactattttgtatcattttgaaaaaatacaagacccgatttgtcatttaactaaataaatgtccaattaaaaacttttgtaaaataataaattcaaaatggtatttattctaaaaaaaatattagttatagttttaaaaataaaatatttaagtaattattaatttatataaataaaattgtaattatgtgaaataaattttttaaatgcattagctgaaaaattaaaagaatgtgcggcaaatacaaataggtagactctaatgaagaattccccaattacaaggatggatccagccttttattacatagggcagcataatgttaaagcccattgcaccatccatcctttcaaattgacaagaggaaaatgactaatatttttagctaatttttatgacagagctattatttcacatggaattgaaatacaaattataacatggacatccactcaatgaatcatgactattccattattatatatataaaaaaaaaa

SEQ ID NO: 63779 - DNA, 864 bp, Cannabis sativa
ttagtaaaaaaaatttatgttttgtgacactaaagaattgtcactaaaagtagtttttttgtaatgataataatgattctttaagaaacataaatatttttttctattttattgtttaaaaagaaacaataatagaaatatatttgtttggattagtggattgagtaaaaaaaataataatgaaaagatatttttttttaaatatgtgcaaagagtttaattttgaattacaatgttaaaaaaatagtcacatttaatataagataaaagataaaaaaaaatatgtgtaatgagtttaaatttaaattgtaatattttaaagataaaagagatatatgtagggacttaactatgaattgtaattttttttttaaaaaaaatactttttgttttataatcacatttatgtgcaatatatgtatacgtagttatattttaaatttttattttagttatctatattttagttttataattatttttttgttatgttatttattaaacaacatcaattttaaaaaaatatatttaatttaagtactattcattaaaaatatatataataacattcaaaatttatttttaactatagtttaatgataatatttttaatttttgaatacttttatttttttagaaatatcataaactttttatatttttttaaagaaagaataataatataagtatattttaaaaataaaaaatttatattttttaagtaaccgtcatagataacaacaacacagtaaaaaatatatcctatttttgatatgtgcaactgttgcccctgattttgtctaaaatacgtggaccaaccggattgagacacgtagactgaagaggtaagactttgggataatt

SEQ ID NO: 63780 - DNA, 645 bp, Cannabis sativa
taatgtgaaattcctctctatattaataagtaaatctagatgctggtaaaatatttccaatagataattctgtacaaaacaaagttttacaaaaaattaacaaataagcattcccaaaagttgctgcattttaccattcaatgatgactttgtacaccttcgcttctcaaaaatatgagtccattacaccatcagatcatatttttgtacacttttgcttctcaagtatttccagttggaggctccgaaaatattcttgttgcattggagataatgctgagaagtctatcctcataatttcattaacttctttttgtttatccaattcaggcctctcttttgtaagacgaataaattctttcttagcatcttttttatctctcttctctgagatttgaagcaccaaatcaataacatcagaagaggtactctcttgcctctttcgcttctttgtagccttcttccctataagtctctctaaattaacatctatagatggtgatgtatcttcatctaggaactctagcgtatcaccatttgaagttgttgatccccttttagtttttgcattgatactctcaactacatattctttccatttgtgatggtgtcctagagtaatccaacaatgaagaaagttgaatg

SEQ ID NO: 63781 - DNA, 1901 bp, Cannabis sativa
aaaatttgggataacagattccaatgattgtttcccggctagccagagttgcttcgagatcgagaattggagtttgcaagattgacagaggctgaatcaagatccctattctttctctcaattctatgttcttgagccagaagaagagcttcaagggcagtaacatcgagaggttcaactcctgaatttacagagatgacaaaagtgtcgtaatctggagacggcaaaccacaaaaaatagcagcaatgtgttcttttggtgaagttttatgcccaatagaattgagtttatctattagagaacgcacctttagaagatactcattgagagcaggagcacctttcttgagattttgaagttcagtggtgaattgatcgattttcgcctctgtttgtgaagcaaaatatgtggatagatcagaccataatcttgctaagtgacgacccgagtaaggattggttctgtcatagaagacagaagccaagaatacaagagttgatcttgttgatcccagtccatgaacgcaagattgatgttatcagtaattcggtcttgttccaaaagaaattgtggtggaggggtgaaagtctcagagatatattgctggagtttgtgacctctaatggcggaaagaacttgaggtctccataacaggtaattatcgtgatcgagcttggtggctaatttgtgtgaaaatacaacgggagtgaacgatgaatcacctgaacatgttgctctgttctggctggttgcggatgagagagtcggagaagattccatggatgatcaacaaggaagaaggagagtgtttatgcatcaacgaatttcaagaaggagaaaatgagaatcatactggctctgatataccatgttaaacgaaatgaattatcaagaatagtttctcattaatcaaagagggaaatgagtacagcttatatagatacataattcaattgaatagactaaactacccttgacctgtaactaacaaaactaatataactgtcataactgacacaatcgatagacaagggacagaatgtaatgaacagaagacaattgaaaaatagggaacaaaatatctaaattatcctataaccgtaacagagtggagctaatcttctcgtcgatgatatgacagttgactgtgtgagccgcctatgggcacataggtaaggtgtgtgtcaaagtagtgggtatgcgaatcccaatgattattttgctttatgggaaacttgttttgccatttgtacaaaagggacaagctataatgcttttcttgtttccacgctaactggtggggaccacgcttggtggtaatctttttggaaatataagctccaagaggttatctgttcaacagtgagcttagctgttactgctttgtgtttcgctaagatggtcatttccctatcggatcaggacttttgtcctgttcccaagtgaaactatttagatttgtgagagctaggcatcacttatagtgagaataaagttcaaatatttattgcatgcataactattttttcttatacgtgtggaaattaattgtttcaaacttatttttaccactataaactattcataattttttaaaatatttacaggtgatcgtaataattaaagcatacatgattataaaaaaaaaattggatgtcgaaacagatatctcttttagtatttgtaatcatagatttcctatatttgtatagaaaaaagtaaaaaaaaaaaatctttgaaaaactaaattttatgtggcatttgattgagaggaaggaaaacataggaaagagaatgagaataggaatataatgaactcaaataaaattactaatatatgattgtaaaaaccattacgctatacttagtggtgagggaggaatgggaaaaagggagaggt

SEQ ID NO: 63782 - DNA, 893 bp, Cannabis sativa
aactacatgacacttaattataattttttagataattagcgacataagtattcaaaatttaaagtttgtgaagcttatgcagctaacgaggtattaagcttttgttccatgtacttctgggaagttaaagttcggttaaaccgaccagatcaaaatatgatgtccttccaaataagcttgaaaagaaattctctatattcaagcatgttgggcgtcccattggtaagaggaccatcatttctttaccaatgcaagaaaaacttaaggtagagtagtacattttgaacaattgtaataaagtggagaagtatatcatgttagacactttttgcattcttattttagttttcttactcataaccttcttttacaaaaatctatttatgtgaagtgagcattggaacgagctacaatttaggggtgatcaaaatcttgacataattcaagagaaagagtttcccaattggttcaagtctcgagtaagtattgctttctactaattttgtcatttaaacacaatttcttgtactagtattgattacatttttactcaataatagatcatcaatcaacttcgagcggataaccccgggaagtatcagatgagttgtacgccataacaaatccctctaatccagcatgctattgttttcctaggtgtattgttaacggtgttaaattcttagttgaggatcaggatgacaatcgacacccaaaacagtgatcttttggtgtctggagaaggtggtaaaaatttttatggcgtactcaaacaagtgtatgagttcacttacttgaaggattgtagtgttattatttctaggtgcaagtggtgagaaacaaacggtaacaagacaaaaagtgatgatttttttctctagtgtctgtgttgc

SEQ ID NO: 63783 - DNA, 715 bp, Cannabis sativa
taatttcagttagtggtgagctactttttgtattgtgtgtgagtgtttgtttcagttatgcattttgtaatagagaaatctctactgcatcaggagagagctgccttagctctctgccgagtgtgggggattatctcattttgcctttaattcaataatagctcacctattgattcaatccgactgtgttttctggtttacaattgtattgttgctgctggtttattgttgtgttgctgctggtttattgttgtgttgctgctggttgttgagaattgtattgcaggtgctcatcaattggtatcagagcgggcgattccggtgaatgttgtcgacaagaatggagaaaaaggttgaaggaatagaaaagggtctcgatagtgtgaagaatgatattcacactattaaatcgatcctcggcgagttcaaggaaacccacgaacggacggtttcaggattggcggagcaaatccgtttgtgtttgaatggccaagcaaggatggccgacgagatgtgctctcagcgtgaaagtcaggggccgatgatgagttcgggacgaaggtctgtcaatgaacgaccaccttcttcagcagtgatgggtttgaacggacgggaaggtgatttgggaagacgatcggagttccgggccaaaaaaatcgagctccctgtgtacttcggtgatgaccccaatgaatggacatatagagctgatcgt

SEQ ID NO: 63784 - DNA, 700 bp, Cannabis sativa
ggttagaactcaactgcaaagattttaaggaattcttggaggaacttgatatatttccaagaagatcatgtaatgttccactaagattgttatcatgtaaattcaagaattctaagttaatagtagaatttagtaaccaagtaattgttgcgggatgtataaaactttgagagatatcaagattttgaagagaagtgaaggaatagtttgaatgagaaatagatgacgatgaagtatgattaggtaccttgagaagtcgacaatttgataagctgagagatattagagaagtaagttgggagagccatcgagggttatcaatagtcatttgagaagtcccttttgaaagatcaagatattccaatttagtgagatttccaagctgtggaggaataattccacttattggattttcactaagatcgagacgtgtaagctcttttaaagagccaataaactttggaatccgactaatgttcatgccaatgagctgcaatgtcttcaaatgatgcagttcggccaacgaagagtcaatctcgccaccaagtgtgtaaattccaccaccataaagggtaacaacaattacatgattggtttggccgtcacaagtgatgtagttccatttgcaacaattttgattggtgctattattggaccatgtggagagatcaccttcagaatcatttaaagtggtcttaaa

SEQ ID NO: 63785 - DNA, 923 bp, Cannabis sativa
accatctttcgtgtctgggtagctattaaattaactggaacatgacagattttgtataaccggaacatagtacagataacaaaaaaattaataacaaatttacaagaatacaacatagaaaagagtgtattttctataaataaaatcgtaaaaaattttaaaattctgtataaccgtgtttttataatttttttttattattttagtgtatttgtgaaataatctcaataaatattgtgtcacggccacttacaaatataaaattttatacttatatcgctatttaccgttatatttctttttagaattttaacaatattactattattttctcctttaatattctttacactttaggtagtggttttttctctttttcaaattttcaaaaacttataagtaattttcctttaatttacaaaattgtaatattattgttttacatattttgtgcttaacacttcccttcaaattttaaattgtattacactaaatattaacctatcatatatataaaaaaataatgcgccttaatgactaacagcaaattaacaaataaaaaagataaaataaaatttaagaaaggaattagtgttatgatgacttttgaatgggtattttttgtttttttatttaaaaagataaaataaaattgaagaaaggaattagtgttatatttgaatccatgtgtagggtttttttctttttctttatgaattggtgatttatacatagttgaagttgagaactaatatccaagttaatatataaattaaataatgaaattagttacatagctagctagtgacagttatttaaaatgaaaaacaaatgcatttaagtaaaataatgatatcatataggcatagctagtcgaattagacatatcatattaccacatcacatgggaagagttgtacttt

SEQ ID NO: 63786 - DNA, 913 bp, Cannabis sativa
agtgaaagattcacttcactgcaaaaactctcaaccatggaagatgaagagattgttcaactcttcaaatctatggagtcatttttcaagcaaactttgaattctcaatttgagaaaattagttctatgcttgagcaacattttacaactattaacaatcaatttgatcaattatatgtggcggtacaatctactctggaatcaactcctgcaaatatggaggaattcgtggatgttgaagaactcattgaaggccatgtggtaccttcagcggtggattcaatggatgattcttcagtcgatcctatcggtatcatccgagatggctgcgatgtgctgccaaggttgaatcgcagttcgtcggaagtagaggaaaagctctcggctcgaatggagattggggatctgagaatctcgccacctcttaagcgagcaatgagatcatcttgcgtgtacatagaagaaggtgatgctagtggagtgtttgtggatcgtaaagtggtgctacgagagatcgttttcagtgttgatgctggcacaccatggaaatggttccacctgcggctgcgagaacggaggaggatatttgatcggggacgacggtggatacttgatcgggaacgaaaatggatctttggcgatgatggacgggacgaagtggtcaccggaggacgatcagaagcttggtcgcgtcggatcgcagaattacattggagaggtggagttgaggatgatcccttgcttggtattcactagtttgcagaagaaatatatatatgtagatgtccttactgtctattttctgcaaaatatacatattatgtggttcaaataatgagtatgttgaagatgaagcttcaaatcagggaggtcacgaactcactgcttcccaaagaaaaaaaaaaaaaaaaaa

SEQ ID NO: 63787 - DNA, 626 bp, Cannabis sativa
  modified_base (567)..(575): a, c, t, g, unknown or other
tcacacaatgtacaatgcacaacacataatgctatataccaaaaaatatagcacacaatgcactaataaatttttatggagtctattcatctgaaattacataatgatcaacattctatctgtaattgacgcatttcaaaatgaaaggtggagctcgaatgcaatattcaacgagcaagagctcagatatcctccctggaatagtcttttgaaattcgaactagttcccaaagagcacttccactaatcatgtcctttggatttacttctttaatttaaaaaaccatatttaagaaactatgctacgagaaaataaaataacatggtgttaacgccaagcaacatttattttttaatttttaccaataacctaaatattttcaaaaaaaaaagtgagctacgttcaaatttttaagagtaataacctaaatgttgctataaaaaagtgaactacattttatatatatatagatattgttgacggtgagaactttgtcaaccaatgagcagtcgaaaaaccaacttatgcttcatttttactgttttagtgattgtttatgtactaannnnnnnnncccagactttgatatctaccaatctaacaatctcaatagttcagggggaat

SEQ ID NO: 63788 - DNA, 1190 bp, Cannabis sativa
cagacttaactaacttaagcacagtaaaaacaatgtaacagtaactaatcattttcacttctaacatcccccctcaagtgacactggtcattgccgagtgttaacttgttacaaaagaactggaaaggcattgttggtaaagcctttgtaaacaggtctgcaatttgattctctgtctccacatatcgtatgtctagttgctttgccacaactctgtctcgaacaaaatgcatatcaacctcaatgtgttttgttcgagcatgaaacacagggttagaggctaaggaggctgctccaagattgtcacaccagagaattggagattgaggagttggaatactgatttccgagagcacagattgaatccacataatttctgaggtagccaaagcaatggctctatactcagattctgtacttgatcttgccactacagtttgcttctttgaacaccaattaattaagttgcccccaagaaagatgcagtagccagatgtagatcttctatcatcaaagcaccctgcccaatctgcatcagaataggcagtaatgtccaatctgtgagctggtttaaagactaaacccgagttgatggagccagccaagtacctgagaactcttttgcaggctccccaatgttcagatgtgggagcttgcatatattggctgagtttgttgacacaaaaagagatgtcaggtcttgacattgtgagatattgaagagcacctatgatgcttcgatagtgagtgggattgtccaacaaagtccctgtttttgcagataatttggtagtggaacacattggtgtggattgtggtttggagtcaaggagttgagttcgagccaataaatcactggtatacttctgttgtgtcaaataaattgctgaagtagtgcgatgaacttcaaatcctaagaagtaggtgactgagccgagagctttgagagagaaactgtgatgtaattgagaaataagattgtgaatagcattgttatcagcaccagtaatgagaatatcatcaacatatattaaaataaggaccaggttgccattgtgattggaaaagaaaagactgttatccgatttgctgctcttgtatccccactgaaccaatgtgtttttcagagtgtcaaaccatgctcttggagcttgtttgagaccatagatggccttgtgaagcttgcacac

SEQ ID NO: 63789 - DNA, 939 bp, Cannabis sativa
tcgtataaatctaatgtttaccacgcgttacataataagaacaataaagtaaataagttaaggatttttatagaggtttggcccccttagttagcgggtaatgacctactctccttttggttgtcttagtaccagataatactattcagatcactataggtgagatttgatatagtagtctataaggttacaaaacgtgaatcaagtatgcagatcactaatgagatagaggtatagccttagaggcatgtgggtgagaggatgagagagccccttaggcgtgtacaagagagtgagagagatagagagagagagagtgaaataagagagattagggtttagacttatagcaatttgacttagattttctaggttagagttaaggactttatataggaacgcctaaaccctaattaacaactgaagtcttagatatttatatattaaattgattacatataaaagactaaattccccctttaaagtagatattttccataagtttgttgggctgttaagagcccatttcgtaagtaaattgcagtccacgtatcaggctgtatagagaatcctgccacgccaatcctggtcccacatacattgtaggatatggtctggccgaccatacaaggtctgtaggttgaggtcatgtgcctgccaggatcctgcaggtactgtcagctttagtaagaggaggctagcttttggatgtgaaggcccgcctttggcaagtggaggacaactttgacactgtttccttgtagaggtcaggttctcttggtgaaatggaagctcccattgtttggaagtcacctttcggttggccagcttgtgcccagatcttggccagccatacaagctcactctggccagcctataggcttctcatggttggcctgacatgttggtatagccccttgatggtcgcttaactcgttt

SEQ ID NO: 63790 - DNA, 1316 bp, Cannabis sativa
taatagaattttattgttattttgttggtcaattttttggagggcctactgttctggggatttagccgataagttttttaaatataagttatttgagacttgtcatcttttttacgattgagcttttctgttattagttcttgatatcatcgttagggattaatccaattttattaatcttattttattttgtacatattttgtggagcattttgatatgttaatgagttggcgtgtagtttttaatgttacaagttgaagctcaagctattttgggttgttgttcgaggacgttatagctatattatttaaatttttggggagtagttttgtctcatattgctcgcttactttagcaattcatggtttgacaaagcatgccctttggttagacaacgagttatcctagttcgaggaggttcctgcatagtttgcggatatctgcatcgtaaattcatgagtgattctaatcaatacgtcaaaaaaataccataaaaaatcttaaatgtaaaaaaataccataggagattggcaaatttaaagtatcacatttttgtaacttttttatcaaatcccatatttcatgtaattgtcacttttcagtgcactatttatcaatatttcctaatttttattgtatttacgaaaagattatggtagttttttttgttagctgaagaatagtaaaaaattataatacacctttcaaaaggattattttagaacattctccatatgtttcagtgttcaagataattttttaatctatttttttttttaacgatcatgtactttgctattttttaagacttcctataaatattcaaaaaactttaaataatttactatgtcaaaaataaagttcaaagagtagcttagtacccatacaagaaaatatagtcatatacgtgcaacaaattatttgaaccttatttttgacaatgtaaactttttattttttttaaaaaaaaaattagagattcttttaaataactacaatatacactatcataaaaagaatagactaagaaactctacgctatgtccaaatagataggaagtgtaacaaaacggccattttaggaggtgtactacagaattaccctataggttatttaaaaaaaataaatctaagaaaaaaaaaagaacccactgagaataaaggataatgggtaattctattgatactccctaaatcagttatttttgtaatactttatctgttttgagattcgagttttttaggatatttttttttgttttgacttttgtttttgtttcactttttgtgtttttgtttttattttattattttt

SEQ ID NO: 63791 - DNA, 1451 bp, Cannabis sativa
ttgtttatgcaattttgtgctaattatcatcttcttaatgcttgatcactattaattaatatagagattttaggttttacacttgagggaggtaatttaaaatgggactaagaattgcataacatagtaaaagtgtgagattgagatattccactaattctataagtttcatttaaagagaatcatattgctttatgagtgcttatttgattaacattgaatagagatatcgtgttagttaatttaagttgaatctatcatcgtttgagaggggttaataagttatattagaattgttgaaactacaaattataagataaatttagataattagtaaatttagattcatagtttaaaatagggaaatcaatgctttaggtttttactttctgattaaaatttgttgtttgtctatttattttttttatttatttatttcttaattataatttaattttgtgttatctaactaagtataaaattaaaaagtataataattagtaaaatttaataatcatgtggcttcataacttttctaagtattaaaactttactaacaaccctgtacaagtttttggagctgcggatttaacattaacacatgccttgctggatcaaaaaaaaaataaactcttgaaggtctctcctggtagagagtgtttttgtccctcttgttagagtgtgattttttgttttcttgtactgtctggggcgtgtaagttttatcagaaagtgtctttgttctttttattctttttgtccttatggcttcatctagtacagaggatcccttaatgtcaatgagatgggctgatatatgtctagaagatgaggaggaacatgaagtttcacttgctgaagataatgaagatgagaaagagctgcaatttgatgatagatggtgtctagtgggtcgccttctgtccggaaaagtgtctgactttcagatctttcaaaacatcattgttgatttatggaagcctggtagaggtatttttattaagattcttgatcaaaacagatttctttttcaattctatcatgagatagatattcaaagggtgattgatggtagtccgtggacgtatgatcgcaaacaacttcttattgaaaggctcaaaccgggacagaatccaagggtggttgctataaacacattggacatgtgggtacaagttcatgagttacggtcaggttttaaaacagattgggctattcgagaagtggctcgatatattggacagtacgtcgatactgatccgaataatattcaaggcgtatggcgggattatctcagagttcgggtaaggattaatgttgatgaaccacttaagagaagaatgaagttccgaagccggggtggtgagtcgttttatgcgtattttaagtatgaaagagtcccaaccttctgttttatctgtggtataatgggacatgctgagaagttttgt

SEQ ID NO: 63792 - DNA, 519 bp, Cannabis sativa
tatataatttttttgtgataaaaatatatttttttcccgttagttttgatgtattatataaagaaagtactgaaagtagtatcgagaagaaagatatttctaattataggaacattagaatgttggatcatgagagtactttactgaaaattaagacgagaaaatatatctgtttactaattaatatacgtatgtatataatatgttatgtcagatatttattaagtttataaatacacatgttataaaaatagaaaaaaaaaagtcccgtatcaatatttttctataagtagttatgatgaatgattgtgaaagtgttaattatgagattttattagtgttatgatgcatctagaaatttattaaaagtacttaaatactgagttaaaaaatgatgaaatagttcctgcaaaaaataaaagaataaatttactaaattaaaatttgggttgagttgtggattaggtcactctttttaagacgttcacatcactgcttagaattgtgcaagcagactat

SEQ ID NO: 63793 - DNA, 1186 bp, Cannabis sativa
ttctgcttctgcaaacgcttacagttttataatttcttatatataactgacattttgcaaaaacacggtttttcactttgttttagctaaaatgtttaaatagagagtcatttttattgtagttgcaccaataaataaatgaaaagcttaaattaagagaaatgctaactaacgaacacctttagagcatctccaatggcacttgcccattagagtggttttggtacatatgcaatgtggtctaattttcaaaattaattttatgtgaagtggtgcttaatatagacaatgggcgagcatttttttttaaaatttttttattagaaaaaaattattttttacctaaaaagttattaattcaatgttatgtgggaccatagagagcaacttgtatagttgtcgaccattggattggagtatttttttaagagaagatgacaaattttatgtggatgagaaaaaaataataaaaaaaatattttaagaggatgtgtgtattttggaaactataggtgttgctccattgaaaatgctcttagagcatttccaatagtaaaaatttagaggatgcttgatgaagtggacatattacatggcaaaatagtaaaatattataccattggagagagatgggtgtcattctaaaatttgcatgatgctatacaataggatgctatttatttatttttttaataaaaaattaaagctaaaaagttattgttgctaaaattaggatatatatagtaaataatagagtaatttgtggcataaatacttaagtttaattttcagttacaaataaatataaatttaatttttgtcgttaataatacaactaaccaattacaacgcgtcacatcagtatagtattgaacaccatgtaatgcctaactaggagtgagtatcggtcggtttggtcaatttttttctataaaaaaaattaagaattcggttttcggtctggattggtgcaatcagaatactgttcgaccaatccacaatctatcttaaaaccgactgttttgaaccccggtttggtcgatttaaaccgcccaaactcattttttttaaatataattcaatttattctataagcacattattatacattctataactataactatacaaattattcgtttaaaaactaattatcttattttttttaattttaatattaataaaa

SEQ ID NO: 63794 - DNA, 1684 bp, Cannabis sativa
atgaaatttataaaaaaaaatacagtaaaaaagtaaaaagtaccgcctgatagtatttttgtaaaaaaatgacaaaaggtagtataccatgtaaatttccctttaaataatgtaaattataacatttctaaaaaaaaagcacattgattcttttacaagaaaatagttgtgttaaaatttaaaaaatagtggtaaaaatctagcagatagctaaattgaatttctttctagagaaacttttggaccgagatagaggcctaggcatcgacccagctcgggctgggcctatgtttgttgcatttttgtcctagtattgttataaaccttctaatttactatcatgttttatgagattactttataattagcaactgggaaaatcaaatcaatttaccaggtagttaatacatatattagtctattatgataagttaaatctaaataaatgtattttaaataaaaacatgaagagaaatgaaatcatcgacccctttcaagacaatgtcacaatggagacatccaattccggttggatagcggcatcatcttcacgcacttggcctcacttcccctttcacaatgctttgagaagaaaagagaatttcatggaccacactccataattttttccacccaattatctctataatccagtttaagtattactttttccacaaacctccattctaccttatcatatgcgttttttttttatgaatcagctaagctcttcattactccaaaaaccaactttttacaaactaatagcatctacattgtgggagacctaatgtgacaactatacaagtgtatacattataatgagtaaaatcaatcaaaatcaattacagagcttactgcattcttagctttccaaaaatgatacactaaactagccattacagcagccaacaccttcttcttgaacttactgcatttagctctctcaatccatctaatcaaactggttatcaaagtagtttgcaccttccattggagccattccttcactttcagatagtataagtgagaaaataagcacccaaaaaacagatgctcatttgtttctttctacatattgcagaataaacaactagcatcatcaattattccaaatctatgtagcttatcttctgttatcaatatcccctgcattattatccacagtacaaagttgggctttggagtatttagtctgccctaaattcatgacaccagtttactctgtttagagaagaacataacagtttacaaagcctatcatatgtttttgccatatcaagtttcaaggctaatctcaatccattcccaaacttgtttttacgcatacagtgatgcccttaaaatccaataatagtatcgtcatggataaggcacccatggacgaacgtgctttaagaatcagaaatggtatccccaaaagatcttcgtatctgtcagcaacgcatttagagatgactttggatataacattacaaagaatgattgggaaaaaattctctttcttattaggtttatcaatttcaggtataagggtgaacattacaagtgtatggtttagaaatggacatactcgccctaggcataggcgggctaggcccgtgcctagggcccacacttttcgggggcccaaaataaaaaaattaaaaaaaattattaggcttttatttaagtaaaattaagt

SEQ ID NO: 63795 - DNA, 12470 bp, Cannabis sativa
  modified_base (562)..(571): a, c, t, g, unknown or other
acagggtccaatctataacttttgcaaaacacagtgtctaaaatggtatttacccttaaaattcctaatgcacatgataaaaatatgacctataaaagtgaatataaattaaagagtagtataaattaaaatagaaaataaaaaataagtagtgcaatttcctcaatcttcactcctttctctcagcaaggctcaactataggcctgcaggtgggttcaaactaggatctcaccagtcacaaatatggacttgtaaaacttgaaaagtatgacatttgaatatggacctagttagacgtggcaataattttccagcagcacaaaaatgtcgatcgcgtcgaactaacctccgtttcctactttaacccgaattagttatacagtaggacctctatccaagaatacacttgggactaagaaaattatattctaattgagaggttataattatatagaggtacactcggaaaaaaaaattaaaacaccaataaatatcaatgtaacaataataacattaaacaatctttaatactatataataatagaattatttttgagtaannnnnnnnnntatacatgtattacaatttagaataaaattattaattctacgtgaataattttaaaaaatatatgtatattttttattaatatgtaattattcttatatagaagtatactttgttaatacgagacttaaaaaatcaagtctaaattgggacttagattttttaataacaaattagaggttattcttgaatagaatattcttagatagaggttctactgtaatttcaaacaacggattactaatttttgtagctgcaattatttttctcaatattaataaaataatatatatatagtaaattctatgataattatcatatttcttatgaatttttactacctaattagttacggatggctgaaattgtctttataataggaaacaaaataataaccccacataaggaagtgcgtaatcaccaatcgaatcaatatcaatatattatatattcccaaaaaaaagtacattttctgctctgcgtattaatttcgaaatgtgtatgcttctttcgatgggaatagcaaaatccaatagttcaaaaagctacattaacaacatgcatatatgttcgttaaaaaaaacaaaaaaaacatgcatgtatatatgctaaagagagacaactatgtctaccatccattgatttgcttccatttgtttcgatgatgatcaaataagatttgaatcttcaacattcccactcatgatgctcaaatttgaacaatatattaactgaagacaaaataaaggttaattgcaaggcataatcaatgccattttgagaaattcttacgtgaaatagatcgtcccaattatgttcaatattctctcaatgtacccctattttgatctatcaagctgtatatttacttacttctacatgaagtgaaccacaaaccccaaattactagcccgaaccatacttaattggtagcattaagcatggctgaacaaaccagaacataatcggttatcatacatcggaagataaatgcaatacttccctctctttcctttagctaggttagaagttaaatcgacaatcaaagaaaccgtttgcatgatatatttaaaaactaaaagataaaaagaaaaacaaataaacaagtccataagaaagagactggcatttaacaaaacttttcaataagcctataattgactttgcaaaggaacagaaaatttcaaatatcagcaaggcatttgcaactgttagttctaatggacttgcttcctcgcacaaactaaatatataaccctaccccattcatccttccatttatcctttctcccacatgtgttccaatagtactatcagtcaaaatgccaagaaataactgagtgataaaaaagattggtagaaaaaatatatattgggtgaacgaatgcccgtaccagcattaacaaagctctgctttcagaattcatgtatggttgaaccagggtccaactgcaccatgcccgttgctatggatcccaacaccattcggaatgaggttaggtggcaatccaacagcaacttggggaggtgttgcagggtatagattgtgtgggagagagtggggattcacatgagcacttccgccaggactgccattgcgctgttgaagggtgcggatctgccttagcccctcttcatgaatgcgtgatagagtctccaactccttcatcgatagagcctctagtccagcaccatacagcggagcatggcgagacatttcctcttgcagagaagcctcaagtgtgtgaatgtattgctgcagaaaaaatgaaggcatcaataaagtaccatttaaagagcaaggagaataagaaacatcacgagtgcaagttagaagatgatcgtgaaacaagtatggcagcggtctaaagcaacaatttatgaaagttcaacatgaggacctaataaatcaggtagagaacaaataattagaccaattaaaagaagagcagggacctggcaagcctgcaattttgattccatcccatcaatatatgcttcacaacgagcaacctgctcttccttctcccgcttttctccttcagtctgtccaactgtctgtgtcaatcgtcgaacttcatcctcaagagattttcgtatttcctctcgggttacattctctgttgcatatcgtttcagctcttcatcaaatctttttcgtgcagcttccgcacccttcaacctttcagcaagagcatttttctcctttaccactttctgtgacatttaacatgtctggttagaaaaacgcatgcaatgttacaaaatcaagacataaaacattaacttttagtaggggtctaacacattaatgaaatgtcatgtttttgttgtatgcatacaaggaggaagatcatataaattaacagattagaacattgcaagagaacatatacatcaagaaattcaatactagaatggtgacaatacacagataccactgagattattttgactttatgttgaaatacactacctttggtaacaaacatccttaaagctaagtgatctctcttaaccaaaagatatctaaatcaataagagcatcattactcaataatccattacaacgttttggtgcatattttgtgtgcatgttattattcaataaataattgcacatatgacataggtaagttgttcagtgacaattaatattagtgtgagacactttctgactctaacaaattgttgcaaaatcaaggagtttctctagagaagtttccatatcaaatagataaatggaaaaccaagaatctgaagaacccaacgcattagaatcatatcccaccaaattaatggcacattacactccttagaaacatgcaaatgcactacattatcattatctatccacagaaagatggccaaccagcaaaaacctccaaaaccgaatcctttttgggggagtgatcagactattatgcaaatttcagtgtactgatatgactacttagccatgatacctttttaatggcaaaacaaatgactatttagcaacaactactgtagatacagctataaattaaaaaataaaagcatcaagctgggtgccgaggataaaaagtaatcaagacctttaattcatcccgtttccgagacttcaactgggagagttgtaagtctgcatcatgaaggtgatcttggagcactttcttttcggcagtcagctttataagttcatcatctcgctctgaacgaaaccattcaagctgactctctacttcttgtatttgttcagaaaactccttcctttcccgggcaaagcggtccacttcagccttcatttcacactgcaataaaatttataggtgtgaattctccaagaagaattaacaatacatgatagttctagccctaccaacattaagtaccttgagacgattgttactggcctcagattcactcagcttttgggatacaatagatttctcttttactagattagcaatttcagcttttttttcttcctgtatgcgaacgatttcatcttcactggcacataattggtgccaaagagcagctcgatcaacatttgcaagttctgcaacctcccgcatcatgatcaaaactggtctgataatatcttgctcctcacaagccaaagtatttaaaatatccaaatctaaatctacttcacgggtattgtctgcagcactggtggcacgatcgaccagtctctttagtatcctccctcggtaagactcatcagcataccacttaaacagcattgtgtatagcatctttacaaatcctttcacagaagcatcactagagagagccaaagtctcagcaagcccgaggactgaagtaaaatcatcttgttggactgttagctgctcatcagcttctccctccccaacatcttctgcatgctgaagattttcagaaagaaatctggcattaagattcaacctctcagaaaggcgtctttccaaaaccatggctacagtatgagccacaattgcacctcgagatacagctctttcaaaagtttgagacgcttcaacagccaaacaagggatggataacatctcaatcaaaatatagatatcagaaaaataactactagcacaaaaagcttgctcatccaccagatgcaacctctcagaagtgggcacatcatgctcaccaaataaggaaagcccacattgccttgttaaagaactgtccccaaaatcatcatcagcatcaatgtctctgagtatggtttcagcaacatcgccccaactatttacagttttactcaaaaactcaaggacacaaggagaaacatctacacccaaactttttagcttaacacgaattgatctcacctacaaccaagatcaaagaatgtcaactaaaatgaatgatactataaaatataattcataacatgagaagcaaatacaataaaatttcaagatgttctatacatactgcttcaggaagatgttggcactgtgatgcagctttgaatatgaaatctatggttgcagcaagaggttcaccatttgaatcagccagcagttcaaaagacttaagtaaaacttgctcccaaacttcactatcgcattccagttgacttagagcaccaaaaacctggcgagcaagattgacatagtttaaggaataatatagtctaaattcaaagtcacacatacagcacaaacaaagagacacagatcaaagcagtttctccgcaatgtattcaaaagcacatccaaacaaagagaattagcatgtaaatacaaatatgtaatcaactactacatgactattagagagcttacaggcatccgtaaggaaggctctgcatccggcttctgaagccgttccagaagagcaaaagcagcaagtggatgttccgaatgctcaaccaacttaggaacaagagcaactaaatcagtctgcaaatgcttaggagctctatctaacacaagagaaatttttgaagcagactgaggccttcgtcgtggttcaggacatccttgtggaacagctccatccaaagctcttagtgaattaacaatcaaccctaagagctcctcagattgctctggccacttggtctggaaaatcaattggttcaagcatcagtatacagcatacaccaattaaacaggtttcattaaataaaacaaatacactttacctttgcccgaagagacacattttcagaaactgcagcagatgtttcgggtggagaaataggctgtccgggaagagctttcccaagtacatgaatctcattcacatcagaactttgtacagcagaagcactgcttgtttcatcaacaccagactctaatctctcatggataggatattgggcagattctgtgccaccattttctctgtcggattcaagaggactagaagccccacttccatctggagaatttttcaagtttgcatcagaagaatcagcgctagaacttccttctgtaggttgacaacactcgaccattatatccaaaagtaaatcaataattgcctgctgcagcactttgactcccattagtaaattcatcaaactcggcgaagattcatcagtcttcgtaagcttctttccatcattactagtagagagcttagttggaagaagcaaccgtttcactttggcagggtcatcaagatacacgcgaagtccagtcagaaaaccagcaattgcaccagcatccattaatagcttttctcgtaaagtgacctgtggctgggaagaattctctccatatgtaagatggaaaccagctctagagagcaagtttctaaaaatatcttcttcatcaccacttattccttcactgtcttcggagtcgacaagttcatcgggatcagttgtcaaagcatcttgatcatcctctgaagccaacacctgataagagacagcacaagaacatgagcaaatactacataggatccaaattttggaccgaaagataaaaactttagacaattccctttaaaattaatcttagtacatgtcactaatattatgtcctttgttaagaatctcatagctttagaatagaaaatagacgaaaacaacaacacatgccagagaaaggaagtgaatgcatggcttaacataattaaaacaataataaatacaaatagacaaaggtgttaggtgttacaattaattatcaacatcatactttatagggttaatactcaaaatgattcagccttcagtataggaaacaggctaaaatttaccatgatcagaacataaataaaaaataaaattgcataaaatccatctaagctatagtcacaaaaacattatgaaaatttaccaataaagaaaaatataaatcaataacacagtacattcaagaacaaggctcaggtactgacctctaggtcagaaaactcaaaccaagggcaacagtccaagatttcacaaacaaaaaccactgtgtcacgcacaagaaaccctgcatccgcttccaacatatctgagaccttcatgaactgcaacacagaattattccatgtcttcgtacatatagaagactctttccacacagttttggtcgggttcttctggtttacaactgccatcctgtatctgacccagaagtttttatccggatcactaccaactgactgatcactttccaaatagatacatatggtgtcaaaggactcatatacacctgtacaaatgaaggaaagaagcaagtcagcgtaaacaatgtgaaaacaacaaccaccttccaaaagaagaaaaaagaaaagaatgttagcctaccaattcgaagctcacagccaccagcttgaaaaaatttactaaagatttttcgagtctccattatttccttgaaagccaggaagttttccaccttccatgtaaatgagctcttcttcccaggtccatcaacttgggaacttccatttactgaatcacaatcatgatcagtaaaatcctgcattactgaagtctcttttaatataaggacctcagcagagaaaacaacagtgtcttggacaaggaacccagaatcttgatcgaagagacttgtaagtgtcacaaactcacgccaaccccaatccttcgcagctttggaatagcgattctgagactctttagtgacagatttatcttccatcctctggttcacaactgctaaacgatggctcacaaaacaactccaatcactggaagtattccgtgaatctgtaacctcaagaaacactgaaaggtggcatggtggttgagactgccctgataccagcaaacatacaaaaactttcatcaaaacactatctgaagaccacttaagcaattggagtatacctatttatgattaaatgaggaaaagtcaccttgggcaaacaaagaatttcaacataaacacactatgttctgttcaaattgagcaagtttcaatcaagcataccaattattaatgatgacaaataataacccggtttacaataccttgatatcatcaatcatatacgagatcttttaaatcagaccatgacgggcaggccactagaatttagctaaaaaaagttcaagtgaaacgataacagaagaagctgagttaacaccgcaattccataacaacaacatagacagtacaagtcctcaattatctgtataagaatgacaatcgcagagcttcaaaagcatgtgaaggatacaactaagaaagctagcgtggtcaatagctaaacatataagacgagacaaacattatagaaaatttccagagcaataatcaagcatacctcgaggataaacaataagacgacaatctcgatttcctatctgaaacctcctgcttttgatgcaaagacctgttatcttcctctttttcaaaagatccttcagccttgtgaaattttcaatccgccaagtgaattttcccatgtgaccatctgatttccttgccccattaccactcctccctccagtcaaggctccactcttggaaaagttactgaactctttgattacgtgaaaggatgtgctaaacacagcagtatcgtcaaccagaaaccccgaatccagcccaacaaaatctgacatcttcatataatcattccaacccaaactggtattatccccactcttattatcagcagcgaaccgcccgtaagagtccctgtgcatgtggttcgagccgggtttctgatttagaaccgacatgcgaaacaaacaccaacaactcctatcagacaataggaccgtcttctctgtgtccttgctctccaaacacatggacaagtactccactccattcactgagctctgatagacactaatcctcaaattacactccccagcagggaaaacagggctcattatcttttgggtcttaatcatttccttaaataaactaaagttgtggactttccaagtgaactttccgttgacaacatcagaaaccggcccagcaacaaccggcgacgacatcattttcattgacgaagccgaagatgatagcgtttcattattgtcccgtgagaagttaacggattcattcaatatcaaaatatcagcggttatcaaaacggaatcgctattaaacaaataacccaacttggaatcgaagacagtagaagatggcgtaaaatcgcaccaaccatgggatttcttcttacttgagaatcggtgccaggaatcccgatgaatggtctttgaatcgtcaacaaggttgacgatggccaagcggtagctcgcgaagcagtcccatttggaggacgatgtaccccgagggtccatgatttgaagataaatagagatgtacccaggtaaagcctgagagtctcccttagggtataccaacagtcgacaatcataccctccaacctcgaagtacttgctgtgcaatggcttagccttgatttttgggaaattatggaccgtccatcgacaaactgccgagtattccccgcgaagatcgacactcactgtctcctgagctcctcctccgtctctcgcagccacagccaagtcctccgcagccgctgagatcgacggggttttctccgatgaagacgatgacgtggcaggttgtgagtggtccgacggaatgggctccgatgaagaagacgatgagaccgcctccgcagaagttgagctttgcttcattactacggtgttttttcgttttgggggtttctctctccggtacgagtttttgatcaatctctgtagttttctagagagagaaagaagaagaagaagaatagagagtggtgtgtgtgtggtgtgtgagggtaagaaagaactaagaagaagtgaaacatttcctcaataagagccaggaggtgcatgataactatcctgcgcctccttctctataaaaaaaaaaatagaaaaatatctcgtcttcttcttctttttttttctaagagacattttccttttttgttgcgtctttatgtctgaagatgaattggttcgagtgttttttaggtcttgtaatcccctacatcccgaacataatactacttaaatttgggcgtatcttcaccgttcatttgaaaaaaaaaaacctaaggtacacgtggatacttacacgtgcaaatggagagctctggatggttaataattttcataatgactgcacgtgatcttgtgtgctaatagggccacgtcaatcaattcaataaaaaaatattgaaaggggattttcttttttttttttgggtaagggaaaggggatttctagcatgcttaagtttaatcactgcagtaatatgataatttaaattattaactattttttaaaaatatttagatgaaaaaaataaaaataaaaacatatgatattatgttgtaagttgaaaaatatgatattaaaccatgccttttttttgggtcatatttacatatcttatttttaactgcttggtaagtgtgacataaataaatacatgaaagattcatgaatatatttatttaaaaaatgttatatttatatataattactaaaaaagcatacaagattgaaaaattattaagaaaaacatatttaaaatatcaacaccttaaaagaactaattagtgaattttaaagaaactaagtaaactaaattcactttatggaatagaatattactaaggaacacaaatgatatttaacaccacatgtaattatattagtgtaatttagtatttatattttaatttaagatataatatgtaaaatttgctactaaattataccaataaatataagatgggtttggatatgtgaacgtgatcaacaaaaataaaatcgagaaaaagacaaagaatataggaataggaaaatttaattaaaaaaaagaaagaggacaagaaaaaaaggaaaaatatcttttaaataaacattttataattttaatttattattttattttttttcatctttgaaggtgattttttttatatatttttaagttgaattgtacacatgtcatatctcagtaacaaataatttggggattcagatcaaatatatatatatgggggaattttaaaccaaaaaaaatcaaaaaatatcaaatatgatataaaaatggtaacatttatgggagaaattctattttctttaggaaaacctgatattatatgttttccaatatgccatattttattcccaaaatcaactttaataattatcacaaaaagatgccttccaactaattttattaccatttttgcccctcacacaatttctcctctttattttcttcgttatcttaattttttatagataactaataaaaggttaaaacgacaaaggtaaaaagtaaaagattttctttatctaaaaaaattaattgtcttttataagtgcatgcagagatactttaaaaaaaaaattggacaataaaattttaatatcatataaaaaaaaaatccttctaactagtgtctttccatccaactgaacatctctaaaataaaataaaaagctaattagtatcaattattaaatatatatataaaaaaaatttaataaatatcatcatacataattctatgatgtatacgctaaaatttatcaatacttatcttcattgttaaaaatgtcttcaatacatctaatattttctttacatcatactaaccttacaaaattgaaactaaccatattgttcttacaaaattaaaattgaagataaaattggccaacctagccaaaatataaatacatataataacctaaaataaatatttccatacaaaataagcttgataccataaatgtctcatcaccattgtagaaccatatccatcaccattgaagcactctcacacaaagtttctttttattctaatgttgtaaaggttccaaatgaatcatttctgaaatttaaacccacaacaatattcaaataacacactcattcatagatttcaaacacttatgtaatattaaaattttgtttgcactatttgttttagatctatacttagaaaattacaagttttttattaaaatcaatgcaattgcaatgtgtaagaacacttttgtgatgatgcgaaaaacatttttttgtcaaaaaccgatatttgacgatgcaaatataatggtgcataaaaaccgtttatttatttaaaaatgatgctttaatgatgtatttgcaattgtaccataaaaacttattttatgcaaaaatattattaactgtgtatttgtgatgcattaacgatgcatttacaatagtttacgatgatctgcgataaaatttaataaaaaaaatagttatgcataaattttcactcgatgttagtttgcggtatcatttttagtattccgaatttgaatgcgtagaaatccaattttgaactgtatttttaattattttagtctcaaacatcattatatgtggttttatttattttaaatagttaaacttgtgtattcttacactccaaaatttgacttctacatattctaaacc

SEQ ID NO: 63796 - DNA, 1358 bp, Cannabis sativa
aaataaaaagaaagatcattctaatgcaagatttgaaaaaaattaataattttttttatcaatttttttattcattttaaattttattccattgctattccaattctcatttccattcttattactatattttcattcctctcaactaaacgccactgagattaagattagtattgaatttcacttgtttatttgctagtaaaaactgttaaccacaatgtaacttccagatgaaaagtccaattaaaagaaaactgataaatgtagctatcgagtttgttcttccgctatcttgtaataaattgtcttagcttttgatttagtttgcagccactgaaaattatgaaagaattaatcatttctttttctttctttctttcttttttgagcagtgtttattcctaatgataactaatggtagagaattgttggagcgtaccaaaccaaatggacatgtttataattttagcttctttaaaattttagaattgttttagcttctttaaaatttaatatatatctttttttttttttaaattgtgtttttgaaaacaatatcaaatactaaaaaaataatttttagttttaaaattgaaaaacaaaagttttaggccaaactctctcttaattttttcattgaaagaaatggtcggagtcgttttacgttatgacattactatcacactattgattattagtaatttttttattatataattaataatttatttaagggaattaaattaaatatagaaggttgttcttctagctaagcaagtcgttcctcaagattattaattaacgtaagaaaccttctttctgttgattccgaatatcatacgctgaaatagtgtgtaaactattttagtttaatattggattttgtatattaaagtataaaattaaatatagagattttattttaagaaaaaatatattgaacttagttatacgcatttagaggttggatcaataatacatgtgagtgaaggtccgggaggaaatagggacaaacaatttctatccatagcgtatagcttatagttttggtactaaatattccatgtcttcatcaaatttcaaatgtgtaacattactgatatataaaagaacttatcatataagggttgttctactataaatataattgtatatctggtttttagaagcattttttagtcgaatttttcttatatatatggtaaataattttatagttataggtgttcttaaaataattacagtattatgaaaaaaaaataaataaataaataaaaaatcctcaaaaccgaaacaaatagagcatactaaaactgaaggaaattacatttttttactaacattgaatgcttatgcaa

SEQ ID NO: 63797 - DNA, 868 bp, Cannabis sativa
  modified_base (352)..(358): a, c, t, g, unknown or other
gattgtatcgtagtgcaaaacattttgaaatttgatttggcacgagaccgagagagtgaaagatggaaaactcagacatcctatagattcccaagcttgaaaaaaaaaattaaactacataaatcctaaattaaaatctgaaccaagacatattcgtcacggtctatctacggatagagtaaatctacatatatctctaagtagtagttataattcatggcatgtcttccttgttatgtataatcttcctctatggttagtgatgaaaatgatatctaatatgttttctttaatgatatcatgcccacaataacatggacataatatcgatgtatatttggaaccattgatnnnnnnnttaatagaattgtatgagaatagtgtttaggcctatgatagttttaaaaaagaattaattcttcaatctagaagtagtgttattatggaatgttagcaatattccagcttacagtaatttattaggcttaagcataaaaagttacgaaggttgtctaattcgttgcattaacatatgggctcgtcgcttgccaaatggaaaaaaaaaatgtgttatattggtcatagacagtacttgcctaaagatcatcctaatagagacaagaagaatgcatttgatggtactgaagagggagatatgactcctttgccactgtcagggtgaatgattatatttgcctcttgcatgttgaaatggatatctgacaatctctggcacctgaaaagaaaggtgaatgattatatttacctcttgcttgattcactttgtccaaaaaagaaataaatggtttgtgaatcattttcaaatatgaaagtagatgatgatactcgtgttgggttttatgcccta

SEQ ID NO: 63798 - DNA, 9000 bp, Cannabis sativa
  modified_base (1115)..(1121): a, c, t, g, unknown or other
tttaattgaaatatttttagtaattatatcaacaagaaccggctacaaaatgccaaaaaatttatagtggcatataactttgtaatacccatgaacaattttttcaagaaaatacccattattttgttttttttcatttgtctttttcaaaaaaaatgtacaaaacattggatattcctaaaccatttcttttttttaaaaaaaaattgctacaatatttttccaaaaaattaatcaatttaattgggttttaatttttcttaactttataaatgaaacaacaaatttataaaagcatgtaattaagggcttttaaaacattttttttttaaatgtttttaactctaaattttcagttaagaattgagtgacattaacgttgaagattcataaataagaaagtgacacaaaactcaatttggtcaccaaaaataataaattactataagggcaaaatggtcattttgacttgtaaaatttcaatcttctcttcctacaaatttggtagtttgtccattaagaaaattttatctaaaaataactttaaaaaattgatactttaaattattattattatttgctaataaataatttccatgaaaagaccaagccaatttatttagataagaaattgaaaatgacatttaaattctcaagacaaaatcttgagctttctcacaaattgtcaaaccatattttttaattatttaagtaaactatctttaataattaattaactagaaataaataaataaaagcaataatagaaaatagataaaacttccaactcctatctgattttattgcttaatttttggttaaacttcattgttttaatttaattttttatattattacacaagatacgttttgagtatttattaccataataaaaataataataaatggaaataaatccaagcaactaaagtagaaaaaaagtaacctaatttattattattattataactatttttttcatagatcaaaattataacggtagattcttaaaataaacatttaaataaaatattgggtaataatattgtgttgtgtgcaccaatgcctttggtgtttttaatgccactataatctcaaaataataataataatannnnnnntaataataataataataagatattgtagtgattatttataatttttgcccacgattattttataacaagtacttatgtaaagtgtatattatgaatagttggtcattttatttgttacatgtaataaaacttgataaaaaagttattttacggtactacaaatagtttagaaactatttttattggactcaaaaatttaaaaagtataataatacataagtcataattgagggggtaaaaattctaaataatctattgtagttgtttaatacattttgcacatttataatagagaaaagaggcttaaataatttattgttcgtgcatataaaataatatagtcacacatttaataaaatgtttaaatcttatttttatttttagagcaatgaatgattcttaaattgtaaaaaatttacaactacaatttatattatcttataaaataattagaattaaaatatttatacatagaaaatacataagggttcagtgatatacctattttagagcggttgggtgtcgatagattttatatgtgtttcagcattttagagagtactttttagtatatttttattttttataatcgtgtatattataattatttagggttattgataaattttttgaaaattttaaatcgactatagtgttagaaaataaaattcaagtattttattacacatatcactgtttatttatacatgtagtatgtaaccgtttaaattttatttttggcattgtaaattatttataatttttttatacatagtaccacctgtaaaagttgctagacaccttgtaatagttactaaagtgatccgtaaggggaaatatcaagtaagctgtgcaatccacattacttgggaaatatcaactgtgatgattctgagactgtataaatataaaactatatcgttaaagaatagttaaatgaattaattagtactacctatatcaataaattacatcttattttttaatagcccatcaccacaaaagaacccttattacaagttttcttaaaaaaaaagtatgagtgaggacaatattctatattaaattttaaaaaagaaaacaattattcaaatataaaattatctttattttttattttatttttttataaaaaaaaaaaaaaagacaaaagcaaaactaaaagctaaatttcagttgactgtctctctctcactgtgtacagctagggtttttccttttagtattactctctctttctctctcctctcacacagtcacagcctgtactctctctctcctcgaaaccagagagagaaaaccaacaaaaatgcaggttacccaatactctccactatatcaaatctctctcaccatttcatccccaaatcaaacaatgcctaaactttaaaaaaaaaaatcccatttttagtctcgtcattgttggacaaaaaaaatacaaaaaagcttggttttttctagctaaaatggagccattaaggcttcccattttgcttttcctctctattcttcttcttcctttagctaaaccagatctgagttccgatcgtgaagctttactatctctccgttcctcagtaggtggaagaactcttctatggaatgtgacccttcagagtccttgttcatgggctggagttaaatgtgagaacaacagagtcgtcgttctccgacttcccggagtagctctctccggttctttaccaaagggtattttcggtaatttaacagctctgagaactgttagtcttcgtcttaatgctcttaagggttcactcccttcagatcttgcttcatgtacaaatctcagaaacctttatcttcaaggtaactttttctctggacaaatcccaagtttcatcttcactagtttgcatgatcttgttagacttaacttagcttcaaacaacttttccggcgagatcccggtggggttgaacaatctgacaaggctgagaactttgtacgttgagaataatcagctttctgggttgattccggagttaaagcttcccaatttggaacaattcaatgtttcgaataatttgcttaatgggtccattccggtaaagcttagaactttcaagtcggattcttttatgggtaacactctttgcggtggtccacttggtctctgtcccggagacagtaacgggtcttctcctttacctaatggagaagtcaacattgatggaaaaagtcataagaggaaactttccggtggagtcattgccggaattgtgatcggttgtgtggtggcggttttagtgattttaatgcttttgatcttcttatgtcgtaagagtagtaaccaaaggaggagttctgctgacgtggcggcattgaaacaacccgaaaccgagctttcgagggataaaccgccttctactgatgctgaaaatggcggttttagtaacggtaatggttatccggtggcggctacggcggctgcagctgcaatgccggttggaaatgggaataagggcgaagcgacggcggttaagaagttggttttctttggtaattcgagttcgagagtgtttgatttggaggatctgttgagagcttcagctgaggttttggggaaaggtacatttggtactgcttataaggctgttttggaagctggaactgttgtggctgtgaagagacttaaggatgttaatataagtgatgttgagtttagggaaaagattgagtctgttggggctatggatcatgagaatttggtaccacttagggcttattattatagcagagatgagaagcttcttgtttatgattacatgcctatgggaagcttatctgcacttttgcatggtataattctctctctttcttttggttcatctatgattaaagtatttagatttgtttttctatatgggaaatttgaaaaaactaactatcaacatgaaaatgttaaatttagcaaaataagaagctttgttttatggtagcttttttctctcttttttttttttgattaaagtctcaaacttttaattcatttatgattatttctttttgagatgttgatgatgatgaaaatgttgaattagcataacaactgtgatttttgagaaatgggtattgttaaaagagtgatttttgatgtaatttggtgttaaatgagtgatttttttgaagtctcttcttttattattattactttaggctttgtgttgatttttcatctatgactatgattatctatctcttttttgagttgttgatgatgattcccatttctctgtatttcttatgattgtgttgagatttagcttcacaagtagataatgttaattgtttatgttgttatgagaattgggtattgttaaagaagtgattttgatgcaatttggtgttaacaactgtcaaatttcagtttttgctgatctgggttttcatcaaacaatgttgtttatctttacattccattacaggaaacaaaggagcaggaagaactccattgaattgggaaatccgatcaggcattgcgctcggtgcagccagaggaatccaatacttacactcacaaggtcctaatgtctcccatggaaacattaagtcctcaaacattctcctcaccaaatcctacaatggtaaagtctctgatttcggtttagctcaccttgttggcccttccaccaccccaaaccgcgttgctggataccgagcaccagaagttacagacccgaaaaaggtttctcaaaaggctgatgtctacagtttcggtgtcttactcttggagatcttaacagggaagccaccaactcatgccttattgaatgaggaaggtgttgatctccctagatgggttcaatccattgttaaagaagaatggacagccgaagtgtttgatcttgaactccttaggtaccaaaacgtcgaggaagagatggttcaactcttgcaacttgctattgattgtgccgagcaataccccgataggcgtccaacaatgtcagaagtgacaagtcgaatcgaggagctatgtcgttcgaacactaaagatgaacctcaacccgatcttgtcaaagaagcttccgatatgtcgtatcggtaaggcttaaaaatggagccaaaaaaaccaacaacaaaaccatcttctttcccttgtatggcttttgtagaattatataacaaactttgctttgttatgagccatatttgtgtgttatgtttaatcttgggcataaaatctttcttttttttattttttttttctaattaggagccaaaaactctaaattttttacatatttttttttatcattgtaatgtttttttttcttctttgttattaatatacaattggggtggatatctattccatttgatctttgttgttgttgttgttgttgttgttggttgaggatgttaatggtggttgctttgtaattattattactttgagttttctttgcttttttgggttttggtgggtacatttcagctgatgaaattaagatgtttttagtactgattttgactaatttgttgtgatgttcaatcaatcattttcattctatttttctccttttttctaagattttaatgtaaaggttaacactttataatcacatggttacttttttaagcttcaaagataatcataatatgtccaagaatcactttttcttttctttaggtttagggcatgaaattaagttaataggaaagcctacaatacatcctctaaaaaaatctttcgatattctttatttaagtcggtattcaagataattttttagtttaatatatatatatatttttttatgattgtgtatgttatttaaatattttaatgtacgtgtggatctgtaaaaaaaattaaactaaaaatactcttaaatagtaaaacaaataggagttttaccgagaagtccttctaaggaggtgtattaaaagattttttcaattaataatacaacattaaaattagtcaaaaattatttgacaaatatattttagaaaatattcaaataatgttaaatttgattgttaaggtagtaactaacaagttgacaattgagattgcttttttcaatgttatttattaatattaatttgaaatgaaaaacacatataaattgacaaaatattaggtggatataaatggacaaaatttagagtttaatttcagtattgtcaccatctttttacaacttactaaaatttttttgtttgtttagttattgggattactttcatgttaaaaaattgtcatatgagaatcaagaaaattaataaaaataaattgaagtgtacaagaatctttgttgacatcattatatttggaatctaagcaaattaaattaattattaatcacctaacaaattccataaaatacatataacctaaaagagttgttaaaaaaaaataaaaagagttgttgagttttacaaaattgaatattaaaagaaaagatatgttttcaaactaatcataaaaaatatggctctttaatcatttaaaattatataaacattcaaaattaacacctttatgtaaaattggctaaaataaaataaataaaaaaaatatcaattaccttctcttaaatttaaaaaacaataatagctttcagatgtttttacaatgcactcctatttgttttggcatctgaaagaatttttcagtttatttttttatgatcgtctaaattatacttatttaagaaattttgtaaaatttcaagaaagtaaaaaaaatataatatgccaaaaacaaaattttaatagtcttatcttatcttaagagaaaaaaatgtctttctattttttaaaagatgaaagaacaaaaatgtactttcttatcttatctataattagtaaaatacctaatataccctagaccctagtattttagatattgaaaaaatagaaaggtgttttttggtccaatataaagagagctctatattttcattgtttgtgttaatataaatatacaaattttaaaaattactaaattaaaaaagtaataaatgatattttctaactaaattttaaaatttaaaatgaaatattagagtaatagtaataaataataaatatgtaacaattttttttattaatcatggattgaaattatgtacttattattcttattttaataaaacttaaataaaatatagaataaacaagatttttactctccaaacttagacactaagtgattttatcttattaattattatttttgtgtgaaaaatatccatcaaacttaaaaaaaagtttaaaatttattccgtcggttatatttcacttattttttgagacaataatgttagttataccgagttttgtaggctgtatcaagtgatattagtccgcgaaccgataatggcaatagtagtaaaatattgtaacaaattaaaaaggtttagtttagaagggtgactcatgtttcatgtggtgtagtttgtggtgatgatgattacaacaactttttttttatttgatagggttggaaagaaagaaaagagtaatagtggaccaaaaccatataaaaggatgatgagttttggttttttagaggtgtaaagtaaaacaaacaaagcatgcactctgacattttttttctgacaatcacaaaactcactagtaccatagtggtcccttctcttagggcatccaaagtctcactcaaattatttatttgtttgttcaaatttaagttcttttgttgttgcctccccttatggatttcaaaattgtaaaattatttttgagaaaaagattcaattatatttatagatactattgggagcttttaggcatgggtcaccctaaaatttagtggatcataagaataaaaatatttttgagtccttatttaaaaaaatatagtatttttcaaaataagtaaaaaaatatgtattttcaaaagaaatttttttttttggatccttgagttaggtggaccctaagcagaggcttagttcacttatactaaaggtgaaatctacttttacggtgcatccctcttccccaaaaaaggggtccattaatgcacctttattgatttgacaaccagaataatttttttataattctgtacattgtaattatttaatgcattctgcaaatttttcgaaaattcaaaacaatttacaattgagaaaagaatcttaaaacagtgtatgtaaaacacatattaaaaaaaagtgacactccaacaaactgtttaaactttatttttagtatattaaatttttttgaattttattttgtaaaatatcttaaataaccacaacgtacacaattatgaaaagaaatggactaaaaaaatcactttgattcgagaataaataggggtacatcagtgaatcctttatagcagatgcaccataaaatttttccattttattttgataaaagaaaaataaacatggtatgaaatattgaatggagcttccatttctctaattatgggaagattttgtcctagggtttgtgttgtcatattctggtcatatatattaagagttccatagaaacaaatattttcataagatagtactaaaaaatttggatgaaaatatatcaaatgtaaagtttgcaataggacaagaaattgcatgtgatttcaatgagtatggacacaatgtggaagaattttttttttttttttgaaataagtatgattttattcatttatttatttttaaagaataattgttgtaagggccaccatccctttgaatatacccaatttgtccttaaatagttgagacaaatgtgtgattggtttaaaattttaaaaataaattaaagaaaaaatatgttaatgtggtccggaccattctcggaatatttttttccacttttcctaatgaattcgtactactgagacatgaatttaaaaatt

SEQ ID NO: 63799 - DNA, 533 bp, Cannabis sativa
ccatcttactctcctttcatcctaccaaacatgaggaattaaaaattgtgtatttgaagggagagggtttccctccatctctcctctcccttcctatttcctttccaaacaagagaattcattaatcactctattcttctcctcctcctctccgaagtgtaaattaaaagctacttattcttttccttactttctatttattttatataaaaaaatatatagatattttctaaaagacatatagatatttgtttacattttttctttcatttttcaattattgaactttcaagaaaaacagataaaataatattaattttttaataaaatgaaaaaaaaaattaataaatttacgttctctatcaatattcaataagtacattataattaaaaaaaattaaaataaacaattaaaaaagtaataataataagataaaaataagtataaacatattatttttgaaattaaaaaaaaaaaattttggtagttaaactcttttttttaactgttgtttctatttaactctccaaat

SEQ ID NO: 63800 - DNA, 978 bp, Cannabis sativa
tacttgtgagtagatctaacatcctggtaaaattaatttcaacagaaactcctttgagcaatactgtgaagcattgaaaccttccttcgagagtaaccctcttcaacttcatcaagtcattgaaagtgtccaaattgtactttgggcctaatgttctgtcataaggaacgatgttaggctccttaaagttgaaaggtaataactcaagttggatctcctttgagaagagagagtcctcattatctcatcttcatcatagttacattccttagaagtggtcgatggtatctaccttcgcaaatcttccatctctttatcaagctctttcctttgcttatttagcttatctcggttgtccagcggagtggacataaactttctcgattctttaggggacctcgcgataagtgtagacctttgcgtgcacactagaagaaagtggacttttgccggcgcatttggccaactgtgctggcaaaagtcgctgggaaaaggtgctggccccaaaattaaacgaaatcatattgcatttttaccagtgcaataatgcgtcggtaaaagtacttaatatcgacgaaattcatgaattacactggaaaaaccagtgaaatgaaccgccttatggcgcgaacaattcccaatggttcattcactttggccagcacaattatgtgcttgcaaaaagtaaaataaattttttgggggattttaaccgctcagctaaaattttgggaggaaacttttgtcggcgcacatatgggctggaaaaagtgtgtcaggtaaaaagaattttagttttatcggtaaatgttacttttatcggtgcaaattcgcgctggcaaaaggtcctaaaaaaggtatgaaaaatcccgcgtgaaaaggtggtaggtgagaatactttttcggtgcatatgtgcaccgataaaagtgttgccaaaaacacatcgtttcaatttaggttaattttaaatgctatgc

SEQ ID NO: 63801 - DNA, 1179 bp, Cannabis sativa
gtaaaatatttccaacaagaacaacttgagcttattcacactgatgtgtgcaggcctattaatattcaagctcaaagtagttatgaatacttagtcaattttatagataattattatagatacggtcatactcacctaatggccaagaagtctgaaacttttagaaagtttaacgacttcaaggatatggctaataagcaattaggtaaatcatcaaagacactttgatcagatcatggtggagagtatttatgaatttaaagactacttgctgaaagaagggatcttatcccaacttatagcacacctcaacagaacagtgttacataaagaagaaattggaccttgttagacatgatcagattgatgatatgttactcatcattgccattaaacttctagggatacacacttttagaggctacccacattttgaatacaatacccttaaagagcacaagtaatactccaatagaattatggaatgggacaaaacccagtctgaaacatttctgtatgtgggtcttgctcatgttcttaaactgaagactggaaaacttattcctaaaactagtgtgtatgattgtaagatatttacagggaaattgaggaaattagagatgagatttttaaaccagtaattttagcaccattagttgaacgaccgatagcggttaccatagttcttgaaaaggaaatcccagtacattgtcatagtaggaggattgtgagacatcatgtccgctatgaatatgaagcacatgttcttatctctgacacagacaaggatgatacattgacttaccagaagaaatggaagaccttgagccgccctggctgcgacttcctcccgttccaactcaacattttgtcagtttacctcctccaattgtcacttgagttgacaatttcccaacttaactaacggaacatacatgttggggtcataaaaacccccacttctaggagtgtcggcaccgtcaatgttgggtatttcattcccaatttttgggttttggccacctttaggcggggtcctccttgaacgtgtcgatcgtgtagatcgtgttgtttgtgagttgggaggccttcgtgagcccgccgactctttttcaggacggtgagtagtccttcaggttgattattatcatttttcccgttgtcagccatggagaaaag

SEQ ID NO: 63802 - DNA, 1338 bp, Cannabis sativa
gtaccaattcactattatttatttgggcatgggataatttttttttttttataatcgtttataatgtaattatttaaggtattttgtaaaatttggaaaaatttaatacactaaaaatatagttttttatttattttttattttatacgcatgtgaaaaacattatttttttataaggtaaatagtgacataaatacttttagagttttgagtttgtaagtgacataaatttaatgatcttttttagcgtcataagtactcaatgtttataaaactgtaattttctttcagtttaatcagtacatattctgttattgttttaaacaaggcacatttaagacccatattttaaattatttggtcaagacgaaaatatgtagtatcggttactttcaaatcttcttttaataaatttaaaattacagttttacaaatattgggtacttatgctactaaaaaaatcattgagtttatgctacttacaaactcaaaattttgagtacttatgccgttatttacattttttttatattgtacattattttaaatttctcgaaataaatgtcttaaataacttgattataaaaaaaaaattagattaattttttttcaatatgcggagacagatagagatgtattagacataaataaatacacaacagcctaaaattatttaaaacatgtatttaattgcaactttattaaagttgatactacctgctccttaaactaacgagggatgaagtcgaattcagtgaatttgttttggagataaagttcaattattgtttatgttttgtgcatcaataataagtgtatagtagaaatatagaaataaaaaatatatatataaaacatttacatctaaaaaaaagtgaaaattatagcataagtgtactagtaagaatttataaaaaaaaaaaaagattgaaaaattatacattgagggaaaaaatattttttaaataaaaaaatcaacttttttccaatcttttcatcgtttgacaatgacaagtagagtacaaaagaaaatattgaaaaataaagttttggtagtatttctaaattaaatatggcaactgctccggttgcatccattgagtttgttaatagttaaatgaaggctaattaagatttttgtcccctgaattttgacatgtaccaaatcatgttcaatgaacttttaaggatttttttccaattttagtaaaaaattctaacctggatgaaaattcagtgggcataatttaatacatgtcaaagttcgatagacatgatttggtagatatcaaagtttagggagcatgatttagtacataaacaatcactgaaatagta

SEQ ID NO: 63803 - DNA, 686 bp, Cannabis sativa
gtgaaaaacttggggatgaaatttgttctcgagaacatccaagaaatgacaaaattgagtatcacagaatattttcatcacattccccataattttgttcttgatgttgttaataacactataagtgcaagtagtgacatacttagacctgtaataatcagaaggatagagtaaaaaacacaaaaatagttagatgacattctatatatttttttcattctatttttctaattttaaaaaagtttaatattttgtgcttaaaaaataagttacacgtttcttttactaaaatttacataaaaaatagcacaaatatgattaggtgacactctatattattttattcattctattttttttttaattttgtaagagattaatattttgtgcttaaaaaatcaagttgcacgattcttttactaaatttatttttgtcccacattgtttagaaagcatagtgactacaagaaaagccactttcgccggcacattgttgcgccggtaaaattaccctaattgcgccggtaaagctttgccggcgcacaactacgccggcaaagcttatctgggaagcttggtcgtaaaggagtttttaccagcgcgtagagtaactgcgtccgtaaaacttacttttactggcgagaaatagcgccggtgttaaaaaatgcccttatccgctatgaacc

SEQ ID NO: 63804 - DNA, 674 bp, Cannabis sativa
  modified_base (629)..(636): a, c, t, g, unknown or other
actttcagataataattgaaacttcatttgtagaattcttgagaaatgtcagccagataacaaagaagagagcaattaccaactacaaattcattccctcttcgcataatcttatggtacatatatataagcaatttttcatgtttgtggtttcattttagtagctatgacagagaatcattcaatctatatcttctcatgcgacaatcttcttctactcctttctcattaagctttgatctctttcaatgatggggtctcctttttcaaatctggtttaagtaagaacgaagatggatacgatttgaaatcttctaatggatacgactgagttttgtaaataactaatatgtcaatataatattaaggaggtaatgaaatgagagattttgaatattttggcattttctattttcttagtcgccaatttagggtggatgtaattttaatttattttttatgtttgttaacttggcattgtcaatttgatgtgtgagaaatgatgcatatgggcatgtgccaaatatgttatgcaacctatctcttcataaataatggtaaggcaagctcaccttacctcttgaatgtgtttacttgtcttactataaagggtaaatattattttggannnnnnnntttgtaaaagttaccaattggaccatctgttttgttaa

SEQ ID NO: 63805 - DNA, 2045 bp, Cannabis sativa
atatctccatatgtatctcctaatttactttttccatcaaataatatatgatgagaacaaaaattattagttaatgttttaattctcttcctacatagagatcgatatagctcgatcgaaagttatttgtatgtcagaggtaaaagaaatggttgtgcaatattgtaattatttaactcatattaagtactaaatgttgtaatccccggctgtaccttatcatatcgtgtactatatataaatatatatatatatatatatgttttaaggatattatattgtcttgtgcagagatgagatccaacgtatcaaagctggaaatccagatataagccacagagaggcctttagtgctgctgcaaagaatgtgagacaattgattcaccattacttaattaattaaaacatataactaatagccatgattaattatacatatatataatatctagttggtaatattttccatggatcgttttttatcattgtgttaatttgttggatcagtctctagctctatgtatatatatagcttggatttatttctggtttggtattgtttcagtgggcccattatcctcatatccatctcggactaatgcctgatcaacccgtgaagaagccagttatacgccagcaggtatttacaaaaccctaaactatatatatatacaaaatatctgcaatatatttttaaaaattattggttaagaaatcactaacaatttatagtcacttttagtatttttggtaatgttttttccacatgatgatatggtggataatgtagtcagatagatggtctggatgaatcttctacaaatatttagaaaatttcaccattatcagaattcaaatatatttttattagtgtgtgtaacacattatatatttgaatgataatttcagttctaaattatttgaatttcttgacaacttgtagaaaatcttctatgtgtgtaaccatgttatatactgtcaatcatgcatgtcaaaaaaataatttatattgatctatttttaaattaattaagtgttgtttataatgtgcaactatggacatttttcaggatggtgacgacatgcttatgaaagatggatttttcagtactactcctcctgctgccaacgttggcgtctctccctactaattatatgcatgtctctaagtataaaaaccttagagctttcttttaatttggtatttaactaaagatactactgtaacttgtactactactgatgatattattagctttcttctttactggtacaactattgtctttcttgctatcttataattatatattataaccgttaatttcagtacaacactcttacaatcatcaatgtttgagccacgcacacctatttaccgtttaagtttcaatatatatacttatttatcgactttacatcagatattgataaataataattgcgtgcgtactataaaaatatattatatatgtcttattattgtacatttagccatgcatgtttgtgtcccaactacaaaaatgcaaaattttatgataattaagtttactaacaaagggagatcgatatgggaaaaacaaaatgcagttcatccaactggcaataatttacatactttttaggggctcttgaacaaagagcatgttcatggctgggtccaacaccaaatatatgtggtgattcttacaagtggttacatattgtgatgttaaatatcttttatttataaaatgaaaatttaaggagtcttaatattagaaatttaataagacaagttttagaaagaaaacggtattcaggtttctaattataaatctcagctcaaagatgagtgcgatgatgcatttctttacacatagaggttagatacaagagattgccactaggcataatcatattggcacaaaatattatgaaactttgggaatattctagatacgaagataaactaattaagctggagcaatattaattctagttttacactctaatgtcgccacaacaccacctctcaaacactaggggtgatgatgttacaccacgt

SEQ ID NO: 63806 - DNA, 1636 bp, Cannabis sativa
aatttaacagaatattcttttagtatattctgttaaaccaagaaataccgttagatagacacttttaatatataaagatatatatatatatactttaaggtggtatataaaattcccataattttttgtataaatccttgaaaaaaaaaaaaaagattttccatcttgcttcttcttttaattaattgagacaaggatgtttcgtatgtcatttgaaagggctggttccgaaaacataaataaggcaagtaaaagaaaactcaatgcaatatatagtacgtactactgtataatatacacataaatgatcgatccttcgtctatgtctatgaagcttaagaaataaagaactagctagataagatcgaaaaaatattatttattgcgtaaactgcggttattatttatagacaaatgtacatatagttatattaattaagctgttatattatgagcacttttgtagttccttttcggcaattccgttttgagaatgtgtggttgcgtgaatccttgtgtttacaagttgtgtctgattgttgggagcattgtagtggttagccgattactgagaagttgaagtattgtggagagatgcttgctgtttggggaaaagagtatacgggtaatttcaagcaaaaaatctcactgtgtaaaagagagattcggtgttggaagcaagggagagactctatttctattcagcgattttgtaaggctgaactgaagctaagtgagaccctaaaccagcaagagattttttggcgccaacagtccaaacaattatggcttcgtgaaggtgatagcaatagcaagtttttccatgctaaagctactgctaggaaaaagcataatacgatttctcgccttcaagatgattcgggtagttgggtaacgtgggatgataagcttcctgatgttatattgggttatttccagaatctgtttacgtcatcagcttcacagttttccccggtcattgatgttattcccagtacgattaccttggctcataatcagcaactccttgatccggtcacagaggaggaagttaggcgtgctctgtttcatatgcacccggacaaatcgctggatcctgatggtatgacgcctggtttctttcagaaatattggaatgttgtgaagaacgatgtggttatgcaggtagagctttctttgatactgctattttacctgatgctcttaatgatacaaatattgtccttataccgaagaaaaagcagcctgtttctatgagtaatatgcggccgatatctttgtgtaatgttctatagaaaattatttctaaggtgattgcgaatcgtcttaaagtagttttgccaaatgttatctctccaactcaatctgcatttattcctggtcgtttaatctctgataatatcatgatagcttttgaagtaatgcattatctgaagaggaaacgtaagggtaaggagggatatatggctttgaaattggacctaagaaaagcctatgacagagttgaatggggttttcttagagctatgatggagagaatgggttcgctactcgtttcgtggaccttgttttggctacggttaactcagtgaggtataaaattgttcatggcggtcatgtgtcagattcttttgtg

SEQ ID NO: 63807 - DNA, 1350 bp, Cannabis sativa
gtctccccaatatgagataggttgtagctatagtcagaactccaactgatacatatcaattaagaatttattacctttatgtacacatttaatattaacccatttcatagaatgtgaactaatatgtataattctacctttgggcaagtaattacacatatagttaaccaaaatacataaatttggcgataaaagaatcattaaaaattaataatcccagatgagggaatcctaagagagccaccgactctaactaccgtccatgtacgatccataccaaatctgaccaactgcccatcctacctcctctacgttcttgacagcccatctttgtctcagtagagtttttcagtggtatatttcagtcctcttccttaattgcttataatatatcgataataaaaaaaataaagtgtctactataacacatatttttgcataaataatcaaattttattattctagaacaataaataatgagagatgtaaaagtaagaatattggtggaaactacatagttaaggtagatcaaaataagagagtgactatgtctaataggacgagaagaaacctaattatttttctgtgatttatagatttaaaaaaatcatcaaaaattattcttaataattttttgactgtataattatcattaaattaataataattattaaatggagtcaaaaattaattaaaaataatcaccaaaaaccagaaatcaaattctaataactctgaaaaaaatttgtcgaaaatagagttcgaaaactaccgcactctccctcactctctggcagtcgcgagtgggcttcgtcccaggagagtgtcttcaacctctaacagcctccatgactgtaaaatgggttttgtgcgacccggtttagacccgatcaggtccggatgaaatttcgacaaaaaaattgacgaacaccgtggaaattatgggttttgtttgagtttcaatttctaagagatatatgaattcaatttcgagtatttatgcataaacttaggtagatctaatacatccaaaaattatgaactaaaataaatccgactatggcaattttgatctcgtccaattcaaacataaatgcgtaggaacattgtaaaataattgttaatgagatatgcacaatcaattttaatttatatccaatagaatcaaaaaatccaaaataaatttcatataatataataatcataaaactctaaacttcaatcttaaaattctcccaatttactcaatgattttatgcaaataatatatcaaaagaaagagaatttcatgagaaataaaatccctaaacttttaagattgaaaaataaaaaattcaacataaaataata

SEQ ID NO: 63808 - DNA, 1387 bp, Cannabis sativa
aatgaaacatacatggttgtaaatctagatcctggtaaaatatttccaacaaattcctcaagtttaagtgaacaaaattgatgaggaatcgtaagatgctaatgaagggagtgatagaaaatatatttaattaacgaaagaatgaaagcaagaaatacaattaggaacaacaaagaagcatctactttctaataacctactatgagcttaccatggagttaagcatacttaacttggggtaatctcaagaagggaaatcttccgaggagtcatcttaaaaagcgtacgagtaagacaaaagattcatattaggatgtagaattagcaattgttccaaaaattatcaagaggaagggatgtgttaataagtagatatttataaggcattgagatgagtatataatagtgggtggaaataagaaatgctataattaaatatctatccgaaacaaatatttagcttattaataagctaaattaataaatcaacttaggagatctcataggaggaacaaaaacacaaaattatgaattatgtactgtgggatcttatgattttgatcgagtagtaacggttggacataccgagttaatatgttgtctatcagtgtagatgaattatacaataaatgaggatatggagttcctacaaaggaatagtctaatcttgtgaaatcccaaagttgatatctttggctatgatgtcaagagttaaagaaggttattgagcaccatggaaatttaagcaaaagtagtatgatgttttattcttgaaagatgggtaacctgggagaatcaatggaatattaaaaacatgttgcatgcatatttgataaaggttagaatatctttgaataatctcttccactgatggagtgtttgtctaaaagtgataattaaatgtaccattagttaggtactttaataagtgcggtacgagaaaaatgttggacacctattcactagagtaacacaagtcataaaagaacacgatggaccaaaaatttccaaggaatttataaaaccatagagtgaattcgagttgtatgctcgcttcattgagtacacagaaaagttgcgctaatttaaagcataggattatcgagttccaaataggagattttatttttctccgagtatcgcctataaacgggatacgtagataggaaagttaaaccctaaattcattataccttttgatattggagtaaataggccaggtagcctatcagctagccttgactctggagtgtatttcatatccccatgagaaaatatgtatcagactcaacccatattctgagctttgatgattttgagcttcagacatatttattatatgggaaaaacatcttgtccagaatttgaactggaaagagaaagtaat

SEQ ID NO: 63809 - DNA, 941 bp, Cannabis sativa
agcctatacttggtacgctagtcgactctagtcgtaccgatgtgatattgtcgaatagtacttaagccaacatacatttatcgatatccaatataatactaaacatactgatctcgatattataatgtaatctaataggcttaactaacatgcacgctaaacatgtaaatatatatatatgcatattattatactaatcttacctcgtttctgaattaaagtgtgtcgaccatcctgagtggaacagctggttgacgaattacaggccccttaatcacattatttgtaaaactgatgagtgacacgcctaatcacttttcggggacttaaacttgaagctaaaagtttccctatccatgaataacatgggaatactataaatatcgtaaaaacgagaaaaactagggttcccaaaaattccccaactggaagaccagttccccaaccagaattccggttctgtggggtttcttggggaccaatcagaattttggttcctgcaagtccccctgaaccggtcgaccgattcagtgcaggaaaacttcaaaatttcactacaccctcaattcaatcctaaaccttccaaaccttctatttagaccacaatgaacatattctaagcaataaaacaactctaccaactcagaatcaaaatctaccattaaagagcaaagcttgagttcttaatctcaaagcttgataaaacatcacaacaaccttcaaatccaattcaattcaacatatttactttaattcaacttcaaaaaatagaaacaaacaccaatcaacaacacagaaccctaatacccaatttcatgcaaaattcattatttaaaatttaagaaactaagagggaaaagatgctaaaggggttaccttcaatagatacacctagaactaactacaatccaccaaaaaccagttgaagatgtccaattact

SEQ ID NO: 63810 - DNA, 607 bp, Cannabis sativa
aataaatttataaaatatatgtatctaggtatattttgttaatacgggacttcaaaaataactaattataatttaaaagttattcttatttataattgagccaaattgatactttatttttttttataacaaattagaaattattttttaataaagtattcttaaataaattttctactagatatataaaaatatactaaatatatagagatgtatttaagtaatgaaaaactaagtaccctgaaaatgcatgcattaatttcctgcgtattaaaataaaaagatttaggaaactctggctcgcagaatccgacttcccatgtacctgcacaaaccatatagctttaattaatacatactatgagtttaatttcaaaaaaaaaaattaatacatactgtatctttaatcgagaaatactaaaaaaaaaattaatagtgcgtatacgtgttatattgctgaaattaaatattaaattttaaataatttaatttaataactattataataaatcattaactatttagaagacatagtgttaatactcctatttaaatgacaataatacacagatacatttttttaaaagacactgcagatatatatgag

SEQ ID NO: 63811 - DNA, 732 bp, Cannabis sativa
tttatcaattaaaattattttgaaattatctttaattaatataaaataaaaaaaaaagataattttcaacttatccctattatttttctaatttcactaaaattcaaagttggcccaacatgtcaaatatcatggataatatcataatatgatccaaaatatatttgcttactttgacgaaattagaatctatactgaaaatattattatttttaattatttagctaatatcaatatacattattgaatttatctcgaactattatgtagctaaataaatatggttattctctaaatatggtcactttttttagatagggctagatgcatattcaaaattatacatattattttacatacaataatgtatatattgattatagctatataatttttagtgaaaatacatcatatttaattacatactcgtgtataaaaattgtgtataatattatgtgtatcacaattattatgagctcattattataatgaatagaattgataagaatatgtcatcatatcataattatcttagtagtggatcgattattcccactaggtcttgatcactagtagacatttttaaatattgttaggttaaaggcatatataaaatataaaacactactatatatattatgatagaacatttttaaatgatcgttaatttcacaaatgtacaaaaataataaaaaaaacaacaaaaatacagtttcacggaattttaaatat

SEQ ID NO: 63812 - DNA, 1347 bp, Cannabis sativa
aatatcccccctcaagtgacacggtgagatagcaagtgtcaacttgttccttagaaaagcaaatgaagatatgggcaaagcctcagtgaaaatatcagcaacctgatgaatggtatcaacatatcgaacatcaagctgtttggacagaactctatcacgcacaaaatgcaaatctatttctatgtgtttcgttttggcatgaaacacgggatttgaagctagagaaccagcaccgagattgtcacaccataaaataggacatgttgaaagaggtatgccgagttcagataacaaggattgaatccaaatcacttctgaagtggcaagagcaagagccctgtattcggattcagtgctggaccttgcaacaacttgttgcttttttgaacaccagctcaagagattgttgcctaagaagatgctgtagccagatgttgattttcgatcatcaagacagcctgcccaatccgagtccgtgtatccttggatttgtagagtctgaactggtgtgaaagtgagccccaggtgagttgtaccaactaaatatctgagaacacgtttgatggccccccagtgttctgttgtaggactttgcatgtattggcttaaccggtttactgcaaaggttatatctgggcgtgtatggcacaggtattgtaaagcccctataatgcttctgtattcggtaggatggggcaggggagtgcctgaattctgagacagcttggaagttggacacattggtgtggattggggcttggcatcaatcatgttggtgcgaattagaaggtccctggtgtacttgtgttgactgagatgtatggtagtgttgtctctgataacctcaaaaccaaggaaaaaactaacgggtccaagctgttttaaggaaaactgatgttcaagagcagtaataacctggtgaatcttgtgtgaatcagaaccagtgataagtatatcgtcgacatacaccaggagcaataacagagagttgttggtgttgatgtagaagagactagtatctgattttgagttggtaaatccccactgaattaaggctgttttaagagtgtcaaaccatgcacggggtgcttgcttgaggccatatatggccttattaagcttgcaaacgtgatctggatattgtggatcaatgaaaccaggaggttgtgccatgaaaactgtttcttggagctgtccatgtaaaaaagcattgttgatatcgatttgttggatatcccagttatgagttgctgcaagagaaaacatgagccgaatagtacaaggtttaataactgggctataggtttcaaaaaaatcgataccgggtgtttgttgaaagccttttgc

SEQ ID NO: 63813 - DNA, 1144 bp, Cannabis sativa
tttctctctatttttcttccttatttgccaagctaataatgtaaaatactaaaatttacaaaataatttcacttaatttactctatactaccgcaatagtcgcacactataaaattataatcgtttcgcgaccataataatcatttatagtctcacagtataattcatatcatctatgctaccgtttaaatttagtggaaccatctcatttttattcctctttttacctttaccaccaaccttaatattattatcattattattattatattctccactaaaaaaagcagaacatagattctctcatcctctcaaaaaagctaagctataacttaataaagtagtcaaaatcttttcaaacagactaaattacacaattaactaactattaaacacttcgcacatttcattagggttcataatttatttctcattattacaaaaactatagaaaaaacaaaaaaaactccattaatgggaaaaggtccagcggcggcgacgatcggttcctcattagtaccgatcatcaacaaactccaggaaattattgctcccgtaggaaacaattcttcgttggatatttctctacctctcgtggctgttatagggagccagagcagcggtaaatccagcgttctagaggcactcgtcggccgggattttcttcctcgcggctgcgatatatgcacgaggagaccgcttctgctcgtgctagagaatcggccggagaccgatgatgaaggagcagagtggggtgagtttcgtcatttgcctggaaaacgattctacgatttctctaagattcgccgcgaaattcaggtacaaatattttgttgttgatgatgatggtaattttttttttatttatttttgttttgaaatattgtgtatattcaaattttgcttttatttgaattttgcattatttgcatattttttgttttctcatttcttgaaaatgacttttctttgactttagtttagttttattgattatggctgtctaaattattattttcttttctattacagctaatacttaaataaacaaattaattatgatatttgtatatctatatttattttaagagaagaatataatatttactgtaattaactaagggtgttcataaaatagccgatc

SEQ ID NO: 63814 - DNA, 1715 bp, Cannabis sativa
ggacaagctttgcctccctaagtcccggggggttctgggattctacaagaccatagaaatgaatcttgcctacttggctaaatgggggtggaacgtgttgactggcaagcaatccctttgctgttcgatcttggaagtgaaatacctaaaaggaaagcctttccttcattgtgtttctaaaaaatctgattcctggttttggaaaaatgtggtgaagtccaactccattttgaagaagggagcttgcaagttggtggtggatggaaaagatactaatgtttggggtgacccttggatcactcataagaaggagttcatccctctacctattggcacctccatggctgaagtgaacaaagttgctgagcttttgttagataatggaagctggaatatccccaagcttaacaactttttgacaaagccactatttcagctatcttggaaggggtaatccatttggtcagggaaatgataaatggatttggaccctggaaaataatgggcggttctcttataaatcggcctatctcatccaagatcttgacagagcgcctcactgtgaggtcgccccgtctttatggaacaaattgtggaattgtagaatttctgaaaggctgaagaccctgtggtggtgtatcttagctaaggctcttcctcttcgggctgagatctgcaaaaaatttcctattgaggaggttctttgccctctctgtggatcagagaatgaatcaattgagcatctgttcttatcttgtgatgtggctatccatctttagagatcctctcgctggggcatctatcctatttgtggaactagtatccggatgtgggactgggtgaagatcatttggaatcttaaacacaaaggcctcaattttgatgaggtattcctctatgcttcattaaccattgataccatttggcggatcagaaacgaaaaggtacataataatacattgtttgatacttttaagtgtgttgacagtattcgctcttcttttgcagttcaccatgcttttgtgttcccttgcttgcctccctgcttgacggttgtctggcaccctatgacgtaaaattgggatggactccatgtgtatcgcagtaattgcaagggatcatctggacaaggtgaattgggtttatactgctagagtggcttttgcggatgctttatgcggagcagcggcggcgtgttgctatgcgatggaagtagcgatgaattatgcctttaagtttagtatagtggacagtgattcgaggatagttatcaatgctcttaacaggactgagtccaggtgggagcttgagagctatgtctcattttgtaataggtcctctccctcttttatttgttgtattttctcttatgtaagtagaaattgtaattttgttgctcataatgtggctaagtgggcgtacccactagaggtttggatgtattcctattccctcaatttctgaacaccttctatgtaatgaccgttaggtctatctttattttgatttatatatgaacgctttttttaaaatatatatatatatatatattaatggagtaaagaaaatagagcattcttattttttttatttattcttacaaataaagcattcttaaatgtggaatttataattttatatatattatagtacttaattatattatatgtgcaaaaaaaaaaattatttacattttatcatacattttattaact

SEQ ID NO: 63815 - DNA, 2185 bp, Cannabis sativa
ctatatagtatactaatattaataatcaaataattgtaccatgatattttataaatttttatgtatattaatcattgcatgttagttttttttttttttaagtaaattgttattttttatttttaatattattttaatattttcaattaactaacgtcttaaacaaaataataattttaagatatcttcaataaactaacgttaaaaataatttcataaattaaactgaagttaggaataagtaaataatttatttatatatgtttgcacgtaatatatatatcatttatttctttcttatttgatatattttcttacacttgctattttcttatatgctttttattttgttatatagccactctctacttaattttattttgttagccactcttcttcattattcttcattaattaattacattttaatttttcttatttttttctccacttttaatgtgtgaattttttcttttatttttcactcacctgatttattttgatacgttctgatagtaatcacttatggattcttaatttcttatttgacaaaatagttagtaattactacactgaaaaataataatttttagtacaaaatatttaaaatgaaatttttttagtaattacatagtgtaattacaccaaactcttattgggcatgagaattggagagtgtaattaaagtttctcaattacctcaaattatacagtacagtgcaattacatgattaaacaaacacacaaaactgtataattatttaccattacactcaaatccaattccctcttagatttccaaatgcgtcttaagaatgtttaatatcgaatttgaaatgaatatataaaagtaaattttttattaaaaaattattgtctaaagttttaaatataaaattgttaattgtaatttctattggcaatggaaccacaaaataaaaggaaatatatttcttaaattatttttaataagttctaaaaggttatcaacaagatatgttttctttccaaagaaagtattattacaaggtgaaaatataactacttcaatatataagatcttgtttgcatgttgaaatcaaaaaaattcatctctgacattctgggtccatgaagtgattcttcaatgaaagaaatctttaaaggatcattttcataaaggatggaacattagctcgaattaaatcttctaatttgatgttaatgatgtctcttggaactaaaatagtagattccttccacactccattcaccatctctaacaacctataccaccataacacaaataaaaaatattagcggttatgttgtaaacacacactcaaaacaaaactttagtagattttacctcatatagcaataaacaactaaattaaactagaaaccattaagataaaataaatagataaatcacaactaggtttatattggttcgacctaattaatggcaagctccagttcttccaagaggttccactatgagaaaatatctcagatcgatcggagaacatatcatgattgcataggacatagatgagaaccaaagaacccatttacattgaagaacttgaacaatcactcaaccctcacaactctcttctcacatcccatacaaatctcttaaaagtatttcccaaacccctactctcaattctctctctagaatctctgctgctatctctctcctattttcccatttcctttaagttaatgaaaatgaggctagacttcaaaagatataggtattgatctgcaacaaaaaatacctagaaagacatcatttaatgaatctgtaacaaatcttaacaactcaaaccaatctgacaaattgttagtcggaactgttaggtttatgagaattacaaaccacatgtggctaataaagtaataaaatcaagattagcgtaactaagtaggatttaggaaagttaatataccacattttgaaactgatatgtgaataattttttagagtacgtgcaaggtataccaatacaattactaatattataaatttaattttaaaaattatcaaaaatgtctatgtttctcttatatattttaacattataaaaaattattaacgattcgcaaggaactaactcatagcagtattgggcaccactaatatatacctagttctaatattgtgggcaccactaatatggagcactagaaatctatc

SEQ ID NO: 63816 - DNA, 1194 bp, Cannabis sativa
gtaaaataatttccaacatcctctactatcaaatcgaggagatgaacaagaccaccttcgctgaaacacagctgagggaatgataaagaactttgaggctacaacctaagagaggccaagactacatcaatattcacataaacttttagtgtgacaagagagtcaatgctaagacaacgaccaaagatcagagtaaatgttaacattccaacatcaatatgattttacagtatatcaaatcaaaggaaattactcaaggagtcatctaaattttaaatttaaatggaaaagataaatgatacgaaaagatgatcatctttcctcttctccttttatacttaaattttgaattccactattcaacaaggggtgagaatttgaaatcctactctcagtgggaatgcttgaagaccaaaaaaaattgtccaagattgttaaaatttatgaccacctggtagtttcaagagaaatgggcttagttcacgtcattaagtcaacctcacacaagtgtaaagttgacttggggggcaaatgcttacaccaaaactagctgtgatgatgtggacattaatgcttaacacgtggcaagaaagatgacatctcagagttgagtagtcccgagtcatagaaagtcgacctgggaggggtccctagccccgcgcctaggatgacttcatgaactctagaatggaagtttggattttgatagctcgtttcttgctctctatctttcagtattctataccaggaagacatggagcaaccaaatcaagcccttagaaggtgaaattacacaaacccacaccccaaaagccaacctagccacctcgggtttcacccagcgcccaagttgacatttgcaactaaggtttcagtttttaggaccgtcttagtgcaaatgggtcaaaatttacattggaacatcaactagaaataccacggacatatttgaggcatcaaaattagactcagagaaagttcatttttgagcacccagagcacatgcccgggctccgaatgcctaggttgacaatttgtcaatctgggtgccttccaagtatcaaatcgacaatctgacttttccatcttcttcgtcttcatcaaaaatggccaaattggtacttttggggaagaaacaacacttcttgggtgcctagagcccatgttgtcattttgtcaatttgggtcaattct

SEQ ID NO: 63817 - DNA, 695 bp, Cannabis sativa
ttttaacatgtttattttaatattttaatgaaatataatttgagcgtattgagcgtatttttgattaatggatacaaaaaaaggtatttctcaacttattccaaaaaaaattgtgagtaaactaagaattataaattattttaattctaaaagtagtttctcaaaactctttttgagagaagctacaaattctaacttaaagacttaaaaaaaaaaaaaaaatccttcattttttatccaaacacttttagaagactttttaattctaaaagctaaaaaaactttaagaaactaagtgaaaggagaccaatttgttgagtccaacattgagtgctatgagatgcaatgataaaataggactttgcttcattgagagattgacactttcacgaacgaacagtgtatttcagaaatttatcttatctcgtagaagaggacctgtacctaatatacttgccctatttgaatgtaaaaatattgctacaaacatgtataaaaggtttgaaatttcagcagtgagagtggggatcgaagacacatccaagtgatatatatactaaaatcaactccacgtgcatgttttattcacaaaagtagttttctaattaaagttttattctgttttttgatttttttcaggtggaacttcagtattatattgagttgggagcgttgttagaagatgttatagcttt

SEQ ID NO: 63818 - DNA, 1363 bp, Cannabis sativa
atatactttgaaataacttggcattattgcatatgtgcctagtggcacccgaatcaataatccatgatgtatcaaaatatttagatgaaacataagtaagaaccataccagaattacccgtggaagtgtcaggatcaggggtattgatgtttatttgttgattggcaaggagattaagaagttgttgatactgatgtgcactgagctgaggtaaaaggatgtgagtgtcttcggttttagctttattttcttcactggtctgaatctgatttgtcacaacatccttggacttgttggttttgttaaaaccagggggataaccatgaatcttgtaacatctttctatggtgtgaccatgaatgttacaatgggtacaaaaaggcctccctttcttgggagcatgagtcttttggttttgatttttggtttgttctcttgtctccttggaaggcaaaagcatgactggtattgggattgtttccagcagagctatttcccttttgattctcttcttgagtgaccaagtgaaaaactcgattgacatctggtaaaggatccattaacagaatgcttccacgaacttgggaaaaattatcagataaacccatgaggaaggacatgatatattccatgtgatgatgctcttgcaatttcttgactcccccacaagtacacccattgcaagtgcaattcggtctgtagttcgccaactcttcccaaatggttttcaacttagtaaaatacatgctgatagtttgagcttcttgctttagattcatcaaattctttctaagattgtagatatgtggtccattcctttgatggaatctgactttgagatcattccagatattggcagcggattcatcatacagaatacttgaggaaatctctttggaaacagaatttaaaatccatgatatgactatattattattcctaacccaagcattatacagtgtataatctgagatcattggtttaggaatagaaccatccaagaaacctagtttatttttaacagaaacagaaagttgcatagctcttgaccaagaagcatagttatcttgaccagtgagaagttgagaaacaagaatattacctggattatcaccatggtgaaggtaatatggatttgtggggtcctcgagtggatttctttgattagcaaactgtaattcttgatttccatgtccagtcgaagcagagggactttctgtggatcttggtgcctgttcctcactttccatttgagtggtagaaggattttcacttgacatgggagatgaacagaaaacagagacagtaacggagtggataaatcgtcggagaagaagagtagaaggcacgacgataccaccgg

SEQ ID NO: 63819 - DNA, 1607 bp, Cannabis sativa
  modified_base (26)..(29): a, c, t, g, unknown or other
gttcagagggcataatttagtacatnnnnaaattcgaggggcatgatttggtagatatcaaagtttaggagcatgatttagtacacaaacaatctttaaaatagtgaaattaaataaaatttgacaaaagtccttaaatctaacaattttaatagttcagtaggcataatttggtacatatcaaaatttaaagggcaaaaatcttaattagccaaaaaaaaaaaacagtggaatgatgtaaatttcccattattttgtgcgccaaaccaaaaacatgacttaaaaggtacattttttttttgatggaaaaacaaaatcaatttataagtcaagatatatatatgcatggtcctgtacgcactcatataccacattaatactattaaatgcttaacttaattaaggtcaagcttttctcagtcaatatccagcaacttgttctttcgaaaatatatctatatctaatataattttatatggaaaaattatatatatataataaatagattctacaccaacttgtgtagctagtaaatgttcctttaaaaattatattggatttataatatagtcttccacatccacaaaccacttttaattaggagatccaagaagatttgggcatttgcctttctagtttattggattagtgattgataatggagattttatgacattactcttcacgtttatttatatactttttttttaagaattgaaaatatataatatgaattttattaattttttagattggatgtgatgatccactaccgttatatctcaagaaattaatagtagtagtagtagtaaattaggacagttaggtgtgtagttaactacacatggtttaatgtacaaaaacatgtgttacacaaataattttatgggatttgataaaaaaaaaaaaaaattgtgtatcacactcttaaacgttttcaatcgagggaaatagaaattaattgtatagaattggtttctatttagttatttattaaactagtggaaactcgtaaattaaggagaaatgaaatgaaaaaaatttcctaagaataccattttttttcttaactttatttttattaattaaaaataaaaagactaatatgtcattcaaaaatcgatacaatatttttaacaataacaatttaattaaattaaagtattttaattattttttttctagttatttaaataaaataaaataaaatattttgattttctttcgaaacagttcagtaaacaaaaaaaaatatatatatattattttatattttaaacctattcattttttttttattacgatttcaattatagtttaataaatatgccaagttaaactagcggtaggagaggatgagcataaaatgtggtggcctagttattacccttattgtattgactgaagttattcatcaatgacctaatttccagcatttctaatcataagaacattaaagtagttttcttttgtaaataaatttaaaatacattaattagaaatttactttttgatactctcttaaaaaaattctctctttaaaaatggtttcctctcttccttttctcttaagctttggctagggttcctaatgctcctgtaatga

SEQ ID NO: 63820 - DNA, 832 bp, Cannabis sativa
taattttttatttttaaaaatatactattttattctaaatcatgtatatactattttattttttattttaagaatatgaattggaagaaaaaaaattaaaaaatttaatataattaaagatataaattttatatgaaataaaaattattaaaattaagtgtctttaaaattttttggggtataaataaaattttcaataatttattgtcattgaccaaagaagtatggtgttataacaacaatgtttagattcctttagaaaaaattaataacaaattaaaaaaaaatgtggcacaactatgacatgccaaggagtgacatataaaaaaaatggcagatgttgtttaatgataattaatttctctcttaaagaaataaaaataaaataagttaaatgaacatgtgtctcactttctttgttcttgtttttttttttctttaaaaaaaaaatgtcattgaaattttaagagtaaactcaatgaaaagaaactcaaaggaaaaaaaaagtatctaaaaatttccctgaactttgacatgtaccaaatcatgcctattgaatttttttgattgttaaaaattcctcatgaactattgagattgttatatttaaggacttttgtctaattttagtaaaagttacgagttttttcatttttagcagttttttatatatatatttttacaaaaatttatatagcaacctatatagtaacaaacagaacaagttaaattataactcaattaatccacatagtaaattatataaaaactatcatagtgttgctcctaaattcgcccaatatacgtggaccagtcgagaggggacacgtgg

SEQ ID NO: 63821 - DNA, 1951 bp, Cannabis sativa
tgttgggtccctgcatagggacctaactcaagtttattattagattagctatgagtggccacatcatcaatcaattttgattttgatctactcatttcttctgttttgatactgcaaatgtacctgttgtattgtaatataaagcttgatcctcttttcaaagctccgcctcttaatgagttcacgcgtattgaattcccttttaatgtcttgaaacacacatgtttctaaccaagcctgaaggccgctgctcaatccaattgagccactctgaaaaaactcaaaggccaatctgagacccccaaccaactctctgcagcccggataacattttgcaaaaacaaacactcaaacacatgttttcaagaggtgcttgttattatcaacaaaaataatagtctgctgaatttacaccaacttaatctatgtctagggagactcaatttacactaaactgcttttgtgtacaaaactttctcttctcttgctgaatttgagagtatgaaacgtaccttataccgttcctccttgtacattcttcatacctatatttttatcagcagacccgtagtataccgtaatatattttctttttgggaagaaagtcaaacatacttattatattagggttgcagaactaggttcatttttattttaatacattcctaccactttttttacagtcatttaaaatatttcactaaaactttatctgatttttaccatttttttttaaaacttgaagcttcattaaaagaagaagaacaaagctacaagctagtacaaggaagctaaagaaccatttcaaatcaactctttatctaatcctaagcctaattttgctaaactatgggcagagatattcaaatccctgttaacataagcaatctgaagaccaggactaacatgactaaaagacaaagagttttaacacttacaagcaaataatgaaatatattgttcaattacaattattaagcttatcaactatgcttttgcaattcgtcttgaccacttgaacaggcagcctaacaaaatgaatccagttaaccgttaggaggacagcctttgcttttgcaattgtaggagtaacaacgccaatgaaaggtttaacaaagcctgcaacaatctggttagaatcattaagcacaactgcacttaaactataaatcctcctttcataatctaaagccgcatccgtgaagacttgataccatcctgatggacaacccaacgaaattgatgagttctgggcaagttggtcatgagaaggaagctgcttctgttgtgcatctaagtactgaagcaaaaagctattacaccatgcaaacatttcattaggagctagagcaaatcgattataaaaagcattgttcctttgattccatatagtccacaggaaacataacaaaacatctgcagaatccttatccaaactagcaaaaatattagaaataaaatacataagatcaaaatgtttatttataagataaaagtgagcaaagtctgaattcttccaagctttcctagctctagagcactctagcaatgcatgcataatggtttcatggtatatattatataagggacacaaatgagaagggataatatatttttgaaaaagtaaggcagccacatggatagagtttgtaataattctccacacaaaatatttaacttttggagaaacattagcatgccaaactttagtccaaaaggtttttgaagcttgaaaggaagaagtagaggggatatctctacttgcaagggcgaagtgatatgctgattattagtgaatagaccagaattttccttttcccaaatcttctcatctttaccattgattcctgaaaacggaacatccaaaatatcattgaaagtaaaggcatcaaaatcggtgtaaagtttatcaagattccatgaaccagaatgatcaataaagtatgatagt

SEQ ID NO: 63822 - DNA, 760 bp, Cannabis sativa
gaagaacaaaaatgttcatccagtaatttctcagaccaagcaacacagtatggataagttggatcctacctgcataggaaagatgcctcgtagcccaagaatgcaacctctttttaatcttgtccacaatagctccacaatcttccattctccatttagttggtctcataggcacacctagatatttaagagggaacctaccttcctcaaggtcaatcattctggttatctcattttttgttgcttcatctacccctccaaagtagatattagttttagtaagattcatggataaaccagtactcttactaaaatcattcaaggcaaccttcaagtgattaacaacctgacttgtacctttgcaaaacaaaattagatcatccgcaaagcatagactaatcagtttgaggctcttgcagagagggtgaaatctgaaagtaccttccttagactcttgcagcaaccttcgagtaagaaattccataaccaacacaaacaaaagaggtgagattggatccccttgcctgagcccctttttgcctttgaacttgccttgaagcctaccattcatcattaaattataagatgtcccttttaagcatgtcataatccaattaacaaacttagcagaaaacagagacagttcaaccatctttctaagaagctccaatcaaccgtgtcataagctttgctcaaatcaatcttcagagcacaatgaggagacacattctgttggaaattttttaccaggatcttagat

SEQ ID NO: 63823 - DNA, 966 bp, Cannabis sativa
tgaaaagctaatgtacaagcttcagtttattcatttcgattatgcccctcccaatggtctctccgggggattgggaatctgttggaaagcaagggtaatttgcaacattcttgagtcggggaaaaatgcgatctgtggaacgattgagtctgaccttccaggagttaagtggacctttttggggatttatggccccccttcaaattcgggaaaggaggttttctggtctcgaattggggacatggtttctaagagtagtactcctatagtcctttttggtgatctaaatggtacactggcagattatgaatgcatcaattatgtgaacaagaataattcagcaaggtattcgtttgatctcagaaggatggtgagtagaacggggcttattgatttaggatgccaagggggaaatttacgtggtaccaaaaggcttcaacaacccacggaagtgctgcgattaaaagagcccgtcttgatagagctcttgcctcaactgaatggcgcattttattcccaaatgcgattgttgaacttctcactattagtacgtcggatcataaacctataatgcttaacacggaggggggcgcgagatgttcaaaaccacagttcaagtatgaattgatgtggggaagagacctgaggtgtttctgggtagttcgaaatgcttggcgtgaggagctccataccaacccaatgattaatttgtatcgtaaacttaaaaagacaaaagaccatttacagaagtggaacaagacccagtttcggcacattagacatcaagtcgacgaagcgaagttagccttggaaaaaatagagttaaaagatcaaattcaggaagaggccttgggggaaaccagggcgaaccttagcgaagctctcactaaagaagagattttctggaaacaaaaatccagggtagcttggcttcaacagggagatagatgcacgaaatttttcatg

SEQ ID NO: 63824 - DNA, 1016 bp, Cannabis sativa
tccctactcgatgtaaatcaaatatagaggatctttggctatttagattgaaacaataagtaattcaaattgtatctatttttggtaatagagcgttctatgtaattaagagttcaattccaaatctatagtggagtcagaaggacttaataagttaggaaatttacttggtaaattttggatctacttattgaaagcttgattacataggggcatcatccatacactaattgggataatattgttttgtagtctcaattaattagttttaattaatcaattagaattttaaataagactatgtcttgtttgtgaattttcaccaaagaagggcttaattgagaagaaaagtatatttagggtttatttgttaattaaaagactttgttaggtctaattaataaatatatttaaattgtaattttatttgataattatttatattattaaatagatagaattagtatttaaataactagagcagaaaaatgacattattgaagaaagacaagtttctttcattaagaaaacaaaatattggcaaaattctaactcatgggctttactaaggggttcgaccatgagatggattctaagccattggatctttccaatcagcccattaagttctaaccctaaatctaatgaatccctataaaattaagggtttttgattctatagaagactctagactctctcttctctgaccaactataaaaagtccttagcttgcagtgagcaaactaagtgtaaaagtcggatcggctcaaagaacaagtgtgcgagatgaccatcagagcgaggctcacaaccctggcaagtcagaagatatctttataaataaccacgatcgacgcaagacatatattgtcgacctcggaaggaagaatgaccctagctcgctattggaatcattataatcaagtttctgtcgagacatctccagattcaacagttaaagacgtgtttaatacacgatagttttgaccctgtaaaagtgggaaaatcacagcta

SEQ ID NO: 63825 - DNA, 933 bp, Cannabis sativa
atataaaagaaccctccaatgtagtgatagaacttctagaaacaaaaacattagatttaacaaatttggtattagatttggattgagttaaaacaaaatttaaaccaacatgactcgtttcacctgaattttgaatctttttaaaaatattggaacctagatttagcattttgacatttattttaagattttaaagttccttagttaaagtggtaatttcagaatcttttaaaataaattcagatttataatatttatttttctcttcaagatctttgatgttgtgacataaatctttattgactttaaccaaggaacgatctttagcacaaatttctaacaacttatcaaacattaccttgtaagatttagccaaagagttctcatcaagttctgactcatctgaatctgatccattttctttccctttgacatcagtcaaagtgttattcaaacatatgaattttcctttttcctacaaatcacttgactaaatacttgttaaagaaactttttcattttcatcctcactacttttagaatcatcattccaagtaacattaaaacccttttatttttctttaagatattcgcacattcagattgaatatgaccatacccttcacattacctgcattaaatacctttttcattttagagacaaaaggtttagaagaattgttacctaaattgttacctcttggagttattggaaaattctttttatttccaatagatttcatgtatttttgaaaattctttgtcaacagggccatttcataatcagaaacattattttcagaaactttaaaagtaataccttagcttttctcagtcaagactctttgcttactctttttcttgatttgttgatttaactcaaaagttcttaaaggacccatgagctcttcaaccttcattttgcaaaaatct

SEQ ID NO: 63826 - DNA, 669 bp, Cannabis sativa
ctttttaaaagaaattatatatttctcttttttatattttttatattttaataaatttttttagacattaccaaacacacaataaaaaaattatattcatattcttttgttaaataatatacaattatatttagttttgtttattaagaagaagaaacttcattaatatactcacaaatttacaacatcaatcgggcatactacttccaacacataccaaaattacatgttctttaccaattttaagttattttattcctcttagacaacttcctctcattaacaaagctatactctttcttaactatggtatctatccaatgtgaagttatgttcaaaaacacataaatttcagttcaaccagatgtaataggttgctccagccatagctgcatagaaaacatcagcaactaaacttttttatcaactgctattcaaccattgaacccaatcatcatatgtactcggccaaaggttgttgccaacgcatctcccaataagttacataagttgtcatgaatagggacaagagaaaaataaatgcgaatgactctccaagtctattttgcaaattggccaaagaggagactcaataagtacatgccttaataagattgtcctaatcagaagatgagaatacaaagcttgccacacaatgaacgggcttaa

SEQ ID NO: 63827 - DNA, 1248 bp, Cannabis sativa
cctgaacggaaagtcttgtgcgaagtggatgccctaatcacataacgaaactgggtaaatcacatgatcaaaaaccctaatccgggaaacccaaacccagcactcttggttcaattatactctctagggattactccaactcaggaaatagggaaacccccaactaaggcactaaaatgcatgagaatcgagaaaattgaacattcgaggaaccctgcaaaaacggctaaccgattttactggtattggtaaaaccggttacccggtttgcaccagttcacccaaaaaattctatttcttgctcaaaaccgcaccaaatgcaaccaaattttctagaacacctaaacaatgcataaacaatattttccaaccagtaattcacagaaaatctcaatgaaacacaacatgccattagagacctaagctttaagtttctaagctcaaacttgagcaaatccaacccaataccactacaccagcattcagaacttaaaatcaatccaaattaaccctagaatttgaattacacatcaaccaaaccctaacagctctcaattatcaaaatcacatactcaaacttactcaaagcttcaaaaacacataaataaaggtctagggttttacgtttgctttagattcacaaagaccttgcttaatattcaaaaaacaccagattggaagatgaaatccccctagtttgcttcagccgaaagagaaagagagagggttctctatttttagttttgtttaattttccttgaattcctctaagtgaaaagagtttaatctctaacttaatcttgctgaattaatttgctaggtgtcacccaataaggtagccaccaaataatttgccttagtaaattaataaaatacccttgttacataacttaagcctatttcagacttagtgttaaaatggtcaaaaaccataaccccgcacaaccccggtattctattttctcccataaatttcccgctaagaactaaggttctaaactaacccatgtgatcaagctagccatccatcgcatttttcgttgtcgccgagcacaaattacaaaaataatataattcacatataagccaaataatacccctagagtttaataaaatctctgaaattaagaaattataactctaatgctcattctaatactagggtccacaaataattaaattcataaataattataaaaatatcagaaattagtgctaattgcctttactaattcaaattactaaagc

SEQ ID NO: 63828 - DNA, 847 bp, Cannabis sativa
gtgagtcaaaaataaaataatactggtaaaaaaaattaattttggatctcttctttgttaaaaaatgtgatataataatattaagatatctttattgtcactattttccttgttttttatttttataattactttttgttaatcttgaaaaatccttaagtacagataccaaggcagtgacaaatgaaaagcaaggagaaaacgaaagaggcacgaagcaagcgactcctcagcaccgtgtcgtgccgcccaaagcaaggagcctcgctcctcaccgtgttgtactgtcgtgggaccaaggctcagtgtcttgtgatgttggtgccctagaggcaccatgccattactttaaagtggcaacatgtcgctgatgcacatggtggctccatgtcgtgccctttcaatcaagcaagatgaaagtctcactgaaaccttttcctgtcattccaaacaaatacaagtttctctcctacagccttaaacaaagagaatatctccaacaaccaaagaactccgccaaaggtatggatgccacaaagtaagaaaaggagaattttatcacgttagagcaaaatattatttatttattttcttaataaataattatttaaaattaatatttaaataaattaggaacgcaaagtttgtctagagaagacaagatatcaccaccttcgttgttaagatgagggataacgccacctgtgttttatacacaataggttgtgtctattagattttgtatcctaaataaatctctatttcaatgtaatcttgaatatttctttatcaataaagaaacagatttatttcattacttgtctaatgtgttatttggttcacatgt

SEQ ID NO: 63829 - DNA, 739 bp, Cannabis sativa
  modified_base (690)..(714): a, c, t, g, unknown or other
tttcagtttatacatataaattgtctaacagtgtgaagtatttgtcctaacaaactacaacaaatattacacacgtatctgtataataatcttttaatatagtttttttttcataacaatattttaatataatttatgagtaaacatattttatttaaaactcaatttactagttgatttataatatgttatcccaacaatcatcagcttcgttaaaaagatttgttatttaaccagaaattctagaaatagaaaacgacaactgaaatgtcatcgctattagttaagtgacttgtttcaattttgactttctactttgtagtttgcattaaaaaataaaatattttttttttacgaataattaccaagaatagagaacgacgaagaaagaaataaacaaagcattctctaaataaatcaataaataaagaaaattgctaaaaagtaatattagtggtattttgtaggttttatggtgtaatagaatattgttattaggtattagtggagttcaatattttttattggtacttcttcgtgattgtttagtaatatttttttaatgtttttttttttaatatgcgatacttaattataccaataacagtttaacactgaggagagtgttagacaccaatagcaaagataaataaacaaggaataattacataaggcaccattttttgtaannnnnnnnnnnnnnnnnnnnnnnnnaatgtttttttttttttatattttt

SEQ ID NO: 63830 - DNA, 598 bp, Cannabis sativa
  modified_base (566)..(569): a, c, t, g, unknown or other
tgaagcggggacgttacaattatcttgtaccaggattttagtgatttttgtttaagttatgacttattttgtaccttgtatggtagtagatatatgtgcccagtgtagcttgtatggtaccatttttgggtgttcattttggatttatcctaaggttgatgtgaagtatcagtgtcactttattcgctccatatatgtcaaagataagttttttctttataaaatactatttgttgctttttgatatctttggtagaaatgttgtgtcatcttgacatatctcattcgcaaggcttttatgaagggaaatttatatggtatactaacttttgccattttcttacaaaaatactgtctggcggcaattttttcatttttactgtatttttttaaaagttttatactgctactgccttttattaattttttttgtcatgttttggaaaagacaaaagatttgatatagatataaaaacattttaaaaagctttttaaataaaatttttgagttgatatatatatatatgagaaaattacacttattatgggattttaaaagttcttannnnaaatatgacacatttaagtttgaccaatt

SEQ ID NO: 63831 - DNA, 671 bp, Cannabis sativa
aatatattcttggataaaagttctgtatatatattattgaaaatttgaaagcgtggttaagggtgaataagatatctatcttgtgatggtctttttcttctttcttcaaacaacgaatacaatgcgttgttgtaatgatgagctgcccttttattaaagcttatacactttacatatataaattggatacgaccgacaccgccaccgtcttccactcttcacaagaatacataatgttattataatttagtatatatgtattaatgtcatgtcacgcaaaatggctgtactgttcatgcgcgcttataatttcgaaactcacatgccttactcttacatgtgtgtgatacatgcataaatttattcatatatataattatatagagctactctttcatgaaaagtttaaactaatatgtacttatcataattatataaaacttctgttgttcgaataaaatatatatatttttaattaatagttcataattaatgttaaattttttatactgaattgtattatgtatattaatttatatataattattgtaagtttaatatctaaaaacttagtacgaatagtacggtcttaattaataatatttttttaaaataaaataaaataagaaacttcttaataatatcacctaataaattaaaaaccaacaaat

SEQ ID NO: 63832 - DNA, 2288 bp, Cannabis sativa
tataaaagaaaaaaaaaagggaggacagtataaatgtaacatctgccgtgtggcagtaaaattgaaaagtattaatccaaattcagtatttttgtaaaattgggaaaatatggcatgtaaagttaatgccactaaatatgacattttataaccaaactaactaaacgtatgggcatttaaattaaaaatgccataaaaaatatttaaaaagatgattaatttttcaaaataggatcacgctctctccagccatacaatatttgttgctctcatgcaatttaaattgcttagtttctcatgcaatcaaaatcaatcatcaaagatcattcatcaagaaattgattttttcatcaagaaattggttgtttcatcaagaaattggttttgattatgtaaaagtaaaatttataataaaaaaaacttataaatccagtgttgactctataaaaagataatatgacaaacttataataaaaaaaaaagacaaaacacaataaaaaatgaagtaaccacatcacagtaaaacagagttgctcgaaaaaaaacacaaaaatcaaactactctctccaaccacacaagatttttttctctctctcatgcgattcaaatttcttagtttcttatgcgatcaaaatcaatcaccaatgatccttcatcaagaaactagtttcttgtttcttcatcaagaaattagttttttcatcagaaaactggttttgaatataaaagtaaaattgataataataataaaaaaaaaaagacaacccaataaaaaaaaaaaaaaagcaacctcattacagtaaaatagaggtattacagtaaaacagaggtgttcgtaaaaatagtaaaaattattctataaatctgcttaaaaataaataaaaacattaaatatgggctttaaaaacctaatttacatatatatatatgacatatcaaatacaataaaaatatttaaaaaaaaatatcatataaattagtcaaatttaaaaataccatatttaagtgaacaacttttaaaatctcatgaatgtaaattcctttatttttataaatagcccaactaatatttacatgtttctaagttttctttttcaaaataaataaataaataaaaaaatcctatattcacatgtttctaattcatgttgtcatttgtacattttattttcattttatgtgcatgaaacttatttttaagggatgacataatataatcagtaatagaatccctatttctcgtggaaaagagcatttaattgctcttgtttggagaaatgggaattccattaatagctatattatattacacactactgaccttatagattaattaattaaaggaaaattttaatttttatagtttttatggcaaaaatttaggttttttaaaaaaatatagggaaaacaattgaagctactagttagtagttacgattattctaaactatctttttcatattttttttttctttgagccattttccataaaataatatattttttaaaaaaattatattttatacacattgtataaaaaatcataaaagtataaaatcatttagactatattaatcaaactacatcttcaaggggtgcttatcttaaatttcctattaataaatataacgtatacaaaactaaatacacttcactaacttgatttgattgacactactttaaaataaatattaaaattatacactgctttacacaaaatatctttggtgtatgatctcaatattaaaaattataatgatatcaaattgttttgtatataaacctaaaaaatcagcacttaaaagacaaccaaccttttttttttcttccttagtttcttttgatgaaaactcaattttgaatttaaacaatttgttttgtttgttcacttaccaaatttggaggcatgtgacttattgttacacgaatcatttgacatcaaatatttgctagcatatgctaaatttcaacaaaataattattaacatataccatctctcctaatataataattaaacatattaaagtaattggcctgcattatttgggtaggacccattaatgaaacaaacaaaacaattgacagagaattggatattccaaaggaatatgttatgagtttatgtttgttccattacggaaatttatgaacaatttgaattatatacaagtgtataaagatatgggataattgcggcaaaagtcctcaaaaatttgggttgatgtcgattagtcctcaatctcaaaaattggcggtgaaaatacccaaggtggataaagttgtttg

SEQ ID NO: 63833 - DNA, 875 bp, Cannabis sativa
  modified_base (568)..(572): a, c, t, g, unknown or other
accgctcttccgatctgggaaaatgtggaccatgtcagcttggtaagcaactgaaaatttctcacaagagtgttcctgatgtgaatacttcaagagttctcaaactcctccacatggacttgatgggtccaatccaggttgaaagcttgaatggtaagcggtatatttttctgtgtgttgatgatttttctcgattttcatgggtggattttttgaaagaaaaatctgatacttttgaagcttttaaatccttgtgtttgaaattaagagttgaaaaagattgtaacattggtaaaattgttcgcattaggagtaatcatggaaaagaatttgaaaatactatatatatgatgagttttgtaaatctaatggtatttctcatgaattttctgctcctaaaactcctgaacaaaatggagtggttgaaagaaagaactgtactctaacaaaaatggctagagtaatgttgaatagcaagaagcttacaaggcatctttaggccgaagcaatcaatacggtttgctatactatcaacagagtgttcttacgtccaggtactcacaaaacnnnnnatgaaatctggaaaggtaagaaaccaaatgtaagtcattttcatgtgtttgggtgtgtttgttatattttaagagatcttgattacactagaaaatttgatgcaaaaagtgatgaaggtattttcttaagatattccatcaatagtagggctacaaaaggaacctttcggagctacaaaagcagctactgaggctacattacaggactctattgctacagaaacttcaacaacaaaagaatccgagcattcttcaaattcaatcattgatccagtttagagggaaccatcctccagggttaaa

SEQ ID NO: 63834 - DNA, 1511 bp, Cannabis sativa
ttttttaattttttttttcttaatgtaactttatttatagttataacctctcaattagaatataatttacttggtcccaagtgtatttttggatagaggttctactgtatctagctttttctctcaaatttgccatatcttttactcaagattctgtccctatttataggtttataggatgacaattattttttcttgggatcgtatcatccaaatctgtttatgaaacgtggacattctccccatttcatttttatgtacatgggataatatttaatagccatccaactgctcttttatcattatccttaaacggttatgctgactatgttggttgttccttgctaagtacgagttgttcttctttaccatctttgtagaaaaaatgctaagtatggatataacgctcctcccagtcctcttttaccatggtgatattaacgaggtggttacttcaatgtatggaagacgagacagatgaatatagttatcctctccacatacaaatacgtggatcaattagttgcaagctcttatttccaagtatgtgggtcaatgagctgcaagctcttaattatctcatcttgaacaatttttattatgtactctgtctatctcgagatggacttattatcacgctaatctcaatggataatagttattactcttatctcgtatttgcttacgtgggagcgagtttgaatatttctatcgactgtaataccttaggcaagttatttaaattgtatttaataatgcatttattaaactcattcatattttttctgaggtacacgtatcaacttctggttgttaaccgaattttgagtataacaataaccataattcaaaaatcattaacgatatttttttgatagatttattaatataacataattaaaaaataactataatatataaataatattcttttcatttcttatatttacattttaatatcaaactattattttcaaatatatataaaatacttttattaaaaaatatcattaacaatattaatctaacataattcaaaaataactataataaaataataatatatttttttcatttttcaactatttttaataatataatattaaaaaaatattattctaatctattattttacccaacattctacaacatttactaacatgataaacttctagagataaattattattttattttctaaaagatagatttaataagtcacagtgaatgaagtattttctaaatattatattctatacatatatatatcattgatttagctacaatattataagtgtacaataattataacaactttgaataatcagaataaaaatgatccttaaaaagaagatcgtttcatattaaatttatttaaatagatttaaatttaattagatatttaatacttaactaaccttccataaaccatactatatttttatattaacaatttaaaattttatatttagattatcatataaatttaaatatattaattaatagtaaca

SEQ ID NO: 63835 - DNA, 1992 bp, Cannabis sativa
  modified_base (868)..(875): a, c, t, g, unknown or other
agcttttaacgtcatgttaggtcgaccagctttatatgacctgaaagttgtcacatcaattttccattcgtgtgtcaagttcccaacaaagaatggggtagggtccctgaaaaggaatcaaaaaattgcacgggagtgtaataaccttgccctgaccaaggccaaaaaggaaaattcctctggccaaagtccggacaaggagaaaagtatttcccaatagaaagtcacccaaggcagggatgaggatgtgataatactggataactgcttaactacttattattcttatccttatagatggctaatgctgatttatacaaatgtatctcgcttaaatccgagttgttatcctcgactatcataatgtggaaaaaacactaaatgttagcagatggttcgcctcgtcaagtttctttagttagaatcgcgaggtggctgtctcgctatttgtaacccgaggtttctttgtatgattgtattcagtctactttgaataaatgaattatcttctttggctatacactctgaggcaggggtgtgtcttgtcaatataagtttcaatggtcttttatccttatctcgcttaagactatgtagtcagcgagttatgaatattttctattaatcctttattaacgagttattcttttttgcattaaatgatataattttattatatcaggtggttcatattccactgcaagacacatgccactttctgaagtgtatctgaattttggatataacaatcgccccttaaaaagttcttttttaataaaaagatctttttaaatgattacaagggtatttttgtcttcatcctagtttgaaaaattacatgctttgagttttggcggttcatgatttnnnnnnnnatcattagcattaaatgcccatcttttccaattcttctgtgttcccatccgttagatctttattcttataatctaactgtgatcatttcccaggtataaaagtcgagaacagatactcatttcaccatttttgccttccaaaccttcaaattttctacaaaaaattgtttcgattatttttcttcttccatatttgcaagcgctcattatccttgacctattttctgcgcgtttcattagatttcttcttcaatctcagagaatctcagaactcatccctccagccctcgacgagttcttcatttcccaaaaacctttgccaaaatagtaagtggtttatttctttgtttctacttttccttttcccaaaatttctaaccttgtttttgcttttgattgtatcttcatttagtgtattaagtttaggcattttttgatttagtttttgaataatttctggggttttagggagagaatttacgtttacctaatccataggatcctggtttggattgaatttatttcttccagaaattgggattattcttttatgtcaaaatgtcccaatctagttttgaaatttcaactctagattttcttgaaatagaatgccctaaagaattagcttttccattcaaacccaaaatccaaaaacctaaatcaaaacttgagattaatgatgccaaaattagagatcatctaataaaaatcaatcatgatgaaatttctagacgctataggcgatttttataagaaataactgagggtaaacgtcgttatctatgagatgcagcttggcctcaatcccaaactttatcttctatccctttagcgagacctttgtttttacctcgagtcactgttactttttcatcaggtgacctaaattttgaaattatgtccaccaagactcataaattaaagaccccccatgatcctaatgtcacttttaaggctgagcttattgaatccaaggtaagggccattagagactatgttggtggtgtattaaagacttgcggcatcaagcaagggcgaggatgctgcatcagatctgttgctcctggggaattcagctactttctaccagaaagagtaattcgcgaggagtgtggtg

SEQ ID NO: 63836 - DNA, 1741 bp, Cannabis sativa
gacaatttattttgtcgttttgtggctttttttttttttttgaataattgtggctttttttagaaaaaataaaattaaaatcaatttatgtacttgttgttttaatattagttagaccaaatataataaataagtttgacatatggaagttgaactttttattttgaattaatttttttcttcacctcattattatactaagaaaaaggttttaggtcatcgttgttttaaaccgtcgcctataatattactgtctgcttataagaccaacaattatgttaccgatgtaaaatgagatgaaataagtctcggtttgaaacaattaattattgaacattattaattgattgtttaaaattaacgttatagaagagcgttagttatgagcaaaaagtattacagtcgatttagaagcaacgataataaaaaaaaattaaaaaaaaaacattcaaccaaaaaacgaacttagatccaaaacacacgaaaccctaattaatcaataaacacaatatattatcaacaaaaaatagtatattcaatttataatccaaaaaaaaaatgaaacatccacgaactcaaaactgcagtgaatcgaaaacacaaaaaattacaaacaaaaaaagagatttcgttgtgagtgaaagagagaaatatatgaggattactcattttttttttaaaaaaagtgatattatcatagttatcatataaaatctaaaattctaataaataaaatggaatcattcatattacaatttattaattacataaatgatgaaaataattaactagtaaatttgcctttttattttatttttatatgcagttaattagtcaaattcagatccttacaaaaaaaaaagtcaaaaattgagatggcaacattttgtcaacaaaatcacccattaattacatgtattaattacataaaatatgtgactattatataactataactatagataaaaacatagagcaatgcttaaaattaaatacacattttttaaatttaatattataactatataatatattagctaattaaaatttttaccaccaaactttgatatgtactaaattatgtttattgagttttaaagaccgttaaaaatttcccttaaactattgatattgttggatttgaggacttttgtctaattttagtaagtgtaacatgcatgaaagttcagggacataatttaacacatgtctaagttcaaggggcatgatttgatagatatccaagtccgagaagcatgatttagtacatggacaattactgaattaataaaaatgaatgaaattagataaaagtccttatatctaataattttaataattcaaatgaaattttcaacaaccgaaaaaatttaaaaatataatttaatatgtcaaaattcaaacaaacaaaaatctcaattaacctaattcatttacacatacacatatatcacccatatctatatggagctagaaactcatcctaagggatatatgtatttttcttattttatgggttaataaattaaatctattgttaaaaaattaatgaaaaaacaattcaaaataaataataaatacaatttgttcaaattattaaaatagtctcaatgtcaagaagttgaaaaagggtaacattaaatttttaattaatgaactcaaaaacaaaatgtacaaaaatcaaaacagcaaattacttaaagctaattagctccttatccattaacatatatatatatat

SEQ ID NO: 63837 - DNA, 710 bp, Cannabis sativa
  modified_base (669)..(674): a, c, t, g, unknown or other
tgaccattggctaaccataaaatctgagagcaacttatggtcatggacaaaagtgttttttctatgccacatccgccaacaaagaaccacaaactcctccatttcgtgcttgagagaatatccatacaacccaccaaaagctcataaaagttagaagcctcttttagtacatcaagacctctcaacacccacccttgcttgatttcttaaagagaatggcaaaaccaaagagcatgcacaattattttattattctgaaagcaaataggacaaacctttgcagcattcattccatgtctagagagattatcataatgatgcaaaaaattcaatttcgctttcgaaataaaattcttaacttttggctaaacagagagggaccacaagagtttccacctacgagacggacccaaagaggtagctacttgaccccatcccaaccttgccacggagctctaatatccacttttgaccgtatactaaccattatcagtgtagttccatatcaaataatcctgactagcataaatacagacaagaatagacaaaacagccttagtctcaacctcattaaagagagctttaaccaaagagatattccaataactcttagccaacttgagatcacaaaaatgttgaaactcgatgttaattccatttttggcatannnnnntgacaaaaatattttattatttaatgtatatttcgg

SEQ ID NO: 63838 - DNA, 875 bp, Cannabis sativa
taactcttctactcagaaagatcatattgaccagcgttgtaggtaataatataatttatgagttttcaagtcttaggattaatttcatttgattgattgattttgaagagcttaggggtttattttgtgacttttttgtagagagcttggggttgagaatgtggagatcattgtggctaatattagcacatttgaagtggaaagatcttttcatagaatatattccattggaatgtttgaggtgtgtaacataaaaaactttgacttcgaccaaactaactatattcgaattgggagtttattagaatagaggtttttttttttatttttttttaattttttttttaatttttaatgaataatattttatttataataataaaaacatccactacacaataacaacaaaaactagatccttaatattattctaaaaaatatttgggtgcctcacaaaatagtttgatacattgatttattcagaaaaattaagattaatggtgcagaattaaatgaatgaaattttaaaataattaactaaattaataatgataagattaataacaagaacaataattgaaaataaaaaagagggacaaaaagagtgataaaaactagaaatcattaaatgcagaaaataaaaaaatcaacactaagatatatactggttcaagtctgatggattgatatgatttatgactctactccagttctggaacaccattaagattcttttttattggttgggaaagaataggtacacgtacagtcgagacgagattctgttgagttctctcaaagtatttcaactctcacactttcacccaagaatcttcttcatttatagaaggttcttcttacaaaacccaaacaca

SEQ ID NO: 63839 - DNA, 3159 bp, Cannabis sativa
gctatgatagcaccaattaatactttcttgggtgagtaccattcttaaccagtacgatgattgtactgccgaaccgacacaatggttgtgccgctataacatcaccaaaatcatatacaatcataacataatatgtatatatcacacatacatgcatttacatatataatatgttctatactattcttacctcgtttccgaattcaagtaagttggccaacctcaacggaaaacctcgtgctggatgggtgccctaagccacattcacataactgggtaaataacacgctaaaaaccctaacctgggtaactcaaactcctattaagggttaagctattggtaactactaaaacaataccccaaaaactaaggaaataaccaaccaaggcactggaaataacacgaattgacaacacgaaaaaagttcgagaaaccggtttcatagggcctgggaaaccagttaaccaatttcaaccaagtaacccaaaataatttgaaatcatgcccaaatcatgtccaaaccaaaccaaacttttcagaacacttgtaaaaccattctaggacaatttccaattgaaagcagcaagaaaaacacactaaaactcattatgccattgttgagccaaagaactcaaacttgctcaaccaaagaattaagcttcaaaaccagtaaattcatacctaaaacatccttaccaaacatcataaaccaaatacatatcaaccctaacttccacagcaacaaatcaccatttcatagactaaaactcagtttaaaacttgtaaattcaagagttaaaaggtttctagggttaccttcacttgcaacaccttgaatccttgctgaatgcaagcaaacaataacaatctaaggctaggttcttctggtcttgtgggagccgagcaaagagagagagataagctttctcttgatttttcttgttttttccttaattttctattttcccaaaactaataactcaagactttgctgaataattcaaaatggctagttgccatgctatggagaagccacctaatccccttaaatcaaattcccaaaataccctttaagcttataacttgagtaatttaaactctaggggtaaaatggtcaaaaattataaccccgcttaaattcagtattctatttatctctaatatttatctcactaagaagaaggttctaaacttacccatatgactcgaaatggccatccatcgcatttttcgtcgtcgtcgagcaaaaatcataaaattgtataattcatatttaatataaataatactcctaaagtttaataaaatttccgaatttgagaaattataactctagtgcccacttttaataacgtgacccacaattaaataaattcataaataattataaaaataatatcaataattaacgctaattgcctttactaatccatattctaaaatgcggtcattacaaaataagagactttacgcagggtcgaccttgagttaatttggaccctagaaaaaataatttttttggaccttttttataacaataaataatatttttaaaaattattaaaaaacatgtatatttataaaaaaaaaaaaaattcacttagggccgcctccgactttatgtaaagtcatcacttagggccgcctcgtagtaattaagtgactatcttgaacaatattgtcaataaaactatttaatttttttaaaaattattatcattataagaaaaactataaattataattttctcaaatatcaaagaggttcttagcaactaaaacgaaaacggtgtccctactataaaatattgagaaacttacaaaaatactgtcacacgaaatttttttcaaaaatactgtgtttttatataacaacaatgaaacacaaaataaaacaactaaaaacaacagttgaacaactaaaaaatagtcgtaaaacaacagtaaaaattttacacaatacacagtataaaacttacacactatttttgaaaaaaattctaccccacaatataaaaataaaaaaatttaaaatttgagtatatggtttcttcctaacaaattggagaattaaccatagaaaccatattgaccgatcgacccgacccgacccgacccgacccgaccgactcccccgaccaccaacttatatgtaattttttcattctgttctctgcctccatttcgtggaactgtgaagctcttcaccagatcaaactgaccaaccaccgtctctctctctccggcgccggactggtctcacctcgaccgcagacggtaactgaaatttcctaattttttgttttcaaagtatattttgatatagcttttctgattttgatttcttgaagcttaatacactcactcactccttcactgggtaattttttgttaatttgtgaaaattatatatttgaatcaatatgtttctgctctgtgttttatgtttgctgaagaatacttcttgttttgtttcattgtatttgagatatgttttgggaaagcagtaattcataattcaatttcaatgacttatgtaagagatgttggaattgttgttgcctgataaaatttaatacttgtttgatgatgatgatggtggtgatgatgatgataatgttattggaaatggattcgatgatgtagaagaggaaatagaaattagaaaccaatgtgttgatattgaggatatagaaaccaactttctaagcaaaaaacccttagttttaacccttcatagttccctgaacctaactagataacacctcttttgttacatttgatttttccatagctatgtcaataagtctcactcattcaaagtatcattctttagtggctggtttgtctttttccctcttcttttggtctatggaacatatttgctttatgggattccattctatttttttatcttttggttagtaccctttgaatggtatttcttgtttattcttgtaattctcaagctttttgctttgtatatgataaatggtatgaaaaaatcctaacttttataataatttacattgaaaaaatgatttctgaaatacccattgattttgatctcttcttctttatttgcattgccatttatagttgaaatagagataagtgccattttgggatataaacctgtatatgtaattgatttggtt

SEQ ID NO: 63840 - DNA, 940 bp, Cannabis sativa
gttttgagttgatgagagtggaagtcgttctcagctagattcgtagattcgatataaattagaatggaaatatggaaatgtccaaattgtaataggaaaagaaatatatagagttttttggtgttgatttaacaccaaatttgaatttttagcatcggagaagtcaagaaaatgataagggacaactcttcatatagagtagttttacttagtttctccacccgcaatcatttatcaatggagaagagaagagatattgcatatacgtactttaatattaaataaaactccactctctccaatagctttgaaaacttgagcctgacgttgttcttgttcaaacttcatagaatcaatctgcctcgaaagtttcttcaaactatcttgagcaaaaaactaaataaattaattttcatcaaaattcatcatatacctgaaaaatgatatattaaagagtgaagtaaaaagatatgtttagcagcaaattgatacgtaacaattaattcaaagcatgatttataataaattttgagagagatttatgtttaaagattatataaattaacacaataaagtgatatatgcacatacggaaactttgttgcagaattgaagatatgcaaatctttgaacatggaccgtgtattatacatctcctaagtaatcttaacattagaggcagaattaagtactactattgattttttacttacttcaattgagaatgaatcgagccaaggcttccaatccaagattaccgatataaaaaaatcaaccatttcatctcatctttttctgcagtctctctcccactgaactccaagtcaaagtaaaaacgaattggtagaccctgaaaaagcaacacatattaatgttaagcagataaaaaacaaaaggggcagtgctttcacaattgtttttcttagtttatttgaaagca

SEQ ID NO: 63841 - DNA, 3426 bp, Cannabis sativa
aatggtatttacccttaattttatatattattatatataaaagtaaaaattataaaaaataattttataaaagtattttaatctaattcttttaaatatttaattattaaccacataaaacaagaatttgttcctgtcaataatactcagaattcgtagcagttagtttctatagaatgcatatgcagtactagtttatatatacagaatgaatcaataataaagtctatatttctaagtgaattttatatcatgtaaaaatttaagttcatattacacaaaagtcaaaattcactacatctttagaacaatgtttgaaaataatacacaaagagtgataataaaacaattaattatagagttcatctaattttattcaacaaacaagtacaatagaaaaagtttgttgctaatatatgtttttatttaaaactttaatttatatcaaacatttaatattttaatataataatattatttatttaaataaattacatatttatttaatataacaatttaaatctattacttaattaaaaaaaaataaataaataaataaaccaagtcgtgcacgtaacaacctatataaacaactataaataagtttacctaaagattcaccgagcttctattactgtacatgtgatatcgtttacggagataattcctccagtagttgatgggtctccatttgaattagcataaccttttttaaatacaaatgcaggttgttttggatcagcaagggttgtttcattacccaacataaaaataacttctgacatagttggtcgatccacagcgtactcttgcacgcacaataatccaattgtaatgcatctcaatgctaagccaccaaatgactcatcgatggttgagtctataatttccaatgctctgccttctttccataaatcccaaacctgtcataataatgttgtacatcttatacaattgtgtgatgataaccaagtttaactatattatacaaaactattccaaacttacatgtccaatcaaattggattctggattttcatgatagtagctggtgttcttttttccggtaatgatttctagcattaaaactccaaaactatatacatcggacttgattgaaaatcgcccttgcatagcatattctggtgacatataaccactgcaatagtacttatacatgatgagtattttattgttattttttataatcataaaagtttaaatataattaatgagataataaaataactttttattcaagggacacttactatgtcccaacaactcgatttgtgtttgtttcaatttcgcctcctccaaatattctagccatgccaaaatctgcaattttaggatttaagtccgcatctaaaagaacattgccactttttaaatctctatggatgatgcttaatcttgaatcttgatgaagatacaacatccctcgagcaattccacaaattatgtgaaagcgtttcttccaatctaacaatgtttttttctcctcatctgaattataagtagtattcattaaaaataaagaaataaatctattttagtagaacttaacaaacatgacaagaaaacaaagcatataccgaaaatgaaaaaatccaaacttttgtttggcaagtattcataaattaacatcttctcatctccttgaacacagcaacctagaatccttacaaggtttctgtgttggagttttgcaattaacaacacttcattcttgaactcttcacttccttgacccgaatgctttgatagtcttttcaccgcaatttgctttcctccatcaaacacaccctgaaacccacaaccaatactaatatatgtacagtggaaaaaatatacttaattttaagttgtcattgtcaaagtgaaaagctttttgtgctttttataccatttgagaaaataacgtgtgcatttgatagtcaattaccttataaactgagccaaaaccaccttctcccagcttattatcaattgagaaattgtctgtagctgcggctatagtttttatatcaaacaatggtaactctgaatttgtagcatcaacaagatcattttttccagaaatatgacttggactttgatcaaaaagatatttgctctgttcttctttttctgtcattatacatgtaaacatgagtgatgctcagcaatagcattaccaaagaatagacaagcacagagtttcatgtctacaagcacacaaatattaaaaacatatatatacttcttctacccagttatgtagaagagtattatctttttcaaattttgtctacacaaaatccacaaaaaatattatatttaaagcttttaaattaaatagaaaagaagaaacatactaaaatatttcatcatataattcataccaagtttagtgattttaataagaattatgatcttggtcaggtgaagtataaattggagatcaaaagaagaagagtaatgctgtgttacctttcttttttggccaccaatatacaacaagaaaaataagaaagagcaaagctacagagcccagcgcaattcccaccttcccaatattactaatggaggaagaattctttgactttgactttgactttgaatattgagctgcatatattcacataaacaaacaaatatcatgtaattagtacttgcagtttgccatttttatcgaatagttgtcagaaaaaaaaaaaaaaagtaaatgatagcacctaaagtgatcgaatcaactctcaagtaaaaatcttgacccgcattaggataagtcctcgcgtcgaccaaatccccatgccatgttatgcacccaatcccaccaatcaaatcagcactcgcataagccgtgcaattacaattcttcagacactcttgttcgcacgatgccaaactcctactcatattcacaaatgtcttagatgtatctggcactttcacatgttccagcttcaagaacccttccccatttccacacgtgcgccccagcagttgtttcttcacacaaccgcctgatccatctctcaggtaccagtcttggggcgacttcgggtcaaacccgggtaggcacgtgcactcgaacctgtctgtgttggttgggtcgcagatcccgttcgggccacacagcttataagtatcgcacgtctccgtcggtgcggaccaaaacttcaaccaccgtccattctgttcttgccacgtggatctataaacagttcctgattcatcaagcaccatcctcgacagaatcgactcgttgcgaataccgtatgttatggagagttcatcctgattgttcacgaagctgaaattgaaaataaaattcggagtcatttggggtacaccgctccatccacggccagtccaggacccgagccgccaacgtggagccccaccctgatttaagaaccattgtggataccctgtcgg

SEQ ID NO: 63842 - DNA, 2120 bp, Cannabis sativa
tcgttattagatcaaaattctatgatttgatatttttaaagttaatatttataattaaatttatttagtaaccattcatgggtaatacccatcaagaagtatttcatatgtatttacttctaaatatttataaaaagcataaaattatgtgattttttttttacattttttgtaatatagtagatgtttacctaaaaactagctctaatgacgtgggcagaagtgtttgacacgtggcaataagcaaaatattcatggagttaagtgtcccaagttatagtagtcaactctgggaagggtccctatccctgcgccggcccaggttgactcccggagctccaaaatggatatttgaatcccgccaagttgttttcaaataaccatcctttagtattatgagccaacaagtcaggaagagtccaagtctgaagccttggaactgaaagatgtcgatttgacatttagaagcgaactcgagagataaaggtttcacacagcgcctaagttgacatttggactagggtttcagttttcgatgtctatcttagtgaagattgctcaaatcttgcacttagacataaattaagatctatcacaaacatgctagaggcaccagaatcacactcgaaacacttcccgtttgagacacctgggcacccagctcccaagttgacctggtgatgcatccaacacccaagttgacatattgtcaacctggccacttccattcacgtttctgaagatgtttcccaagcaatttcttcgttttcattcaaaaagaggaaacaagtatttttggaaaaaaaacttatcaacagatcaattacagttttacccttcaatatattttatcttttaaacacttaactctttgtaaataatatttcagtaaactaacataattattgaaatgagcactctatcatttatctcgtctatccaagctcggaaaaaaacgtcaatttacttctagacaaacatagaagctataaatgtctgtatttatgattgacatttctactcaattgaactaccaagttcccaggatgttagtatgagctagactgacaggtaagctagtaacgaacaagttaaaaacctcaaacagtacaattaacttaaaacttaaccatcttattattaagatatataaattaattgatttgtgatcatctaagttatatcgaattagaatagatataacgataagtttataatattttttccactatcaatatcggttcagtctgatgtaaactctatacatctgatacaagtttattttactaatgtcttgaaaaatacatttcattcgccttagtgtaagtaaaccaaatcgatgattatcaggttagtgtaaattcgatgcattgataaattttgggactaaataaatttaacgcatataattataattatttgtttactgtgattacatcactataattgtgaataactatacgttcatgatttaatagaatttatatgttaaatatataatcatgaaggcatctatgtgaacaaagcatatgacaatgccaaaatataatttctaaactttattaataaaaattaagatatattaaaatataattttatttacggcataaaaacaatagtattttgggtgctttgcaatatttctcttatgaggcccgatgttgctttcattattgataaactctttcaacttattcatactatttttgttcattgggaagcatgtaagtgcctacttcggtatctaaagagaactatctatgaaggtcttcttcttcggcttgttcctcgcttgtccattggagcttactttaatgtcgaataggctagctatgttgatgacaagcgttccacagggaggggagtatgttgtatttattggctgtaatcttatctcttggtctgccaagaaatagtaggttgttgcacaatcgtctacagagtttgagttcaagtactgcatgcagcggtcggtcgtgtggttgctttcctttcttataccaagtttcatgttacactggctcatgtttccatcatttaggttgataactagggagttgttgccttagctcactacaacattaaggaccaatagtggcgggcccctcggccgctattgg

SEQ ID NO: 63843 - DNA, 1819 bp, Cannabis sativa
aacggttaggtacctacaaagttccaaaaatataactaaggtattattaacgccaaaaattaaaattaggtatttatttacaactgaagttgaacttaatgccgcaaattactcaaatgggttcttgattaatttgtagctagatcttccaaaacctaaagaatacaccatatttcacttttttattttagttttattatattgtaagctctaaccacaactcattcattgattctttaacatcaatcgattcaaacgtttacttaattttactcaagcagaattattttaaaaatttataaaacattttattcaataataaaatatttaaattttgtcaacttgaaggtcgacaaaagtgtgatgtaccataaatttattatttggcacccacaccctaatatcttaccaacgtaattaggaagtgttttaatattattttttattaaattaaaacatataaaactatgaaaaataaaataataaaatcctccaaacttaatttgtctattataattttttgtaataattataaacgtgaatatatgtaaagaaaatacaagtggcactatatatagatggacacgtgtagatgatagggtactcaattatgaggataggtaccaaacttaataagttcccatattcattcccatacgtcttcttcttcttcttcttctttccattaattactttgacttatccatcaaaatttagattcaaaataattaaattattattacttaataacaaccacaaattattacttaatgtttcaaaattttcaatttttttttctgtaaaacatccaataaaatttagataaaatacttttttaaaaaatataaatttattaagaagaacaatgacaattataagtgatatataaaattgtaatacaaataacaattaatttgtatcctaaattttaatttttttttcgttaaataaaatagctcacaaaatacaatttatttcttaatttacaatataaaaaatacacatataaaataaatatgtaataaaacgtttactataatataaatacacatataaaatacagtatttataatttaaaaaaatttataaaaaaataaaataaaataaataaaaaataattaaaatcaatatttataatatattatttactaaaattatttaaaaataaaataataataatgtatctcatttattttatcaaaaaatataatcaaaatacttaaattaattaaattttattttaaaattaaattataatatataataattattttataaaataaacttatcattttatatttaatattaaaaataaaataaaaattattaccataacaaaatagcaagataagtattttttagctcatatttattaaaaaaaattattatttattagtaaatatgctataaaaatattaaatttttttgaatttcaattttattgttttaaataactaactatatttttatggaaatagataaaatggatggatacacaattttatttagtatataaatataaataataaaataaatatattatatattattcattcacttcactcaaactcactccctcttatcttcttctccaatcaaaaatagaagcaatgatcctacgtggcacaatctcagcccttcattcctcctccgctgcattactccgtcccaaaaccaccgtcgccgccgtctcatcccaatcccaacccttctccttcaacaagagctactccatctccgacaaagacctcaactcccgaggcttcatcctccgccgtacaccgtcagatctcaacctcgacaacctcaacaaagtctt

SEQ ID NO: 63844 - DNA, 1078 bp, Cannabis sativa
ttttcgggttatttcggtttgtaatttttatcagttttttcggttcggtttgggcgggttattcggtttgggcggttttcaaatttttttgtaagcaatgatgaaaaaacacttgttttctacattttaaattgatcacttgaagagtatgttgtgattgtattattttttaacacaaataaagtaactcttagtttcattggagtaagttttacaatattgaaaataaatagataaataataaattgtgcataatagagatcaagaattacaataaaattaataaaataatatatatttttaaattgttttaaaataataaagtaaataacaaaataatgataaatctcacattaataataataattttttattaaaaaaaatataatatagtttattaattattatttctattttcacaacatccaatgccctacttcaaaaataattaaaaaataaaagatctttttctttgtccaatgttaaaattccttcgatcgttttaaagtaaaaaaataaatacttcaattacaaaattaatgccaatgactagcggtacaattaaattcaatagtgatataaaaataacagtagacttatataaagaattttgcacgtcaattttcagaataaaatgcaataaatgttcaactgtatgtaaattatccattttactatgattaacaattaatttattgtacatatgaattaaacaaaagaattttagtaaatattttttgaccccaatattatggcaacaaaataaactatttaatttttcaacaataattgtatgtatgtaccttagttgatcttattttcttcaatgacatgtccaatttttgctcaagctgttgaatttcattcagtcccaaatgctccaaatcctccccgagaatattcctaaatagaattataggagtatgtttaagtaggggctctactagtatattgtcataaattatttgaaatatggacacagtgtgtgtctattgttgggaataatggataaaattcaagtttcccttcaggaaaaatatttctaagaaaatataatggagtctctaaaatttttttt

SEQ ID NO: 63845 - DNA, 778 bp, Cannabis sativa
aaaaaaataaaaaatatattttataatcataaatttatttattttattttttattttttttcttttcttcaaatagtttattaattttttttatatacatatattaaatttgataatgttgatgattttttattatatttataaatatgtaaatatatattaaaagaattataaaatatataattaccaaaataaataaaaatgatttgttaattattttaaatttaatcttttaaattattttattactctttttaaagaaatattatttcattatatattgatattttatgaaacttttaatttttagttagttatatattttactaaaaaagtgttttaaatattaatattaatattataataaaagaattaaaattgaatttttcaaacgttgttttgagcttttaattaaaaaattattatttttaacctattttattataatttggtattttaaaatttctcacattatttattatctccttaattctcttattttttttttaattttttattaactaaaaatagtctaactatctacatctttaaattagctaaagtatgagacggtgaaagagtctattattatcaatattgattccgttattgttttaaacataacacatacaagctaggctcagattctaaattattggatcgggttgacctgattattttatatccaacttcttatattttttaaagaaatttatatgaaaaattaataatgttaaaatttaatacaattttaatacttagttattatcaaataaaa

SEQ ID NO: 63846 - DNA, 845 bp, Cannabis sativa
agtaagtctgtcttttgttattttatggatgttagcctttgtaacatatgttctattttgattaataaaaaaaaaaaatcaatcagtcaatataatatttttcgtgtataataaaaaaaaaagtatattaaaactgaggggttatttgcggtaaaactcccttatattttgattttttacacttaaccctttatatttactttactttgaaaatttgaggtgtcaactgaatattactgttaaatacttactgaattattactgtattgacttcgaaattttactttcacgtatacacaacacaggtgaacacattggtcatctcattagtatttaacggtaatatttaattaacacctcaaatttacaaagaaaaataaacataagagaattttatcacaaaaaagtaaaataaagagattaagagtaaacataagagaatttcgtcaattattctaaaatcgagcacaagatatgatatgaagcttatgtattcaaattattaataagagtcttcaatgaacaacttttatcaaagcaaaatatatttggagcgtaaaaacgtctgtgttcaaggaattttgctcttttttcaaattttgggtcgttgggttacatagtatggccttgtaagataatatatatgtttcaacaaactaaatgcccagacccagatctagtaatgggtcccctactttttatctaaacttaccaagtacaaaccaggttcaagacatcagatctctacaattattatggaaatctaagcgcatgtttggcaccataattaaaaaactgttttttatttttaaaaacagaaaattgttttttgaaaacaatttggc

SEQ ID NO: 63847 - DNA, 2521 bp, Cannabis sativa
atggagcattatgtcttcaagcgcaggaacgacgaggcttatatcatcaactttagaaagacatggaaaaagtttcagctcgctactaaggctattgttaccgtgttccctgcgagacatcccagaatgttaaggtttacaacatatttaatacatgtttacattgacccggtaaaagcgaacctatcacagctgtgtgattttcaagtattaaccgcatttattttacgtgctatgtaatcaaaccccacgatttcaggggataattgttgtaagatatcagtgcaactatgtaattaactgtcttactatgaaattataaatagaggcaagttacactgaaaaatggacgataaaattattagaaaaaaggcctgagagctgtatcagaaatctaatagagtgatttgtggactatgcagaattttaactgtaaaatcacgcaaaaacctttttgttcatacatttcttttactacttttattttatgtgcgattctatcactatttaggctcaaatataattaacaaaaatcagcgttaacaactctcaggaacaacaaccgaattgcgtgatcatcgatactatgctggagagacgggaccaaaaatgggtgagcttgctattggcaagccccgtatagacttgggagaagatcttgttattaatgtcatatacgtcttgttgataactttgacgtgcttaacggttattgagaaggcctttgtatgtcttcttattgcaaggagattatttaatacctttcatttatatacgtgtagcgtaaataaatttatttatttgctcaaaatacgggtataacacaaactatcatcaaaacaaagatgaacaaatataaacacaaaagctagcttaagtgattttggactacactaaaccaatatggttttgagcttaattaataaggtttattttcaccataattttacggtgacaaccttaattaaataaacatttatgtaacaaagtagaagaaaaatatatgtatatatttaatagcaatacaagaaaagtgagagtgtaagaataaaaaagagtgggacctatgataattaattcttccttctaattatataaccaaacataataattgaaaagccatataactaatttattatataattaattaatgcatgagaagagatttaattacaacagaattattggtcaattgtaattgtcagatcgttcaagcctttttcaagaatgcacgtataaatatagtacttgaaaattagggatattagatttttataccaactttagtgtaaagggaaaattttatcaagtttgttgtattgaaaactataacccaacaatacccactaattttagacaccaataaatttattattgctggtatatataaatgtatttatatataaatgtgacaaaaaaatactattttaatgataattttctagttatgaaataaattttttttgttatttgtgactaaaatataatttttaaatataagtaattaatttactaaaaatatatttaatcacaataaattataatttttgtgactaatacatttaactacaaatattttaatcaatataataagaatgataatttataattagtcataaatttttttaatttgtgactaaaactaaaattttttacaacgtgtacatgtatttagtcacaataaattatgatttttgtgactaaatttttagctacaaatctttcaattacaatataaaaataataatttataattagataaatttttttaatttacaaaaatttgtaaatagtatatatatttatatacatttatttatttagctaactagatagcaaaaggtaaggtccactacttgtgtttgttcatctagtacttacatataactcttatctttcgaaagtactagctacacaatactgtccttacaaaatcgattgagaagaaaaaaaattataaatatatatttttttttatttaattttgggtcaacaaaatcatactattgataaaataataattgaacaacgacgtactttaatatatatatgacatgttcgagagacctattgtattgaatattgatgataggtttggaagattgttggctactcaaattctacccactaaaataaatcatatatagacaaccctattattatgagtacgtaccaaccctagcaaaacaacaaaatgcatcatataaatatttttggtgcacgtacccaatattaatagcttttttatttattatttatattgatatatatatacgtataaagaataacttggtgataaattattaaatatatttgaatatattcaattggagtgatttaaaacattatttgaatatatatatagtgatttacaaaattagatgttcattcattataactgagttgtaacgcccgcatttataataataaactcggaaattaattttaataatttatatattaataatcatatagattgggatcccaggtatcaaaattcaggttaaaagtactttactat

SEQ ID NO: 63848 - DNA, 2738 bp, Cannabis sativa
  modified_base (2328)..(2335): a, c, t, g, unknown or other
gggtcatggacatgtccatactcgcctttagccaatgaatacccttctatttccatatgaagggggatcataacttaaatagtcgtagctctcctaatattgctttaagtcttcttctttaagagaaactaaaagtatagagttagggtttcctagaaaaaattaaaaacacatcgaacacgcccttagaggctaatagactaactcatggagtaaggttaattaacacctaaccacataaaaatctccatctagttaatttctgtattttattatttttcaagtccttcaatatttagtttctaaaatgctcggtaaatattatgtatgataatttaaattttagttaaataaagaattcttttattattggataaactttaaaaaaaaaaaaaaaagaacaacaacaacaaaaaccaaaacttcatcctctctctccttaagggtcagccaagagaaaactaaggaaaactagaaattttccctccatttttaaaccagaaatgaagagtatattagcaagaatttttgtgcctttcttgttgagaaccaaggtaagctccattcctttttttctctttgaatattttttattgtgaaagcttggtttgaacatgcaatactaggttttggtttttgtttggctttagattgtttggagtcaattttcggtgattgattcgagttgttggagctagtttaattgcttctcgagtgtcttggtgttggttagctaagtttgagtttaaagggtttaaacttaggtcatcaatggaaaaaacttgattcagttccttaatgatgctatttctggttgggtttggtcctttatatgttaattaggtgttctgaaaacttcaattaaatttggggtagttttgagaaagttttcaaggtatggtgtttactaccattttcttataaatggtgaaccagtttttgtggcagaacttagaaattgctaaactatttggggtttcgattcacaagatttttaagattttggagcctagtttttcacattttatcgatatattccacgctatctatcggtacggaaactcttagttttaagtttaagttcccaaaaagtcatttagcaagtcacttacaagtttatgcaaattgtgacttaggaccttaaatcgtcgaacaacagttttcactcaggtggaccgacacacttgaatttggaattcaagtaagattagtataattaatgatatgcatgcttacatgttgagcgtacatgttttatattttcctagtagataacgtatcagtaagtgtacatagagctgcactgaatagtgatgcataaatatttggcaaagtatggattgatgctatcacatcggtacgaataaagtgttgagtatagacttatattatggtcaatcgtactattgtacaaacgtctagacttagtacgcattggacgtgggataggattgtgattaggtgtatgggtgcctggctatgatttggttatatgattatgtttatgtttatactttttttactgagtttgttgactcacagatatcaattatttatatgtgtaaaagcaaaggttgaactgcagtgaactcagactagatgaagattgtacatatcgaggcagttagacctagagtgtttagatcttagggatagtagagctttattttgatagtcgctaggcgacaacttttgaatacaagtattttagaaaataactgttactttttaaatgggattccagaatatgtattctatatttttatttctgtttaagttaaaattttaattattcacgtttttcaataaaccttttgattagcaaatgagtgcacaataattagaaattacagtaatgtgcctaatctagtaggacgttatagtttcccttgccaagatgaagaactcaaccctagaagacctactgggtgagcacaaaatgataatgggacatcagtggctcgggcagctgcagcacttggaacattcatggcagacaaagaaatcgacttgccaaaagtgggagtaaaaaaatttaccaattgagggcacaaacaagatcttgtcttgataaaaaatcatagtaaaatctctttgtaccaccttgttgttcaaacttaaggaaatagatggtgtccgaccgtcttaacacctaatatttctagccttttatctcaattatttttcctgtttttttaatatgatagaaaaaatttaagagcataaataattatttttgttatataagttagaactgatgaacattttttttggttatgttcgtggatgtatctcaaacttttaaattgtgtgtgtgtgtgtgtgtgnnnnnnnnttttttttttttgatgaatcaagtgaatttcattgctcaaaaatatatttatacaaccaaatagcattctccaaagtagagaagaacctaaaaaataataaactttacaatgcttctaaccattctttatcactaattgacgctttctttggccatgtacaagatattctcttctttgacacatttttaactttacacactatactatctacactcggcatcaagtttttccatagaatgtcatttttagctcgccaaatggagtatacaagggctgccaagacagcagcaagaatcatctttttaaccttgctaaccttcattttcagtacaacatttagcacaattagcggcggacccctccgtcgctattggtccaccgactggccgctaaagggcatta

SEQ ID NO: 63849 - DNA, 1289 bp, Cannabis sativa
gctactatatatgtttaatggtggaaataattataggattggcttagtcgcaagagatgtccatagccctttggtggaaggccgcactgagtattacttgggtagagttaatcacgaggttgccaaagcaattggagtgtgtgaggctttgagttggatcaaggatcgtagctggcaaagagcggtcattaaactaactgtgtaatggtggttcaggcccttcagggttcagttcacatggtatctttatttggtcaagttatcaatgagtgtaaacaactcttgccggagttggataatgttaatatttttttatattaagcgatcagcaaatgtagtagctcataatttcgcaagagcttctcatttatactctggttgttgttttagtttggagactgttccaaccaatttgttaccttgtttggtaacagattttgatggttaataaaactaaatttttcattaaaaaaatcaaaatacaacagaaaaaaatccttaatttataaaataatatatgataagtaaatgattttaaataatacgtgtccattatgtttagaattatcaactgcttgaataaaactatggcaccaatgactaactagatcattaatttgcccgttcgtagccgcttacagtatactaatcagaattcgtcctgctcactatatatacgtactagcactttttctaatacttgtaggagaaaagtaaggggtgagctaaaagcttagtaagaaaatatttatcatataatatcatacaatatcacacataccattaatgtacgaattaagttttagcaatatcatacaccttattttataagcataaccaaataattgtacacatagaaatatttaccatataggttcatactaactgatcacattatacacatagatatcataactccaatatcatactgataacataaccatataattaataccattaaataataacgtcattactataatattggcatgttatagccattacattacatgtataacctagactaatttgaccctacaatatcttgggcctaactttctcatataataacttgggcatatgcagtcctaccattgtaataggatagggtatctcttcatttaacaacaaaattgatgtatcataccccattataacaatctcatacacgactcagaaaaatacaggatagggtatctctacatttaacgaccttactccatattagggttgtacatcgatcggtttgggcggtttatcctatatattttctaacccaatctaaagtt

SEQ ID NO: 63850 - DNA, 937 bp, Cannabis sativa
tggccaatcccgaacaactttgatcttggctagatctaccatgatcccatctttatccactatgtgccctaagaaagagacataagataaccaaaatttacacttttgaacttagcgtacaacttgtgatctcgtaatcgctgcaatactgatctgagatgcaactcatattccttttctaattcagaataaataatatatgtcatcaataaacacaatcacacatctgtccaggtaatcctagaacatccgattcatataatccataccaaatatggtatgaagtcttggcccgacattcaccttgatggtgtttcttgcatttcaaacattctagatatgatctgaaagaggatccatgaccttgacgggcaccttcgtttccctgaaactttctaatactccctgatgttccggaagcttctaccttccgtttgtgatcagggttagcactgtcggtccccttactgatattaccactaacaagaggattcgatgccatgacggcatcctttacaatctgctcctttattgcatgttgctcagtctgctcaacaattaaggctagtacgtccactttcctatataagatgtcgtgagcagtggcaatcatcaagtcccgactaattgtggcattcagtcctcacagcgatgttataaatttttccctcaaacagactcttgaaatctttccaagtcatcaacttatatcccgagtctgtcccactatatcccaccaaatgcgggcatgatcttgtaacataaaggcagcgtagttcactttctttgttcttgtcaccccacgttagcaagaatgcaggtgatagtactcatccattgttcatctttgattatatctctaatgccctaatctatagggacgtcacgtgtgtgattttataaattagtttaatactaatagaataattaattatta

SEQ ID NO: 63851 - DNA, 1287 bp, Cannabis sativa
gcgatgggagttttgatcaccaatggacgtgatgaggaaaatgcaccgtccagacgtcttcttctataaatgcgataggtttgtccatgagatgaggcctttgtgttgggagttggttaacttcccacacatctctgtcatgatccagggctttagcataacatttcaattcattatgtgttgttcctccaatatgcggttcgctcgagatcatggctactattcaatttggtctaggcagctgcccaggagctgggtggttttgggaagggctcctggaggagtttgtgcatctggggcttgtgctctaggaggcactggtgctctagcttgtctcccattcatgtgtggaaatatgtattttatccattcgtacgaatggcctagccatatcaggttctcaatcacatccttcaaatttttgcattcattggtagtatgtccaatatcgttgtgatactcacaccttttattgggatccctctgcaaactatcccagtatagaggaggcggtcttcgtagtggacgtttttccttgtggccaagtacacacgttcttgggtgtccaccaaatcattatactaagtatactgggagttgtagcctctcgtttgcctcttattttcagtccacgtgctcctttttgacgatctcttactttgggaggtctgaggagcttatgtcgcacttgttgcttgcagtgcggattgagcggtatactataaactcactctcgaagccaagttacctcctagtgtcccaaaactagactgagtcgaagaaagagtgaggttatgtgaatattctggtgtagctaaaaattgtacactgggtgctccacttgtctgtggtgtgataggaagggtgattcttggaaactatgctttgggagcatatccagggccgcccgtgtggtaatatccttcgaaagtagttatctgagcttcctctaagttgatatattttttacttcttttctggaagtcttgaaggctagcagctccctcttgctgaagttcattccaaaagggagttcccatccagataccagcttgtaacaacgccaactattgtctatcatccacttttttggttttggaatcttcttcctgaaacctttttatgacatttttcaacgttacaactggtagttatttaatgttggttagagcgctaacttcaagattaatctttctggctgctacgaactgtcttctgaaactagtttgtaacttattccaacagtcaacaaatctgggcttcaattttttaaaccattcctcagcg

SEQ ID NO: 63852 - DNA, 844 bp, Cannabis sativa
  modified_base (705)..(706): a, c, t, g, unknown or other
agtgtttacttgaccactttacttacatatagttctacttggtttgcttctaaattcttccattagctacaaatttaggttaggtaggtacctgaatagcgacttgtatggtatattcacttctaaatgaagaatgtatgtgacaagggatagtggaagaaaataagagtcaaatattgtataatatatgcttttaaaaaaaaaaccaatattgtatgatatattcacttctaaataacattaatgcatctatattcacttcttatggtagttctctgattaagttcttttaatttttctgtttgttgttgttttcttgatgtcttagcttttgtttcgtttgtcgaccactcttagagtatctccaattgtatattattttattaaattagtatgaaatcttcacaccttatactaatggcacactaaattatgtactaaattagtgtatactaaattctatactattaatagtgttgaattttgagtctataccaatttagtgttattttttttttttacattctaattcttattttaattaattttaaaaattaatcttacattttatttttcaaattaagatttatcacaaaagtgataattaatttgaaacactaacatagtggaaaatacaaaattacgataacaaaaatactaatattaaataaaataaaaataacataacactaagttatgaaactnnaaagaacaatataaataaaaataagcattaggtaaaataataatttaataaacgtgcgattttatttaagtttttttttttaagaaaaaatgtataatgttttattgatttaatagatattttattttactaaattat

SEQ ID NO: 63853 - DNA, 970 bp, Cannabis sativa
gtcttcccctttgtaatcgtgtatttggttttcaaatggagtgtactcttgaaagcgtgttcatcaaacagctcaaatctttcgcaccgcatcacactgcaaaaaatatgtggtttgaaattttttgcagtgtggtcacagtttgaatttttcttaaaccgcgcagtattgtgcggttttcgattttgaattgttaatatgcggtttaaaccacatcgcaccgcacattataaaaaatgattttttttctataataaactaataagggcagtattttacatttatatctagaaagtaaaaataaacataaatagaaaacaaaagtttctatttacaaaaataccggcctaaccacaaaaaacagaggaaactcctccttcttcgtgacccagccgaaacactctaatccaccaaatttctactattttcttttaaaaaccaagaaaattagttcaaatcaagatgtagatctcaaagaaaaagcaatcaaatcccgaaaaatctaaatacagaaggaaatacagaaaaagaaaacagagagattttgacctccattgttataaaaaaaaaaaatgcaaaaacaacctacaaacaaaacttgaaatcgtacagggcagagaatttgaaaagaaggagatcggataaacttcgaatcttacccataatcgaattcgagaagaaatttaaggtacaaaatttataataatcctcttcgtaattttttttcttcataatggaaaatattttttagattgaggaaatcaaccaaataattattgatatagaaatttggttgatctgaaaaaataattaagaatggattacagctcaaaaaataataatgcataaaattagaatctacagttttgttatttggaaacagttgtatatatgttgttttccaataatataattattgtttgggtataaatgaacaagaactgttgaattttttttttttttttttttt

SEQ ID NO: 63854 - DNA, 1886 bp, Cannabis sativa
ctttaactccaattaaaagatttattttgtgttatatttataaagaaaaagaaatggaataattaaaattttaacaattttttttgacacaattgatattttttattattattttaattgtaaatttcatttaattagaccaacacgacttcaataatattaacaatatcaaaagaaaaattagactctaaaataatacgattaatatataaacgagacgctctagccataaggtcaacaactcgattagtagattatttgagaaaacataaagaaacatcactaaaagaagatagaaattatttacaatcctcaacgataccacactaaaagtaaatgacaagacattcaaatttttaacaacttgtaccaataccagacaatcagatttgataatactaatcggaaaagcacactttaaccacgaaagtacttccttgagagacgcggctttagcaatctctagaagaactcgcttaatctgtaatctcaaaatcccatccacgatccgaccttggtgatcccaaacaaccccacgaaaatcatgcctctccttatcaaataatgcagcatcaatattcaccttgagttttttataacttggtgtaaaccatagcttagccccatccgaaaaatactaagtataaaatgaaggaagcaaacttatttcttgagcttttttctactgatcaagtgtgatacgagccaaactaacaacaaactctacccaaattttcttacttttccacaaaagttgattccatgcgaaccaaattgcccaaaccaacatcataggttgaacactttgttcctcacccaaacgtcgtgggaacaagtgaaaaaaccagtccccaaatgatcctgtatcaactagaatcatagccaaacccgcccctccaacaattttgcaaaaaatcacaggaaactaaacaatataaaattgattcacctgcccatgacaaatcgaacacaacaaagaaatattcacatgtttcgtcttcaactgaactctcgccggaagacactcactaactgcccaccatacacatttttttgcctttggaggaagttttaattgtcgaaaattcttctgaaatcccacaacctcctcattcacactaccatctcgatttgccataagtgtcaaaactccaataccagtaatccttgaaaatcgaattagaaagtggaatatcaaaaatattggtcgccacttcctcatcaaacaggtctttgacaacatcaacatcccacgttttctaacccaccacaaaaaaaaaactactaaccttttcatcatcaaataaaagagtctcctctccattaccgattcccttcctcaccccttaagaacaaactcttttacctcaacaaaacttctccaaatataacttggaatattgccatgttctgccaaaaagaagttcccattcataaaataccgggctttctagactctagaaaccaacgaactaggcttagtatgaaacctccaagcttgtttacccaacatagccaaattgaaatcacgaagaaagcaaaaatccaatcctccaacctctttactacgcatcatgctctcccaactaatcaccaaaattccttgatgggaatttatagccgacttcttccaaaaattagccttccaaatcatgatatgttcctgcaggcaaaaagaaaacacccataacataagttggaagactttgagccatattacgaatcaggacctccttaccagcatgcgacaagagtttaccattctaattttctatacgcttccatatcttctctttcaggaagtccaatacagtaaacttgtttcgaccaatcgtacttggtagatccaagtacatactattctcattagcttcatttatattcaa

SEQ ID NO: 63855 - DNA, 1863 bp, Cannabis sativa
tgtgaaatgattagaaacttgaagtttgagcccataagatatagtccctttgagataacgaagtaaccgtttgcaagcttcccaatgaatggttgttggggcatgtatgaattgactcaacttgttgattataaaggccacatcagggcgagtaaggctaagatattgtagagccccaagagtacttctatagagagtaacatcaccaaatggatctccatcatgtaagcttagtttagtagaggagctagctggattgggacatgattttgctccttccatgtgaagctttgttaataagtcagcaatgtacttgctttgacttagatacatggagttggcatctctgtatatctccacaccaaggaagtagtgcacaggtcctaaatctttaagagagaaggcagagttgagattagtgataatagaatcaataagagaagagttaggaccagttattaaaatatcatccacatagactaggagataaacaagagtatcatgagagccactaatgaacaaagacgtatctgatttggaagcttgaaaaccccaacgataaagagtttgtttaagcttgtcattccatgctcttggtgcttgtttgagcccataaatggccttgtgtagtagacacacatgatgaggtttgtctttgtcaatgaatctgggaggttgttgcatgtatactgtttcttgaagtgttccattaaggaaagcattactcacatcgagttgtttgactggccaattgtgagtgactgcaatactcaacacaattcgaacagttgcaggtttaaccaccgggctgaaagtatcctcataatcaatgccaggagtttggagaaatcccttggcaaccaaacgagatttatcgatctaatgagccatccctgttgagtttaacccgatgaacccatttgttagtaataacattcatatggggttcataaggaactagagtccatgtcccttgtttctttaaggcagtgaactcaacattcattgaggcaaaccagtgaggatgttgaagggcagctttcaaagacttaggttctgtagggagtaatgactcggggagagggtgtttagtggctaagtatgctttaggtttgtgaatgccattttgagacctggtagtcatgggatgaactctggttttgggattttcagtaaggagagaagggagtgatggagatgtattagtaggagttaatgtttggtgtagtggagaaagtgatgtcgagatagtggactggtttggctcagtgacaggaacaacaccttgtgatatgttgggtaatggattggtgggtggagaggctaatgtttggacaggtggctgatttggtgttgtgacagggacaacacatggtagtgtttcgggtaatgtattattgggtggggaacttgatgtgtgaacagctggctggtttggctcagtgaaagggacagcacatgttgttatttcgggtaatggtgtagcagtagcatgtgtgtcaatgtttggtagacaagtatcactcggatgtataatgttgtgtgatgcagcaatagtaccaggagtaggtgaaataacatgctgctgtctatgagcatcagaatgggacaaaccagttaatgaaccagcaggtatatcctgattttcagcattggcaaacctcgacacagcaggtacagacccagtatggatgtcctcaggtgcagcagtggtaccagtatgaaaagtagagttagcaaatgtactaactgaaggataaaaggatgaattgcaagtaaaaggtgtgggattaggtgataatacctgcgaagttgctgctgatgtggaggcagaggcagctttgtgaggataaaaatcctcat

SEQ ID NO: 63856 - DNA, 4736 bp, Cannabis sativa
gaaaatcttataataaaataaacaaatttgtattatataattcattgcatgaatatctattaacgaataatatttttttttgagaagatttccttttaacaatcatgcaaatcactaaaggaaggattaacaaagggtcttagtcgtgtctcaatgttgttggtttttaaatttatggtcattttgatcattttgcgcaaaaggttaattatgtaaatatatttttagggtgtagttataattttatggggtgtaaaggtaaacataataaattttgaaagagagaataaaaattaaaagcatcgaattaaaagattaaaagaggtatatgatgtaattttctccatacattttttttattatttaaatgtttatatattacacaatgtataacttgaggctcgaactcagaacctccgacacacgcgtaccctttaatagccacttgagttatcctccagtggtttaatttcctccatattcagtgagcattttagtgcaagcaatcacaagcccaaggaactagtatgcttaattggtgtagatgaattgtctaaatttgtatttgatagcttaaatgttaaatatttgtaaccttatgttatgtgtaccatattgtacaattacaaaaaaataaaaaataaataaaaacattttgtaaaacttatgaaaggagaatttatatattacattaaagtagccaactgattataaaattcaatataatatatatattttttacagtgttctctgataagagattcagagtacatttttattcagaaagaaacaattttctcaattaataagtcaatatttttggtaaagaaaaaaaaaatatatgaaaagcttatattacaaaggataagtatatttaaacaaagccctcttctttcttatccatataatatatattaattgaaatagtagtatgttcttaatcttttattttactatagttgctgctgttgttgttgttgaatgtttatcaacttataataaggtccatttgtgttatctataagagttgaatgagttccttgctcaatgattttcccatcttgaatgacagaaatttggtcagcatttttgattgtagacaacctatgagcaaccatgattgttgtcctgttcttcattaatctgtctagagcttgttgaacaacgcgttcagattcaacatcaagcgcgcttgttgcttcgtcgagtaaaaggatttcggggttttttagtacagctcttgcaatggctactctttgtctttggccacctgagagttgaacacctctttcgcctacttttgttgagtagccttcgggtaaggcgcttatgaaactgtgagcattggctagtttggctgcttcgatcacttctgattctgatgctccttcttttccatataggatgttttcatagattgatgtagcaaaaagtgctggctcttgttgcactagaccaatgtgttttctaagtgattttagctttagtttcttcatgtctttccctgcaaacataacattgttaactatcaacatgtgtaatgttattaaataggaacttaaagtggtttggttttgttgttttgataaatttaaaatcactcaacataatatttacccaattactaaaatctaatctagaggttaagacttagtagctattgagtatagtagaaaagacaaaacatacacaaatttcgttttttaaataaatttaagtacaccaaacacaacatttaacacaattaccaaaattctatcatgagttaatacataatttactcaattaccaaaattctattataagattaagactgaaaagacaaaacacaaacacaaattttgtattttataataaatttaagtacacgaaacacaacatttaacacaattaccaaaatcctattatagggttaatacataatttacttaagagcattagcactttctcgacatgtcgcgttgcgattggttagcgatactccataaaagctattatattaaattatatgagacccaatacttaattagaccaatagcaatattgacacataaaagggtgctaggcaccactgatgctctttagcatttctctttactcaattaccaaaattctattataaggttaatacataatttactcaattaccaaaattctattataagattaatacataatttactcaattaccaaaattctattatagggttaagaccgaaaagacaaaacacacacacaagttttgttttttccaactccctatttttaataaatttaattacactaaacctaatatttacttaattaccaaaattctattaagagatagggatttagtaattgctaagagtaatataaagatcacaaataactcatacctaagcaatgtgggacaaaacacacaccaatcacttattattgataaatttaatcactagtgagaaaacacttaccatcaataagcaccttccctgatgtaggatcatagaacctgagaatgattgaaataactgagctttttcctgatccactttgtcctactaaagccatactctttcctgaacgaacttttagattaaagtccttaaatataacaacatcaggtctcgaagggtagctaaaatggatgtcccttagctcaattgtaccatcaactgatgctaattcttcacccgaatccccgcttacttctgtttttcggtccaacacctcaaacacagacgcaaccatttgattccctttcaaaagatcaggagctaatgccaatgtctctcccattgctaatgcagtaactatcaaaaccatgaatgatttcatcacagatttaaagctactcagctcttttcccatcaaaacagaaccatacctgagcaatgacaacactttagtttagacttttagtgttaacttgtcatgaattgatctaagtttaatcaacttaccataaggcaaggccatatgatgagaagatgaaaaactgtgaaatcccataaaagattccagcaatctggccacgagtgaacgagcgcttggacggttcaacaagctcgcgagcataaaggtcaagcaccttttgctcagcacaaaatgcagcaacagttctgatattgctcacagcttcacctgccaacatgttggcttttagatatgctttgctcaagttgccaccatagccttgcatgaagagtttctgccaaatttcgaagagttagcaaaacatatcagattgtgatttgaaattaagaactattagtgatgagattaaacctcactgatgtgaccactaatgaccaaaggataagttgccaagacaacaagtgtgatcctccaattcaagaggaaagctatgatgaatgaggccacaaccaaaccaacattttgtaacagaattgtggagcgatcaacaacgattgttcgtaacagagttgcatcgctttctaatcgcgacgagagcattgaactggtgttgtttgtgtcatcaaaccatgctatctcattcctcaacatggctaaaaaaacacacacaaaaacaaaggttagtggaaactgttttggtggtaaaacgtggttattttacagaacactttattgcaaacatacccgaaaacattctttccctcacacgaagagtaaggcgttctcccatggtaccgaaacaaagatgctcaattccatgaacaatgacagttacaacagccccacaacagaaaagtatggatatctttttgacctcatgttttgttgtgtcccaatccatgtaatatgacacaagagcatgtgaaataccaagagcaaacagaggcatttgagctccagcaataaaagcacagatagttccacacaatccataaagccaatctggtccaatcatggaatacagtcttttagctgaaacatttgttgtctttacaggctcaactgctcctccatcagcaccaactcggctaatagaatctttatcagaccgaaaactagcaccaaaactagttgttgtgcgcgataattccctcgagaacttaatgctgcattgcataacaggcaatcatagattatgacatgatcattgttaagttgagtgtaaaaatgggatagaagatggattacctcggtgggcgtcctaagctagaattgcgctgcaaaggcgcggcttcttggagttgaacaagtgatgaatagacactatttggattggaaatgagttcatcatgacaacctgtttcaactatctttccctcttgaacaacagctattatgtctgcatttctaatggtggaaaggcgatgagcaactacgatggttgttcgtcctaccatgacacggtcaagtgcctcttgaacactcttctctgactctgcatctaaggcacttgtagcttcatcaagtaaaagaattgatggattcttcactatggctcttgatatggcaattctttgcttttgtccaccagagagttgtatacctctctcaccaacctgtacaagaacaattctaagattatctccaaatatagaattcacaatagcatttgaagatgcaataagtaatcattaataaattacaagtttgctgttaggtactagtgatgctagaaatcatcacaaggtgttttcctatatatgagtagttaacaattctttagcattattattaaaagatgaaggttctgatattaaattacactcaggcccggctctgggcataggcgggctaggcctgtgcctagggcccacccagtc

SEQ ID NO: 63857 - DNA, 946 bp, Cannabis sativa
tttttaatgtggtatggattttgaaaccattagtctcatataaggtgggtcttgagactcagtgagcattaacaaaaaaaattattaggtcctttattcaaaatatgtgatatttttgaaaattattagaaaaaacgtatatttttaaaaaagaaaaatattttttttgacccctgagctcatctacaatgtcatgtcttgtcagcttaatttatgaaaattttaacagaaatcttagtttttagtaattgataaagttaaggtaccattttaacaatactgatattataaaggttattattatcatataagtagtaaaattaaaggggcaaaataattttattctttaataaaaatcttaatttttattaaaaaataaagttaaaaagacatttttgacaatactataattttataggggcacacaattaaagttaaaaggtatttttgacgatactaatattacaagagcacacaaatatataaaagttgacaaaataattttttattcaactaaaaataatgagggtcaaaaatatacaaataaaagttctggataaacaataattattatgacagaatactattaaaattattaaaatatatattccttaataagtggtttaaaatctaaaaaatattcaacgtattaatagcacttatggaattgaaaatcaaatcaaataaaattaatatgaaaataaatatatgatattaacctcaaaaaattgccaaaatagataaaaattaaatattagaatgttttaatatatgaaggtatagaagctattaagagttagtcccacattgttaatgtgtggaaataaattgtgatatataagatgaaagtgccacttctctcattgccaattggttttgggatggaacctccactactacaaaattagcttttctcaatggtttataactgtcttttatactattt

SEQ ID NO: 63858 - DNA, 1070 bp, Cannabis sativa
  modified_base (707)..(712): a, c, t, g, unknown or other
ctttaggaggttttgccgcaaataaccctttttttttgccaaaaatactgagagactatttggtaatgtttttaatttttagtttttagaactgtgtttttataagtaagaacagaaaataattttttatcattataaaaatttaatagtgttaggtttttttaaaactaatgttagatttttttttttactaaaaacatcaatattctacaccataccataacataaatccatccaaccctggaccgaacaccgaacccaagcccggaccccagaccttgaacccaatcctagaccccaaacccaagcccgaatctgatcccgaacctaacccctactcagacccggacttgggccggggtctagggtccagtgtcggggtatgggtcttcgtccgttttaggttgtttttagtattatttttaggttagtttttagtatgtttttaatttaattctactcttgtttggagtaattttacgctttttatcttttatttttgtatatttaaaatagaataagattagaaaatatcaaaggaataagatggaaaaaagatgaaaaagatctcacaaaaagataatctataaaatagagaaaattgtgcaaaaaaaataaaaaaataaagctgaaattttaagcctgaattcgactatgttatatttagaatttggaaaaatttgaaacataaaagttctagatctctnnnnnntctttccggaacatcttgaatcgttcaattctgagcaataacgagagagttatggccaaaatacgatcaaacaacgcactaaaaaactcacagcccaaataaagagggggaagggggggaccgcgcttaggcatggaaattccatgccgcggcccgcccctctaatcctaagcaaaataggttttttttagcatttatttttaatcttttttcatcattttttaggtataaaagaagtggacttcaacaatttttaagaagcaatcaaggaggacgaaaattggagataaaaatcaatcgcaaaggctttttcaacgagattttcaacattcttttcttctatattctcttctctttt

SEQ ID NO: 63859 - DNA, 681 bp, Cannabis sativa
cttggaaaccaatagtttgcagcccctgaatatgctgaaaaataggtgtggcttttgaattcgattgatctgcactatagcttagctgagcctcagtataatcctgtaaataattaataacaaactcttccacattgttaggaataccaggcttgttaaataaaattgagttatgagtattccaaatatgccagataatagcaataaagataggaaaatcatgtgtggagatatgattcaaagcttgaagataaaattctctaatgtcagttctatggtaatcatagtaaaattgcttaaatcttgaagacttccaaatgttctttgctctgggacaacctgttagggcatgagtgacagattcagtactgttaccacaaaatgaacaagtggaatgaggaataatcttttttagaaataaatttaaggcacaaggtaaaatatgatgaaaagccttccaagtgaaatgctttaatttggggggaacagaaagagaccaaagctgtttccaccattgctgaaaagggttaaggttggaagaagaaggagtatcaatagaagcaagggaagaagcaaagtgataagctgatttgacagtgataaggccagaaggatgtaatttccagatgagagaatcatctaaagttgggtccaggagaatttggagaatacgatctacct

SEQ ID NO: 63860 - DNA, 537 bp, Cannabis sativa
atgtcttatataaaatattgtctagggttctctctaatcgccttaaagaagttttgcctcaattgatctcggataatcaaagtgcatttgttcccgggagacttattacggataacatcatgatttcttatgaaataatgcactatttaaagcggaagagacgtggtgaagaaggttacatggctgttagctttgatttcagtaaagcatatgatagggttgagtggagctttcttaaagacatgatgcttaaaatgagatttgatgctcattgggttaatttgattctgaaatgtgtgagttcggttcgctataccattctcaacagtggtagagagatgggtcctattattccaatgagaggcatccgacaaggcgaccccttgtcttcatatctattcttgatttgtgctgaaggtttctcctcgtcaattaagcattttgagcttagtagaagaattagaggttgtaaagtggcaaacagagcttcggttatctcacacatgctgttttctgatgacagttatgtctattgta

SEQ ID NO: 63861 - DNA, 1080 bp, Cannabis sativa
  modified_base (577)..(581): a, c, t, g, unknown or other
ataaaatcaaaaaaatcgtaaaatgttcaaaattcggtaaaactgcatttttgtaattttctagttgtttttgtgtatttgtgaaataatccttttgttaaatgacaaaatagaacttatattttctaaatagtacaaataggacattgaactaattttttgccaaaataaaacttaataataattttctctagaggtgttatgacagaactgattaaattttctacatttgttcgtgttaggctcgactgattagtgaaattccgttaaccctgctcattatgatcaaaattagatcaaacgagtatgtatcgctattgcaaaaaacttgaatacgattaaggattttaaaggggaattagcatacttataattaggggtattcataaaatagtcgatccactccaattcgcacgatccaatccaatccaatctgcaaagtgcggatatccgcacgtacggattggattaaaaaattcaaaatccatacttgtacagattggatgttgattgacatgtaaaagtaatcgatccaatctaatttacaacacacatatttataaaaaaaattaaaaannnnnatatacaaataatattttaatataaagaaaatagtaacttaaaagtctaatacatataatacgattatatttcaaaacttaatagatcaaatatatattctacttttatatataattttttttatatacaatttaaaataaaattaaacatttatttatacatacaatttttttttcttctttcgaatttattatttgttattttatttattttaatttgttgttggagacataaaataataataatttaatttatttgttgctagttatgtgaaaaaaaaatatttttttcataaatattaaaaagtaatcaatccaaaataatcaatccaattcgaacttttgtagattagattggattggagttgagctattgtgcagattggattggattcataaaataaaatctatacttagtgcgaatcggatacactatgagcaaaatattacaaattagatttgatgaacatccttgtaatgcgatatttgtgtgaaaata

SEQ ID NO: 63862 - DNA, 1590 bp, Cannabis sativa
aacttgttctttgtttttgtattacaaagtacaaaagcacattaagttatacaaaggaaggctctctctgtactaatttgtatctttttttttgttgaagcactagagcttttgatatgcaatacaaagatcaaaactaatcaaagaaaacaaataaggccaagtttaacgaggttcaatcaattattgttgacagtggcaattgtctactccctaagggaacagtctttagcttggatctttattaatcaaatacttagttacaatgaatgaggatggagttctctagtctaaaactctatacaattattttagagaggagagtagagattagagatcaatgagattaactagattgtatttatagacctgtttaagattgttggagtgacgcaattgttactaactaacttctctaactgtctaaaatcaagtcgagttagttgactagctgacaaagagagaaaccgattttaagtaacttgtaccaatattcaggcccggtcttgagtataggttgtgcttagggcctacttagcctaaggcctaaaaaaattttctttttaaaaatatatttatttattgattttaaaacatattatatttttttaaataaaagttcaaaaataattttttttatgaaccattaaatttgaagggtggtccttccaacaccaagacttttaaagtaatagatgcacacaacaaaggaatgctaaacacaccgagagcaagattatataatcttgtttttttttatttggaactcgaacccagaatctccaacacacacacacccacctatgaccacttatataatccaatcttacaaaatgtacactttcaaaattacaaaagacattaacaatataatatagatatatgatatagtggtctatgaaacagcataaataaaagggttcttctttaatggtttcattattatttttgtgtgatgtgatcaaatcatatgtaaatgacatgtcgtttcttcacatgcaaagatgtgtggtggaaatgaaaattggcacatttttttcttaccaagatcatcttcaatcaagtgcctaatgctatatttttgtgtttttgaaaaaatttcttctccaattcaatgcggactcaaactaatatttaatttttatgtcaaatttcatctaatattttgctattatgcagttgagaatggagatagtctaaaaactattgttgtttttcattaggatgatatcgacgatgccattgacgttgtcgtctccctcaaccaccaccaccacaaccgctacatctcttccttcagttgacaaattcatcttcctaattgacaattccaactcaatcactcgccttctccagacccacgcagctgtcttccgccatggctaccacgaccactccattattaacttcaagctccaacgctcctatgcagctcttgcccgtctcaactactccgttgctcttttccaacaaacccaaatgcccaatgttttcttttggactaatattatccatggccattcccaatctggtttgaacgatcaagcactcttgtactatacccatatgttgaaacaaggtgttgaaccg

SEQ ID NO: 63863 - DNA, 690 bp, Cannabis sativa
agcggggttatggaatttgaccattttagccctagttttgagaaatacctaagttatagcttggagggcattttagtcatttattattaaggtgattaggtggttacccaattagaagacacctagcaactaatgttttcagcaagagattgattaatcaatctcttttcatttgaagcaaattaaggaattaaagaaaaaccaaaaatatagaaagctctctttccttccctctctcttttcgaacccggctagaacaagagggtttgctgctgaacttttgtaatttcagcaagggattcaagagaaatcaagacaaggtaagccctagcttctttctcccttagttcttgaagttttatttggtttaaatgtgtgattttgctatatgggggctgttaggattaggtatgtttagagtttgagttcattttagttgaatttagttcctagcagctggtttcgatgtttggattaggttttgtgcaagtttgagctttgagtacaaagctttgatctctaatggcatgttgagtttcaatgagtttttctgtgaaatactagttggactttttttgtttatgcattgtatatgtgttatggaaggtttggttgcatttggtggaggattgagcaagaaatggaaaattttgggtgaactggtgcaaaccggctagccgggtttggcag

SEQ ID NO: 63864 - DNA, 708 bp, Cannabis sativa
ggcgtgttattcaaaactgttttccggcggctgctgcactttttaagaaaaaggtactcacttctgcagcgtgctctttatgttctcaagcctgggaatcgattggccatgatttgttccaatgtagccatgccaaatctgtttggaggcacttcaatttcccaattgatttcaacaaagcacgtaatatggttggtggagattatatcttccatcttgcaacactactaagccagcaagaattagaattgttctttatcatcatgtgggtaatttggactgaccgaaacaaaattaatcatggtgaatcaaggcgtgatggtttggctctagctaattatgctacaaactacatgggaaattatcaaaaagcaaaaaatcatcccactgctgttagtgaaccgactgttccaacatccactataactctaccagctgaaggaattccttggaaaccacctgatatgcttggcttgaaacttaatgttgatgctgcggttaatcctatttctaagcttttgggagttggtgccatcgtcaggaaccataatggtgaagtcattgcggctatctcgaaacctgtctaaggttgcttcagataagatgaaatggaggcaaaagctctcttccatgcacttaattggatatctcaactcgcattgccgattactcttgtggaaattgatgctcttcgtgtctccaattttt

SEQ ID NO: 63865 - DNA, 929 bp, Cannabis sativa
aaaaaattaataaactgccattatcatggtcgcgacaagacctatgatagtcgcgaccattaggtttaaaaacccaaaaaacttgttttcagcaaagaaaattatgcccaaaacacatcagaacccaaacaaaaacttagaaccatcacataggctttaaatcattaaatagacagtctaaaacaccgtttcatgcattaaacatcaacaacaaactctcaaaattcagattacacagtaatcaaaatgatgccttaattatcaagaattcaagctcataacttgagcttcaaaacaacttgattccaatatttttccagcagctcaataccaaataaaacatgaatttcaacctagaaaatcccctgaaatctcagccacaactcaacaataaaacctataacaacttcacgttattcacactcaattctatcaagatctaacacaaattccataaacatgcatattcaagaacaccacacccctttcatgctctttttacaattaattcagtaataaacaaagattaaaaccatagaatgttacctcaaaactcaatccaagagcaagctcaagattctacaataataaagctccaaagcaagctaagattcaagcttttcaaccaaaaatcaaactcgaattcaaagagggctagagagagagagaggcgggtcgggtatgaggggaacaaaagccaaaaatactttttcattttccttaaaattcaatttttaccaaagtaaatcaataaaggtcaaaagaccaatttgccccaagggctaatgcacacataaccacacatacaagggtatttatcgcatttcatgctcatctattttcaaataaaatttagattcctcactatcaaattgcattttgggcccgaacccggttcaacccgaaatacccggttgtgactgtaccgc

SEQ ID NO: 63866 - DNA, 1032 bp, Cannabis sativa
aaattcaggccaatttcccactagtcccagacctggcaatccaccatctcgcagtcaatttggcaacttcagaggaggactctctcgcggccgtggcattaacaccatttggggacaaaaaccacagtgccatctgtgtcacaaactcggccatacagtgcagcaatgtttttatcgctttgataaaaactttactggtcccgagtcctttcaagctcttcaaggaagtaacagtgccaatattgcagaagttcaggcctattatgcctctcccgaagtggttaatgaccctgattggtatccggattcaggtgctacaaatcaccttacaccaaacgagcaaaatctcaataccagcagcagctatcttggtgaacaacaagtgcatatgggcaatggaataggtttaaacattcttaatattggcacttcttcctttatttctccttatcattcacaacatcttgttttgaacaatcttttacatgtgccttctattactaaaaaccttctaagtgtgtctcaatattttcaagataatggtgtgttttttgaatttcaccccttccattgtattgttaaggatcgggcatctatgaggacttacttgttgggaaacttgagaaaggcttgtacaagtttgattctcaacaactcaacctcctcaacacccgacaacagttttatcccagtccttctcccaattccaagtctacaccagattctgcacagtgtcactcaagtagtattagtgatgtaaacaattctttttctttatggcacaaaagacttggccatcctcatactagaattgttcaacatgtactaaatacttgtaatatcaaagtgagtaataaaaatactgatttttctcaactgtgcaaagcctgttgtcttggaaaaacccataagttgccttttcctcactccactactgtctatactgcacctctccaactcttacactctgacttatggggtcctgccccaatcaactctgtgtctggctataggtactatattagctttgtg

SEQ ID NO: 63867 - DNA, 1890 bp, Cannabis sativa
tatgcttacattattgatatcaggccattcacatcctggtaatgatattgatgtgtacttagcccctctagttgatgatttgagtcaattgtggtatcagagagttcctgcatctcgacaatagacggatgttgagttaagagcctaacttcatgtaacaatccatcaacatctcgacacccctcctctttgtccaaaataagttgtactgcacgaagacaatcagactcaattcaaaacctcggtaggcgacattgtagccctgtacggatcccgtctcttatagcatataattcagcaattaaaggagaagtagtcattggcaaaaccgtggcagcagcacactgaacaactccatcattgccccaaatcacaataccagttgttgctgatttatcctccatccgatgacctacatcaacgttaatggagaccagccccacaactgcggtgtccacctacctcgattccccttgtctttttcccgcactatcccattagcttgctaaaattcgcttggaaattttgcacaccaatccaagagatcccttacccgtgggtgatacccccatgaaccacaatatttcgagcattccacagatgccacccaataactagaaaaagatcaaaagagtctttagaccataccttagcaagtcgctgaaagatccagatggtgtctgaagtttgaagttcctgaatctgatcccaccatttacatctctttcaaacttctacactcaacggacatgcccataacacatggccaacatcctccacacacccgcacgtgcatatagagaatctaggatccacatccacacctcttttagctaatgctttattggtgggaagccatgagtgacatcctttccaaataaaattcttgacttttggaggtaccttagctttccacaacgtcttccaccatgcttctagctgtctcgaatgcgattggaccactgtttctctcatttttactacgacactcgcttcgcaccgtatactcaccattattagtgtaatgccataatattttatcttccagactccaatctccactaggaatgctaagaatcaaatcaacatcttccatattgaaacttgcccgtataaactcttcgtccccttccatccgctaattttaaatcaataacatgtaattgtttcgggaatgtaggcttatcatagacccgaaaagtcactggtcgtggcaaccatggattctcaaggatcctaacttcattaccactaccaattctccatcgataacctctcaagataatctttttgccccaaaccaagttccgccacataaaagaagcgttgctgccacatttagcagccaaaacacttttatcgggaaagtaacatgcttttaaaaccttactacatagggcattaggaaagcggatacacctccatatctattttgcaagaagagcttgattgaacatacccaaatctctaaatcccaaccctcctttctcctttgatttacatacataagaccatttgcactaatgaattttcttgttctgctccgatgacccccaccaaaatcttacagccatttgatggaggttctttagagtattctttgataatcgaaaacagctcacggtatatgtaggcatggcctgaagaatagccttaatgagtacctctgtacctgcaactgaaaacattgatctcttccaacctttaactttttaccatactctaatcttgattgtctcaaacagtttcttcttgcttctcccaacaaaagatggcagccccaagtattgcccataattatctaccacacgaacttcctttaacgtagctaatctactcctcaaacttctatctatccttcttccgaaacacatctcagatttgtgaaaa

SEQ ID NO: 63868 - DNA, 808 bp, Cannabis sativa
  modified_base (62)..(66): a, c, t, g, unknown or other
attaagaaaaaaaactgttcaaaagaaaaattgaaaataattttttttttgtttttaaaatnnnnnttctcaattaaaaaattaaaaaattaaaaaagttgtatagaacatcttttaaaaaatattttcactttttcaattttaaaaacagaaaattaattaaaaaagtgttatcaaaggtcaccaaagcttttctatgaattaataaaaataaacgctcttagctattcagcaataaataaataaataaataaataaatggtcttcaacccatccgaggaggaatgttaatcaaagatcttccataccaactcaggaagattattattatcttttttttaggaaataacttcatagaataccacttaacaacaaaacactgaaggggactgaaagctaaaaaattcattaataattggtactagtcaagatggagttccaaatgcatgaagggtagccaggccaccagattgtacattaacaaatctagggcaaaaattaaaactcgcaaaaataaatttggaacataaatttttaatatcatcaagaattaaacccaaccaaaaatctaaaactaaagaatgatggaattcatgaaccaagccttgaccatcaaatttgaactgaacattgagaatacagtaggagatgcattgagtcatagctttttggattactagtgcttttgcccattctagaatgatattttctttcattttccaagcagttgaaggaacaattttgctgttggaatccattataaccatgtcgagtccacaatgagcattaagagaatcattggcagtat

SEQ ID NO: 63869 - DNA, 587 bp, Cannabis sativa
tatatatatatatattaattcttatttaattttttctctgaaggaatctttagtaaaacagtaatttagcttttttgaaaaagaagaaaaaaaaaagagataattcttatcacttttgtggtggtcttcaacggtaaacaaccactatataataacggaattaaactaattaatatactacatatcaacttgcatggttaatatatatatcaattatatatatacttttttttcccactttatatataatgaatcatagtaaataacaaaaagaaatggactagtaagatgaagagaaaaaccaataacaaaagctagaaaaaaaatgtataaattttataataaaacaaaacaaaacaaaataggaaagtaaagataggataattctatgaaggaaattaacctagagatagatgaccaaatataattgtgatggttatatttttatttgatttgttataacatgttacctaggtaaaaattttatttttacacttagaataattatcattaattatatatttaaaataaattaattttttgattaaaatatttaataagacattttttacaattaatatttataa

SEQ ID NO: 63870 - DNA, 1233 bp, Cannabis sativa
attttgtattttttctttcaaatagaattatgattataaattaatcattttttttagttttaaatttaaattttgttagatatttttttttttaaaaaaatcatgtttaaactctccttatgatttttagtattaaatttaaattttgttggatattttctttatattttttcttttgttctattttattatcattaagttcaaaacattattaactttttagttttaaatttgaattctaaatttgttaaaaaaacgaattttaatttggataaatatttacattttttttaatttattttcctccaatttataaatatattaatttaaaattctctatataaacttttaggtaattaatgaccacctatcgttttattttttctatttttatttattttatatttttttaattagctaattaaaaaaaatatgcacatatatattttaaaatttacttcctaaaaagattaaaaatttgccaatgttctattaaaattaattttatacttaatagttgtacgtacactacactcaacaaaatttttatcaacatcttaatatctattatattataattcaaaatttgatactaattattttgtatatttactatatgacatcgactttgaatataataacaactacaagtaagatacggtgatgatagcggttttgaagtaagaattttttataaatttatatatcaatatcttttttcagatctttattatttgtgaagatatttattaatttttaatattctcttcactataatatttgtataaaagtgatcagttaatccatcatttgattaatttgttttatgcatagagcaaatctatgaaaaatgatagtaacaaaaacaagtgagatataataatgacatcacaactttgatcaaatagtactgtatttgtttgattagagcaaatttattgagaatataatagtgataattacaagtgagatacggtgacgatagtgacttgaatgtagttgcgactacaagtttggtaatgataatgattttgaaatcatatgatgcgtttttttatagatttattacttattatattatatatatttgaattctaatttattttttttcaaatgatatattttgaaaaattatcctatttatttgtaaataaattaattaaaaaaattataatttactaaatttaaaataatttatacaatagtattttctttttgtattattaagataaa

SEQ ID NO: 63871 - DNA, 579 bp, Cannabis sativa
  modified_base (82)..(83): a, c, t, g, unknown or other
agttcctggtaaaataacttccaacagattagccctatatgtactcattaacattggggatccttgactggcttttgggatnnaatggtctcctcagtgtcattaagtggtaagtatatattgatcacagatagtccaaggtggcacccttctgtgattgccacatggcaagcatctgggaatacagataataagaaattaagagtttcttaccatcgccaacaactatagtttcatgaccttgataaggaacaaaagtttctaaattggaattgtcaaaggtaatgtgattggttgcactagtatcaacataccaagagtgatcatcaccaaaatcttgaatagtagtagaggagtaagcttgtggatcatactcaaatttcatatctataagataagcacagttttgagaagcaccaggtttaagggtacccaatttttatcaaacctataatgatacactggagcagtatgactcgtgagcatatagacttgacaaacaactctaggatgggagtatcgaccatagcctctaccgtgactagtagtgtaatatcccgataagtctaatggtaaata

SEQ ID NO: 63872 - DNA, 738 bp, Cannabis sativa
aatatgttcgggatttttagaattctttaaggcgaactctaaaaatgcatcaaaccctacttgaaatcacagtgtgtctctctcctcacgcatcgatgatttatcgataacaaatatcctaaccaaaaaaattcagtatttagtaactaattatacctagttacaaattacacaatgtaactaactaggtttctcacaattgattcatattaatttatatattactaaaattcttgttttagtttggctcatgttattaagttgtctaagttgtaaaagttgtaattaactaactaggatagtgttttattgattggaattttggtagaattagaatgacttttcctaaagttactccattcatttgtttggtttgtcatttataattgcaaagtttatatgaatgtgttatgtcacctaatttcttacaactagcgagtaataacctagttatatatgtttatacttttccttgaacatttatgttttgttagtaaaatttgaaccaaattttaccaaaattttggtaccataacggttgtaattggacgttcccaaaaactttaaaagtacctaaagtaacaaacaaaacaaatataacaatatagaacaaacaaactaacataaacattacaaaatttctccacccatccgatcgcagtacatgtattcgtagaacctacttcattacggatgaatatttaagatattcaaactcaactaagcatgcattgataa

SEQ ID NO: 63873 - DNA, 1479 bp, Cannabis sativa
atatatttatattgattatacctgaacattagcttcagcaacagatccagtgtttgtagaatcactacatgctttcttgtacttgtcaatagttgctctaacgctgcataatattttatatttaatcccaaaaaaaaaaggcttaattaattaacaagcagtcaacataaaatttttcattgatagagcccagttttaataaaataatataaataggaaaaaaataatgacagttaatattattggagttatattgtatggtttagacattgaagaaatcagaataaggtaaagagagagaaaggtataaaagatagatcaaagaaattgtgtttggtattaatgaaaggattgaagaactaataatctaaccaaccaatactaactaaaccagctgtcatatctaacaatctaactgaaataacaaacactaaacagttagacactcatacaaatcaattttaatatcaacactaataattaagatggagaaaccaacaaactagaaaactaacagtgggttatatacattattagatacactaccagtctaatcatttttggaggatcaatacaatatatatgtatatatataaattatttatttttatttttaattattttacatgcaatttaaaaaagtttgggggccaccacaccctttgacccctaagtctatcactgactaaactccttttacaaatatgatcatttctattggataatttagaattataaccagcaagctcttcactctatatattaattattattttttttttcattgtatttcctttgattttagttataaattaactttggtgtgccaaaacatgtattttttttttagttttaatcatgctgaaattgaatgtagaaatgcatcaaatgttgtttatgttaaatggaaatttcaatacaaaagattttttttttttgatctataaaactatattaaaaatattgtcctaaacctgtatgtttttaggactacttgtagcttttataaaatatttagaataattttgtaaaaaataaatttcaaacaatttaccacacttataagaaaaaacacaaaaccattgacaataagaaaaaataatttattcatcttatatatggtaatttatttttacacatgagactaactctaataaataaaaaactatttaaaggtttttatttttataaaattatatcaaatttagctaaattttgaaaactcttattttatcgtttgaatcagaaaagaaaaagggtcataaatttgctaacaaacaaagatttttccagcactccctttccccaaaaattatacattattagcatagtatatattaatatttaagtatctataatttaataaaaattattaatctacttttattatatgatagcagtcttctctatatatctaattaattaattactaaatataataaagggtgcacatggtttcttccataatccaatatagaa

SEQ ID NO: 63874 - DNA, 1982 bp, Cannabis sativa
  modified_base (190)..(195): a, c, t, g, unknown or other
  modified_base (829)..(839): a, c, t, g, unknown or other
gttatgtcggtttgtattttttttcggttttgtcggtttggtttagtcgggttattcgggttgggcggtttacgaaaatttctgtacagccctactaaaaatgaagtgactagttataaattattatatattcttatgttgtgcctaaaatatctgtgactaaaagtattagttacaaaaattacaattnnnnnngactaaatgtatttttagttactatatatacttgttgtgactaaaattaaatctaaatactatattttagtcacaagtatcattttgttgttattaaataacatatttaattataaaaaagaaattatattatgactaaaaaattatccttaaaattaacttttttttttttatagtgaaattaagttgcatgccaatttctatagcatgcattttcctctacgtacttactatataatctaatacattttaatattctataattatggcggtattgacaaaatattcattctcattattgctactaattaaatttgtagtctcacttcttagaaataaataaataaaaattagtcctagtcaatattctaattgatttattaatgtacacataaattatactacaaaatcacctgtcactttcaataaattggactcattttataataaatacaattgattaaaaaaattagcacatgagtgtatatttatgtctctgcatttatacatacatatataatgtatttaatttggctaattaggaattagtatcaaatcatatttttagaattttttaggtcattaaacattctttacaaaaaatcttactataacaaaatttgtgactaaaagnnnnnnnnnnntgactaattataaatcattattcttatgttgtgactaaaatgttcgtgtagctaaaagtatttgtcacaaaaattataatttgttatgactaaatatattttaagtcactatacttgtttaaactaaagttaaattagtgacaacttgtatcttaatattatattttagtcacaagtgatatttagttgtgactaaaagtcacattaagtcacaaaaaaattatgttgtgactaaaatattatcactaaaggtatttattctttgaagttatttctctgaattaactattgaatttagaattcaaaaattttattctgattttatttaattatactaataaactcttgatgtggacggaaattcgagggcactatttgacatatatatgtcaaagttcaaaaagtaagatttatatggataattgtcacattaggcgcctattagtaaaattgaacaaaatttgatggaagtttttaaattcaataatcttaataatttaaagcaaatttttaatgtccttaaaacttcgtagggcataatttggttcatgtcaaactccactctaaaaatatatatgccagagtattattttattcaaatttttaacacggtaaattattcaaattttcttaaaactttataaatttgatattataattataacaaatgttgttatgaaaaaagtatttcacacgtattttcaaacgtaaaaattgatgatagcaatttttttaatagttaaagaaagtgggttaagatgagtgtggccaatattaaggtaaatggagagagtggatccctattatcactacaaaaatcttactgtaacgtcttcgcttcaagcctttattgagcctttacacccacggaataatgactcttatacacgagtacgttactctggctgcttcatggactgatgactgactttacaaaccaacacgagtgtttccagtgtgctttgtcctcactcgcacacttcctgagaaaacttcccaagtcacccatcttaaaactaccccaaactgtgaagttcttttatgatgggctaccaggaaacaagatgcacctggttgatataagtatagtatcaatcaatccattttttgccctcttcaactgtgtagtcccatacctacaca

SEQ ID NO: 63875 - DNA, 855 bp, Cannabis sativa
gtggataccaattagacaatttctgatttgatgaggggctaaattagaaatagttaataaatattactaactgttttgacagttggttatataacaagtaatggtccctgtttttgcatcgtatcatatttttcacaatcttgaatccccatcattaggaaaataaggcttcaaaggtttttgatgcaaaattggaagatcataccctttttacaaacaattcaatggactccagtacgttttcgctaatctataattctattgtttcattctcatgaattaattaaggctaaattcaaatttatagtgttcttaacatcttttacttttggtgctacaactccaataattcacactaaatatctcaacaaataaatacatacgcgatcattttcaaaatgagcaaacaatgattatgtaaaaaaaagagttcaccaataatatcaagcatttcaaaaatatcaagattctcaaaatatttaagtacatataaccaatgtttatttttatttatgttgttctttttaatttaataattaagttatttttattttatttaacattagtatatttgtattttcaaatatgtccatgctttaaatcaattattttcgtaatacattttaacttgagtactaaaatgttacattgttttttaaaataaaataaaataagagttagaatatgaagaaaaagttttacattaaattgatgtagattcaaaattcaacactattaataatgtaaaattttgtacataatttagtctattattatagtgaaatagtgtgaagattctatataatttgataaaatagtgcaccattagatgaagatgctcttacaaaggacatg

SEQ ID NO: 63876 - DNA, 1080 bp, Cannabis sativa
  modified_base (995)..(1035): a, c, t, g, unknown or other
cttccaaccttgaagtttctcccacaccttattctgaatctgaccaaacacttctcttttatttcttccaacaaacgcaggtaagcccaggtatttagtatggttttctataaatgtgacccccagtgaagtagcaagcctttgaccatctgtatgtctaattttactgcccacacataagcttgatttattgaaattgatgcattggccagacatagctgaatagatacgaagaacctcacctagagctgccccttcctctaaattagcatccaagaatatcaggctgtcgtcggcaaatagaagatgcgttactcttttctccatgaggccaaaccgaagcccatgtaacttatcggctcggctagcttcgttaagtaagcatgataatccttcggcacaaatgagaaacaagaagggagagagggggtctccttgtctcaagcctcgcttggggacaatatgaccccgagcctctccatttagtaagattgagaaggtaaccgttttcacacaacccataatcttcacgatccactcttcctcatatcccaggtatttcatcatcgcctctataaactcccattcgacccgatcataggctttagacatatccaacttgagagccattttccttccgttgccaaaacgacccttcttcaaacaatgtaggctttcaaacccaaggatggcattatcttgaatctgtcttcctttgatgaaagcactttggttctccgaaatgactttgtccaggctcaatttcattctattagcaagacatttggatatcactttatacacaacattgcacaaactcaaaggtctatagtcgcctaccatggttggtttcttcactttggggatgaggcataagagagtgtcattcaaactgctacaatccttgttcttgtttaacacttccaggaaagtagtaatcacctcatggcccacctaggtccaatgattgtgataaaactgttgggttttatgcnnnnnnnnnnnnnnnnnnnnnnnnnnnnnnnnnnnnnnnnnaatatagatcagaaataacattcaatgttgcatggttcacatgat

SEQ ID NO: 63877 - DNA, 786 bp, Cannabis sativa
agagaaatgctaaaggggcacccgaggtgcctaaataagggtgtaacgtcgctattggtacaattcaatatcgggtcccacttatcttaatttaataaatattatagagaaccgctaaccaactataagttaccacgtcgtagaggtgctagacaccttggtggtatggcctcatagcagtgctcagatgaaaagtagacaagattagaaacaaagaccaacctaagtgatattgaaattattcctcctattaatttcacattggagtattattatagaaacatgtaaataaattagtaataattacatatttatattcgtacttgcacaaaattagagatacagaaacattgaaatagtagtttataatacaaattcaaaactaaaatactaaggtaaataccattttggatgctttgcaaaagttaccaaactcttcctgttttgttaaatgacaaattaaatcttatattttttaaaatcgtacaaaatagtacccttaagctcaattttggtcatttttttttaacataaccaacctgaggctaatttctagcacgaccaaatataaaaaaaattaatcagtttgttcatatacacttccaggtcagactattattaaattatattttgataaaaaatgaactcagagcacaattttataccattttagaaaacacaaggtccaatttgtcatttaactaaataaaggatccaatcgttaacttttgcaaaacaaaaagtccaaaataatatttaaccaagatgatattattgtacagtgat

SEQ ID NO: 63878 - DNA, 1027 bp, Cannabis sativa
aagactattcatgcttttagagtcttttggagggattttagcatattttggtagaaaatagtggaagccggcgagctcgattttacaaggcgaaacttaatttcatattcggatgaccttagaagcagaactggacttcaagctcaacatcaaagttttagatctcgttcttaactttccaaaacatcttgaatcgtccaattgtgagtaatatcaagagagttatagccaaaatactattgatcatcgcagcatgaaatttctaaaaaaaaaaagagcaaaaaaaaaataataatttttcaagaagagttgcaatatttaacttttagtgagatatttctaaatactattataaatagaatcccaattctatggggatctatctgtccactataaatagaatccgaattctaataggattcatataaattttcaagcactataaatatgaactcttaggctaccgatcgacttcgaagtgttcttcattctagttcttttcttctccttctattcttattaaatattacaatttttattataatgtctagttctgagtagttttcttttagttaagggttattttaaaacccgagacatgaactcttaatttcattattgaatgttaatttttagtttccacaacacgcagcatgtcgagagtaagactcccgggggccaccgacccagatctggctggcggcgcccataggtgcaaaaggaatcttagaagacacttaaagagaggaagagactttaggaagaaaacccttacagaatactcacaattatcgtaatttaacaaagtatttctgttttattttcaaagaagatagtgtaatcaaaatgtagtaacattagagaatgtttacctaaatgactttggttctttattaaaggatgttgcaaatttatttttaaattttcaagagtgtccctaatccatgtacgacgaacagtcaatactgctgcacatggattagcagtgcatgctcttcggatggatgaacaaattgtttggctagag

SEQ ID NO: 63879 - DNA, 660 bp, Cannabis sativa
  modified_base (51)..(69): a, c, t, g, unknown or other
actttatatgtgtttatttatcattttacaaagttcatatttagggtgttnnnnnnnnnnnnnnnnnnnagatttaagatcctggtaaaataaattccaacaatgaagaaatagaaatatttggtagatttgtgtaccacacgagggttggccctactagactagaacaaaacctcttacacatacatgcctctcgcaattcacgaggtatgccaactgtgaacattctttgcttgtaacgcgctatgtgatcgttagggtccgttgttccgttgaacatcttcattgatgggaagacaaacttttttggcatctccactggagctatagcatccatgaatggagagtctacgaagctacttggtaagctctttttgataggtgcagggactcctgggattctatgaatcatagcctccatcccttccagcttccttgttaccatttgttcgatcatctcctcaggtgtcattgcgacgacttgacctgtagatggaacaataggaacattagatataaaaatacttgtagtgattgggtcggaggtcttgagttgtcatgtgcttggtgcgggaacgcttctgtctagaactgttgtgacctgagcgtcggtcatagtctcgtcacctaccaaagagggtccatgtgttagagtagatc

SEQ ID NO: 63880 - DNA, 1401 bp, Cannabis sativa
tggggattctgataacactaaaatcagaagtagtactgctgctaggaaattagggaatgttagaattgatgatgatgatgatatagaagtagaggtatcatacttgaactctgctatggtcttttgtgtctttcgttttatgaatttattttatacatgaatagttagttagatgttcaaaatagtacaaattaaatttattgtcgtgtaatccaaatagtctttatatatatgtatatttctattgctaataagatgaaacttgtaactgtttatatagtattttcgtatactatgattactttattgataatttatgatgacttcttagctgaagatcacaatattataacaactctagctctgtagtttgtaaattatctctgaaaattgttatgtttacagtgcaagaaaattgtttgataaaatgtctaacagagatattcttttgaaaggtaatacaagtagttcattttccctattgaatagtagctcatttctttcaatcattgaattaatattatactgcacacttagaacagttttattggtctttctatactctgttttagtgagtgctaactttgactagacacagtgacaataaaagttcaaaaggtcactgaattttgtatctaataggtatattatattagatgatgatgaagatgagcactacggatgacgatgatgaatctcagttgaattgcacttgtctgatgatgccaataaggcctccggccactactccgtctaacgtcatcatttcatctcctcaccaccatgctactatactactgtctctgctccatctgcccccctcaatcaaatccaaggtaaatgaaatataatgcactaaaatcttaattttgtttagatgtgcataaaataaaaatatagctaaattaattagttttatataaaaaatttaacacggaagaggtgcaaattcactataataaatatttagaatataatttatttatttatgagaacaggtgttgtaggagaagatgaacagggagtggtggtggtgggtccaggtggaggtattgatatcatctagtaacaggtatattactctgtttggcaatgtgcaatgtatttatatttacacacgctgatatggtaactacaatgctaattcattcctgctattggttagatgattggcctttgagaattggttatattgcttttctttttgcagcaatagagagttggttaagtggtgaaactatttattactcacattttaaaattttcttactaggcatcaactgtggagaggataatgaagaatttacggttcaaaatcactaagttgaggcaatctttggaagaatctaggtataccctttctagaatgtgactgaaaaaaaaaactaagaacacttctat

SEQ ID NO: 63881 - DNA, 1297 bp, Cannabis sativa
tgcttgtctgtggtggacctgtctcttcccctatgaaaatgttgtggcactctcacatgatgttattaagagtttgtttggtatgccgtattatatcgtattgtattgtatagtattatattaaattatatttcatacaataatattttatgtaaaactatatgtggtattgacttgtatgcatgagtacataaatatataatattttattataaattaaagtttaacataatattatataaaaatatgatatataatcgaatttaatacgatacaatacaatataatacgacgtaataatgtaccaaacgagccctaaaaattttaatttattccataagtttcggtccaaatcgaaggtgttaattatcttctaattagtttatatgtatacatatttgtgatatagagagaccaaatacatccatatcttttattcatgggtaaatattagttcacatatatataatctttatatattccatatataagaataggaccacataatatatggacaaactatatatatagtgaccaacacgtacgtggacagacaattaatacaatcaaccaatttagaagggtgaccatttggctggctggaaccccccatagatgagttggatgttgtggatcacatctgaatatgaacccttaaatcccacagtgaaactaccactggggagtggaaaccttgttaaatgtgtagggtgaaagagcttgtcaaaaaatttactaaacacattcgatgatcgatctccaagagtgtcaagaactctatcatcatctagagtgatgcgaagaccatgaagctcatgagaatcgtataatgccgaaatttccttgataaaatgatcatgttccaacacaagtttaccgcatgaccttccttcgtctttcccataaatgtctgtgtgtttacctaccatcgtcgattcgtaatcgacgatgagacttttcatacgattaccatcgcttcgcatttgaatgctggtaatccttgttttattctctatgtacgcatctgcctcagttgacgagtgaaattgttcggtattacctccttctcctctaccaagaactggtgagaaacttgtcgagtgttggagttgtggcatgccctttgaaagtgacgtaagttgtggtcgcggtatggctgttagatcttggattggattggtttgaaaatttgataatattttttgtagtgactccatatcacctttcgcatgaaaggcgatctcgttcaagtcagggtcagtgtatccaccataaaattcatagatggattttattt

SEQ ID NO: 63882 - DNA, 1386 bp, Cannabis sativa
  modified_base (1315)..(1324): a, c, t, g, unknown or other
agacttcaccgatcttaataaggcctgcccaaaagatttcttccctttacctcagattgaccaaatggtagacgccacctcagggttcaagctactgtccttcatggacgcctactccggatacaaccagattaagatgcatgtggaagatcaggagtgtactagcttcaggaccgacaagggggtatactgctacttggttatgccctttggattaaaaaatgctggtgctacttattagagaatggtgaaccggatgtttaagggcctcttgggaagaaatatggaggtttacgtggatgacatgctagtcaaatccaagacatgcatggaccatgcagacgaccttacagagtgcttcgaagtagtctggaggtatggattgaagcttaacttgaagaagtgcacttttggagtcaagtcaggaaattttttaggatttatcgtcagccaaagaggaatagaggcgaaccctgaaaaaatttaggctttactaaacatgccttcccccaagaagcacaaagacgtgtaaagcttgactggaaaggttgctaccttaagtcgattcatttctcgatcaaccgacaactgcatcccttttttcaatattttaaagaagtgccaaaaatttgagtggacgcaagaatgcgaggaggcattcaaaaaactaaaagaacatatggctaaaccaccgattctatcaaagccagttcacggagaagacttgttactatacttagccgtctccaaacgctgtcagcgcagccctagttgggaagaggacaaggtccagcatccggtgtactacgttagcaagtgcatgacaggggctgaggtacggtatcctttgattgaaaagttagttttttgcctcttgatggcttcaaggaagtggagatcctacttccaggctcatcccattaaggtacttacaaaccatccacttcgacaagtcttacagaagccgaaagcgtcagcaagactccttaaatgggatatgaaattgagcaagtttgacatacactacgtttaatgcatttccataaaaggacatgccctagcagacttcgtacataatgcaatgaggcagaagctagttcaagtgtgccagtactgcagaccccagcatggaaggtattcgttgatggagtgtcaaacgaaaatagatccggtgctgggatagcaatgatatcgccagatggacttcggctccaggcaaccctgcgtactgatacccataatcaacagatacctcaatcctatccttgagaggtccctacctaaggaaccagagggagagggtggtctatggacnnnnnnnnnncccaaggaaccaagagaggactaggagtcacccctccgatagggttccccgcaataataatc

SEQ ID NO: 63883 - DNA, 723 bp, Cannabis sativa
gagtcatatataagaacatgggcaactccactcatcaccaattggttttgagatggaaccccatgattctcaacaatataatgtgaatttttatttttaagtgataagtttgtaaaaatatatttttttttctgatttttttaggaaaaaagttaaaaaaaaaaaaattggaaaaaacagtataaggtaactagttaccctaaaggtacctcgttaccattgtaatttttccatttatttccatttttttttttgaatttttctaataaaataactttatatatatataaaaaaacatatttttgcaaaaatatcataaaaacccataaaatttgtaatatcatcttaaattttgtaattatagttcagtgtgtattgattttaatttggaattttagtacataatcatcataaaactgtttgggcccaagaaagaagaaaatggactagttgacttaggctatgggccatatactttgttcaccaccagagtaactgtacaaccacttattatcttttccttttctcaataaaattaatttgttattaaagatttttgtaaattttggtttactagtaaactataaaataagataagagtaatagtttgtaaaaagtgttataaatcaaataaaaatagagtgatgatataaatagggattatttcacaaatacacaaaaacaacaaaaaaaaaattacaaaaatacagtttcacggaattt

SEQ ID NO: 63884 - DNA, 782 bp, Cannabis sativa
aggaacaataatattaaaataaaactgcaagctttttagagaacataccaagtgagcggggtcgcttttgagtttggaaatgaataagaagtcaggcgagcacgactgaaatagggctgtaacttccagaactgtagaggtctgcgccaaccctctacagttctaagcaacgcctctcatggcgcctgtggaggagggctgtccacctcctccacaggggtaataatgttgaagggagaacccaccatcgatcccacatcttcaataatgccaagatccttccttggaatagcaatattcgtcatcctggcccttgccttccaagcagtgagtctcgaggattaatcggcagagattggtttgtccacgtgatgggagtaaccagtagagacgaccactggagagctcccatcattcaaagatggctccttcgaatcaccagagccaggaaattcaccagacacatccagctcactgcccctggggccgacaccacgaggaaaatccctaaccacacactttactcttctcatattctatttaggcacgatctttaatgagtgagactcaacatcaagtcttctcttcttcactggtgtggttctctcattggttggagaagttggttgtacaccaatgtcacatagacctgcttttcttttaattgggccgtgagaggtgaactcagccagttcttggagatatccttctcgagcttggaaattttttgtaagagatctcctttcatcaatatgcttagaataatcctgtcccaaaacaga

SEQ ID NO: 63885 - DNA, 952 bp, Cannabis sativa
taatccttcaatttcccttgaattcttgctgaattccttaagaatagtcgaagaaaaactcttgttcttcttatttctttagggtcgaatacaagagagggagataaaggcataaacttaagtttttctctattaattttctaacttaatatatttaaaaggttttatcttaacctttgttttgaaatcagcttggttattttatttgatgactcaaaatttggtcaactaacaaagaagtcgtatttatgatagacaatcaccacgatgtaataataaattataaaagagacacaaagatttatagagatttgtcccccttatttagcgggtaatgacttactctccttttagttgtattgattctagaggtaataccatacagatcataggtgagaaccttatgattctagctatggctttctttgaatagtacaatagtgagaacaattctaggcagaccaagaactgatgagttcttgtgaaggaccaaagaagaaaagacttagtgtctaggaggcatagatgagatatgagacgtgagagagggagagagggagaaagaggaggactagtatgaggcttaagaaagcctttgtagtatatggaatgacttagcctagattaagatgacttagcctgactaaggatgacttaggtttgagtgagacctaatgccctttatataatgtagggcttacaatagatctagttcaaagtaggttgatatcccttaaaatgagaagatatcacctcttatttacatattaaatatataagaaaataatatgttaattattctccaagaataggtaaataacttaagttaatctcctatttttgtgggttattgaagtccattcgttgttgagagtgtagtttaggctaaaatctataggggcacaaaaagtgcctgctagaagaggaactggccagcctacccttattttgt

SEQ ID NO: 63886 - DNA, 821 bp, Cannabis sativa
attctaatataattgtatttttttagtttggtgttgtgatgttttttcagtttcgttagctctggtgacaacttttaatagtggaaaagtgtttttcaatgggatgggatgctatatgaaaatgttatagctttattgattaaatttttggggacagttttgtcccatgtggttcgcgataagatttctgcagcacatagtttggcaaaacatgcccatcggttagacgataagctatcctggttcgaagagattccaccgccgattataatttattgcattgttaatcatgtgtgacttagttcagcacgtcaaaaaaaaaaatatcacttttcaaatcttgaattagaatcattaaattatacaataaatgactagtcaataccagattgaatagataaaggaataaaagaaaaaaaatcataaaactaccattagttaaataatagaaaggctcaagtgaatccattaaaattctagaaaaaagtaatttaattcatgataaaaataaaaacatccattaacgtaaatgaaaataacataaaaagaataaggagatgaaagagaaagaaggaaaatttaggagtggcaaaacaagttttgacatggtacacgaacactacactacacaaattttatgggatagggttaggaaaattagacaccggtcaaaaataagtcaatactatttgacacgaaatgaaaataggttaaacacttcacagaccacttaacctgaatttgatacgatttcttaaacaaaataaatttactatttatgtaaaaatatatattttgtaatttaatattgagttaaaaaa

SEQ ID NO: 63887 - DNA, 649 bp, Cannabis sativa
aaagaaaaagtccatttgatttatatgctccaaaaatgaggataattacatcattacacctacatatttcacataggatggtggactgcaggacccgcctctaatgaaacgggaattccttatctaaattgggaacaagatgtggatgggtcaaaaatagagatagtattttttaccaggaaattacattctatacttactttttatttctttttaatttttatctttattttattattctttaatttatacctaattttatagatcatgtccacattatgtgtattaaaaactttaaatttgataaattatgtgaagttatcattggtactttttgattataaaagagagtatttatcaattaaaattattttagagttatatttagttaatgtgtaataaaaatgaatagttttcaacttattcgattctttactccgacaaacactgtttaatattttgtatagttttaaatagtgttttatattttaatattatttatgcatttttagtatattactatttttagttttttttaaaacaaaaataataaatcatttgtattttaaatgataattagtatgatactttacactgcacttttaaaaaataggtgcctttcatatttttactactttttttttttttt

SEQ ID NO: 63888 - DNA, 707 bp, Cannabis sativa
ttatcaaggagtaaatctgctactttctccaaattctcaagcctagtagaggaaggcttagggtagtaatcttggtcattgaaaatccacgggtcattccaaatatttgtccatttcacatccattataactttgcaagcacctttcttaaggatagatatcgatcgcaccacattctttgagaaccaagaatttgaatttttagaggaacactccaagaacgatttacctctcaagtacttagctttaaaaaccttacaaaataatatagcgattgatcctcagtcattaataagcgttcaaccccatttggctagcaagacttgattcaattttatagtctttctaaatccaagaccaccccgagatttaagcaggcataaatgatcccaaacctttaaataatttccatgattattctcttcacaaccccaccaaatatatccctagccataccatcaattttagtggcaatcccaccataccatcacaaccccaccataaatttcacggtttaattaggctttcataatttttattttttacacagacggattttggtatttcatcaaagtcacgacttacgtcttgtcgttttaggccaattttatatctttttagttagttttggtagcagaatttcaatcgaagcagatagctaaacagtactactacctcttcagattccagaatgtgcggcgatgtca

SEQ ID NO: 63889 - DNA, 708 bp, Cannabis sativa
cacacccaataattcgtccctcaaataaaggaccacattgccttcctcaaacaatcttccatctatccaatctacctcaaataacttaatatctaaaacatactattagaatttaaatttaattagttacaattttttttttcattattaattaatagattttatttagtatatttcttctataaaaatttttaaattaatttatgtataaaagtaagtagttaattcattgttatatttgttttgtatatataaaaaatatgttgggaaggatagttaactacaagttaaatatgaggatatataacaatacccttgaatgttatatattgactagaagtaagatacggtgatgaaaacggttttaaaatcatatgataagtttattcttatgacaattcactctcaaaataatagttaagtctaacatattattataattaataagactaaaatttgaaacaatttattagttaattatcatttaataaaatttatgatttattttacaatataatttttaaaattttaaatatggttgtcactaattattaaaatattatgaaaagtaaggattgacaataatttgacacgtgttaatttgacacaataatgggatattggcggctaaatcacttaattttaggatttgtaacacttaaccacaaaaaccaaaattttggcggcaaaacctactaaactcccatt

SEQ ID NO: 63890 - DNA, 816 bp, Cannabis sativa
tataccaaaactttattatatactatttttggaatgtaaaactatattttatgcgtggattacactagtctttctttatattcatatatatgatctatagaaggtaagacaagacctctcaatctctttttcttttaagaactttttaatttttttttagtttttgacgattaaaccttgtgaactatcattttatttgtacttaattttttaagttcaaattttaacggtattttttttaaaattactgaactgttagcaaatttaaggagtcatctagttaattttcattatggactgcttatgtgtacaatcttatacacgtgacatgtttatattggtacacttaatattattattttaaaatttattttgaagttaaataaaattataagaataaaatatttaaaaaataaaaatattataaattttgaaataaatttttatcatttttaaataataatattatgtgtactaatataaacgtgtcacgtgtacaatacacataatcagtgctgacactttaaatttgctaatagttcagtagttggaggattttactaacaccacaaaatttgttgcaagtagaataataattaaaagagttgaactgcaaaaaacttttttttttttaatattagtccataaggcacttgaatttttttgaaatttatccacttttaaaattttgccctaagtcccataaaagttagagataaccctctatagaagtgatattagatgtacactcttaaacagggccgactttaggcataggcaggctagtcccgcgcctaggatccactcattttaggg

SEQ ID NO: 63891 - DNA, 740 bp, Cannabis sativa
gtagtttagccgccaaaaattcagtttttgtggttaagtgttacaaaccgtaaaattcaagtggtttagccgccaatatccctacttttaatttatttaaacaaacttgaaaattatcaaaatgtatacaaattaataaatttattttagctaagagtaatttgtggcataacctccatacgtgtttagtatattgcaactaacccccaattctaaaattttagtggtaaaacgccctaaactcgtgttctgttagtagttaaatatttctatctatttttagctgttaactgccatgttagactactcacgtggacacagtgtagacgtggaataatattattggtccatgtatatattttttaaataaaatttttaaaaataaattaatttaaaatttaaaataaatcttaatttttttttttttaaaaaaaaaaaatttcttctccttctttcttccttttctttttttagaaaaccctaatttcctaagaagcacaaaccagcaccctttgtctgtctacagccttactcacaaaccatcaccctctttcacagttgtttgttgttcctccgatcaccgatcaccgtcttcttgaaccaggaccacgacggaggtccttgctcctagaaacccccaccccaccactcactatattctctctctcgcctgtgcacgcaccaacaccagaaggagaagagcaccgacaatcattctcttcctcgaacggctctgggag

SEQ ID NO: 63892 - DNA, 981 bp, Cannabis sativa
actacaaacttaaactaatatttcgtacaacttttttaatctctttcgttcattatatatcatagcatataaaactaatataccacacacttaaattcatatatacaacttttaagatttttattttttttcttaatatactataacacataaaaaagatataccatagtgcaaaataaacatatgttacacgtaaagtaatattctattcttttaattttattttttttctttattttcttcataatatatcatatcacatacaaatgatatgcattagagtaatatgaatatatataccatgaatttaaactaatattctattaagagttttttttttcacaatatataacatagcatacagaatccatattaggggtgataaaatgtgtcattgtgtcgtgttcgtgtcatattttatatgacccacttttatattttgtgtcaggcatgttgaccgttttttgactcgtgtctaattttctcaaccctaacccaacccgtaaaaaatcgtgtcgtgttcgtgtcaacccactgtgacccattttactattattgaaactggagttgtggagaaaaataatagatttaggttctattagaaaacttaaaattttgttatatatatataacaaaattaaaaattttaattttttttttaatttcatgttaaaaaaaattaaatttaaattttttaacttaacattgaatcactaaatatatatttttatataattatagtattattaataattttttattttattatatttaaaaaaaaaaaaaaatcgtgtcaaacatgtcaaatttgtgttaagcgggtcgtgttgcctttgacccgtttttatttcgtgttaagttgtgtcgacccgttttcgacccatgtctaattttctcgatcctaacccgtaaaatttgtatcgtgttcgtgtgccgtgtcaaaatttattttgccacccctaatccatataccacaaactt

SEQ ID NO: 63893 - DNA, 646 bp, Cannabis sativa
cattgttattgggtaccagtagtagataacactttttatagatggcgtcctacaattggttagtgatatttcctaaaagttattttttgaagttatatgggatcccaatactttattacatcaataacagtatgacacaaaggaaagtactaagtactagtagtaccttttagcaattctcaaatcaaaagtagacgaccaattttgatctagtcatctaaaattggtgagcaaaagactagccactattttgaggggatgttagaccatctccaatagtaaaactttagaggatgcttgatgaggtggatatattatgtgccaaaatattaagattctatatcattagagagaaaagatgccattttagatattttcatgaatcattgatgctattcattttttaataaaaaattaagccaaaaaattattgtagctaaaaattaggttatattttgtagatttttaattagaacatggcctccaaaatatttaagacgacttcgatttatttcacatttcatataatcgttcgtacgttttcgtattattcatataaatttctaacagtaattatatataaaataatattttttaatagttaatatttaaaataaaaataaatagcatcaatgattcatgaaaa

SEQ ID NO: 63894 - DNA, 871 bp, Cannabis sativa
cttcattgtgagatgataaatcgacgtcacgatcttcatctctttcaagattggccgaccaattacggcattgtatgccgaatattggtcgattaccgtgaagtcagccattgacttcgctactacgggggaagttcccagggtaatcgggagcttaatcatccctttcagtgcgatgacgtcgccggtaaaaccatatatactcgacataacaggtcacagatccttctcatgcaaccccatttgtttaaatgcttggaagttcaagagattcactgaacttccattgtccatgagtatacggtggacattgtccccgcgaatattggcgaaaatgaccagtgcatcagaatgcgggtgatggacccatctcttatcactctccatgtacgtgatgttgtcgcattctcttttgaacaacttctctggtatctcactgagattgttcacgttggtgagtggcttctccttggcttccattgcatatcgctcctacaaatttttggagtcacctgcgatatggggaccgcctacaatggtcaatatattgcgaggcattttcgaaccactcgcattttaattttcctctttgtcatccgctcggggatgactttcctcgttccttttatacttgctgaattttcccctccaaatcagctcttcaacttcatcctgcaaaacccaacacttcaaagtggtgtgaccaatatctttatggtacttacagaattttttggggtcccttttgtcgcgatttcccctgatcgggggttgattctccaagaccgcattcttctcctagatggcgtagatatggcctcgtggtaccgcgagttcagtatagttcacaaagcgcggtccacctttcctt

SEQ ID NO: 63895 - DNA, 681 bp, Cannabis sativa
agttcagttatggaggatttggtttttaaaaataaaaactgaaaagaaattgaaaataaaaagaaaaagaagaaaaaaagatagggaaatgatgaatggttgattgatagaggtcatagtagaccattgacgtgtatgaacatagtgatgcatgaaatatgtgtggaagtggtaaaattgtaataaaataaagttgaagagtaaaaaagtaacactaaccatgtggtggtattttagtaataaagtgtgtattttatatttttttgtgtaaaattttttatattaattattattattgttattatgaataaaaatataatatttaaatatataaaactaaaaaaataaaatatctatactacaaatatccttttataataataacaggaaaagaaggggtgactctttaagaaacaatagatgtatgtattatttattcctaaaaaaaattatatatgtattatgatttataaataaatactataatatccatatttaagtagtatattatattatctctaaaaacaatatcatatggaaaaagaaaaaaaaatacataaccatatctataaaaatattttcatcataaaaaaaatcaaattgtaccaaaaagcctaataagactcgtgctctctctctctctctagaaatggcgattggtgatttccccatgctctcttc

SEQ ID NO: 63896 - DNA, 1877 bp, Cannabis sativa
  modified_base (36)..(37): a, c, t, g, unknown or other
atatttaggttgttaattcaacatacttgtgagtanntctaagatcctggtaaaaattaattccaacattaggtactttagtaagtgtggtacgagagaaatattagacacatgttcacttcagtaacatatgtgagaaaagaatattgagttctcagagatgctacactaatttaaataggaatatcgagttccaaatgggaaattttattttctccaagtattgtctatggaaaggatacgtagagagggaagttaaaccataaattcattatacattttgataatggagtaagtaggccaggtagcgtattagctaactttaatccctgcattgtctacagataatgtatttaatatgtccatactgagaaagtatgtattagactcaacccctattctgagctgtgacgcgcgatgttaagcttcagaaaattttattatatgggaaaaacattttgtccaagttttggactagaaaaaagaagtattatggaatgagacaatttcactagttaagaaagtgttgtagagaaagagtaagatagaaacagcagcttgagagttaaaatcataaatacgggggtaatatctagaattgtttcaataaatttcaaggacaaaatttctataaggagggaatggttgtaatatcccaaagacctaattatgaataattagtgtttaatatatattatggattgataaggtagtaatgagtaggattatgatcatactaacctagttacaataaactataaatattgttatatgtggataaataagcgtaatttgataattacggagatttatttaaaatatgtggatataatgtaaattatttgtgacaaaaaatgattttaagttcaaggaccctggaaacccgattggaggctaaaattgtcacaaaagtataagttaaaaatattgattggattattgaggtaagttaattttaaaaatagcggggtattttggggtactcatagttgaccaaataccctagaagtagatattttttagtggctaagaaatgataagataattattaatattaaagtttttcttaatattattataactgttattattatattattattaattttataaacttatcagatttgataagtttaaaatatatatatattatgtttaaaacagtaagaacatatgaaatgaaaccctctcccctcggtcaaatgaaaactttatcccttttatctactttcttaaattttaaactcaaaacctagcgagctaagcttcgacagtagcgcgatagcaaatctttgaaaaagaaaagcctaaggtatggtttaattttgttttaaactaaaaacaatttgttttatacaggtgttttgtgaattagaataattatgaaggttctaaccttatagaactgttatcgggtaatcatgggacttgttctgatattttcttattgaatttgaggagattttgaattagaaattgagtttggaactttttatagtttaagtctaaacattagtggtatttttccactactacaaatatgggctttagagacggtttttaaggcctttcaacgtcagttttggcaaaatttgctaccgacgttgattcgagcaacgttgtagggttgaaaataaccgatgctaaaagttaccatatggtgtcggttattacaatagaaccaaccccatatgtaccctatagtgtcagttatataccaataactgacgccaaatatcctcaaaactgacgctaaatggccttttaaccgacgctaagaacgaattataaaacagaaaatttaatttatttaaattacatatttattaatttatttattatattattcaatttaaatttaaattaaatatttattt

SEQ ID NO: 63897 - DNA, 8223 bp, Cannabis sativa
aagctttttaaattttttttttttgcgggttcaccagttcgggttcggacgggttgctcgggctcgggtcaaacccgttcaaaatgttcagccctaataaaaatatgatatgatcacaagatcatcactataggccatatagtctgtgatgatgaatatagctgcatcagaattaagcatccgataaggagggcctacttagctgcatcagaattaagcatcctccgataaggagggcctacctagctgcatcagaattaagcatccgataaggagggcctacccagcgagctgaaacaagactatatagaagaacctcaacaagctagtggagacacttgcacaaactatgtgctaaggtcgttccatttcgacaaaagactcacgcccaaatttcatagcttagagtttgcaatcccaattatgattttcttacccgcaaaaggaagggtccttccctttttggtctactaatattggtaccgattagcatgtatagtccatagccgcccaaccacaaacatcaaccttggatgaccagcttcttaatttcggcaaaacttattaataaagtgtccatatattttttcactcaaaaaaaaaaaaaattgtccatatatttaaaagagggccatgagctaattaattgcatttatatataatgtccttaaattaacatataaatattattcaaggtgatcatgtggcctgagcgataggaacaaaacagcatattgggtaagccgattcttagcagccgtagctccatcaagcgaaggcgccaccgaaattcccctagttctcatcctatagcggcgccagccaagctgtataacgacggctccccatgttcgccagttggaggagtagtatctagccgttcgtttgagcctctcgctagcgaatttgtagcggaagtgattgatgacgtagcggagatcctctgcatcgatcacgaacgattcgatcatatcaacacaggtgaatgtggctgaggatgccggaagacggtccctgaatggtctgcatagacaccacgacagaagctcatcgcctaagaaaccgccgcactccaacgtgctcgtggctaggaaccctttacttagccgctggcttcgttttactctcccacggactataaacgacatccttttaattgggtctccctctctcactatctgaaattgaaacctatatattaattaaccgaatgagagatcttattataattttataatttgttaattaattgaaaccttttcgcctttggagtagataagtggtctgagacgatcacaaatgttgtcaagaatgagatcgtctaacaagtggaagagtggaacctatatatagataccaaaacattaaacagagtaaatttgatagatatttttaattaatctgagaaatcttttaaaataacacctaactaaaatgaagtaccttcttgacgatgtctatgcaaagaaaacgtctaatgtctctgcggagaccatcgggaaaatgtttgataagttccatctcatcctgaccacccatggctgcccaactttgacgttgaaaatgtctaactctacctctcaaatgagatggaatttgtctcctcttcatccaccattccagatctcgatactgtagttgcattttcttcttattttccattaccgtatgcaagaacaccttttgtttttatcatcatgacatataaaattaatgaattagctagctcactagtcaatcagagcaatatatatatatgatcatgcctctctcacctgtatattcccgattaaagtaacaaaaagcaccaacccagcaattgttatgcagcaagaaaaaatcaattcgagccagttacatgtgggttctagctcgttcccgaaggagctgtaaaaatcaattattaaattgtatcatcattagatacagttaattggtaataaattcacttaattaattacctgaggttcaacaaaccccagaaaatgggataaaggagcttaacggcgagggagttgctggaatagacttgaagaacaggattataaattccataattgaaagggccatttacatccaaacacttggagcttattgttgtcatgttattacgacctggtaataatgccatgtcacattgctccctcgaacaataaacagagagattattacaacttttgcttctgtcacattgctgctggaggcatcccattaagcgttccgttgcaagaatgtaccagcacgctcctgccacctgttatatatatatatatagacacacatatgataggggtgtctgtatgtgtgttactgtacatatataatatgatgatgatatgagctttgaataatataggcttacgtgagaggcaatcaagtaagctatggcatttagattaaaacgccaccaaacgctgccaaagacataacctgtgaccttttgtagttgtctcattaggtaaatgacgtggtgcaccttcggaaggaattgaaacaagaagctcaacaaaagtaccatcattatcactgtgattctctcttctctcagtaatttcggtacaatcagccaaattactgcctacatattaattaattaagaaggtcaaatatgtacatctaacattttcttaatattaaataaaaggtactatatacatatagtaaagagctataatgtgtacaagattatttaatatacagatcattaatgtgactaattatatatgagaacaaatcagtaattacaccaaacatggtgggatgattagttaaaattatttactatataagtgtatgtcaactttatatgtaaatcattactcatcttaaaatagtgatttgtgcacccataattcacatacatagttaaaatgacaagtcatataagtatatacatgtgtgtgatttgtgtgtacatattatattttctttaaacggtcccaaacttcacctatagagagaacctataaaaaagagaaacggacacaaaacctacattcattccttaattgtctcgtgcaatacgagtatatacaaagggatagatggatcaccatacctgctaatagtaattaataaaacatacttaaacaatgtgtgagcccccatattgagagctctcagactagcactccccaaactaaaattattaaaagacaaactaaaattatctggaacaaatcctaaagaagaatctaattttacatataatttttaagtttggagaccaaactccaaacttaattagacaataacttaaaactatgtaaataacattaagcacacccgcatttcgaaaagtcagagcttccgtgatttcagataaaaacctccaactaagaactaagaagtcgatgccaaaacctctccttggtgtgcacatatcattacccatgtattttatatcattacatgatttatgacacaattgttaatgtaattaagtattatattttatatattttagtttaattataaaaaatagtgaattggtcatcaatagtgccacatatactattatatattaagagtattgttaatttagtggtgttcaatattttttataagtagtactttctcattgactagagatattcgtgaaaaaaaaaatttagtatataaatctgatacttaattatactaataatagtataatattaaaaatagtactagcacaaataatacattttagtaattcttatatacactacaaaaacaactacgtttagtgacaactttttagtcataatataatttttttgtgattaaatgtaaatttagtcataacaaaaaattacttgtaactaaaatatagtatttagctacaagttgtcactgatttagctttagccacaacaagtatcgtgattaaaaatacatttatttacaataaaatgtaatttttgtgactaagacttttaaccgcaaatttttcagtcacaatatagaaaaaataatttataattagtgacaattttttttttcaagttgatattaaccattaatgctacgacttgattatagcaatgcctaaccattaaccaatcaactttcatgtaaattatacctaaaatctcccacggccacagtatttagtatcttaatcaattacattgactaactttaatttatacgtttctagctagtcttatatcatttaattaatgtttttctattatgaacagtatagtaattaccaagtgcgtttatttctaacatattagtggaagctgtatgcaaatataggtgttacatatttacttataatagtgcaattaattaaataatttattcattattaaataatgagaagaatttatgcgtgtgtgggactacagttacttcatacatagtatttcgcaattaagtaattttttttcacacatatatcagaatagtcattatcattgttttttaaagttgagagaggggcttagaactagtcactcaccagtagtgttccatttattattattattattaatttttttggtgaagtaagagaggtatgtatgagtcttaataataatatgacatgtggtattgagcattggttactccttagcaatactctcacttgaaataacaaaattaaaattgatgtctgacctgtggaattggaagaataacaaaagcatcaagccaaaaacccttaaaagatcgcacgtaatgtaatgcaatctcacgtgagtcccacacgagtttcccgcagccgaccaccatggattcactggacacgtaagcaagccgaaactgaagccaaatgtaagccaaatgaagcgcatccaaacacgtccttacgacagtcaccgccgccgcaagtggcacgtccaagtaaaagcaaggatctcccgccgcgctcaacgacattacgtacaagaaaagagggtctacggccaacgccatcccacgcgccagcagcaccacgcgattccacctcttcacgttattgctacgtgggtccacgatcccaccatgggccgccttcggtctggcccaattggaatgggcccgcaattttgtaggccttaggctggaaccggcagtggcttcccagtacggttgctgtgaagggtagcatcgatgggagtggaaaataggtaatccaacctgagtacatgcgaagcattcgttggaatcgaaaatgatccgcttctgttcatctgagatatcgatgacgtttctgctgtttatttcttcgctgtaaaaagtttaaaacaaatgattaaaaacccattttatttttcatctttattataattaatgtcgtattggtatatattgataattgattaaaaccttgaaggattagacatggtgagtggtgtctgagatagagagagctgatactgaagagaagaacaatagaaagaaaatatcagaggagaaagggggacgagctatggcccaggggaacaggctgggcacgtagccaatgcgcatgaacgtaaagtgtactgtggttttcagtatacgaagccacctatggttttatttataaacgtcatttttacagcatttgcatcttaattaattattatatattatattataagaataattattctattaataaataattactgattgttatttatttcttcgctggcggataactttgaaaccttaaaggtaagctttcttttgctttaacgtttagtgtgttcgaaagtatagtacaggttgcagaaatcatctggacatttgggacaaaatgagaactatatttatattagttaatgtatatatgtatccatgtatacatattgatgaagtgtgcatagtttggagctattattatataaatacatattataatccttttttatcatgaagttatatattcaaactcaactcttaacaattttttcatcatgttgaatcaagccaaattggtaatcggaatttttagttagttcttgactttctgataagttcatataattaagagtgaagatgagagatttaaattcccctgcccgatagtgtacatgaaatactacgaagatagtagccctgtaaacacagggttatcatctctggcttcattcttttttttttctaaaataactgtttttttatataactttatttttcctgtcctttttttttcctaaaaataatgacttttaaataagaaagagtgatagagagttttacatttgttaatgtgtaaatacatgcgctagccagttaattttgagataccatatgccaccatattctaccttcttcagttcgaaaatgaactactctaattactagttaattttaaaattgaacttttataggtacattctaccatatagttcacgaccttattttatctaatcaagttagttaaattagttagtattagttgttagttagtgatgagctgtaaacacagggttatcatctctgaaactatattgtaacagatgatgatttgagcaataatacacatccatctctctctttaatttcatcttttattcctttgctgaagctttgctgatattcgaccaagcgttggtagccttgactctcttcctaaaactattgtttcaaatgatcatgtgcctccttttaaaaccacgtgagtgcgcatgttaaagatgatggctcacattttttcatgcaagacatggctttgaaaggcttgactttctctagctttatgacggcttcgtagctaagttcagtgagaggccgcctgtgctaggggttaaacgttgtattctactagtgtcttcgattcatggggttgctcccaagggaaagaaagggatgacgaaaaaaatggtagtggatcgggaagctagttatgtgtctaaggggaattaggggagaattaaaattatgggaaaaatcaatttcattttgttagtttatgctcttaaactggtgaaacagaaagcaagaagggatggtttggatcaggatataaaattttggggttccttttgttgaggaagaggaggtggtgagtgatgttgcctcagacgtagttgcggatatgattggtgttggttctcttgggtcacctgttgggatgaacaacgatgttggagtgatttctattgacttggcggtgcctgtggcacagggccacctctcattatgatgtgttagcatggaacgtccaaggcctgggcaatgagagaaagtttcgagtactctacgccaatattatttgagaggtaaacccgatcattttatttctttcttagactattagaactgttgctcaaatggaactcttacgaattcatttaggctttgcgagtaaactagtggttgagaaaggttggagaagttgtgtcttttgtctcttttggttggataatgttgatgttacgcttttgtcgttttcaaggggtcacattgatgttcttgttagtattttgagtttcactccttggaggtttactggtgtttatggccaacttgattcttctttgagacacgttttctggaacttgcttcgtcgcattgcttataataattctgatccttggatttatggaggcgactagaaagagatttgggttcaaaatgaaaaagcgggcagggggtcctctttgcccttaatttttgatgaaatatttatggaaagcttttgacgattgtttcttaggcgatatgaggtttgaggggcctaaattcacttagtgtaataaacattgagattctacttttgtccaagaacggttagatcgctttgttaataattcttcatagatgaattattttccaaactctcatgtatctcaccttactttttgagggtctgatcatagacctattgctttggccacgacccaaggtgttggggaagcaagattatttttcattttaaaatgtttaggcctctgagattgagtgtaatgacattattgctaatgagtggagttccaacgctattgaccctctttagaatgtgatgaaaaatgttggtgttgttggtgaaaaataacaatcttagaacaaggaggtttataaaacatcataaaactgttattgacaaaaagttgaaagatatatggctattcttgatgctaatcttgatcaagtttcttgtggggagctttggaaattagaaaaagaattagatgttcttcatgagaaagaagaaaagtattgggcctctcgtgctaaatccaattaattgaagcttggtgacaagaatgttagataaattaacaattaacccaagatctatttgtatataacatagaacac

SEQ ID NO: 63898 - DNA, 1379 bp, Cannabis sativa
  modified_base (870)..(873): a, c, t, g, unknown or other
atatttcaaagaatatatgaatacagtttttggataatctttgcaaaaaaaatttttgatcgagaaggaacaactttattaatcaacaagcaattacaaacaaagccaagctgaaaaaaaaaaccaactgctaacaaaacatctaattataaacaaagcaatttcctcccatgtctattcaagctctctcttttagctattgttaatctataaaacatgatttttttaatatcatgtacaatttttttaatatcatgtacaatgctagtggatgtgctcgagtaaccattaaaaacacaatcatttttgtttaaccacaatctataaatcattgcagccatgacagcaataaaaattctgcatattctatttttgctgataaccaccaaccagtgtttccaagcttgatactccttcggccaagccccaactcccagccaagtctgcaccagttctgccaccttttgagagagtctacactcaaagaaaagatgctgatttgattcagcaacttcaacaaaaaccggactctctgtgttatccaataagacccaaaattgaagcattttattccttgttaacaactgagcttttatagcttgccacaagatgaaccgatgcttcgaaacattaatcgaactccaaacactcctgctgtaaatgaatggcacctgtgatagtttactattatataataggtgcggtttaaacttactcgaggcccctacattatgtatctccaagctatcaaatttgtctctcacatgtcaaagcttccgccaataccaactcgagtcaagctttaaaatataggtccatattgaagtgttctttagatatatgttgttgatccatttcacccaaagagannnncttttgtttgaaatggcccaaatatattttgcaagaatagcttgattccatttggcaccatctttgaaccccaacccaccatagttcttcaaaagacaaacttttttcccactagccatatgaagcttactcctatttccactccaaccccaaagaaaaccttgatagagtttttcaatctccttcgttatactttgagggagaataaagatgctcatccaaaagttacagagaccaagtattccagaatgaataagttgcgatcttcctgcaaaggaaagatgtctactcgcccgactatggagtctttgcttgattttctttaggatcacatcacagtcttctgctctccattttgttggtctcaacggaactcccaagtattttagcgggaacttgccctgatgtatgcaaaattcgatctttaatatatgtcacatgcaataattttcaacattgcaagtaataacaatgtataataatatgactaatacgaacaatcttta

SEQ ID NO: 63899 - DNA, 1707 bp, Cannabis sativa
aatgagtacccttgagagtcttgacaaaaacctaaactcagcaaagagtgaagtctgggaaagaaaacggcaaagactattccttcaattttttttttttttttttgtttaaactttgatctaaccaaatgaagtttcagtttccttttaaacttaaaaactgtttaattaaagaataatataaatatacactcaaacccaaatacaattctctttcggtttttttttgggagtaaatatcttttatatctctgtgcgactccatggagtcgaaagcttcaaccaaaccgagttcaggtccaacatacccaatccaatcgaagcctccgaaagatagagactttttgaaccatctagaagtttaccttgcaaagagagatggtgtagacaaactccttaaaatctcaaggtacgccaccaagatcatccttgcctcctcggctctcccggaaaacctaaccgtaaccggccgcctcaagagcttcgagtccagcgttggcctcagtcggaaggctttcaggctcggaaaattcgtccaagacgtgaacgccctaaggaactcgcaattcgactcgaaacaggatatcgctctctcggtgattgcttatggaggcgagggattgtattatttcgtcgaacaatttgtgtggttggcgaaatcagggttgatcgacccaaaacacacccggaatttccaacagctgagtgcttgggcggagtttattgggtaccttggaagcatatcgttgaagtttagggatttgagtcggattagggaagacgaagcgtgcctagaatcgagcatcggaattgcgattctaagagaaatcggttaccaggatgagaaagaaaaattgaagaagataagggagaagaaattgatgaagaaagtctcgatttttcaagatttggctgatgggttaatggctttggcggatattaggaatgggaaaggttttcttttggggcctctttcagtgtcttgcgctggactattatcggccattgttagcactcataagaactgggtatcttgctaaaactcatcaatcaatcttttcgttctttgtcataattctacagccaaaaactctacaaataaaaacagattatagtctctgaagtctgaacctccaaaaaaaaaacaagggatttctccaactttgtaatactaataatattagtatatttcatattttattttttctctcccacccttccaacaagagattacagttgtttgtatctccgttcttggatttcaagtgggtttttgtcaatttccaatttcactcaataagatagagttgataattattagtataatgcttgaacaaacatgaagaacgagaataagagacaaatgggaacttaatttttaatactaatagtctaattattagtatcatgaagaacaaacatgattttgtgccgagtaaaactgggaagtgggatttattgacttggtcgatcttcttatcattattatgttgcagaatgcagagttattcagaatggtcattaggagcaaacatgacaagtttatttatctcttcctgcttcaattcaatctcaccgttttgtctttaccaaagaaagagtaaattagcaatgcttgatataacacctgttgtgtggtgtagtggtcggatttgcttttattggcatcttctcttacttgggtcaaggttcgaaattcaccctaac

SEQ ID NO: 63900 - DNA, 1450 bp, Cannabis sativa
ttaaaatgtgtgacacacttgtaacacacttgtaacacacttgtaacatttatttaatcaatcaaaatattatatcaaaatataacattatcttctgtatccgacgactattttaaagagtcgcccaaacctttttttttttttcagtagtatatataatatagatctatcttttatatccgacgcgtgatctccacatatagttgtcttttttctatacaaattaaataatttgctagtacgtaccattaatgactttattatatacttcatttatgatcagttccactcccactatttgcttttgccaatatatgaatcatgcacattttaaacggttttcatataattatatatatgtatataaatagttctttggggaaaaataggtttacctgagtggccaaagatcatttgtctaagtatactataaaggcagacctaattcatatatacaatataaaatcacattaataattaataatttgactaaagaagtggtctatctcccatgcatgcactcactattgttcagctaaaaatcacttctaccaattaataattaggatatttatacgtgtgtacgtgtgaacttgaaaattaataaatcagctaccaaaatcataaaaaataatttataatattaatattaatttatttcaaaatataattaatatggttgactgagcgagattcatgaattgacttgatttctttacttcttaagttcttatatatatgtgtaatgtaagtaaacaaggtttgatatttatatatataagattgacaggaaatatataggatatcgaagatgaagctattattatggttggctttacgattgttgtgtgttattcttattataattattctctttcaaaatccctcctttgctgcccgccattgtaatacgtatgtttttctttttgtaattaattatgtaatgtttttattattaattagttaattacttttgctaatattgttaatttcatgggtggaattaattaatatttattgttgttaataattaattacaggttgtacaacggtgctaaggactgtaccccaaaacattcacctccatccccagcacaaggtgtgggtgttaatccttaattaattatatttaacaacatcagatattatatgatgacattcttagtgataacttaccttaattaagtatattaattattaataatggttggtttggtgattaatttattttttaattatacattaatgtactacataagtgtaagtctttatttaatatattgatccatatatattatgtggaatattctattgaacaaactacatgccctttaatttcatggtttgttgtttgtataatatatccaagatattaaatggtatatagcatgcatgcactcatattgttcacttattttggacctatatattattctctagagactctaat

SEQ ID NO: 63901 - DNA, 687 bp, Cannabis sativa
  modified_base (570)..(587): a, c, t, g, unknown or other
  modified_base (641)..(662): a, c, t, g, unknown or other
agtgttccattggtacagctttcagctttaacaatacaaaaaaaaaaaacaacagattagcataacaagctttgtaaccaaataatacacatagacataatgaacaaaaaatggttaattttttatttttttaccttagacaatgaaaacacttttttctcaagtttatttgaatttggcgaagaactatcagtccacctacaaattctgaaagttggagcaagatcatacatacaaatgtcctccctctttagaattggaagtacttcatacaaccaaacttgataagcaaatggaaagccccccattcggtattgcctaacacctttctctttaatatctaaatccctcttcttttgcatttgttttgacttcagcccaactctcaacccatgaaaggtgcaatcataagataatttcccacaagggtatgaattaaactccccagaacctatcaaatttaacaacccagcatgaacttttttattctctcccctgctaagcaagcaattagttacaaagtagagaacaaccatttttaaagcaaaccctgttgggttttgtgccctnnnnnnnnnnnnnnnnnntataatcagatttactatttaataaagatcagaaataaaattttatgttgcatnnnnnnnnnnnnnnnnnnnnnnattatatataatgtataaattctat

SEQ ID NO: 63902 - DNA, 715 bp, Cannabis sativa
tatatatatatatattttgaagaaaagcgttcctatattagataaaaagagatagttagacctcattacaaaataggtgttcaggaatcgaaataattggaatatctccaaacctctagtaggaaaacggccacttagccacattatgggcagtaaaactacagattctactaatattagaaaaattacaactagtaaaagaggattaatacaaacggagacatagttttcaagctcctacctttgacttaatcctgtaaagagcaatgataactaccctcaaatcactctctacaattatatcaatcttatataatattgtattacaatttttaagtttttctcataaaaagaagtaatatttctataaatttatcttagtaaaaaactaaattatctaaaagtcattttcttttttcttttaaatgataatatatattatttagtagggttttttaattttttttatttttacactttgaaatagttttttttttaatattttatcgaatttcacacaaaaattaatattcgtaaccaaaatcggtacagcaaacacataaaaatcattggaaaaattactaaagcaagacaaactgtaaatttttaaaaaaaaaaaaaaataaataatatatgaagtaattttcatatttattaatattcaaaaatagaaacattaatttatagaaaagagaattatctcatgtactttttg

SEQ ID NO: 63903 - DNA, 1138 bp, Cannabis sativa
tgtctatcttttaggacatgtagagagatagacatgtatcatataaacttaacaaatttggccaaattaattataatttggccaaaaatgaaatgttaatttttatcaacaattatataaaaaatacttataattattaaaatttaaatatttactatcatttgagtccagagatgtggatctcatttgtaaaatttcgctgcatgcgttgccgaaattggacatatggtattggttttttgaaacttttggtggatattcagtaaggagtgtctattgtgctttcaagtgcgtaatggaagatggaatatgcaggataattctggtttttggagaaagttttggtatttgaaacttcctccaaaagttaagaatttgttttggagggctctcactaattgtcttccaactctagtctctcttcagactaagcgagttcgtgtttacagtatttgttctttatgtaatgttgaacccgaaaccacctttcatattatggttggttgctcttttacaaaagcatgcttggaacgtggtttgggtctgtatatcaataatggggatgaagattttggtggctggtttgaggatttctagaacactcatctggtcgagaagattgataagctggcaatgattctttggggtgtttgggggggcccgtaatgatttactttggaataataaggctacttctgtggagaaagtcgtttcatctgcaattacgtactttgaactttggaagtttgctcaaattaaaaatggaggagtttcatcttcttctagtcagcctcatgctggtgctgagcattggattaaaccgtctttgggagagttgaaggttaattgtgatgctgctcttttttcaagtgagaggagtcatgggttggggtggattgctagagatcgcgctagtttgtgctttgctgttgctgccgtcaagcttcggggtgaagttgaccctgtggttgctgaggcgttgtcaatgaaggaggctttgagttgggttaaatcaagctgggaagaaggaggtgctgctgaaggatttcgtcctacagcggtggttatggagtcggattgtctcttgttggttaatgctatcaatagcaagagccaagttctttctcctcttggtctt

SEQ ID NO: 63904 - DNA, 1542 bp, Cannabis sativa
agttcacgtcactaagtcaacctcacacaagtgcgaaattgacttggggggcaaatttttaaaccaaaagtagccttgatgatatgaacatcaatgtttgtcaggttgcaaaaaagatgatatctcagagttgagtagtcccgaattatagcaagtcgacctgagaggggtccctagccctgcactcaggttgacttcggaaactctaggatggaagtttagactttgataactcgtttccaactttgtatcttttagtattatgtaccatgaatacattaagcaatcaaatcatggccccaggagctgaaattacatgaacctgcaccccagaagtcaagctgagcacctagggtttcagctagcacccaagttgacatccctaactaggaccgtcttagtgaaaatttgtcaaactttgcattataacatcaattagacataccacagacaaatttgaggtatttgaataatattcagagcaagttcatttttgagaactcggagcactcggtgctcaggcacccagtgcttagggtgataatttgtcaatctgggtgtctttcaagtatcaaatcgacagtccaaatttcacatcttctttgtcttcataaaaaatagggaaataggtacttttggggaagaaacatcacttcctgggtgccagaagcacgacccaacacccaagttgaaacctggggctggcccagcaccgaggttgatattttgtagacctagggtgattttgatgatgtttttctagaactcttccgagcatcttcttcgttttcagcaaagattaagattcacttatttttgggaaccaaatggaaattttgaagggtcataaaagggactcagcgccaagttgacacctggcacggggcctatcacctaagttaacacactgtcaacctgggctgtttccaatcatgttcttgaaaaagtgttctaggcatttatcttgtcatcgaaaataatgaagattcaagcaaacttggggataaaatcacaaactaagcccctagaaacaaggcccaatgccaaggttgacctggtgttgggcccagcacccaagttgacaatcaacgtggtgcgctggttttaattacgcaaatgccaaatctaattcgaacaataaatatggaatggccaaaaatgaggtaggagatctcatcctcaagttcaagaatctcaaaagtatcaaaatgacatcctcggatcttaggaatgagtgcccagcggcgaggttgacaaatggcctggtgcactaggttttgcttatccgattctgatactgttttgaccgcccgtctagtttttacaataaataagatccatgaagttagagaagtcaaattcacaacttcgcatttctcatttccaacatggaaaactcactcgaaaaatgaagaggttttgagtctctcttttctgcaaaacaacaacatctccaagaattggtgactagcttcaccaaaacacagaaatagactaattgatgtcaaaatatcacttaaaatattatttaggcatcttaaa

SEQ ID NO: 63905 - DNA, 2203 bp, Cannabis sativa
aagtcctattgttatagatatattagaaaattattttatttgttactattgtgaaagtgtggtaatggtgtgatattacataccacttttgaccttcataataatatataattacattgatattaataaaatataaaatataacctaatgacacatatatatacctctttgaaaagtcaaatagattattattaagagaatatgatattttgataattctcattgtacagtaataaaaagacaaatttaatattttgtcttttactaactcatctactttttaaaacacttaaccataataaacaaaaaaactttcttattttaacttttatccttattattttgttttattattattacacaattaaaaactctattagttcttcctttttaattgaaaattttattaatttcatttttttattttctcttggatgcttattatataaaataaataaatctaatacttatctaataattttaaaatatttgtttttttttttaatttttatatatcagttaatataaaaattatgtacaaattatataaatagtgtgtaaaatggattaaaatattgatcgtcttttatatatggctatatttgtatataactaaaatattcaatttaaaattttgttcttactcttgtacaacaataaaatatattttgtaatttataatttttaatttgtactacaattaagatgtcaaatttaaatttttattataattatttataaaattaaaattatgcaaataaaaataaaaataaaatataataattgcacgtgctaactttacctagtattgataaaagtagaacttttactagactatctccaccttttggtatttaataatttgtgttaattttggccaaaatattataaactaatgcttatatatttagctcttttaattttttgaaaaattaaaaacaaaaaatttaccccattgcacaagacaaaaaataagttcaaatagaattaacaagttgttacaagagtggcccaaatattttgggggtcttcagcaaaaatttaaaaataaaatatttattaaaaaaaaaaaaaaacaaaattcgtgcacattaccaacctttttaagatacgttctaaaccttttttttttttttttctaaaaacatatttttaatttgtgtgcattacaatttttttaaaaaaaaattaaatgtgcattacaattttattaccaacttttttttaaagatccattttaagctttcagttataaataaaataaactttttatttatgtatgtatgatagaaataaaaataatttttttttttaaaaaaaaaaaaaactaaaactttgtacaatggtctaaactgctcaatacttgagtcggcctgtcataatgtggcatcatcatattaagtgtatgggaatattttatggagtttcccataaaacttaacgaaggagcaatatgcttaattaacatattttttaaaaaaaattattaggcactaatagtgtttgacatcatgataaaatagcaccttataataaatagttatcaatattttataataattattaaattaaattatgtaaaatttgatatttacgagtgctatactaatgtgtagtatatttttgtacaagtcactttgtgtatgcccttccatgaaagttatataaaataaatgaaggcacaacacaaccaaccaattacctcatatccaagaattaatatttacaagtacacataatgcatgtcatgtaataatcaatataaaataaattggtggtttataatagatacctgacctattataaaccaccatttcagatatgaatatgataatattgaaattttaaaatgtgagaatgaccatgaaaattttgttatttatcattttactactctcatgtaactttcaattcatcctgttcttttttttttttgacaattcacacttactactctactatatatataagcctagaagatcatatatatatatatatagtggttttattaaatgacatgcattattgatttcatatttataactacacgttcttagtgggtgtgggatataagaagaaatattgatttgatatcgataataaagagatatatatgggtccatttagcaactctatccttgtagtaagcaatgttaaatgattggtttggtctaattaatatttaggaataattacataaggc

SEQ ID NO: 63906 - DNA, 540 bp, Cannabis sativa
ttcagcgaccccaacaaaattctgttgttaagaggaagcatcaacatctcttgaatgttgcaagagccttactgttccaatcatgcattcctttatcttattgggatgaattcattgcaacagccgcttatctcatcaacagaactcctactcccaatctaaaacttaaaacaccctttcacattttgcattccaaatctccatcttatgaacatcttaaagcttttggttgtcttgcctatgcttccactctttctcaaggtaggtctaaatttacacctaggtctgccccttgtattttcctaggatatcctactgctatgaaggcctacaaacttttggaccttaacactaatcgagttttttgctcaagggatgttgtttttcatgaaactatttttccctttgtcaattctgatgttttctcacctgaatatcaaattttttttcctatttcttctatttctcagtcgtctgcccattttgatcaacctgcccctgatcatgttgcagtacctcaatctgccagaccatctcgac

SEQ ID NO: 63907 - DNA, 1586 bp, Cannabis sativa
gagaagagagcttttgaattgtaagggtaattttgggattttagggtgttcggagaatatttagagtatttatttaaaggtggtatattacaagaatactctaaatttttaagtatattttaacaaatttttaggtggcagtgacctccgtttggctcgtcaacgagactaggtcgtctgtcatttgagaagaagaccagatacgaatgagtcgtgcggagcctgggccacgtgagggtgcaaaaaaaaacatctgctttggttgcgagaaacgaaaggggaaccacttttgtttgagtttccagatgctgtgagcattatgatgtggtccaaatggacaaccatagtcaaagagaagccatcgtaccctggtagcaccatcgcactaggaaaaaaggaaagagagatgagagagagaggttggggctttgggttttcttaggttgaggaagccatggctggaccatgacaatccagtcgtggtcactctggagccacgcgaaataaacaaggggagatcgatcagatagggagagaaagatagagatgggagagagagtttgaagatggtgaatgagattttgggtttcaacatatttcttttatacccttatttattttttatctcttttttttaattttcattcataaatgataaattaagagagacaaaaaactttttttttggaactagccgtgtgtttaagatataaaaagaaagtttaaatcaagaacccagatacgagaatatataactaagagggtaaccctaagtgacgagtcgaagtaacatctaatttggattaatataagataattctcatctcagaccgtgatgagaaagatattatcttagatcgaaaagcgtctatctcaattcaatcctggactcttcttatctcaaatcaattcaaaatctattttatctcgaaccagtctgagatatgacctatcacgattattctaagatatgacctatcttgattagtccaaactctcatatctcggacgagatgagtaacatatctcaaatgtgatggctctcatatctcggacgtgatgagtcacatatctcggatgggaggacttacatagaacagatgagtctcatatatcgaatgggatgactcatatatctctgacaggagaactcgtatatctctaataggatgatttgtatatctccgatgggatgattcttatatttcggacaagatgactcaataattcggacgagatgactcaatattttggacgaaatgactcacatatatcaaacgtatgactcacatttgataaatgacacttgtcaaagatatgtaaagacacttcataaggaataaaagacacatgtcaaacaaaactcttaggataagagagagataaatggaagagatgctggggagaaaaggggaccttggggaaagctgagaaaagattaagaatgaaccggggttaaagggttctcaaaaaaataaaaaaaattgagtagttttttgatcaataataaatgacttttggtcaaaacaagtattgtagttgcatcattctgtttaacatcatatatggtattggtgcaataccaa

SEQ ID NO: 63908 - DNA, 873 bp, Cannabis sativa
tttgaactttcgagggcagaatttcgagtatattccttttagcgcaggaaggagatcgtgtccaggggtgtcacttggtttggctgtagttcaattggtgttagctcgaattgttcaaggattcgacttgaaaaacaaggatgattcgcctgtggatatgagtgaaggcttgggcattgctttgccaaagcttactcctcttgaagttcgtttggttcctcgccttagtcctcaactttatgaatcactttaaagtatttattaaattgtgttaattttgtggatttagtgttagatataaaataagataaatccatgtgtttataatgtggtatcgtgtgtatgttttttcttgatttgaaaaatactagtaacaaaagtccttggcctatatttcccaatttcttctcatcattatcttatttttcacatgttcttgccgatgtgagtgaggtggccatcttaattttttatttttattttaatattttgagaaatagggtatggaatttctaatttgactctcttaaattattaaaaatttacttctaccactacactaatgactacaccatccaactaaaaatagatactatttcttttatatggaagcataatttgttagaaaataattgtataggcccctaacttttttttttggattattttagaaatacacaaaaataataaaaaaaaaattacaaaaatagttgtatgaaattttaaatatttttattgtttttaatattttatttacaaaaaaagacaattttttttttttttttttatgttttcatgttattgtatgttgtactcttgtgattatattgtttttttgtattaagtgtcacatttacacctgaaaagctactc

SEQ ID NO: 63909 - DNA, 1053 bp, Cannabis sativa
taaattgttatagttttgactttaattattttatgaagagattattatttatttatatattattaattgatgaaatttatttttaaatattataatattaattttatgtgtaattactaacatcattccaaacatgatattaggaattcacatataattaccacttgacatccaaacacaccttgtattttaaaatacaatgtaattactatacagtgtaattactagggctaccctagtaattgcaatgcatagtaattatgcactgcatagtaattacacatttgtttccaaacagaccctaaatattagcgataagatctgacaagcaactctactagtttcatgtgttggcgaagatttaagagttctatttttttttatttgtattgttggtaatttttttttaacttgacaagtggtctctaatcatataagtttggacaaatttatgcccaagatttcttttttactaaattgatttctaagttcttaattcgttgtggttgacaatattaagtttccaaggttaaataattttttttatatatttatttttcattcattagttaattatctttagtgtcatgtttaattttttaattattttataaaaagaatatatattaatttaattttcttttaaattataaaaaaatgtttctaatgttgtataatttattttgttttacaagtacttttgtatatataaaaatgtatatatactattatattatataatatgaagcagtgatatagcacctaaaatttttttaaaatttttttaaaattatttttctcttctcaccttaattctttcatttttaatattttattagaacataaatttacacattgatattttactattattttagtaatttatttttctcttctctgcttaattctcttatttttaatattttattataacataaacctacaaattaataattttatattgtttcaataattttctttaaaaaaaacatactaaatatactaccacaccttattattattattattattattattagcggttttgagtca

SEQ ID NO: 63910 - DNA, 817 bp, Cannabis sativa
aacatccaaacaactttaatacatgtttgaacaactaaataacaacaaacaaataactgtataactacttctactttaatatgcaaattaaattataggcataaaaaaaaaagtatccataatcttaggaaataaaataaacttaaaagtaattataatacatttgctcactaattcaaaagtatatggacccttgaaaacaaaatatatacttatttttttcttagttgaacaataacaacaaataaaaaaattaattacaactctactttaatatgaaaattgatccgacattaaatagtgctccaaatataagattgaaattaaaaacaaccaataaataatgtaaaaaaacaaataaaaaaaattctacaccagctcaaaaataatattttcgacacatctgttatagaaaatttatataaaaaatagtaaaaataaagaaagaaaaaaattcttcaaacataaataattttttattagtaaaaataataaaatttagcattttatttgtcaaagatttttttttatattgttggaaatttaattaaattttttactttcatcattacttttacttctttttttttttaaaaaaaataaaatttctaagtgactctcttcagctcacaataatattatttgtacatttctatttatgtctagtttataatggtttattcaatatcatttttagttttcaagcattaattatttttgggaataataaaaatgatagaataagctccaaatgcgacaagtggcgaaactttctctaattagcagcaaatacggccatggtcgtccgccactctga

SEQ ID NO: 63911 - DNA, 1056 bp, Cannabis sativa
tatttgtttaaaaataataataaaagtgagagtgggagaaaagagggaaggaacgaggtctctgggtgtgacccggcctgcatgaaccggtcggacaacaccctgaccaagccagttgttatctttctttctgactcacataacaacatgcctgacagctaaaatggatttcgtttgcacgagagaatcttccaacttatctctctcgtccacactcaaatatgtcaactaatttcttttttctttctaatttcttttactcaaaaaaaaaaaaaaagaaagaaaaaggaggacgtacattctttaattttcctttttaataattcatttactaaaaaaaaaaattacttcaataaatttggaacagaaaagagatcatatgatcattttccccccgagggatatgggttataggtatagtggacctttttatttttacgactttttatccccaaaaatgttatgaaaaggatagtaagaaaaaaaaaggattcgaaatattctttccggtataagtaaaaaaagaaatgttagcggcatcttaatgttgtttatacaatttaatatcaaattttatatattttaatttaaaaataatatagaatagcataaactgtttattaattacactctatatttatataggcttttttcagtttaactaaaaaaataataataatacaaaaaaaaattaattggtcaaataaataaatgtacggtccaaataaaaaaattacacaaatacctcttacacacaccttcaactcacaattcacactttttggaattgaaatcttcgttcgatcgaccaacccaacacaatcgaaacgaaacccaatcagaaagagaatcactattaattctggcgacttcacctaagaagatggttggaatcaatcaaaccagaggttgtttcaaattcataaaaaagtgctgaaaaactactacgaaataaaaatttaaccataaatctaatttaattcgcataaaattaatgtcctgacttcaattttcagatccatgaaaatggacatctcaaaaagttgaactggagtt

SEQ ID NO: 63912 - DNA, 762 bp, Cannabis sativa
aaccatctttgtcaaggattttattgttatattcattttctttcatatccacacaagggttttaattcttcgacttgtgcttactactgttctaaagcacacacattttccttttttttttttcggttttctttcaataatccaccttgcttgatcaaattgattgggaggtaaaggctgctattggaggtgttctggtgcctatgtgcatgattgtatttttacttttgaacttgctctttgatgatgtttaacccaaaaaagaattcactactatgataagagttttattaattgaaatgttttcttttctattccaggaaaagggcaagagtactgggcggaggagaatattaatgaagaaatacctgcctgtcggcaaatgtttaacattttccacccttttgatcctgtggcatataggtttacttcacacctatctgatgacacataagaccagtttcaacttcattttgctaatcatgataacatagtaaaactcactttctctagaattcaatgcatgcagggcatacttgagtgagtgtttgagagagagagtggaaaacaattttttaatggcagtaagaggctttgattagtttttttgggtcagttttggagagtgatatttgtcaggcctttactgttttgtttggaattgtaatcatggttttcctccgccacaagtaaggcttttcaatttatatcggggagggtcctgtctaagacaagaggatcctttctctctctctctctctc

SEQ ID NO: 63913 - DNA, 789 bp, Cannabis sativa
tatttattttataattttaatttataaaatgatttttttatattttctaaatgattatattaagtgtaccaatatgcatgtcatgtgtacacataagcaatcaaagttggcacttaactgtagtaaatagatgacactttaaaattgctaatagtttaataatttggtagtttttacaaccaaaatttgagatttgatggttaagtgcaggtgaaataataattaagagaatttagccacaaaaaattctattaaattttaggtttttcctcctatttgagggcttttatataaggagacatttattaatatttttgttttttaaatttttattcataaaaatttgtatttttaaaactatattttaaaaaattaaaatgtgttttataactattttagttttttaattttaaaaacagaaaataaaagtgtgtttaataatttttatttatttttttattttatttaagtctagtatggggctattgtctgagtctggagttgggtctccaattgtggatctgagtctaaaatattaattaaaaaaaatgtttaaaaaattttgaaagtatttttttttttattttctatttaaaaattgaaaaatgaaaataaatttatagaacatatatctttggaatatatttttactttctaataaaaaaaataaaaaaaattgattaaaatattgttactaaacgcgtttataatatttctaactagattttttattttattttcttttaaaaaaaatgatctcagtataacctcgctaatttctaacttgat

SEQ ID NO: 63914 - DNA, 1466 bp, Cannabis sativa
  modified_base (992)..(996): a, c, t, g, unknown or other
tttcgttctaaaaatattttatttagattccttgtaaaaaattaagcaactttagtttttacggaactcgattccgataaaaattgacaaagttataaaagtttagttaattattgtatagtgaaatgtgttaattttttttgtatgatttggcgctttgcaagtgtttgaaaagaatttatgtcaagtgggaatttcaatctcgattcattgaagctatattttttttttatagttgttatattatattacatataatttataaaagagttcgaataacttaattattcatccataacaacgtaggttatgagactttgtgtgttgcggtgataatagaaggtttataacttgcatattttagtgaagtaagatctgtgaaatttatgtgatgcggtgatataaggatgaaaatttctgtgttatttgattatttacatttgaaagtgacagatggttaggtttataaaatagggaaaatactatctgatttttcgtaaatatgtttatcatatttttaagtagttgcatgcattcattgatagatatgagaatatggtgttaatgtaggtaaaaatagaatttctcgtcaaattgattctaatttgaggttgatgttgattttgtgccatcaactacaaatgaagtacaatctgttagtaatacaatagatgaaaatcagactacagggacacagagaaaaagaacctctcgtgcatgggatcattttatatggaaaaatattgatgcaaaattaaagtagtttgtaattattgcgagtgtaagctggtgggagaaagttctaaggggactaggcatttaaattctcacgtagagaggtgtccagtaagaaaggtccaacttgccgctaatcctagtgcaattgcaagcccttcagttactttcaattttgatcctgatttaggaaggatcaaattggcttaaataatcattaagcacgaatatcccttgtctatggttgagcatagcgnnnnnatagaatattcaagcactttgtgtcccatgtttcaaatggtgtcaagaaatacggttaggtttgatattatgaaaatgtataaaattgaaaaagaaaaatgcaggaaaaatttggaaaaaagtaggagcagaatagccataaccagtgacatgtggactgcaaatcattagaagaggggatatatggctgtaacgggctcattttattgatgattcttggaaattgcctagttagatttttgagttttaagtatgttccatgtccttacgatgctccagcactacttgaggccctaagatcttgtcttaatgaatgaaaaatagaagacaagattagtacagtgactctcgataactgtacttcaaatgatgttatgattgagcttttgaaaggacaatttgagcctgacagttttattttgaagggaaagttgctacatgtgctaattgtgcacatattttaaatctaa

SEQ ID NO: 63915 - DNA, 1203 bp, Cannabis sativa
ctttatcagagattgtcctcaggcgaagaaagaggagcctaagaagaatactacacagaacccggggtgactttttgacatgactaaggctgacgctgatgctagtccgtcactagtgacaggtcagttttctattagttgttgttcttatactgtgttatttgattcaggagctactcactcttatgtgtcgagtagagttattgaaagttttcataagccatgtgatatatatgtttcggggttatgtaccctgttaccttcgggagaccttatactgtccactaggtggattcagtctttttccttctagattgatggttgtgaattgaccgtcaatctaattgaattgcaactgtctgattttgacataatcctgggaatggattttttgtctaagtatggcgcaacgattaacggaaatcacaagatggtggtgtttgagcccgatagtgctaacccagcagtgtttgtgggtgaggttcagggggcacgcttaccaggaataacatagctgaaagctaaggacctggtgaggaaaggttgtctgagattcatagtcactacagtggataccagccaacttgtgacatcagggcctgagaatacaagattagtatgcgagttccttgatgtctttccggaagatttaccgggattgcctcctacctgggagattgagtttgttattgagttggtttcgggagcgaatccagtatcaaaagcaccgtatcgaatggctccagcagaattgaaagaattgaagatacaattacaagaattattgaatctcagattcattagacctagctactcaccttggggtgctccggtattatttgtgaaaaagaaggatgggtctctgcaaatgtgtattgattaccaagagttgaacaaacttaccatcaagaacaagtatcccttacctcgaattgatgatctgtttgatcaactgaagggtaagatagtcttctacaagatcgatcttcacttaggctatcatcagcagagaattcgagaggaagatatctcgaaaactgcgttccgtactcagtatggacattatgaattccttgtgatgtcttttggattcaccaatgccccggcagcattcatggatcttatgttttgggtgttcaaggattacctggataaatgtgtgattgtgtttatcgatgatattttggtgtactctgagtcaga

SEQ ID NO: 63916 - DNA, 651 bp, Cannabis sativa
aggaaaatagatcatgtacagcaacctatgcatgttctacataatacccaacctttgaaaagccctcatggtaactagaaaagaaagatgcaacacaacaattaaaagtgaaaaaaaataaagagatcgaaaattaaacctacaggcccccttttataaatgtttctatggataaattaaacctgaaattttacaataagaggagggcagagattacccatgagctggaaccccatctccttgaaaagcaaagattatcaattccactcagacaggactcccacagcacacagatcactgtgcagttacacacaaagcttccagattgcttactggcaagcaggttccattgaggtgggtcttcattgggaacccaagcattaagctgaattatccctccggcttggacccttggtcccccaataacgaattctcactttcttttctatatcatttaattagtttagaaccaataacacaaaagcccaattaaaaatatctgtggagaatatatttaaaaatctattaatctatttttaaattaataattatacctatattaaccacaaatgtagaacattttagttattaaatttaccacaaattttaagaatattgaatttagtttatccaaaaataaaaaataaaata

SEQ ID NO: 63917 - DNA, 668 bp, Cannabis sativa
ccaaaaaaaaaaaaatacttaaaatgaccaaaatgaagatgcctttttttttttgaacaaaagctttttaagggtgacattttctactcatttgctcattggtaatgatattagttctgcaccagaagtgaacagtttttacttccaatatgaagaacaaaaagactaagagaagttaaacaaaacaaaatctatcccaaactcataaaatccaaacttaattcttgacgtacttacttaaactaatcatatgaaattcacaacaagaaaccaatctcagcatttaatttccctatttaataatgtcatgtataaacagtgcttttgtgcaccaaatagatatatatatatacacagcagaacctctatttaagaatactctattcaataacctcaaatttgttataaaataatcaagtcccgatttgggccagttataaataagaataacctttaaattgtaattagttatatatgttttaagtcccgtattaacaaaaaatacctctatataagaataattacatcttaataaaatatatacacgtattttgtaaatttatttatgtaaaattaataatttaattttaaattataatgcaggtatgaaattatatatactctaaaatatttctattatgatatagtattaatgattatttattgtt

SEQ ID NO: 63918 - DNA, 882 bp, Cannabis sativa
cgccttggtttgaggatttagctttggatgtagagacagacattcttgaagaataatgagattcagaaaaaaaaaggaaaatccagcagttagcgcccaaaccaaaccctaatatgaaaagagggaatggggcctaaccgttagaaagaggacccctccggatgcttgccaaacatggaaattccatggattcccctaggcaaacatcgagtgcacatctctcaaaggcaacaaaagtagaggaaaaggaaaggaaaaataaaagaaacagaacacgggcacgaaagctgtctcatattctgaagcaatcacgcaaaagaaaggttgattgcaaattaaaagagaaagaaagtagcacaacacaaataaaagaggatgtatacaccacacgatagtttttgtcaaagtcatttcctagaaatcaacacttaaccaaaaaaaaattctaccctagcatgcaagtgaacaacaaaagtataaagtacccagaaaacttacacaaaggttgtgaattgggggctggtagtgatcgacggtagaatgctgattgacaacgacggaggaatagcagtaaaaaatctatggtttctaaaatttttctcgaaggtgttcttggggcgaaatgacgaagtggtgaaagtaacccagtgaagtaaaaaggatggcttttatagaccagaaagggtgcaaggctgctgtgatcaggcgccatcgtacggtgggaattgtaatcgattcgcattctacaaatcctacggtggagacaaatggacgccagggcagttgaaaacatttgagtactttacagacactcggattaaatgcgtcgatttctcaatggatgggaagcgaatcgttgcctgcaaaaggaaatcaatatta

SEQ ID NO: 63919 - DNA, 899 bp, Cannabis sativa
tccattacctcctccatttctctaagaatgacatcacgctcgcgactaatacggtgctcttcgaacttggaattctgcaaaatatcagaaaggatatcaagcgccttcggcacgtccttgtccaaaaccttagcgtagtaagtggtctgctccctcgacgtgtaggcattcaaatgtccacccatgttctcaatctcctcctccagctcacgcgccgtcctcttctcggtccccttgaagatcatgtgctccaagaaatgcgccgtcccattagtctcttcagtctcaaatctagaaccggcatcgatccagacaccaacggtagcggactgagccgcgaggttcgattcagtggcgactctaagcccgttaggaagagtagtgatcttagtctccggtgcagaaaggatccgagtgtggtcggtgacggtcgggtggggcgacccgtatttgagaaaacgagggtcggggttctcgagctgctgaagcttggatttgacggcctcagcgaggcggtcatagatcatgacatctggagccggtggcgacggaaccggagactgcgatgaggcgatcgcgggtgaggtggatgcggttcgaagcgcttgtgtgagcaaggtctgaacgggaagggttcggttgtgtgagcggcgagctatggtggtaaggagatgtttgatcggcatggctaccgattgggggacctctcggaatctgtccgctgagggtgtgctatgttagggttttattttgagaaaaattgtatttttggggaagaagatgaccaatgaagccaaatatctctctcttactcctgacttttctcaaggaccaaacgacgtcgtttactcttgttttatgttctcactatttgggcctaaacctaatgttagccacaa

SEQ ID NO: 63920 - DNA, 580 bp, Cannabis sativa
tgagtaacaatgggtccaagaattgttttctttgtgttctaaagtaaattgtgattattattaggttttttttcacaatttttttttacaaaaatattatttttttcaatatataaaagtatactatataaaagttttgggccctaaatttagatgggccctagacatgggcctagcccgtcttagcttagcgctaagcctgataatagcctatcaccgttggttgatatggtagggtttttataagtcaggtctgggtccctaaagcctatttgtatataggagtagcaattcgtattgccgtattatatttgtgttcgtattatataagttgatatgtttaattagttaatcctaacctaacccatatatatttggtattaaaaaatttcaatattaacccgacttgggttctcgtgttatgtttatatgtaaactatccttatattacaatacatatcgattaacatggttggtatcttatatttaatttatatatatatttaattatatcaattttcttactcatttaaataacatactaaacaaaaatatatatgaagttacaattaaataatat

SEQ ID NO: 63921 - DNA, 1097 bp, Cannabis sativa
  modified_base (588)..(604): a, c, t, g, unknown or other
ataattataattagttatcaaatgaattgccatctatactatttattaattagaccttacaaagtctcttaattaacatataaactccaaaatcttttcttcataattaagcctttgcttagtgaaaatttataaataagacatagttcaattttagaattataattgattaattaaaattaattatttgagtttgcaagcagtattatctcaactagtttggggaccatgggcctatatataatcaagcttccaataagtaaaactagaatttaccaagtaaatctaactgattaattcctccttgtgccactatagattcgaaatgttactcttaattatatagaacactctatatgtgccaagatataaatacgttaggaattatccatcgttctaatccaaatagtcaaagatcctctgtagatgatctacatcaaatagggacaattctacccttcaatgtattttatcattaaaacacatagctactataaatgatattttagtgaactaatataataaccaaaatgagacctcaatcatttatctctattaagtcaagctcgaaagaaatcatcatttcannnnnnnnnnnnnnnnnaagctatagattccatatctataattaacgctcccactaaattacactttcatgttctgaagatgtaagtattcagccgttctaactttaataaaaaaactttaagaacatgaataatacagttgagcagaacctaattatattaggattaagatctattgacctaagatcaactaacggatattgacttagatagatataacagtaagcttatgatatcttatccaagctcaatatcggttcagtctgatgtatactccatacatccgatcctagcatactttgccaatatcctggaaaggacataacacttatccaaggtgtaaggaagttctatcactgattattatgtcagtctaaatctagtgtactgacaaatatggtctagatagcttatagtgtttatgtgtttaatgcctgttacatatttaatttatcaggagagtagaaaatttacatatgattgagatttatatatttgagaagattataa

SEQ ID NO: 63922 - DNA, 1250 bp, Cannabis sativa
  modified_base (710)..(712): a, c, t, g, unknown or other
cattacaacaccatccaaaaatacatctcaaatattgccttctttgagtttgagttggaagaaatcagaatatcattaatgaaaacattcacgaagtcatcgggtatgaaaagctactttggaaatacccttctctcgaatcttcaactggtaataaccagatcgaagactgatcttagagaagacggtccttccctaaaattaatcatcataacttctatcattgacaaaataatacttaaccttctcttgaatccccctttggtttccttctaggtcgaaagagaggagagagagaggttagagactttccttcctaacttcttcttttatttaattcttttgtaaaaaattaaatcctattttctttttttttttaaatagtaaccagtccaaaaataaataaatcaaatcaccttcccatgcaaaattaccaatatacgcttctcccaaaaaaacaaaactaaacaaaccctaggggcaatttggtaattttagttaatccgccaaaccaatattctaaaattctaaactaaaccggaatacttccaaaataatccatcctttaatgttgttaacgcagattttcattaactaaatttgagcctcacagtaatgatttcacatagaagaagtaaaagcaatcaaaataaagaatatgaacacagggttttttacgtggttttgtagttaaaattctgcatagtccnnnagtcaatcttattcagatttttgagtatttttcaaagtctctttcatatgagttttttcgtccccccatcttgatcttgtctgccactatttataattacataatggccactaaattacaaaagttgactgtaatcgttatagcaattattttctcaaatcatgctaattaaatgaagtttttatttataattcacacagctatgagtatcccgcttttattgggccgagatgaacgcacacttaaggatatacgtaagcctaatctcatggggatggttcgttaggaatggtggcgagttaactttgatggcgagttgtgacacgtcatatgacttcccaaaattaatatttttttaactccgataactatattttcttgtatcgagataatcttcctcgcatgcatgccatcttgattcacaatacttttcaaacttagtttgtataccatgtaatatatgctaagtgtttttatcgttatcgtttctctttcacacagcgaggttgaggcctcgtcatgcacacttgcactcaca

SEQ ID NO: 63923 - DNA, 1984 bp, Cannabis sativa
ctctgtggtaccactgaacctttaatagccccatttatgttgaaagaaagcgaagctgtcgttacacatttcataacaagattcacccaattggtatcaaaccccatcttcatcataacctcacgaagaaaaaaccactctactctgtcaaaggccttactcatatccaatttgagtgccgaataccccaatcggcctcgctttttattcttcaagcaatggacaagttcaaaagccagcaacacattgtctgttattaagcagttgggaaggaaagcactttgatgctgagatataacaaagggcagcgcttctttaaatctgaccgcaatagctttcgagaccaacttgtaaatcacaatacacaaactaataggtctgaattcactcacaaacttaggctggtcaattttcaaaattaatgtaatcagagctgaattaatacatgtcatatccgcaccctcattaagaatttgaagtacactttgagtcacaagcaagccaacaatatcccaatgtttttggaaaaacatagcagacataccatccactcctggggatttatcaggcgccatcgaatgaggagcattttcaacatctgtagcagtacatggtattgcaacagaagagcatttatttcaggagttatagccgaatggatagtggacaaaaccaaattcagagcttcaaaatcaacaccattagaattgaacaattgtgaaaaataggaagtgacttcattagcaatttcctcatctccatgtacaaccccactagcaacagtgtttaaagttttaattttattggtggcattccttgacttagcacgagcatgaaaaaattgtgtattagaatctacactttgcaaccaatcaactctagctctttgatgccaataaagctcctctttctctaacaagtcatccaatattttatcagcatcttcaacatttttgaaatgttgtatagaccggtcattactgttgtgcaaatgagatggatttttttgtgctgctgctatgtctcggcccatttggccatatttggagacgtgccaatcctggagagcggaggagcagtctgcaatattttgcagcaatgaaggaataggatgaatatcgttacaggatttctaagaggcttggatgatgtcacggcaatctgaatctttgagccaaaattgctcgaagcgaaatctgtgatgtcttttagtagaaatggacaattgttgtggtagagaaacattgtatgcaattgcacggtggtctgaatgatagaaatccagatgagaaagagtagcatcaacaaaaaaatcagtccaaacaccattatgaaaacctctatcaagcctctcttttactaaagtcccactgtagtgtttgtttgtccatgtaaactggtccccagtgtaaggaattgcaataagattacaaaaatcaatagcttgcctaaaatcattcataagcttatcacttctcagtggacccccatatttgtcttcatttgacaacaactcattaaaatcaccaagaactagccaaggaatattgtttgaaggtgtagcaaaacttctcaaaagattccaagtattaatttgtaagtgagatttcggagcaccatagaaagcggtaaagtggaaacgacaaccattctcatacaacacaaaagcatcaaaatgattcattgaataggagttcaaggttacatcaatatttgtcatccataacaacaataaacccccttttagtccaacccttgggacttcaagtccattgctaagtttcaaagagtgacgaacatgatctaaagaattacatttaagcttagtttccataataaaaaacaaatcaggacgctgctatttaaccagcagctttagatgcctgaatgccgaagggtttcccaagcccctggcattccaacttattattttcatggctgagcgcggggctgctgatgtgcaactgttggaagttattttacc

SEQ ID NO: 63924 - DNA, 1263 bp, Cannabis sativa
aaacatatcttttgggttgtttttcttagatcacattgcttaatcactacatatatataatctaaaacattcatttaatgtagcaagagaagtttgttttgatatatatatatacatacatatatatatatatatatatcattctcatctctagctaaagtagggtctaccatgtttctagaaaagattaataatcaaactaattaattaagttaacaaactaaaagttcaaataaagttgtagggcaattaatgtgtctttaatttatttaattaatatgagtagagttagaagacaatccccatgtgattgtactccaagtaacttctttcaaaactcacttgacaagccacaagtccaatcctccaattatactataaataagcatctttagttattagctctaccataccaacaagccaagtactcatctcaatagcaaagaatccctttcttttaaaaaatcccctacttttcttttttcttgttctctccttctatatatacactcataaattatattatgggtttttatttgccaggagtagtaacaactaagaaatttcttcgacggtctttgtcgtctaactcgagcaaaacaacatcaagcgcagtagatgtcccgaaaggccatttagcagtttatgttggagagagacaaaagaagcggtttgttattccggtgtcaattttaagtcattctttatttcaagaattgcttattcaagctgaagacgaatatggatacaatcatccaatgggaagtctcacaattccatgcagagaagatatgtttgttgatctcatatcaaatctcaatgcttgaaggttgatcactaaaagtgtggcttattctttcatcacaacattttgtgaaactagaaatattgagtttcttttattcttattatcattctccttactttgtggagtggaaaaatagctcccagaatgagaaatgtataattctgatacaatcaatttgcaattattattcttatacatatatatttgtattttctcttgttccctttagctttggttactaattttttgtaattataactctctagctataattaatttatcaagagtcaactagaatttgataaggtatatcttctgtggtgatgctttgtttgataagagcttacatatataacaatgtacttgcccaagatatatttatatatatatatattttttattttcagtctgatgaagaatgattaatgtagatgttgaggtttgaacacttaaaa

SEQ ID NO: 63925 - DNA, 707 bp, Cannabis sativa
tatcttaacccaatatccgttacccgattttgcccatcctaatgggccgcctgctgatgttgattttgaacaaatacctgatattgggccttccttgattcaagggctggatataccacatatttggtcatgtaggtcttagcagccccataacttccctgagcccattaaccttcgttggccctcaaatgatcctgaacttcagaaaatataccaacagcttttgaggcctgagtctatagatttatataaggcccaatcttccctcatttcaaatcccccagatatatctcaattaattacccatctgcttggaacaagaaaacgcaaagtccacacatggtatcatccaacccctgaccctttccttgactcccctttcatcgattcaagcgttgaaactcatgggtcgatctctctctcgggggggaaaattcaatctttggaatcccctaaattcaatgctggttccgttgaacctggtgagacctcaaaagggaaaagcagaagaaggcagccacatggaactttatcctccaaccgaaaatcaggggtgcgcactagaagggcgagactcaatgaagagaatgaagtgcgtgaaaacattgaacagatactcaaccagtgtgtcgaagtcccaattacttatgtgcaaaattttggaagtggcgaggaggcggccggaagcatgcccccacctgcgccat

SEQ ID NO: 63926 - DNA, 1530 bp, Cannabis sativa
ttaaacaatatcagtagcccataagtaaagaaaaactccctaaatttgactggcatgtatacagtatcaaactcaagttgccaaaaaaacaaatgacagagctctagcaagcattacaataatatttacacatatcatgaaagttataagaccttgtacaaacatgagctctttaacccatggttgacgtgtgtcagaacctctaaatgaactacaattacaatggtgaaacagaagaaaaaatggttatacagctgcttctgaaaagcttatattcatccaaaagcgtgtgaaagcacctccaaccttttctattatggatgcattaattcacttaaagatatgacaaaaaaatcatagactcatggaactcatgatttgttttaaagacgttagtttcatatatttctaactaaacgaaaatgtcctgtctcattaacaaaatgaataaataatcctacatcctttttgtgagctcaacatgaactgttaaagaaggaatgaaataataaagtgagcaaccagataagtcacaagatcaaaaaatgagagtatgaagatatgagaggcacaaaaagtcagaataactataaattagaaaccatacattctgtatctataaaggaatatctactcggtatttatcaaaaacaaaatggtcttataaaagaaaaacaaaaaaatacactgcaatggcataacaaaaacttaagaggaagtccaatttcatcaagcaaccttcaactaaaaatttaccagtagcatgcatcttatacagctctgaaagccatacattcagtaagaaagattaatgcttaaattttcaaaccaaccactaaagtggcaataaagcaatgaaaggcattgatagaaaattgaatttctgcattaaaaaaggaatcatgtcatgcatttggtttggtattccacagaaatgacatatatgacttgtttctaagtgtctactcacatactctggaatctaactattacaaaagcacccaaactagcaacatggctattgaagaaaaaaaatataactacaactgatcaaatgactcttctaactccttcaagtgatccgtacattaaggcaaagacttaacaaattaataagagtcggtgttacaggaaaggtatagggactaattagtataaatatgtaaagtcatttcacaaatagagtcaaaaaaaaaaatgagagaaaattaggagtattcctattggaatttggtaagagtacatttgatattgttttttttctttaacctataaaattgtctttattattgaattgcccaactcatggagtctcaaggtaatacaatatcaaacccactcttcaagtcagtgccaaactccaatagcaatactcttaattttcattcatttcattcattcattctctatttataaaatgattttacatatttatactaactagacaatttactagttgccccgacaaacaaatataatactaaaacaatcccaaaacatctaaataactcaagctaaaatccacattcc

SEQ ID NO: 63927 - DNA, 1802 bp, Cannabis sativa
gtacctcaacgttaaatatcaagtcattatccatgtgtcattttcttattggtacacataaattattttttttaaaaaaaaataaaaattcatgacttggaccaactagggattgccacatgacatttcatttaatatttaacaaacaggtacctacagaattctagaagtataacttaattattattgccgccaaaaattaaacttagatatttatttgcaattgagagctaaacttaggtatttataccgtaaattactcaaaaaataataatataacaaatcgattatcgcccccacctttaaaagaaaacaaaattataacttattttttatgccataaaggagagggagctacgagtgttgctcccctctctgagagttaccaaaacaactccaacctcaaaaattgtttgtcataaccctactcggataggttgcatctacctttacaagagggtgcgcatattctatttgaataactaaatagcatcttcacatagagactaaaaaaattggttaatcaatatgaaaatttgtagttcaaaacaaagacagaaggaaaaagtctagagtgagggcaaattgtgaaaatgatagtaaattaaactaattaaatagaaatttctttttacatatttaatatctataaaaatacatataattttattttttttagggctaaaacccccataatttacaagtgccaagctatttgcaacacaaaattgaacccaaaaataaaataaagggatgggtgttgttttcatgaaattgagaggtgtaaatggcatgagaataaggctatgattactagatagttttacatgtacacattaactttatgtgttatgttgttttcatctaaatttgatgtgtagttatagtcataacagctactctcattatcatattcaaattgtccttcacaaaatattaaatgtgaaccaaacctaaccaaaccctttcaaaccttaataattataatgagcttattttcattaattaattaaataaatttcaaaagggttcctaaataacaaccaaacctttagggttgtgtgactttttttttctcaaataagaaagaaatatataggaggaaattatgataaaataaaattgagggctaaaatatttaataaataaataaaaataaaataaaaacaattttccatggacttgagggtattttaggaaacacataaaataaaaacaatttcctagaaaccaaaatacaagttggcttggctgacctgaatatttccaatcaaaacttgtgaggaccaacttgccaatttttaaattggacaagggtaaaattggaataaaaaatgagggtaggttggatggagcttagtgcagctattattttattttattttttcaaataaaataaaataaaataaaatgtccaattttttttagtgaaggctgtaataaatggtgctatattttccattttattctacaaattaatttcatttgataaatgattcctttaactatatttaattaattatgatgtcttttaatgttgcttatcaaattgtggatataatctaaatcaacacctaagttaataattttatttgaatgttacatatcaactatttaaattttaattattggtattaaagcttatagactatttaataaaataaatatgtttgtgacaaagaaaaaaataaataataataatgtagtacgatttcatctttaatttgatcattctaaatgatttaattgtaaatagtgcattagtaattaattatatgtagttaatcacattataattaaaa

SEQ ID NO: 63928 - DNA, 871 bp, Cannabis sativa
tttatttattaaaggaaataaaaaaagataaaataaaaaaaaataaatatggtataaaatgaatgtgttgaaaccctaattctattcccacttaactttttcttacagacaaactttaaatttcctctctctgtctcgtcctcccgatctctatctctccgtctccccctgtttttctggtgcagcgatggaaagccacagctggctctagccatcaacaaccctcttctaccccaaaaaatctttctcttcccttgcacgacgacactgccaggccacgatggccaccctagtgctcgcagaaacccgaacggtgaccagtggccaatcgcagacctcagcctattcgtttgcatctatcgacggaggatgacttcggacgtgacggttcattctctccctctggttctcggcccgagcttcacgcaaacctccgtgtccggtcttcttccccaacgacaggttaccatcgtccaagagccatcatcatcaacgaacatagtcagattaaatattttgtatattttttctttaaagatttatgagtttatgggactggttgacagtaagatttatgggttttgtttatatatctgacattgtggttttgatttttatattagtgtgatgattaggactaaattcaaggaagtgaagtgatggaggagaaattattacaatatcatattgcttttctatgtttaagatctggttttataatttgatttttgatgtataaattttttgttaagtttaagacattttattacttaaatctgtatttaggtttttgttttattaatttttgtattttttttctttaaagattaggaattttagatgtttatgtccatgtttataaattttttat

SEQ ID NO: 63929 - DNA, 4176 bp, Cannabis sativa
gtgatcccagccagaggggatgtcgcaccttggctcacagtaggtggctgcttaggattggttcttggtgggacccttgtattctcaggagtttgtgaggcaagatctgtcagcaatgggtcactctggtatcacacctctgcgagtttgcaccaccattctgtgtgtctgctgaatcttaagacaaagagcaaacttggattcttgcttctcaatgaaagcaccaaaatgttgacttcgcttttagccgatgacaatgagtcaattaataagcgataagaaatataattaagacagagcaaaaatggataaacaataaagaacacaagattttaaagaggttcaacccctttagttcggtaatagtctactcctcttagattgtattgacttgagaacaaagaatacaatgtttcttctctcaaagctttcacaatgaaatctctgagggttttctcttagatctctctctaaagcaattctttcgatctatttttcagtgaagctagatcattatttatagggctaaatgcatgaggggaggtttcccttttgcttacaatatctataattagtaagaacatacattacatatttaaattatatgaaatgagggattgggacagcttgttgtatcccttttatatgattccatgattgtagggattgcttttgtgcttgagcttcacggtatatatcatctttgaagtagttaagtcttgatacacagttcagaggggtaacttcactctttgctcgaatcatctgtcctttgttctgctcggtcaagcagactttgtgcgtgcagatgtgttgcttgaagtctgttcgaaatatttctccagccaagtgtaaagaataactgacacgtgccactagtacacactgccacatcatagtacgaaaaatgggataacaagtataataatatcttttttttgtaaatattttatgtttattttttatattttttctatttaaatgtggaaaaatagaagaaatgaatatgtatatatgtatgttattttcctgcatatatattatttgtaaattattataaaaacttaagaaaaaatataattttatttttaaaacaaaataagtattgatactttaaaatttatttgtctacagttcttactcttttttatatttttacaaacttaacaagattatcttagtaatttaatttttttttttgtttaccatatttagagtaatgtgttttatttatatatttaccaattatttaatacttgtccttttcttgtctttttttttaatctttgattttcttttcatttttgctaaaaaatctctcaattcttttactctttattaaaataccattttttaagtcttttgtacatttttactatttttttctcctataaatgaattttacttgcttatttttttttaagttttcctttttatttgtttattagtaaatatatgatagtgtaaaaactatatgagcatacatatggtattaatcttttttgtgtagttaaactttttttttttttttttataaatatttgttagttattattttgttttccttctaagtttacttattattagataatagcaggaaaaattaaatgagtttatatttggataggataactgatgactttaccttcaacaagcaaacttataccatgtcgttgtttaaatataatttttttaatgattgtttaaatattattgatgaaagtaagaaatataattgtaacttacatatattgacgagtattacatatattgacgagtattacgtgccatttattccctaactagtatacctataaaattgtttttcaatagatatctttctttaatacataaaattgttttattaaatattgttactgtcctgatacatataaaattgtttttaatacataatttttttttaaaaaaaaaattgttttattaattattggtactgatattttcttttagtattataatatttcttcaatacctgtgcactgtaacgttgtttgatataaaccatgaagaaagcaagtcaaggttaattgtcacaacgaccatgcaaaaatgagctcaaagcaaataataaatgaccatacctgcgagttagagtaactcaggtcggtcacataacttgcacaacaaacttagtatacagaaccaatccattcattaaaagcttctgtgcttcaattcaacttcttgtaagttgtaattcatttatgaacaaaaatttatcctttctacttgactgatcttttgtgaaatataattgccatcagcaaggccatgtacaacaagttaacaatagcattcaacaatatatcaatgtgtttaactctacagcctagcctttccttcacctattgaggctcctccatctaccacttcattcaaaatctctacagcctatcctttccttcaccactcttctcatcacattttcgctggtccgcaccaaaagtaacgtctctttgtgaactcgctttcttcgaggctccagacaatgaaaagctaaaccacattccatcgatttgcatcgtgctatcatcacaaagcgcaaataactctttttgtcatcctgaaccagtagaaaaatacaaaaaaaattaggaaaaacatttgcttttgattttcatagctgttcagaacatctccattcatgctctctaaatacaatacttaactaaaataagaggtgagtcttaaaaaaaatgaactccaaccgtaaaaaaggaataaaaaaagaaaatgaataggaagctcaatgtaaggagcactctatttttttgctaatttttttaaatattattttaatagaatcactattaccttttttattatttcaacaaattaatttatatttaataaatttaaattataaattattattaaaataatcaaatgaactaaagtaggaaaccggctggagcaagaataataaaaatgaatctctattctaacttttttttaactattttagctaaaatttagataaaaaatagagagcaccaaattggagatgctctcatttatcacaggtggccaaaccccacgatgacagcctcagacatttcgggtctattcagtttttgccatctccttaggtgagcaacttctaaatatatttcatttggaatttggcatttggcattaggaataaagagagacttgcttatgctttgttctcaagttgttctaacacatcaccttctcattatgtgatttagtaagaacattaaaacatgatttgatttcaagaatcctatttcacagcttaccggtggaatatctaagtaaccttcgctcgcatcacacaaatccagtgacacttgtctaagtaacggcatctgtaatcataacaaaatgctataagattagtttgtgttacttcataaacattattcatttaattgaaaccaaaaaaaaaagggtaatgatatctattatattattacttttgaagcagcatccagaatgaagctgctttgtatcccatgaccctgtataaaacaggaaaattcagcccattaaaaatgagaatctataatttcattcaagaaatgataaagctacctccatcttcacaaatgttaattctacaatcaaaatatgctgatggtgaaaataaaatgttgcacaatcatgctgtaattgttatcaacaagtccataaaagagatgaataaaacatgtacttgagaatataagtacatgttgcacaatcaagctgtaattttccgcaagtaaattaatttgattgagaatataattgggtgcgaactgaaccatgtacttgagacagcaacttgctcatagaaaacatgtcttaaattttttttgaccatgttgtaactaccagatactgggatttaagtatttactataaatacccaagaaaaaaaaagaaaaaaaattaggaaggaaagtctcacattatgtcgcaacaacagatcttcaagagctacacactcaagaagagaagaaactccgttttctgtaatcgatccacattcctgaatgagaaatgaatatgtgaccattgtatcaacagtttgcactaccacacctgaagacttcatatcaactagttatgacttattaatacgaggaaggggaaaacaggaagagggaaggatatcagaccaagtacaggagacagaatcacttgttc

SEQ ID NO: 63930 - DNA, 1244 bp, Cannabis sativa
cttggtagagtgtagcttaattagctgtgaattggttggaactttttaaataaaaaagacattggaatgtggaaatgtcaatttaggtttattatttttatgagacagataagatgggttcacaattggtactatgtctatttatatgtatgtaatgtattcactttcttccttgtaatttccttttctcattttttggacataataatcaatggaagcttgagattattatagttggtgacttaattattaagtggctaccataaattatatattcatgaatctatcggcggtgtcctataccattactccaccctaatttcaagacgtgttcttaattgatatcatttactattatgctattaagttttgaataatcctacaggtcgtccagtattgggcaaaaaaatttaattaatttttttttttatgtatagtggtaaatacttaaaaatataattatgtaatttttttaataaaatgttgattgtagtatcttaaaaaaataaattaagtattttttttttaaaaaaataattatattttttaataaataatagtaaaaacacaaactataatatttttaaaaataaatttggaatttttttattaaagaattttttaggcttgtgtaaggagccttaacgagccttggggtgggttcctacgtcttcttgttgttgcatattttatgagtgttaaagaatataaacatttctgtcttctgccccatttttgagttggtcctcaatcctacaatacatattcttaaggagatgtttcggtagacttttatctgttttggtatttaggaaaatttttcaatttctttttctcacgttgtaattatttaagatggtaaattttaaaaaaaattttaaataccaaatgattttcctcaattactttatatataaatattttagaaaaattaactacaaaattatttcaaatactaaaatgaataaaaatgtattagtacatctatttcgtttggttgtatatttcatcaaaacaccaaaccaaagataataactagccaatattaatgattaggcaaacaagataaacccaaattcaatcatgaaataaaatcactataattagatcagagctttataatataggatggtaataaattgggtgttacaacttacagtataatgcaatttatttattagataaaaaaaatcattaataaaaaaaaaaaaactacatggtagagccttgtgaaatttcttgta

SEQ ID NO: 63931 - DNA, 869 bp, Cannabis sativa
gagaggggttataaacttggggttcaagttggaattgggtagatatatttctgtttgagacatgggtaggctaaggttgcaaatccatatttgggacattaacagatacaattggtgtgttagtagaaatattgttgctgatagtttgaaaattagaattaggacttctgctagtaatccttatccaaaaaggcatcttatagcaatatgtgttgttagggctcgatatggaatatctctctattttgcttttgcctgagcacaaaatagatctaacttggcaagaattgcaaggttttcttcttagttttgacagcaagcttgagcatctagaagatgtccgtccaaccaataaaacgctaaataacccctctggtaatttttgtcaaagaccatccaactctaacattagggggaattactctagaagaagaagtagcttcaacaataactaaggtcgtgggaattaatattaaggtaacactaacaggggtggcaacaacaataataatagtaacagtaattgtgtgagaggcaaatacaataattgtatgctactgcagatataatgacaattacatgggccaaccacttcaaaatgataaccaccaaagccaggacaaaaacagtcagatgactgcacttgttgctacacctcaaactcttaatgatgatgcttggtatgctaacaatggggctacaaaccaccttactcctgaatctgagaaaatgaccaacaaagtaaactatcatgctaaatgacttgcttcatgttccttcaatcacaaaaaaatttgattagtgtttcaaaactgactaatgaaaacaatgtatcaattgagttttaccttgatttttgttgtgtgaag

SEQ ID NO: 63932 - DNA, 632 bp, Cannabis sativa
tcaattgatattatttttgttgaaaataacaaaaacaaaattatataatatctacaaaagaataattaagttgttttcatgttattgtgaagtttcctttgtgttgtttttgcaacatcttatttcaaattaaaaataaaatcaagttatttttgtgttgttgtaaaatttgttatgaattatttatacattacaccgattgttcaataattaaaagaatatagttttacatgttaaaataaaaacttatcttatctcttacatacacacatgaaaaatagtaagagaacacgcattatgttaattttgaatcaagtgggacaataataaaaagagattgtaaatatgaagaaaaattacttatatttagttataatattatttgttatttaatttacagttgttttaaagctgtaaacatgttgtttaactttattactttttaaacatgtttaattttgttacttttttaaatatgttgtttgtacgttgatcaatttcaatagttatttacagatttcttaaattatatatacaattgtttttatgtttgtatgtttataagaattgccagcttttactatcctctctacataatgttaaactttgttttatcagacgattaacaaatc

SEQ ID NO: 63933 - DNA, 1450 bp, Cannabis sativa
gtagggaagctatcatatcgagtatttctagtgagatttattccattacagaaagggatgaagttgttaatggaggatatgtcttttttaacgaaagactaatggttatgaaatctgggaaccccaacactaatttcaaaaaaaaaagatgtgagaaagactccgatttggattcgacttactgatttggatttaaaatactggggtgagaggtcgttgttcaaatttgttggcccattcggaaagcctttacatgtggattcagtgacaaaactcagggataaactagggtatccacaagtgctcatagaaatatccctcaaacaagacttccttgatcttatttggtttgaagatgagcttggttttgataacaatgttttgattacaaatgaatggaaatccatcatatgtggtcattgcaaaggtatgggacattccactaatgtttaccgaaagaaagaagggaggaagcaacaattggtgattaaagaagatgcaaagaagatgacagaaactaatactagtgttgatcggaagattgatagtgaggggtgccaacaagttactaaggggagaagagaggcaaagaagtaacctattgttgagactcataaaaataatgcattttaggtgttatctaaaataccaggtccctcgatggcatctattgaagaacttgtgatagtagctgagaatgatagagtaatagcaggtggctcagatgtattgtaggtggatgagaacttcacctttgagcaggcctcattaaaaggtttagcaagggtacaaaggaaggaaagaacatgaggagggggagtacctcctctatgcaatggataaaatcctaaattcgaatgtatgagggatcaacgatcaataaaaatagaatttagtcaagcaattgattaattctcaacacattagtcttgttggtcttctcgagacaagagtcaaagccccgaagcttggggctttgtatgtaaatatgttcaaaggatggtgttttacgtctaacatagcttggcataaacgagtgtgaataatagtggagtggaatccatgtagcttcactgtaaatattctgaaatgtactagtcagctagtacacttggctgtctcgactttggatggcaaaaataagttttttgctacctttgtctatgccttcaatgacatggatagaagaatgaacctttggaatgacattcaacacttaagaaccattgatcctttgattgtcttgggagattttaatgatattttgtcgaaagaagagagaattggcaagagattcaactacaaaccagagagaatcggcgagagattcaactacaaaccagcttctaaattcgttaattgtgttcagttttgtcaactagaggatgtaaaatatagtggaagttttttcacttggagtaacaaacaacaaggcagtgacagagtttgt

SEQ ID NO: 63934 - DNA, 592 bp, Cannabis sativa
ttgggagattttcatttatagaagcagaggaatacaataggtcatacagtgatacaatcttagccttacacgtgttacacaccattttacaacagaaagaatattccctcaatcatgcctaacaatattgatggtaatttgttacctcgggaaatgcaatattccaacaacttaggagacacctcaccacaatagattatgagagtactacccctacaaatatcattctgtaacagctcggacgccttcactttatttttacagacataggtgcttctgcgtcctaggttcaaatccgaggattttatttttgaataattttttttagggagatcgaaaataagttattacatggagggaatcgaacccatcacattatataaaatgcaataagcacttgccatcacattgcatcaaattactattatacatgtgcagtaatatatatatcatctaattataatatataattaattaatactttcttaaaaataggttacaaaaatattttttatgaaaatatatttttaatatttaataaaaaaaattaaaaggtgtcataattttacgtggtcttgaacacccattatct

SEQ ID NO: 63935 - DNA, 925 bp, Cannabis sativa
tactatactttagtcacaagtaatagtttgttgtgactagaaatcacatttagtcataaaaaaactaaatcgtagttaccaaaaatagcagtttttgtaattagatatattaatagtgactgatattttttataggtagagttttatgattgactagcaatattttttcaaaattattttttttaatcatataaaacctgatatttaattagatcaatataacaataacaaaaaatactagacatcactattagcaattctcccccaattaattatgaaaaaacaaaaaaaatattatcatatatttcaaaaaaaaaaaaaagtaactattatttattattgattaacttgtagaatacacgtactgtgaaaaagttcatatatttaatattactattactaaaaagtcataatgattgttattactactaccaccacttataaaaaatatataatattaatatacatgcaagttatatttacacatgcatgcataaataagtatagctagttactttcaaagaattagagagatatatgtaaactttaaggtaaggaaattgagtacgtacgtgtgtgtatatatataacatatcaatttgaaaaagaaagaataaaaattggaaaatttgactcattttatgtcatgaattaatcaatcaatcatacaaaaattttcacactttatatcagcagcagtacaactatatatactagttgttagttgttaggcgataacaactagtactcatcattatcattattatcattatcataattatcatcatgatatcatgaaaatcaaatcacaaaaaagaaaaagaagctttggttttgttgtgtttggatatgtgcaattaattaattgtgcatacatttttcatgcactttcattggaaataattgtcttttacaagtagcaaat

SEQ ID NO: 63936 - DNA, 1055 bp, Cannabis sativa
aaaaaaaaaaaaaaaggtagcaccaggccaccatcggatccctaacggaccaccatcagtatagatggaaataaggagtatagatagtgaagttagaagagaagagagaagggtgagggttgtctttagccgcttggaggccttgggcgagcttcaaaataaaggccttgttataataattattttactaaaaaaatctcaaattgaatagtaaaatgacatattttacaaatcaacaaaatgataaatttataaaaaaaaaaaaaatatttttctaaatttttaagatgcaaaattatttattaaatcgtcatagtcaagtttatttaataatttttttcaatagacaacattgctaatccatttaatctttcttgaggcatcaaagatcttaaataagtttttattaattttaattttgaaaaacttctttttgcagatgcaactgaaattggaattgttaacaatattctataagaaatataagcatttggaaatgaatcaatttttttatataattaagtacttccaatggactacatttatctttttcataaatttctcttaatacttttaattctgaaaaataaatctattccatctatattagaatgctcattataacttagaaaatcttcaagattcagacaacattgtttaatagcatctccacccattaactttaatctagtaaaatcaaataagaatccaaaaatattttataaatctttaaattgctcaaatcttactttaagtgaagaaattatttgattaaccaaataaataaaatactcaatcctaaataattcttaggagattttattttatcattacaaacatcttcatcaaattatttctttatacaaatcacacatttttaacgaaattttggttctattttcaattcatttgcaagttttctagctgaagtcatagcagatataaatctattttccctataacttttttaaaaaaaaaaataagacccttaagaagatctatggcaacattaattgttgattcttttcttcgaaagttcttactaagagagttta

SEQ ID NO: 63937 - DNA, 633 bp, Cannabis sativa
ttcatctcctcattgtgtagtcgggtttgtgagctagaactcactgagtaagctcgcttctctttccccagcctatggtgcgaggttcttgggtctctgggctttggtggctgcagtgtcttatcaaatatgaagctttcggccttgcactaagttgtcatcctatggggtgatggaggtagtcacccaatcttattggttgtttattgggttgtcctcaagcctcccattttactcttctgccgagggtccttgaccgtttgcgcctccccattctgaggcgtttgatcacctgcacctctttttcggcagcagacgtcgacggagctggccttgaagcgatcaaccgatggctatcaagatgcacttccacatcccaacgacggtgagagcatctcagcatcttttcaacaaatcttaggtaaggaaatgatgttgcttttatgtgtcaattcccacagacggcaccaaattattaacagttagaactcgttatgtatataattagatttctgaactaactcttaaaaagataacttaattgaagaatatctagagtaagattctcataaactttttctatctcaagaagttactgtttcattgcttttaaaaaactcaaaaatcccccct

SEQ ID NO: 63938 - DNA, 904 bp, Cannabis sativa
caaaacagtagcaaataataggaaatgtatattgaatgtgttgagaaacccaattacaaagtaagggagaccttaggccccttgggtgcaaatagatatttactcaatacatttgcatacctcccaattccccttaatattctatatatactattgtattccctccaaaacactaccctcagtacaaagactcaaatacccttttatttaatatatgctagcactccatattaatcctaaggcctaacttaaacttttccgaatttcttaaaatttcgcaggatgtcttaaattactataatctacatgatcatgagaaaaaatttaattaaaaaattattttgaatattaaaatagatagagatgtatcggtgtatcccttttaagatggtgcattataaaattttcctaaagtaaatatttgagaattaaaagaaataaaaacattgaaatgtttgctataagtatattgtttttgttaggtatattgttttagagtttgtagtaggtttaacaccaaaattaacgatttctcaatcatatatgctagagaagttgccatttatactcttttttttttaagaaacaattttatttttttgcagtaaattttaataacttcattgtaataatcccttctaggcttctatctctcacaatagtcttataatagagtattagtagcaacagaattctctattttgtgtatatatataaataaaaaatgaaaaaacttaattacaatttgttgttgaacttgttgtcgttttagttaacaatgacattccattaatgaaacaaaaatatggatatttccaggcgtcaccatttaccaaggttcattcttttagttaaactaccactatcaattgtatactacaaaaaatgaagacaaaatttgtct

SEQ ID NO: 63939 - DNA, 794 bp, Cannabis sativa
ttttttttttttttttatgttttggtagactttcattcgaagaataataaaaagaaaaagaaggagggagagagagagaggtaaatgattttctttattaattaaatagtatataatttagtttgtttttttttaatggattggaagtgacaaacgtataaaagactaatataagtatttaatttattaaaaaaattaaaataaataatatataagtatatgaaatcgaaaatattataaatatttacggcacaaataaaaaaaaaaaggatagttatacatactctttgcaaatacatacatatacatcaattttgaagcatgtaatgaattttcaaagtgtggtgactaccttaaaaaaatttataaaatattatttttgctctaattttaatatttataccattaaaatacaatttttacattttaataattttatttttataaaaataagggtaaataggggcataagtacccaaaattttaaatttgtaagcggaataaacccaatgtttatttttagcggcataagtacctaatgtttgtaaaactgtaattttcctctagttttgtcaatacagactctgttttgaatatattaaaggaacatttagaagtaactgatactacatgcatgtttatgtctagacccaatgatcgagaatttagaccttttatgcgacttgtctaagaaaacaatagagcttgtactgacaaaattagaaaaaatttacagttttacaaacattgggtacttatgccgctaaaattaaatattgggattatgccactta

SEQ ID NO: 63940 - DNA, 539 bp, Cannabis sativa
cactacacggccttgaaactggcccagccccctcaccattagtcacaattaaatctggcccaaagcccaactcagcttcattatcacatggtttattagaaaccaacggatataaagaatcctcaacctgaattgcagcctctaaagaaggaaaaagagcaggagacttttctccaaaattcaaaccagaagtaaccccattaccattaatagcaaaggtctcaccaccctcctcaggtactctcttgggcttccaagcaagaagccttcgctgaccctgcccccgacgtgtctgagaggtcactttcttgaagcgtctcgagccacgagactcagacgtccaaggacaactcaccggttttcccactccgttccctgccacggatgacgatcgaccggagagcctcaacggagaaccagagataacatcctccaaaagcttgtcacgggcactagaaaaaacatcatgaagctttgatgcagccgataaccaaggtcggaacatcgggaatggggtcccatctgttgggttttatgcc

SEQ ID NO: 63941 - DNA, 1553 bp, Cannabis sativa
gagatcaaccggccttgtaaaaacacactttgagtatcagatatgatagacggcataacactcttaagtctattagcaaccactttggacacaatcttgtacaccacattgcataacgcaatggtcgtaaatcccccatatccataggctatttttttacggattaagaccaaaatggttttattaaggtctgtaggaagagaaccattatgaaaaaactgcttaaccaaattgatgacatcatccttagcaatcgaccagcacttctgaaaaaaatccgtggtcattccatcaggccctaaggatttatccggatgcatttggaacaaagcttttcgaacttcttcatctgaaatcggtaatagcagctcaacattctgctgggattatacacgagtttgcacgctacttgtaacttctctccagtcggtttgggaagaggaaaaaagctcgtggaaataagaaaccataagatcatccaaaccactctcccagtcaacccatgcacccgaatgatctttaagttttgcaacaaaattattccttcgtctcgtagttgcagaagcatgaaaatacttgctattattatctccctcttgtaaccacagttgcttcgatctttgacgccagaaaccttcccgttgcacataacattcggccaagttcttctttgcttgtttgtaattggctacagagacctcttcccgacccaatttccacttctgcactttgtttttacactttttcaacctttaattccttaaagttgccagtaacctccttaccccaatccgccagcttgtccccacaaaacttaattttatgcataatatcattagactcacgaatctcccagctatcctttataatccgataacaaagaggttccctcaaccacacattttcaaaccgaaactgcttaataaaactgggacctgcagcaggaaccatgaccataagaatcggagcatggtctgaagttgaaattcaagattacggagcttagcagaagtgaacatgttcaaccaagcaagattagtaagccccctatccaaacgcacttctatccaatgattagtaccccggccacaaatgttacaaatgattagtgacatttttatttacttcacatgggcgtattctacatttttttacaaatgttacaaaagctacaaatgtgaataaaaatatataatagcgacatttttaggtgttgctggatatcatttttggtgtagtatgtaatttaactgccaatacaattttacccaatagtattgattttaagcaaaataaataaagaacaacacaattgataattctattattattatgaataataattactaaagagataatgattaatttattatcatcaagaacaatattttagagctatataaatataactaacattcacgtaaaaaaatatatatataaaatgtcaattcttgatttaacggatgtttttgggtttttacattaactttaatagaatattttattaattaacaaaatattttttattaataattaataatattattatatat

SEQ ID NO: 63942 - DNA, 791 bp, Cannabis sativa
ccaagcttgttttgctaacataacttggttaaaagggtgcaagtcttaaaaactcataccaccatcttctttatgccaacaaagtctcttccaagtacagcaatgcatcttctatttagtgtcatcactacccccaccaaaatctagcacacataccatggatgttattcacaaaagccttgaggagtttgaaaggcgacatcttgtaagttggagtagattggatgacattcttaatatgcaccttgcaacgcaccatagaaaaagactttgccttccaaccattaagttttttccaaatatattaactttgaaattattagataatgcttcagtaaaagtattaaaaatgacttcatatagagttatttttttttaatgtgtcattgtttcattttatgtttaggtttaatgttatttctttatttatattttttaataattatttgttaaaaatacaatcatattcaccaaaagcatgatagtgagagagggagaagaactttgttttttaatgtttttgtttttgttttttttttttttttgtagttttggattctttgaggaacaacttttaagtacattttagagagagtgagagagggagaaaacgaagagagaaatgaggagaaaagtgatagtgtttttaacaaataattataaaaaataaataaagaaaaattttatttatactttcaaaacttgtaaaaacacctcatgtactaggttttttttaacttttttcttacaattcatattctttataaatatacctatcaaacaaaaataaa

SEQ ID NO: 63943 - DNA, 2266 bp, Cannabis sativa
tcacccattacatgctactggatgccataacgaacactaccaaaacgtcacaaccaccttggagtctgtcagtatcaagactcaccactcacaaacaaaccaaaaacctgggacgaaaaaaataacacttacataaacactgttgcatacgtaccaatacactcaaaagagagagacattaccccgtttgttatttacgaattatgtatatatatttcggctttgtgataatttttgtattgattatattagctaaaaattattcaggataatttatatataattttaattttacattttttttaataatttagttatataaaattgtatatatttgatgttatatttcagttttattatcattttaatttatacataattaataaataaatatatttttttgttcaatattaataaatgaatattaattattatttatcatcaaattattacactttaatatgcatgttttcgaacttgtgaattcgtgcatacatgtgttttaactgatattttttcgtatcatgctctgccaatctaacacattgtgttgtgcttatcctaattttatattttccgtgtcttatcctacttgtatggtgtctaaaatcttgactggtatcaacaacactagtaaatattaacgtgtactgtaaatcctatattcctaaaataaatatgtaaattaaaaaaaaaaaaaagagatcaatgccaccattcacccagcaatacaaaattgcatatgctagtgcagaacattggctaattattgtagaaagtgtcacctttcataaactaaactggcactattttcttacttcaaaattgatttggctatgttacatggattggcatcaggaattaaccagcatccttactccactgccagcttatcacataaagattggtacgctgcactgcaaagcttgaacttctcctctgccacagcctattataggtcataatgtgagtaaatgaattacatacattaatggaggacaatatatactaacatttattggtatatatatatggagaacccagttgaatgaatgaggcatgtgcaaaccttggaagagcctaaatgacgatctggatgccattttagtgcacatgctcgatatctgtaacaggtaatcatggaaattagtggaaatgaaaaaacactagctgtgtgtgtgggacaatagcaaatagctagtgaaaaacttacgcattcttaacctcttcaagtttcaaaggaccagaaacacttaatccaagggccaatctgtgtgaagataaatctgattctaagctctctgactcgtattcgtattcatattcatattcttcttcgatcctgtgtctccaattccaagagttcttggagaaccttgacgagctcctccattgagtatcatcttcattaaggaatgaccaatgatagaatcgatttccaccaaatgcagatcgaaaaatggtctctgtatcaacataatcatcttcatcttcgcaaattcggaaacctcctggcagcataaatgtgtgagtatacgtgaaacttccaaagaatgaaatgaaataagctctgataaaaaatagatcaatcatcccaaggagaaacaatttaaggaaaaaacaaattgggatttgagtttagtctgacaatctcatgccactattaatcaaagccaataaaataaacagcaatcaaataaaaatggtcaaatgtcttctgcgagcaatagtgagtaaagacaaattgtagagcatttagtttcttcccaggaataggtttacaaagaaagaattctaccctattgttttttaatggaaaaagtttaatcagaagtattaaactgtgtccttacttctgtcccaggctggcgaccccctattgccaaaccctcttctaaagtcttttcctgagtgtggccttctgaaggggcctttacttgatgttgagtcatcttcatcacactcatcccgcaagctctgttacagtaagtaaagctttgtttaaaatctaatgattgaaggctttaatattttcataaaataaaaacaagaaacagaagatcagtcctgaattaaaaatgagtcagtcaatgtaagccagaaaacaaatctctttatactcataaatcattatacacaaagagatcaaaagagttactgtccccaatgcccactttttcatcgacaaaaaaatataaatgaatagtagaacaaaaaaaggatcgagaaaaatgctatataaataatgtgtaagagaacatcatag

SEQ ID NO: 63944 - DNA, 867 bp, Cannabis sativa
  modified_base (607)..(617): a, c, t, g, unknown or other
aattatgaagtttctagaatttaagacaagaaagaaaaaaaaaacaaaaatatagaagaaaaggaaaaaaaaatgcaaacaaatagggattttgtccttctctttttcttacacttgggtcccccttttctccttcctcttttgtactttttcaccctgcacttaattctctccaaaaatggtagctactatcatcttgatgaagaagcttgtacttagtcttctttttatttgttgggtaaatagggtacaaaataacaccctaaaaatagaagcccaatcctttccaatcttagcccattaggtttagtattcttccttccacagcagctagctggcgtatgatgcgtgactggtacataattactgatgtggataagtgaagttcattttttagacttcttccatgtcattgcccaaactgtccagaatgttatagcattctggcagcatttcctcccaaattaaaacttttatttccactttgcctttgcatcatttcctttttcctagcaagttaattcttcttttccacaacaaacaagcaacatataattaaaaaaacacaactaaaataacaatttttacaagacttaaaagttagctnnnnnnnnnnnaaatgaaactaaaactaattaaaattaagcaaacaaacacaatttcactactcttctcacaataatttcacttaatacattatagcattctcaagacaaaacatatttagggtagtaacccttattcaccatatataaatacttaggataatgaccctaattcatgatacatattaacttagagtaatggccctaatacatgctttcatctaattcatcacaatccttaactttcacacaaggttaatcc

SEQ ID NO: 63945 - DNA, 1155 bp, Cannabis sativa
  modified_base (146)..(146): a, c, t, g, unknown or other
  modified_base (1096)..(1101): a, c, t, g, unknown or other
tctctttggagatgctcttagggttcaaagaaattcaatagagacaatagagcagtgaagttgtcagagccgcactcagctgaaatgagtcatagataaaaaaaaaaaataattagaaaatagcatttttaaaaattattaaaaanaatatgtatattttttaaaaatatttttttatttgaggccctaaaatgagtaagtcgaaaacacgatcttagcacacttatgctcaagactaactctggatatagtatgtatcaataatattagctaagtatttctttattttgtatacatatacaaaataataaaatttacattatttttaaaatttgatgtggaccaaataatatcacttttatagtaagactatgtaataataatatgtacataagacaccaataatttcactataaaaaattttatttttagtcacaacaaaatttgtgattaaaataaaaaaaattataactaattataaatcactatttttatgttgtgattaaaatatctgtgtggcaaaagtattaattaaaaaaattaaaatttattgtgactaaatatatttttaattagtcacaataattatgttgactaaaaactaaattagtgacaacttttatttaaatactatattttagtcgcaagtaaatttttattgtgactaaaaatcacattaatcacgaaaaatttatattgtgactaaaaagttgtcagtaagggctcgtttggtacgccgtgtaagggtcgtttagtattaaataataaataacactacgtttagataaaacaatgtattttattaattattacgaccaaatttttaaatacaatgtatgttgtattatttaatacacaataaatgattcgtattagctattataatatttaaaaagggtttggggtcaccaccaatccgacctggaccggcacctagaaccggactcgaacctaggacccgcactcggaccgagacccgaacccggacctagacccgggacctggacccagacctgaacctgaacctcggacccgaaccccgaccccgacccagaccccgactcgtacttggtgttgggatcgagtgtattaaaannnnnntataactttacacaatcaattaatacaagtcaataccaaacattgtattgtatt

SEQ ID NO: 63946 - DNA, 700 bp, Cannabis sativa
ataatttgatatttaagggcctagctacagagtttcagatttataacttgagtattattatcgacaaaaattaaatttaagtattaatttgcagctgaaaattaaatttaggtatttatagcgcaaattatccttttttttaatttaatttgtctataaactagtgcattttttaaagaaatatttcggttgacttatttatattttttaatatcacgaaatttttttagtttaattcttttgtatgttggtgtatgaatacttaaattttcataaacttttgaataatttatgtgtagtaagtaaatgtttaaattttagcttgataaacattttagaatgtcttaaaaatatataagtgacttttttttttaaaaagaaaatatataagtgactttaaataactataatatatactatcataaaaaaaattaaattaaaatctctcttaaatgctgaaatatataaggaggtctatgaaacaacccttttaggtggtgtataatctcgaagctaataaaaacatgtcatacataaatagttgtacatagtgacaatctaattggtatttaatgacgtgattttaaatttgtaaagaaaaatgaaactaattagaggaagaataataacaaaaaaaaaaaaaatcaagagatgaattgtataaaattaaaacatcaatttagttgttaattaccaaata

SEQ ID NO: 63947 - DNA, 626 bp, Cannabis sativa
agttatactttacatacatagaaaactattaactaacttaggaagtcaactaaagggttcaaaaggtttattagcaagaaggttttgaatcgtttggttcttcaaatatttgttaacttaagattttcagaaactatttatagttatattaaagctaaagaaaaatattaaaaccaaagaacaagataatagattttacgtggttcaaaaattaataatctctagtttacgagtcaatattattatgattagaaaaatctttgagtattacgcaaatgtttgccaaagttaatgacccttaaaacttgccttagcttgcaagcactactacaaaaagacttattcccattgatttgcaaatcgatttttttcgagaactaccgctaataaagttacgtgactgtttaaaattatcggttatagtaaagtattcttggcgattttaaacagctgtggagaatccccgacagtttaaaagagtgacaagccaaaaaataaaaaacgggttttaaagggcatctcgacagttttaaaccgtcggcgatacttgtcttcaaataaaccactaagaaaattggtgtgagtctctcatattagttaacaatatttcatgagttgagtacata

SEQ ID NO: 63948 - DNA, 1459 bp, Cannabis sativa
attgcaatgggcttaaaaagtaagtgcttgccaacaacctcatttagagaaatatgcaaatttatgaatctctgagtattttgacagattgtataagggctcccctattcttggttttttccaatatctcttcttttgctcttacaattgttgttatatgttatcagctactacaagggacatcgttggaatattaactgttttaagaattctttatacttgaagtaaaactagaatttagagcaagaagatgctgacattagggaatgttcttgaaatctgacactagaagtgactcttgagcatagaatggggttcatttttccattcaagtcacttaggatgtaatagtatcccaaaacaatagtaaggccaaagaaaaatccaatatctcaatgaaggaataaacctcacaaattcatatctgcttcaggatctaatttaggttgaagatgaattgtcagcaatgaatggaaaatgactttcgattatagaaaaatagacatcttaattatgtagaaaaagatgataacttgagtaagtaactcgaggtttgcaactgtggctggctgtaccggatgtaaattctgcactgatagcatatacggtattggtggtgtctctagtattgaatataaagcaaatatgctacaagcttctaacataaatatattatccatatgccatataagtataacaagtaatatgaagacataccgaacaacactggatttatgcccaaataacttcactaagtccaaagcaacaccactaactctgccataagaaagaatttcatgttgaattagttgacagacaaactaagttcctcacggctcacaactcttttacactgttaacatacaaattcaacctggttggtgtgtgctcggtccctcggcgtcccttcttgctgattcggctttctcttgctgaagctacactttgaattgcagtctagaatataatatatcataagtacattgatgacaaggcaatatgagacaaaagcaaacagaaagaatggaaatcgagtttacatagagtgtataattctattgctaactctaaaaggtgaaggaatctgacctcatacaattgttctctgattgaaaaagcaattgcaggctgaaacaaaacattcttaagtttaggatagaaagaaagtattgacacaaggtatgctgaagtgcatagaccagagtagctacttacagcaacttcagggtcttgaatgcctaaatctttgcagaaggttttcgcaaactcttcgggatcactctcaaagttgttcatgtcctggaaaatagcagaagcaatgttcattacaagtagtagcagtctcataccacttgaaaatcacaggatgaaagaacaacttacccacaaaaattggtcctttataagaatattgtttacacgaagatcaagctgatgatgagcatagcatgtggttaaa

SEQ ID NO: 63949 - DNA, 819 bp, Cannabis sativa
  modified_base (246)..(251): a, c, t, g, unknown or other
taatgaattttattatggctaaatcttttaactatcattttattagtatttaaacttttaaatttaaattttaatggcaaatttttttaaattattacactgttactaaatttaagatatcatccgattaattattatcattaacggtttatgtgtacactcttttatatacgtggtacgtttatattaatacacataatatttttattttaaaattatagaaataaaaaatttaaaaaataaaannnnnnataaattttgaaataatttttataatttttaataataatatttgtactaatataaatgtgtcagtgtacaaaagtataggtacacataatttttccatgttggcatgtagttgtgaataatagatgacaccctaaatttgctaagtagtttgggagttttaccactaaaatttaagtgaaaaattaaatgcaagtaaaataataattgagaaaatttaattgcaaaaaattctattatacttgaactttctatgaaaatctaaaaaaatgacacattcttaattttcttttatttgcaagtaaaaacaataattatgacctaagcacaaaaaaataaaaataaaaaacccctaattttgtgtagttgaatctctaaatttttcttttttttttatcttacaaaagaaaaaaataataataatttttgaaaaaaaaaatagttttaaatatttaaatttaacttaaagttatcaacaaaattattagataattatttttaaataaatttaaatttaaatgagaaatttgactttttatgcttacaaatacttaatatttttcccctaaa

SEQ ID NO: 63950 - DNA, 663 bp, Cannabis sativa
gcgaatcaatcgctaaggcaaccaggcacttttgtgttcgaaaggttgggagcaacccatgacctaaggaatgctctgaatagaaggaagggagtagacgaacagaatattacgacgatcgtgcagcctggagcccgtactcaaattctcgctcagaaagatgctgaccagaatgccgagccggtcaaccaagctgtacaggctcagctggacgaactgaaaaatatgttcaacagtatggctggacaaagaaacaatgatcttgagctggaccgagcacgcggaactcctttctcaccacagatcaatctcctaccactgcccgagaagttcaaaataatgacgtggaagatgtaaactgggagagaagatcctcttttccatctcaagtatttcgaaatgcaaatggatttgcaaggggttacggggagatgtatgctgtagaatcttccctgccactttgtcggaagccgctcaacaatggtatttcaagttggctcctagaaagtttagttcatggaaaaccttctcttcggaattccatgcaccattctcctcctcacgctaacttccataacatttgggagacttggtcaaagttaagcaacgaccaggcgagccactccgggcatacatcagcagattcatgacggaagcggccaa

SEQ ID NO: 63951 - DNA, 1982 bp, Cannabis sativa
agggtcctgtctaagacaagtggatcctctctcttttttcaaaaaaaaaaaagaaaaaacattgtaagatagagaacaaattagagaccttaaccgctctgtttaataaacaaataaatcactaagatttgttaactctcatgcacgtccgatcctttcatggcccctctggccatgataaaacttggtcgtccgggcactgtggccccgttggtcttgggaagaaaaatatccattaccccactggttttggaggtgaagaattttttgtgcttatcaactctaggccttcactgatattggagttttagaatgaaacacaaagtcttcatgttaacattgtctaaggatggtggatcggtgagaatttgcgagagaactagaagtgcaagttttgagattgcagtcgccattggtaccgcggattggattatggatattatggatgagatttagaagaaagctggacaatcgcgaattacttttaagaggatgttcaggaattacactgacagctgcctcatggaagcattttggaatgcaaagggtcttttctgtaaaatctcaatcttgaggaataacaaggtgaatatggtgatcataccagaagaaaaggagacttgggggtggaaggagttcggagagagccttggcaagttactgaagaggaaacctgagacgaagtttgaagatttctccactgtaaagggagatgcaaaagcaaggaataccaaagcttcatgggctgatgtggtaaaacgcccaaccgccaaagttagtggtcctatgaaaggtagagaagcttcggaaaaacaagcacctaaccatgttcacgaccaggagatgatttccaccgtggctgcgattaggagcaaagttggtgataggagtaaaagtgatatcgaatggaaggaattatacccaacaatcaatactagcttcaaaccaaagaatcagtctcttggtgcataggaggggattttaatgtggttagaagggtacaagagaagttaaagagtaattcttggactaagagcatgaagatgttcgatcagttggttcgagaattgaaattaatagacccaaaactgaataatggtagtttcacatggtctaattttagagaaaagcctatttgttataggctggacaaattccttttcaccaatagttggtgtgaggtattcctgtttttgtgtctagaaatgctggtaagaattgtttcggatcacaaccctgtgattctagattcaaatccaccaagatggggacccggtccatttcggtttgataacatatggctggagcataagttgttttccaagaattttggggcttggtggaaaaaagcagaaggtttagggtgggcaagaaccaagttcatgagtaaattaaagaaagtaaaagataacttacgacaacaacctattggccaagaatgttttgaagagaagattgctggtcttggacaagttggaagcgtcaaaagagtggaattcttctttagcggaggaaaggaagatgcttttaatcaaactcaagggtgtactgggagatactattcttaaaactcaatcggtctttgttgaaggtcgacaaatactggtctcaattctcattgctaatgagacagtagaagactatagaagtagaggcaagagcggcttggttctcaaaattgactttgaaaaagcttatgaccaagtcgaatgggacttcatggacttggttttgtgcaagaatggatttggagaaattcggaggaaatggattaaaggatgtatctcttctatttcgtactcggtcttcatcaatggtagaccaagggaaaatttaatgggtcacgaggactcagacaaggtgatccactctctcattttatatttactctggttgcggatgtgttagggagaatgatgaataaggcagtcagttcaggcaatttttcgggatttatggtaggaaaggagatagtccaagtt

SEQ ID NO: 63952 - DNA, 625 bp, Cannabis sativa
tcattgatatgtttcaagcttttgaagcatttagaaacttttttatcctcacgtagtctttcacattataatctacttgatagcttttggatgtgtaacgtttcactctttgatgaaatagattcaattttgtactttgttgtgattcttaactctttaaatcatgaagaacacgtttgagtcttgaaaaacacatattttgatccattacacaccttggccggctcttgggatcttgtttaagtcctagctgacccatggtgtttgtcatgggggcaggatggttctagaatttgtcctaggaacctggccaattcatgcatgggtcacgagaccctgaccgaccctctcactactttgggaccctggcctacctaggccttggtcccaagctagtggccaattttttgtcctcttttgacctcgacaagaatcctgtcatggtcttatgaacgatacaacctttgtcacacatgtggttcccttagaaactttgtatgacactttatagtgagtctattatagtcaaatgctcaacttaagactcaacattttccaagttgttacactgttacacttgaaaccgtacttcgctaataccgagccttgtacaatgacattatct

SEQ ID NO: 63953 - DNA, 644 bp, Cannabis sativa
caattatcaatggttacacaaagaatggagattcagatgaagctttaagtcttttccatgagatgcaagtgaaagatggtatagaaccgaatagggtaactcttttaagtgttcttcctgcttgtaactctcatggttgtttaagaattggcaaacaaattcatggttttgtagtaaggaaagtactgaattgtaatgtgtctttatccaatgctttgatcgatatgtattcaaaatgcgggagcttagatcttgctatacgagttttcgaggatgagtcgttttgtaaagacgcaatctcttggacttcaatgatttcggggtatggattacatggaaagggcaaggaagctttgtcattgtattctaagatggttcttcaagggttaagtttggatacaataacagttgtagggattctttcagcttgtggaagatcgggtttgatcgatgaagggcttaaaatctatgactcagtgattaatgatcatggaatcaaaccaacagttgagatctgtgcttgtgttgtggacatgcttggccgatcagggcaactcgatcgagcactaaatttcattgaaggaatgcctgttaaacccgggccaagtgtctggggagcccttgttagtgcttctgtcatacat

SEQ ID NO: 63954 - DNA, 1443 bp, Cannabis sativa
caacaacagggttaattttcgttcaaattcattagtaacatttttttactaaaatatcctattgtatgttactatttgacaattaattttttttttttatcaattagtgaaattcattacttcaaaaatatcaatttacatcctacaaacatttttgaaccaattggtatctaccaggttgacattattaggccaaataatgcaagtaactcttctcttcacatcttttttggttatatatatatactcgaacaacatgttccattgttagctctgctgatctccagagtgaattatttcgggtcctccatagctgatacacaaggacagcaacagcatcagccaaaactactttcttgaatcttggcacgttcaatgacaaacaaattatttattacttaaatcatttaatctaaattttatattatataaaataatacaacagtcatgtgtgtgcgttaatttatttcttctacaatttaatttctattatacatatatattattttatttttactgctgttttcctatggggttgaaaaaaataaagtttgctataaaaataaataaataaataaataaagtttctgaaaaataaatgtaaaataaaatacatgcatgcatgcatatccgtgccctacgtggtgtggggtaatatatattgaagcctctgctttaattaattaattgatagagtaaatgaataatgaatataataataataataattgaagaaagaaataaaagtgtgtaaataaatatatataacttagtactgattttattactgaatagtctgaactctgatctgaatccccattaattgttggacttggatatgtaggcctccatagttgaaaaaaaaaaagtagtgatgcaaatatgacgacttttgcatatataaacaaacaacatttaatctttcatataatatgtatatttatatttatcaccccatcaccttaaacattgtgccactttatataaatattattatataaaaaaatatatgtatctatatatcatatattcatatatatggttgcatatgtgttgttgtgggagtaaccttatttgatatgttttattgatttttttttttttattgaaaggtctaggatcgatatatttaaatttaatttttactacaaaaaagtatcaattacttgtaaaatgatactttcatcatatttatatttggttttatattaacaccactaatgtggcaatagtcctataagaaatgtggttttataattaacaccgttataaagtattattatattgctattaattaatagtaattaagttttaaatctaatgttaatactatcttaaaatggtcttagactactctacaatagatatagctaatagcattgcgatctaatcccttccattaatacattacatcattagtgttaattaattttaatgcaaccc

SEQ ID NO: 63955 - DNA, 1655 bp, Cannabis sativa
ccaacatctgattcgatccaattgaatatttaaaaataacatccaatttgatccgatcacaattggatatctaatgtttggtggttggttggagttggatcgattagttttcattggattggatcgatttatgcacacccataatcttgaccgtcaaatggttgtcgatcaatattcaacctagaatgtctataaaagcccgtgtctttttccttccaaagtttttacatactcatcattttttttcttttttgagcttttccaatcttcgccaaaattccagactttccagactaccttctgctttttctttgtcgttgtcaagcaaagtattaccggcgtatgacggcttcaacaatttctgtaatttcttcagcatgtaagtttaaacttttccaagcttttctaaattattacatatgcatttattacactttctattcttttttttttcttttagttttgggtttttaaatgactgtagcgattctctctgaaccaccatctttctgggctattttcttggctgcttttgctttgtatttaggctaggggttcatatgcttagggttcctaggaatttccattttaccaacttcttttcctttctttattctattattgtggctagggtatcttgcacccgatgcatgacaacatgaatttttgattgtggctacaaatgcaattttcttacttaagtcttccatttccttatcgagcttttaacttctcttgtttaacttatcctgaaggtcttgagccattgatttgggcaccactccactcttgcggggtgcattaggtgacttgagtctctgcaaggcatgcttcctattgagtttctccctcaagtgtgagaaggcagatttggtcagggttcttagaggttgaagtgtatggtctcgttgtggtgaagactgtgcggtgttgctcgtggatgattcaggagcgcctattgtcttggtcttttgattatcctcataggtggttctgcttttgtatagggcatttgaccgtcctttcagcaaaccatttagcacctctgatttttcaacctgaggttgctcacttctctcgcattggggcgggtccgcgtgctggggcttacagaataagctcgcttctccttttcaagctggtggcgcaatgtgttgggatttcgtggaacctgcgagagatatcagattggtgatagacatcgtggtgttcccccattgtttttggggatgagtgtcagtgatgaaacagcttcatcccgctccttaacacgtttttctcgagtaggagaaaggttggcttcttcagcgggcgtcgatgtaggcacttccatttccggtaggtctttttgcctttggattttatcctctggattgcttccttggtctcccctgccatgggcatgttctctttgacccttcccgataattgatgcctggatgtctttccttgctgcaaccagttggttgttgtccaaacggattttaacttttaggtgatgtcttgaatgccttggcatgtcagaatgcttatcaatctttgggtagaaatgagacttgagttttacttccttcccatagacggtgccaaactattgacaatcgaaactcaccaacaaattaatgttggattattattttaccaggatctagatt

SEQ ID NO: 63956 - DNA, 578 bp, Cannabis sativa
cttatcgacaaattctctgtaaatatagacttgaaaaaaaaaaaattaaatgagacaacaaaaccttacactcccaaataatatgtctgtgcatttttaatcattggtgtataattaattagtaatattcattgaatatttttttaaaaattttatcatgttaagaaacgaagggatggagctatgtgttatttatcaaaaaaaaattaaatatttttttattcaatttttttatttataattttgtaacttttattaaaaatttatttaatgatcccgcttaaatttttttttttatattttggttttattttttgctccgtctaaaaataaaatacgtcatttagattttatactaattaaataaaatgtttttttaaatgctaaaataaattaatagtgtttaatattttttaagtgttatacaattattggtataattaaatatcgagtcttatattattacaaatattaatgtggaattatgagtttatgacttttgtcccatttgtattaaatgatttgtgagaggctccattttgtataatttattaaaatgccattggaaaatgagaaca

SEQ ID NO: 63957 - DNA, 761 bp, Cannabis sativa
tggtcaaataaccaaaatacccctgtagccaaatataaccatacacatataatcaagggcaaacatgtcatttcaacacacacacatgtatcacaataaatcaaattttctcatttatcatataaatgccataaataaatcttaaaaatatattttgggcctcgaacccgattcgacccaaaatacccaattgtgaatatattgtgtcgacatatcagataatacttgcagaaagacagaataaacatactatataataatatagtccataaataaactatatcataaaattataaatttatccttcttgggtaaaaattacaaaaatacccctaacataccaacggagttttaaaatgcaataaaccagaataatttcacatgttaaattatattataatataatttctcattaatacataattaatctagttagagttgctaatctgattattaaaccttaaggtattactataaaactacaaaaaaaaatctaatacgatgaagttgttattttaatttattttgctacttttttagaatctatcgaaaatagcaggatcctaggcgtcatattaaggatgcttctcatcaacacccatctgaatcactatctcaacatcattataagttattgtcctagcatatgcttcttcatctgagcgagaaaagaacactctcgtaataatcagttgttattaaagaaaaaaaacataacaaatattagaatcttatcaaaaacatatcgagaaccaataaaa

SEQ ID NO: 63958 - DNA, 774 bp, Cannabis sativa
  modified_base (711)..(712): a, c, t, g, unknown or other
tagaaacctaaagtggacctccttgagtcttgataagatcctaaattagaatctatgtaggctttgagttgaatttcaaattgtttaggaaataagagacctaaaccaggaaaaccttcgacaaattgtggcaatcttccagttacttccaagtatggcactccataatgttgcaggaaaagaaccgaatttatttgaagtgtcatgaaaatttccaaggttaattgatgaacttgaactactagatgtgcaagaattatttcttgcataattattacaataacacataagtagaatataaatatatatagagtattgtggtatagttctaccaaatgaaaagattttcaaaattcattcttggaaagttaagcatctccaagatgttattctcggatagctaacttgtccatcctagaaggagtcttatggaatgatatttgagtccgaaatggagttcctagatgactatcatgcccactttggattcagtcttcaggatagctagccctcctctagaaaagagttccagacaactagatattctgcctagaaggaagttctagaaagtcgactctagttggctctatcctatccgaatgcttcggtagtgagtgccttggtctgtgatcctagaagctcgtatatgtttctggatgcactaagagtgaagctggcgtcgagacttcgctcaaagaggagttggttaanntagttatttctaactaacttaacaacctcgtttcctgtagccattgactttaggatcttgat

SEQ ID NO: 63959 - DNA, 792 bp, Cannabis sativa
  modified_base (438)..(460): a, c, t, g, unknown or other
atgggcttggccagccaggaggggttctacagagttttctatgcacttctgcatgtgagcagcaagtcatgggctgcgaattgggccttaaaagcctaatagaatggtttaataatgtctagattcaatggcatcttggtcttttgtaattaactaacaaactatgcaaatatctagcgtttcaaaatataatctagggtttaggcctcccatataaaggccttaagtctatcctagacacttaagttgaatctaagcctaaaacctgcttccaagctctacgcctaagtttgacaatttctctcttccttacttcctgtctcacacgccttcactatcatcatctcaacacttgagttttgtcattattgatgcatactttgtattcctaagggtgctatagcagatcccatctatagtgatctagatagtcttaannnnnnnnnnnnnnnnnnnnnnnaggggagtaagtcattacccgctatcacaaggggaccaaacctttataacaaatttgtgtgtttactgcatttcattcttatttgtgcaaacacgtggcaagcataatatctatacaaccccactgtcggttgatccctttttgaggtcaacagtttggttctttcattgagagcgtggatatcgcacctgatcaagtgccatggttaacacaagaagaacccctatcgcaacatatgcatctttgggtctccctcaagacccattgatggcagatctagctacttaggttccagtcacaactggaatccctatgaacactacagatgtggt

SEQ ID NO: 63960 - DNA, 1272 bp, Cannabis sativa
ttggggagtgagtgggaatgatagtaactctataatcagtgtaacaagtcaatataatatttaatgttcccaaaataccattatgtacttttatcatttctcgcccaccagattgtattcaccacaataaaagcacacagaaacatctcattcacatcaatgcccctatctttaagactccatatgaactttacccagtcccaaatacgaataccagagtctaaaactggaaaatacctcaaggagaagaccgccataagtgaacagccaaattgcaccaaaagaaaaggtgcaccataatttcgtttttatttccacaaatagggcaaaggggattatcaatatgaaacctttcattcagaattgattgaacaagaagcgcatttgagatgatactccaccacaaaatcttatgatgctcgagaatttaactattctagagtttattccagagggagggtgagaccaaacagtgaggtgcctgctcaagggcttgggttaaatagcagacttgctagagaattttccactgctatctttagtccaaatctaagaatctctttccctatcaaaaggctttccccctttcaaaatgtctgcaatggtattaggatcaaataagtagtgaagtttctgaaggtcttaatccccgttatcagtcaagagatctgcaatccaaatctaagagtctcttcccctaccagaaggctttcctcctttcaaaatggtcgcaatggtatcaggatcaaacaagtagtgaagtttttggaggtcataatcctcgttatgagtcaagagatttgcaacccatctatagccaaaggaaggattgccactaatttagggaagaaatcgataccgtgagcaacccaaggatcctcccagattttagtatcattcccatcagcaaccaacttacaggcaactttccaaatcgtaatttagccttcaccacattcttccaaacccaagattcagattccttgtagctatagtgaaagaaacatttaccctgcaagtactttgcttacagaatcttacaacagagagtcacccccggctaacaaattccaactccatttagccagaaaaagcccgattctcttttattttacaaaagcctagtccaccacaagatttagggaggcatagcttgtcccaagccttgaggtggagcccatgattctttttctcaaaaccccaccagaaatccttaatcatgccatcaattttagccaccatccgattgaaaagcttggtggtttgcatagt

SEQ ID NO: 63961 - DNA, 837 bp, Cannabis sativa
attttatacccaataagtgatcacgttcgatcaaaagaaaggtgatcgaacagatgggaacattgcaaaataataacagtcatggcattaaatactcaatgatgtgcctcgaagttctgaactgccaaaactcaaagcatgtaaatttttaaaagagttaaatacaattatacccctagaatcatttaaaaagtacttttcaggggacaattgccatacccaaaatttgattatgcatcagaagttggcacgtgtcctacaaaaagaatatgaatcaactcaaagaatataataatgacattccataattaaatgcaatttaaataactcgttccaattaagtatatgtttgatagaaatattcaaacttgctgattacacagccttatgtgagacaagtagaataaatattaaactagaattgataagacatatgtctgtctcgggataaacatagtaaaataaacgagaagagatatttaaagatctcgtgaatcgttgactctcctgcacgagcagagtaaaagtgacaacactcaaccgcctcacattattatacacaacgtagtgatcatctcacatcactaatacaaaaaaaaaaggtacactaacatgaagtacttctatcggttaatgttttttcctattaagatggataagaaggagaactcatatttgacgagatgcaaccttcctagttagcataaccgtctaaaggataaaaataaggagcagttcgatagctattagatattatcccatgtgtaaataaataaaacgtggggaatgtccacgtttcatcagtagttgtaaatgaatcaatcccaataaaaataa

SEQ ID NO: 63962 - DNA, 1468 bp, Cannabis sativa
ttaattgtaataattttaaaatatgaaatatattttcttatttatttttatatatatatatatatatattaagggtatttttgtttttacattttaaaacaattttttttcttttttatatttttacgaaaatctatatagaaatttacataacaactaacggagcaaaacaagtctcttatattttatgtatttataatgtgaaaaggaatgaagaagaaaatttaaaattatatatattatactaaataaaataaaaataaaatgtaaatgtatttttttttgggtgaaaaactgaccatgacaaattgttaaattactttattttagagagaaatttacagagaattcttacattataagtattacgtttaatatgtatatagattaattggttgagattttattccttctttgtaattttttttttctagggtaggaaaatgacaaacataaatagttattcaaatatgtattcctaaaatctttaaaaaaaaaaatcaaatcgtgtatttatttttaatgttatcaaaaaatccaaaatatatatataccaaaagcagatatatttgtaagtatatttgaaaaaaaaattaaaaaaatttgaaaattttaattgattagattaacttttctgggcaggtgaatggggggctgaatcggaccgtcgcccgcgccgccccgtaccgcccaataaggattttgtgtcccttacaacttcggttttttaaaacaaacgacttcgcctcaaacaactttggttacgaatatgcataaaagttgaagttaaagtgggataaaaatcgaagttaaaggtcttttttagtagtgcagtcgagtaatctgattatatatcgtaaccaatacttaaaatctaatgaatttgagtcaattgaatttttcaggcataaattaaaattttaatttttttttagaaccaaaccaattatgttggtattttaaaattcaaagtaaaaccaaactaatccaattcaaaatgaattggtttggttcgaaaccgtaatttgtaattgttataatattttcttactggattatttttattttaaagcttataatacgcaaataacaataaaaataaatattcttaacacaataatatgcctaatatagttcttaaatatcaatattcaataaaaaattatattaagtaaataataagaattaagtggtttggtttggtttgaactacgaacgagaattttaaaactatgactaaaccagagaattataaacagtccaaattgatcaaaccattgataccaaattcatttggtctggtctcaaatggtttggtccgaattagttgagatttcgacccacagattagagattatataaacaagggtttttttttcaattttaaccaaaaaaagtaataatattacaaaactacttccagttggccaaataaataaatatacagcccaaataaaaaaaaaataca

SEQ ID NO: 63963 - DNA, 726 bp, Cannabis sativa
ttagttcttagtgggatatatattggagaaaatagaataccgagtttgagcgggattatggtttttgactattttacccctagactttattttgactaagttatgcaccaagggggtattttagtcttttttgtcaagggggttttgttggctgccttgggtgttgataactgccatttttaatgtttaatgtgtgtgttatgctgaaaattaagaaaataagaatttaagagaaaaatcaaaaattagggaattatctctcttttcccttctctctctttgaacccaacaagatccaagaggagttgttgctgaattcttcatttcaacaagatttaaggatctttttcaaggtgtgggattgatttgtagcttgaggtaaccctaattacctttattttgaggattcttgtgttataagcttgcttttggtttatgattttatgttttgatgggtgttagggttaggatgttttatattttgttttctaagtttgatttgagttagaatgatgatctagctgctagttttgagttgtgggtttgtggatgaacaagtttgagtttgaaaactcaagcttggttcgtccatggcatgtttttgtttgatgtgttttcccgagttctactggttggattgtattgtgtatgccctaataaggtactctggaaggtttggtggcatttggaggagttttgagcaagaaatggggtttttgggtgaac

SEQ ID NO: 63964 - DNA, 838 bp, Cannabis sativa
tgccctggaatttgtcgagtgcctcttcctcgtgccatagcaaagaattgattactgctggttcctctagcaggatagcttcgaaaatttcctctggtgttgggaacagaagaaggaaagttagagaaattgtaattagttggatgatactgacctcgagtggaaggataaggtctgtaattgcgatttgactgagcaagaaaagcttccatagctggatcttgatcttgattttgttcagcagtagctagattagcactaaattccatttcttgatcctccttctcaatacgagattcagatgcaagaagaagtgcttcaatttctccaacagtgtaaccttcgatccttgtgttggtggagataatgaaggtatcgtattcgctaggcaggcctttgaagatagcagcaatgtgatctcgatcagaaagaatctcccctacagaagccaataaatcgacatgttgcttaactttgagaaggtaatcgtttaagctcaaagtgcctttctttaatttttgcaacttggttctgaactccagaatttttgaggaaaccttcagtgtgtaatgctgttcaagagccttccagatctgtctagcagagttacagcctaccattcttgtgagaagactttctgtcatggaggagagaagccacgaaaccaacaattgatcttgaacgtcccaattagcaaatgctggatttagtcttcttgcagcttgatcagcatcactgagatattgtggaggtggaggagtgtcttcaatgaatttcatcagccgattacctcgaattgcagcaagaatctgctgcttccagaggaggtaattgtgat

SEQ ID NO: 63965 - DNA, 991 bp, Cannabis sativa
  modified_base (52)..(54): a, c, t, g, unknown or other
  modified_base (961)..(966): a, c, t, g, unknown or other
tgtaaaatataaaatatttgacctccttatatttaaaaataagataaaatannnaaattttaaaaataagataaccaattaagtaaaaaaaaataaatattatccatattcaagtttaaaatctactaatttctaaatttaattaatttcaaactgataattagatttgacatttgaaaaataaaaatctacattgaaaatttcacaaaaaatttgaaattaatcccttgaaaaaatcatgaaaaatgaaaaaattagaaaaaaaattgcatttggtgcggatggtatgcgtgcgcgtgggatgggttgcatggccgaggtttctcgatgcaggaggctgctagcagcctttccgcgtgcgcatggcctcatttcagacaaaaatttcccaaatgggcgaggatcctcggacatgatccctgtccaaaccgcatgcaccccgagaatcaagggtgttctgcgcgcgtaatgaggtgatacacctcctaatttttttttctaattttcaaaaatttataactaattcaaataaaatcgaaatcaagttctgtaaaaaagtgaattgcttaattttttccaaaatatctaagcaaaataattccagaatgataattgaattattttacataaaatttttgtaaacatcaatcaatcatcaataaacatatagatcaacatgaatcacattcaaatcacacatacatcgttttaaatctatatttcttgaaagtaagtattaccatggctctgacgccaatttttggattatattttgtcaggatctagatttattaaaagtatatttattaacaccctaaatatgaatttttaaaataatggaatttaaacacatataaagtttaagtaaccttacattgattgcataggaatataataacttttcccactcaaatctctaacccttgtatcctgtctgtcgcaaagtatcaccaagatctgnnnnnnaatgtccttctcttcaatttggatt

SEQ ID NO: 63966 - DNA, 1483 bp, Cannabis sativa
tgaaaaagagagagagaaagagagcagagaaaaaaaaaaaagataaaaaaaagaagctggttgaaaaaaaatgttaacattagctgactgtaaaaaaatagagatcattagctgattgaaaaaaaaaaaagggtcagcgttgaaagaggagaagaaaaaaaaaatagagagaaaaaaaaaaagtaaataaataaaacaaaaataataaaagtgaaaaaagaataaggtataagtaatataaatataaaaaattatttacaatataaatgttaagtttgaaaaaaaaatatagtactttatgtttatggtaaattttttttttattgacttttcatttaaaatgttttaatttttaatttcttcaaaaccataagatgttgcaaaagaattctgatatattagtatagatattaattaattaatgacagaggtgtggattaattgaagaaaacaaaaagcaaataactgaaacaatatcataattcattgagacatatttatgtatagattttatttctattttaattgtgttagtaaacagctcaacaatgtttgaattttggtttaacaaagtttagatgaagtttttgggtggaccaagcttcataacatagttcaacagctatatattttaggaatgaataagtaagttaggtggatgaagcatatagtatttcaattgctatacttgatgaatgagtaagcaagtggagtggatgaggatgtaaaggccaattgcaccgaaaggtattaaaatatagtgagtggcagcatagcaagcaacccatttagaaacaagacaaattttctaaagacactttttcctcttaacaaaaaacaaaaaataaaaaatttgcataaaggggataatagtgggccactaccaagcacaaattgatagccgaaaaccatcacagattttgttttgaggtgaaatcacaccctagattttgtacttgtcttaaatcagttaggtctctcattttgtatattttttttttgttttcttttcgaaggaatctctcattttatatgtttattttaaggttataactgcttaaagttactcttttttagttacacatttagtcatctttagtgttgatcatctaaaatatactttacactagatttacatgattcatgatttcaaatgcactgattacatgatgataagaagtgtaaatgtggtcctactttgggtctggacaggtagtgaaatgttaagggtaagatataaaaattcaatagattgaattagtgtgcggtgccaacaattatataatatttacaaactagtctattgacgagaatatgaatatgaataagaatgtgtaggaatttctatagatgcaactagtatctattgcgatccaactctaaaacttaaaataaatacaattaaacgaacataaaataaagaataattatcttttttaccccctgtacttatgacactatactattatgccccttaatctat

SEQ ID NO: 63967 - DNA, 1724 bp, Cannabis sativa
  modified_base (373)..(377): a, c, t, g, unknown or other
  modified_base (1515)..(1530): a, c, t, g, unknown or other
atattttaacaaaattgatgtcatgttatttttctgttgatttatagttgtcttttgttatttcatagttatttttatgttgttgtttaggtgttctatagttatttttatgttgtttttatgtgtcttctttgtatagttgttgtttagtttgtgtgccttttatcgtgtatatttttagtttattctagataacatttttattgtatatatgtgcatttgttttgttattttattttattttttattttattttttcagtttatagttattctttaactatcactaacttaaaaaggaaaaaaaaaaaaaatattgaaagattaaagttgtaacaataaattttatgaaaaaaaaataatgtaatagtacnnnnngataaatcaaattatcaaaactaagtaaaaaagttcgtaatacaaaaatatattgaagagttaatattattttacttattacaattaggttattgttttgttatttttctgttgctttaaagttatatttatgttgtttcatagttattttcatattgtttgttaaattgtttataattcaaaatttttgtaaactttcttctagtttatagtatttgtgtaaattttccaaaaaaatatggcccatatgttcatcatagcatagaaacaaatctggttacttcaagtgggcctactatcacaatatgtgaaacaggctaactttacacatcctatttttggaagaaattatagttgaagatttatacctcttttagtgaaccacaccatacttaatggttactaataaactatttagtaaactgtaacaccatcttgatgggagatataaaaattgtgaagtatttgacataaaaaaaaaagtaattttataatatatttatttaagtttttatcattttgtaaaatttaatacaaaatttaatgtctaataaatgtttttattaaaaatataacataataatatcataaattttactatataaaataataaaaaaaataaacataaaaaatttataatttaatgcaatagctaaattgaataataaaatattaaaattagaaaaaaaagtaaatataaaaataatgtatttactgtgatgtaaatttttaatcatgacatattgtaatttaaatttagattaacttttgctatttgtcaaattttgaattaatttctaacacacaattatagcaaaatttttacaaaataaactatattttaataataaatcattaatggagaagctctaaaatataatggtattagttagtaaatggtgccatcattagcggcaacataagatgtgttggggttcgcctaggctatgggctttggtggctggcggatctgtgcgcaactactttacaaactaaatgtagagtggaaagataagattttaaagattcttatgataaatatggcacatttaagtttgactaatttatatggtatttttttgtttttaagtctttttatggtatttgatatgccatatatgtaattaggttttcaaannnnnnnnnnnnnnnntttatttgtttaggaagttttatttgtcagtgatgccgaaaaagtcaccggagtttgctgtcggtgccggaaagtcgccggagtagcagtcggtactggaaaaattcgtcggaattcgtattgtccccgaaaaaatcactgaaaaaatataagaaaccggtttcttgatgaagaaactactttcttggtgattt

SEQ ID NO: 63968 - DNA, 1469 bp, Cannabis sativa
tgaacattcccctgagtctaacacatttcgtttaaacaatgctgcagcagtaggaagaatattttgaaacactttccaggcaaagattcttattttcgggggtaatttcagattctaaaaaaatttccactattcgcaaagcttatttgaagttgaggacgagttttgttcttccaaattagtggcaagatgaaaacctgatttaacactatagatgccattaagggagtgatgccaaactaatggatcatgaccagcaaaataagagaaaggaatagacaaggtgtactcctaatgtagaacttgggcttattagcccaaaacattgtgggccaaaggccctcctaagcccaatttctttctagtccataaaatactaaaatatattatctaacaacatggtttggcatattcttgtaaatgttctgttttccaaacaagcatcaagagtccaaacgaatctaatattccaaatgaacggtggaaaaaaccatccccaaattaaaatgacaaaattgcccctctaacattacaagcaattaagcaaagcacaatgacccagaaaagtcttcctggtttgaaacctctgagaaaaaagaaatagctagaaacccacctttaatggattcttcttcacttcagccacttttgtatcaaatgaggtaaacaagtcattattacataattaacttacatttttcttcttgttttgcatgaagtgttatatacttatattatatttggtttaatgagaaattttgtgttaagagtttggatataatggatatactacaaaaattcatgtatgtattgtatagatatatttatctaggttgagagattaatgtagttgatcaaactaacatgttgtatataaacccagcggtaaatattttatttcaggaatattgattaaattctactgaaatttacaattttatttaattccaaaaatctcctcacacctataatatggattatagtaactaaatagtactgaaaatttttgtagtacacttgaatgtttgggtagagtaactatctgtttcaacttattttaatttattttcataattacgtacgttgtggctatttagtactatatgtaaattttttagaaaattttgaataatttacggtgctaaaaataaaattcaaataattattaaccatgcgtataaaaataaaacagtcgcgtgtgaaataaaatatttaaactttattttttgacattcaaattattcagaattttttaaaaatttacaagttgtcctaaataattataattaggggtgtgcataaatcgatgcaatccaatgagaaccgaccgatccaattacaactgaccgtcaaacattggatatccaattgtgatctattcagattggatgttatttttaaatatccaattggatcggatcagatggtggatggggtgtctaaaaatacaatacatccaacatccaatc

SEQ ID NO: 63969 - DNA, 1775 bp, Cannabis sativa
agctacacaacccatgccaaaagacaagactcgaaccagaaaaaactaaaaggaaaatactaataaaccatgtcaaaagacaagactaaagaatcatgtaaaaagacaagactaaaaggaaaagactaaaacactatgtcaaaaaatttattcttaattataatacatgtataaatattatatatttacttaaaaattattttattatgatacatagtattaaggattgtttattgttattgttgttacattattattttttgatattttaattttttttagtataattctatttaattataatattttaattaaaatataatttatttagtttcgtatttttaaatagaagttaatatattcaaattcaataagtcaataaaattatttttagtcttaattatgtacaaatgaaactctttctaactatgatattgaatatggatctctataaatctataccactttccttataaataatgaataagaatttatgtaggtgtagtaatgtatagacaaatacagctatagttttttgtttacatttcttttgagttgacttttcttatataacttttcttagtcctggtcagctttttaggtttggaagtggttggtgagaggtgactggaacactaattaatctaatgattctgatgttgttgtggataagctgccaatttactatgtttatcttcttctttttattaaaaaaaaaaaatcaattgaattttagtgaccacaaaggacacatttcaccatgacaaataatgtgtaaatatgacaaataagtacacattatattaggcagaaaggaatttttttttttttcatcttttgtaacttatttttaaaattttcctataaaataattcttttgaaagagaaaaccacaattttgtacaaattatatatatatatatgtaattttcacccaaatatttatatgcctattttgccaaaagcagaagctgaagaagtatgctgaaaacaataacacacactaaatgaagaagtaaaaatctttcaaaatgaatgaataaataaagaagtaaaaaaatataagaaaactcggattagatgaccattaattttacaatttatatgtgtgtgcttgaagtgcaaagatatgcaaatcatttcatcaactacttaagggtagctgaagtgatcataggagggtgtatgtgttggaggtgctcggttcgaattccaagttatatatggttctaatatataaacgcttaaataataaaaaaaaataatcatttcatcaatggagcgtcaacagcttccactcattatgattcgaatcttgaaatcgactactaaaattttcatgtgttttttaattatttaggtatttattctacttgttcatggatggctaggtttgacatgatatcttgatgcctataacttcatttagcgtattcttggcatacattaaagatttcaaggtgatattgatattagtgcatcactaagttaattttttaatttctttcataaaaaaatgattcttaattccgatgaagtagttcatcgtcttttggcaattgaacttggttgcacactaggttatgactatagaggtcacatgggtgcaagtatgtcaacctgtgtgcaggggtgacataccaaggtgagaaatatttgacttactacaagtgttacaccttgttcgtggtgaaaatctagcacgatgcttgaaatagaattgcatttggatgaacaaaaccacgcgctccagattaaaaggcaacctgggcatc

SEQ ID NO: 63970 - DNA, 1195 bp, Cannabis sativa
ttgtgtgagagtgatagatcacatagagagtgtggttcttgtttgttctaagagcatctccattgaattaccataaaagtgatgcacttttaagtttgagcatatttgatatttctataaaattaaactccattaattaataatggtatgtaaatatagactaaatttcaaattggttaaaaattctatcaaattttatacaaaatataacatcaaccaaatttagcttacaaaaaatatcattatcttattaatttatctttttttataaccttaattcattcatttgtcactcataagtgtatatagtttacaaactctatcattgggtacaccattcatgtgtttgctcatatgaaaaattgtattcatgatagtctgcaggatcaaaagtttaaagactcatttgaaaactaaatttgaaatgaaagacattggtcaagccaaaaagatacttctaacgcctacaagcttaaatacgttacaatatttttttaattactttgttaagatttactaatcaaagggtagcttaaatacgttacagtattttcttaattactttgctaacctttactaatcaaaggattttagttaaaaaaatgtgtttaataaaattttcataataaataagactttataataaacataagacacttttccaaaatactacaatttgggatcctgatatctatttttataacatacataaaatacataatatcaaaagtatcgctaaacaaaactaagcatgtgttgtcccaaagatcgtaaccctccaggaattgtctggatatgtaaaatattcacaatgctcgtcattcactgatgttcaaattttactttgtctttacctacttatgaaaatataacggtgagtcgacactcagtaaaaaaagcataaaacatagaacatttatttgacctgtaattaggtactcatacacctaattatcataagtctactaccagtgtctaacgcgtataactgagtctcgaatactcttaactaagtacaattaaccataatactaaattgcactaagtactctagtcgtactagtgttggtagcattaatttgtaccttttcatattacctagcatatatttgtcagtatttagtgcaactctacgtacacaatacctctaattctgaaacgttaatctaattagatattgttgcccctgattttg

SEQ ID NO: 63971 - DNA, 782 bp, Cannabis sativa
ccaaggaaagtgcactcttcagacctaaaactgagcttgtgtttattatatggtctagtgtttgggaaacaagaacaaccaaagactcttaaaagactgtaatcgggttccaaattgtgtaatttgtgtaaaggtgtatcacctttgaggacagatgatggaagccgattaatgaggaaggctgaggctcttacagcttcatcccaaaattttaatgggagtgaggcatgagcaagaatagtcaaggctgtttctataagatgtctatgctttctttcagccacaccattctgttcatgagtagttgggcatgaaagacgatggtgaataccatgttcaaccagatatgaagtaaaggcttgaaattctcctccccggtcagattggagatttttaataggtaagcctaattctttttcaacttgagtcttgaagtttatgaaagtctgaatagcatcagatttatttttaagtaaatatacccaagtgaatcgtgagaatgcatcagtgaagtgaacataataataataaccattggaagaaatcatgggagaaggtccccacaaatctgtgtggattaattgcaatggttgagtatatatggtttcggaattaggagaaggaaatttatggatttttcccaaacaacaggcagaacaaaaatcagatagagttttatttatattgtgaatgttacaactgctcaacacgtgcttgacagtcttggcagcaggatggcctagcctagaatgcgatagatgaaacaatgaatcattgtttga

SEQ ID NO: 63972 - DNA, 553 bp, Cannabis sativa
ctaccccgactatctaactcagccctagcaaagtcttgaactacaatgctagcttcatcatccccaagaaagctgtccgaggggagaaaccagctagaaaacaactaagctcagtgatctagagggatgggtgcaggaggtccgaaacccatccgggaccggcctaagaaatgacctaaatgagaaaagtaaaaggccttggcatgatccccccaccgagtggggggcatcctaaacttaagaaggcactagtcaaactctataggcctataccgggaatactcttggactgaaggaacatgatagaccgttaaagaagacttaccggagccaaatgtgctggaatcgggagccctagtattgggaaccaggatcaaagatttaggtctggaaggcatccgatctatgcccgcttccaagcaaagggtcctcccagcggcggcttgagctttgatataagccagctcctgttcccttctaaagaggtacttctaataccggtcctctactgaggctatgatgtgttggaatttattttatcaggatcttagat

SEQ ID NO: 63973 - DNA, 975 bp, Cannabis sativa
  modified_base (143)..(154): a, c, t, g, unknown or other
tcaaatcttgataatactctgcgatagaaaagaataagggttaaagatctgagtggaatgagacatattattccgctgcaatcaatataaggtttattgaacatatgtgtttaaattctattattttagagaattcatatttnnnnnnnnnnnnaacatacatgttagtaaatctaggtcctcataaaataattcccaacaccatcaccatctgctgagagcccaggttggtctcgcaatcaacggaggctgtggagataaggtaaaatttcaggcaattgtccggtgagagggtttaatattgtggaaatttagaagagatgaaaagtaggcgtttaatattgtaagagatccggtgggtttaatattgaagaagatcaaaaaatgaaatgaaaaattgaagaagatgaaatataaaattagatttgaggggttcgacgattttaatcgatttttaacaattttaatggcgacatatcactgacgacaaagtcttcagtgatggactgttcactaggtggcagtccatcactgatgactttgttgctaataatttttttagagggaaaattcctgccttatctcttgccaatgcagctgcaaaaatcaagtggttgatgtctctgctttcagaacttcagaatgccctattctatgggtggataatcaaagtgttgttgccattgcaacaagtcctatgttccatgctaggtcgaaacataggagcatatcttattcaagcagctgttagttcgatatgtgccagccatatcagattgttaatgtgctatcaacagacagattcatgtaccttagatcccaactcaagatgtctgaaatactctttcatttgagggaggatgttaaccatgttttgagatatgttacttaaccaaatattctaacagttagttggtgtactaagcttctgttgtttattcgattatattttttgttgttggatcttcactataa

SEQ ID NO: 63974 - DNA, 1440 bp, Cannabis sativa
  modified_base (613)..(620): a, c, t, g, unknown or other
tctctctctctctcctctcaatctcagatttgttttgatctctcactctcactctctcttttctcgtctctctctctctctctctctcccctctaaatctcagatctattttgatctatcattctcttcttttcttaatctctctctctctctctctctctctctctctctcagtctcagattattctcggtctctcactctctctcctctcaatccaagattgttttcaatctctctcctcccttttcctatcttttctcttatttaggttaattttctttcttaaaatttgattcaataacaaatattatcatttttattttttaattgatttctattttaaaaatggggagataggtactttcagggaagaaacaacacttttcaggtgccagaaacaaggccagtgcctatgttgacactggggctcgcccaggttgacattttgtcaacttggggcccaattccaaggatgttttccaagaactcttccgaacatattctccgctttcaacaaaaattaagattcaactatttggggaccaaacagatcttccaaggggccaaaattgggatccaatgctcaggttgacacctaacattgggtccagnnnnnnnnttgacacttggcactgggcccaacatccaggttgacatctggcactgggcccagtgcccaggttgacatattgtcaacctagactgttttcaattagtttttcgaaaaaatgttcagggtattttttcctgcattagaataacgaagattcaaacaaacttggggagaaaaccacaaaccccagggcctcaaagttgaactcaatgcccaggttgacctggtgttgggcccagcgcccaggttgacaatcaacctggtgcgctggttttgatcattcaaatgccaaatttgatctgagtattctttccgggatggtcaaaagtggggtaggagacctcgtccttaagttcaagaaccttggaagtatcaaaatgacatcccaaaagctctgaaataagcacacaacacaagattgacaaatgacttggtgaactagattctgcttatccgaactgattccttctcgaccgtccatctagtttttcaaataactgagagtcatgaagagagaagtaagtcaatcaaataaattcacaacaacttttgaatttctcatttccaacatgggaaagcctcctagaaataaagtgtttcgagagtctctcatttccacaaaataacaatatcttcgagaactagtgaccaactttgccagaagacagaaatgaactaaatgatgttaaaatatcacttaggcattaaaaattacatccccacgatgttttcccactcatctagcgttcaggatgacatcatatgttcacctgggcgatggatgtcaacctaggcgctgagatgtcaacctgagcattgggcccaa

SEQ ID NO: 63975 - DNA, 1051 bp, Cannabis sativa
gccagcagccacttagtgtattttttgtccattatttttttttttttaaaatccatataattaaatcctaaaccaattaactaaggcccttattttgccaaagccaatggaaggggatgatttgtatctttacttggcagtgtctgaacataccataaatatcgctttagtgcaagaagaaggaaaagtctagctaccggtgtactatgtcagcaagagattactgaatccggaatccaatatccgttgattgaaaactgaccttttacttaatagtcgcctcacacaagcttagaccttacttttaagctcacaccataaaagtattaacaaatcaccctctccaccaagttcctcaaaagtcggaagcttccggtagattgttaaaatggacagtggaacttagtcaatttgatatctagtatcaaccgtgagtgtcaatcaaaggacaagccctagccgactttgtaatggaatgttttgggttaggagacctcctagatgagtcatttctagagctacctacctaggaagtgtatgttgacagggcctccaatgaaaagggagtcagagtgggagctatattaatttccctgcaagggcatcaactgcaaagcgggctctgtcttaagtttcttgcgtctaacaacgaagctgagcacaaagccatgctagcagaattatgaatggccaaagaagttggagctcagcataattaagtgcacattgatttctaattggtggtgaaataaatatcgggagaatatcaaactaaaggcaaaaagatgactgcttatgtcatgatgtctcgagaacttcttcaaggattcaagggcgatcatcctcgacgcctactaagaagaagtggagtgagagagatccagaatgggagaatcggcgtggtctagccagggagatttgggaaggatgtggtgatggtgtcgtgcaatgagatctaggcaatggagaattggcatggtctgagcgagagaaagttggtggtggtttgggcgagggagaacgatcatggttctctggtgtgaggctgagt

SEQ ID NO: 63976 - DNA, 3849 bp, Cannabis sativa
  modified_base (2651)..(2673): a, c, t, g, unknown or other
atggagctttatttacataaaaaacatgtcatttttccctaccacaaagtattatttctattaaatgagtttttttatcttgcaaataattagtttagaaatgtttcgaacctcttagagtgactacaaatttgaagatgcagtccaatttattctccaactgagcaccatttctcatcatatatgcagtgctagctatccacactgcacattgatcaagagaaaagagtctcaactcaaaaccatatcacaataagaagagtagctctcttaacttaatgttttttttttcgactttcggatggggacattcgaacttaacttcttctttttaaacaagtgtgaaactattagactatatctatgttttactgtactagtgtagtgattatttttctttagtgatggaggatattcataaacatgaatctgtattgtgttctgtacttataaaataatgaaacaatttgacacaatttcccttcaatagtagtagtaatagtaattgattgtgattaatatcaattaataacaataatgttggggttttgcagtagcaaaatcactgtatcaatatcaataccaaacaagaaaataaaagattgaaaaatcaatactaatataagcagatttctctgagtagagaggcaatggtgtagggttagattttcttgactcttctagctccaatgggaatggccgatttctctgagtagagaggcaatggtggtttcttgttctccttgctcatgcttcgcaacatataccttggagtttccattgtcttctccgccgaataagccgccgagatcgatttcctcaagctcccaatcttcttcgaagtactagcactagttttcttagcagattcaaaattaacacccagattctgcgtgctcttactaacactcctcacctcacctgtttgaatacccattttccttctcaatctttcattccttctagcagagtactcatcgtaaaatcgacccctttcgaatatcacactcgaactcggatttgataaagctccagtcttgagcttgagattctccgcctcgtttccgaattcgactcgaacctgcttcgctagagcccaaaactcacgcgaaatcgtgtggtaaccagaatcttcagaatactgattagggatcggtttcagagaacctgaaatcagtaggataaaaaaaatcaaaacaacgataatgaatgaataaaattgagatgagtgatctgtagaatcgaatcaagatttaatggaacgaaccaggaggtgtttgggtggtggtattctgttggggaatccggctgggtcgaatcctggtgggcgatttcgcaagcggaggtttcttgaccgacctcatcttcgacattctttgatttgagacagagagagagttagggcaaactttgttgggagaagaacagtgagaggagagagaaagcgctctgtttgaaatcagaatataaaggagcgtcttctcccaacggtcatatttttttgatcggacggtttggattgattcaaattttcaacagttctatttttgtaatgcactcctttaaaaacaagggtgcagtaccaaacatttttagtctaatatttttatattggtttacttagatattctataaaatattaaaaaatttaaaatagtttacgatataaaaaatagtgttcaaacaatctatttcatatggtataaaataaaataataaatagatagattttaaatttttaagggagtgcattataatttttttttttttgagaatatagaataattaattattttttttacactacatgatcttgcatcttaaaatatatgtttaaattttttactaaaatacaacagttacataattatatatattctgctaagtttttttttttcgtaaaattattattttaccctgaaattgtaaaacatacaaaattttaccccatttgattagaaagagttaattgtaaaaactataattttctattaattctgaacaattttaaaaagattgataaaagtattaaataaataaaagataccgaaatagataagagtgcatcaatacacccattttaaggagatgtattgtagaattttctaaaaatatattaaatttacttaaaaaaaactcaaattattcaaatatatatatatattttcaaattttattttatttaaaaacaatcttaaaaaatgaaaccaaaattattgaaaatcaaataaataatttaaacaaactaaaattttgtgaagaaaaaataaaacttatttatatttataaactcatatcataaaaaaataaagaaaaaaataattaaaaattcaataaaaatatcaaattacttttttaaaaaagttaaaaattaaactaaaaaaaattatgtttacttaaacaaatctagattttttagaaaaaaaaatagacttgaacttgaacccgtgaaatttagtttttacaaaagtgaatttttaatatactttttaaatctaaattgattttttaataaaaaaataattaattttttaaaggagcttttttatttttacacttcaaaatagttttttttttctttttttttacggaattctacataaaaattcctattgcaactagcgttgtaacctaaattgcaacaaaaaatnnnnnnnnnnnnnnnnnnnnnnntagcgctgcaaccactttaaaaattcaaatcgtaaatttgaaaaaaaagttaaaaaaaaatatatggggtaattctccttttttaaatcgcttaattagttttgaaattttttattttttattttttttttaattttcttaattatttaaaataattttttttaaagacctaagttaattttttaagatttactaaaaaaaaaagttatatttctcatttttattttgagggatacgatttgatagttgtcaaaatttatgagacaaaattaccaatttacaaagacacgttagtaattaaaagaataatgagacggaaccaaatataaggactaaacttttgtaaatgtaaaagttcaagcaaattgttaacaagtctttttttttaagggctagctcaagtggccataagtgggtgtgtgagtgttggaggtcctgggttcgagtcccaggtaaaacatgttgtaatatataaacgcttaaataaaaaaaaaggtctttgtttttttttaagggctacaatcaaataatattgaaagttcataataaaaaattactaattattcaaaaacataattacattcccgttccctcctttttatttggtttaggaaacaagaaaaaaattgtcaaatttaaaagagaaaaaatgggttcacacgctattattttattttcaatttattaatatgtatattataatatgttaaataaaacaatttcgattttatatgtttggccaattattctcaacatcttttgtaatcaataataataattattattctttaactcacaatcaaaattcaatcacagccttaccaagaaaaaaataaattcaatcacagctaattttgagctctagtgtgcacaattgcattatttttttattttagataataaaatttaatattattttttcctagctggacgtgaagtgtacaaatttaataaggatatgtttcttaaatacgtaagtcttttgatttattttacatttttactttccttaatttttattttccaaaatacaagttttatatttacaaaaatacaaatagtgagagaaagctcatttgcgagaaagaaagtaaagtgcactagtgatttaggtgggcaagtttttgacactattaccgagaactgcttcaattaatatcaagatagttgagtttt

SEQ ID NO: 63977 - DNA, 689 bp, Cannabis sativa
tgaccttggataattgtatgcagtcgagatccatgctgacctttcccactttagttctgtttcgttttcgggtggttcccgtttggtggcgtgtttggtctagatcattttgtggggtgtattgtgtaattttttgcctttgctagttgggtttattgtttttttttttagatttttttgcattgtgataatagtgtttatcatccagttttcttttgtgtggggagtgtcgtcttctccctaagagaattgtgcagttttatttttacctcacttgttggactttattaagttatgagaaatgttaaataacacaatgcataatatgtaatattattttattagtgtaatattaattatttataaaacctcactttcataataatattaacattttagtactacataataatgctctaaagttgttcgtcttttaaaaaataataaataaaacataggctaaaagtaagtaatgagaaataaaaattggtgggagatattttacttttttttttcattgttaaccaactaagatataataaatgagcacataaaactatgttagaatttaagaagatatttactaggcagcgatttcagacacactttattttaatgcatattaatgaatataaatagtaaatatattttaattaatatttaaatagtgacactcctagattacacct

SEQ ID NO: 63978 - DNA, 736 bp, Cannabis sativa
ctagacactactggtgcattttagtatttctctttaaatatagagaaatgctaaagggcattagtagtctctagcattctcttacgtgttgttatatattggtctaaataaatatcgggtcttatgtagtttattgtaataatttttaaggagtattgctagccaatcataagacaatacacctgaaaaatattagatactactggtacgtgctcttaaatataattacaactcggtaattttgttttaagtattaattaaattttatgttcaaaatgtgtaatattataactttgtatataaaatagtaaaacaaatcttcactcgatatttataaggattattttttttagggttgaaaagattattgttattaatttagagtgatcacatactggaaaacaattgtaaatgtgtagcttatcagctcaaacaattacattatttaaataataccgagtaattattaacacccaaatattaaacacagttagaatatattatatgtatccaatcattaattcattattttgaatagcagttggatctcacccattagaatacatatatataaatattgcaagtcacccattagaatatttgagttcatacaattattactcatcaataatagttgtatcatgtaaagaatttttttgatttaaaggggtgtttttgagcttgtttggttgtgttttcaattttcaatttctaaaattgtgtttttaaaagtgag

SEQ ID NO: 63979 - DNA, 1018 bp, Cannabis sativa
  modified_base (69)..(73): a, c, t, g, unknown or other
tgtataaaaatgtttaatttaatgggggccggcccggcccaaagtatttttgtaattttttttcctttnnnnnatttttctgtttttttcccatattaaaatgaccagaagttgtatttgaagaagaattattaataatcagtagtgtaaaaagttaaaaagacaaaaattttaattagtattaataatattaacggaggtaagatatatacgtacatttgatttgaatatgcgtcttgataaaagaaaaattggacaatcaatatccatggctggtctataattgttctatttacgaaattgtgtatataataaagtcttggccttttttactttcttaattaattaaagagaactctataaattgaatttattctttggatcttatttggttatgacaaaatcataggatctctgtttcatctttaatttgtttcattaaaagcaaaagccagcaatatcaagagtaatatatggccataaagaatttctttcttcttttaatcttaataagaaaaaggaaaaaggtttggtcattattaatggtggggttattattttttttttttgacacacactggtggggttaatttaattttgtgtcatatgtattaacttttggctgtttcaatactagtggtatatacaaataattataatttgtgtcatatagttgtcatattatatatataataaattggcccacattattaaataagacgtaaggtgagggtcataggttccatcatatacaagtagaaaaaatatgaaagacaaagtccagagatagagaatgtctattggtgttttctggtcataagtcttgtgagcgttatattaattatttctcataatattaataaaatcttcaagaaaaagaaagaaaaaaacagagtggagtttatctcatggtggtctcaatcaatgttcataataacataataatacacttggataaatttgagacgtgaacgcaatactatatgggaaatttgattttctatacttagaaaatcaa

SEQ ID NO: 63980 - DNA, 3878 bp, Cannabis sativa
  modified_base (1716)..(1720): a, c, t, g, unknown or other
ttcttcttcttctctttttttctttcttttcctttttcatttttttctttattatccctttcttctaatttccttgcttatagaggttgtaactacatattctattttcaaatatactatagctacctttcttttctttatgtgcaacatatcatttggaattatataccttcttttacgtcttgaattttctttaatcaatattctacacataattttcttctttttgtctatatgtctatataaaaagaatttatttaatatcaattcactcaaccccagccctaaacttcctgctactctctttttctcttaaaacttttctccttcaaattgaataacaatttttaaactacttagcttatttgtttgccagaaagaagctattctacaatggctattcatactagatttctattgagacgcgatgatgatgaacaagattgtagaagaacccttcgccaattattggagaaaataaaaatgttagaggaagaactgaaattggagcgagaaggaagattgaaccaacaacaaaagaagaaatgtcacatatgtgataatgaaatttctgatgaaggttcttcatctgggtgcaaattttgcaatgacttgcgcaggcgcaaccaagaacaacatcgtccaatccaaactccctttcattcttcccacccacttaaattatgtactgataaatttcaaacctttatatgcaactcttgccataaattgcatgaaaatattaatatgtattttacatgcgaacaatgtgatttcttcatggacgtaaaatgcatggttatgccccagccaacatggtacgatgaatttgaaagtgtaggtggaaagttcatacaacattctacacatcaacatcgtatgccacttattaaagacggagcaattaatgacgatgtcagttgctttgtctgtcgcttgaaatgttcaggtgaagtttgttatggttgcaaacgttgtgagtattttttgcatgaatcgtgtgcacaattaccacctcaaatttatggttcttcttttcataatgaacaccctttattctttcatacttctaatcgtgcatttcgttcttgcaagtcttgcaacaaagaaaatctaatcttcacttatgaatgtcgtcaatgtgattgtattttatgtggggattgtgcctctacaattccacatggtgtaaagttcgattatcatgagcatcctctttacctccaccaaagcacagatgatgacaatctaatgaagtgtgatgggtatgattcctattgcaaaaagcttactctcaataattcagaggaaattaacggtacaaaatcgtacatattttggtgtgcaaaatgtgatttcaaagttcacatgctatgtgggttgttacctaaaattattaactatgactatcacatacattctcttgtactctttgatttggctttggaaaacgagtttggagaatacggttgtgatatttgcaaaggtaaaagagatccacgattttgtgcatacgtttgtgaagaatgcaattcattgctcacgtgcattgtctaacttctcaggtacacaattaatcactagctatattaaattattaattatcattatagtctctgcctattgtggacattgtcccacatggaataaatagtagaaaagtgagtcatatgtaagaacatgggctactccactcattgccaattggttttgagnnnnnaccccatgattctcaacatggtatcagagccatgagccatatcatagtgaccatgtccactcaacactgcctaattataacttaaattctcatgtgatacactcaaattgcatacactacaaattaatgtggttcccatagatttatggtaaaaacacatcattaaaaaattatgttgaatttttaagtgcgtaatacttttttaattaatttttttgaaaaaatattaccaaacagcacatcattacttttattatatagctattgagttttatacttactcaataaacgtgacaaaatttataatttatattcaattttggtgtcaagtcatcgtaaaataattgagttgtttttattttttactaaaacaaaaatactctttactatgaccagattatgaaagttctaaaaggagatctgaaaaatttggaacttcataatgttggagagatgaaactttccaatgaagtaaacaatgtttgggtggttgagaaagagcagggacgttcagtaaccaccttaatggatttactaaaccaaatatctgaagttgaatcagaaaagctcatgccttattttcactttgatgtggtcaataaaggaagtgatcatgacaaaactactcaacaccagcttcaacataacaataatgatgaagttcttcaattttctaactttatcgagagccaccaattcatatcagtactttttgatgagttccatttcaactttcagaaaacaaagcttgaaataaagtacactgatttatcattgagagttgttccttttaaaggttattcaatacctctgaatttgggctctgttttgaaaaatctacttgaaaagtatggtgatattggtgagtcttccacattctcccaagccatgaaaagtataggcattttcttcacatgtaaagtactcaaacaaatgcaattgactttggttgctgacatcaataaagatcatcttcgacattggtatttctacataatatttgccaaggagattatggggtttgaagtggaatttttggaagtgtctctaaagaaaatcacacaagttttcttctatcgacaagttagtaagttacttgacatggatattaaatcattgcgacaaagtaagatggatgagcttgaaaatgaaaaggataagtgcaaagtgaaatttgagaagcttagggagtttcaagagtcttcttttagtaatcaatttataaagaaacgcttgaatgaggggttgaaactgatgtggaagactgttggggaagttggctttaaatctcataactaataagtaacatatatgtaatatattgtgttttatattacttgtttatgtttatgtttatgtcatttgattggtgtgtctctgtgtgtgaatatataaagaataacatatggatttatcgatccttgttcctttcaaatgagttaatgacattttacattttttatttacttgatattattataggaacaaactctaaaatggaatgcaataaaatttaaaagccataataaaatttgataaaaaaattattaaatttttttcatgttatactggaatagttattttaaaatggaatagtcatttaatttttatttttttaaaattgtttttttaatttaaaattttttaatttttaaggaaaaacataaatttttttattttttatttttgtaaatattcatttatgtgaatcaataaaattgtgtcacgtgtacactgtgtccacgtaaatattccactaggtcagttaacatctaaaaatgaatggaaatgttaaactgctaacagaacacgagtttaggaggttttaccactaaaattttagaattaggagttattgcaaaaacctgccacttcaaaaaattatgctgcaaattactcttattttatttagcttaatgaaaataacaattaattactttttatatttaacttttttttaaaaaaaaaaaattgtactgtaatagtttttctctttttttcttaaaaaaaacaaacaatatttccatatcttttcttcttcttcttcatatctagacacctcacagcaaccaaatacaagaggaagaccccaaccattcattatccttttactcactaaattttttgtttttgcctgattttctttctcgcaatgctc

SEQ ID NO: 63981 - DNA, 1233 bp, Cannabis sativa
tttttgtatttttacaaaaatatttttaataaacttatttagttttaattttttataatcatttaataaaagaactatcttcaaattttacagtaaataaaagatccgttctcatcatcgtatttcacatgtagtcactaaagtagaaatttgatagaaaacataaaattcaataaaattaagttaatacaataaaaagaatagcatgtacgggaagttatatatatatgtaagataattttaataattttaactttaaataaattacttgataaattcctacaaaaaaatttgacaatttacaaatactatttatgattaagagttttattttttaaaaaaagttaataatcatataacataaatttaaagtatctctaaaaacatataactatattgttttacctcaacattcagaatttaaaataaataatattaactataagaatatcttaaagagcaactttactaaagatagactacattgaaatataaaggtaaaagaattgatactttgccacataagaaaacaataagagaaatatgtagtccattacttcaaatctattatcactacatcatctcattgttataatagatcacataaaatattctgatgaaaaccattattaacaaaggaagaagaagactcgtactttccgaaaaaaactataatcacatatttattcattgataaaaaatggtgaccatagaaaatataattatctcacaaaattttaagagtggacatatttggaatatagataagatgctttggcaaaattttagagtgatatatatatttattattatttttaaaataatttttttaaacgtaatatataaggcaagtaatgaggtagatttttttaaaaaaaatattattaattaataatattaaaaaattaaaaaataaataaatatttataaatttaataaaaaatttaaaaaaaagatagttaaggatataacaaataataatatttagaaaaaagtaaaggtgatgtcaccgctttataatttacatttacataaatatatagatatttataataaatatctcttaaatatatttaactcgaataatttttattgttttaatattaatttacaaaaacaaaatatcaaacaaatcaaaataaaccatttacttagtatctactaaattcaaaacctatatcacttgaggattaaacaaaacattattaaaatcaaattaatagaagaaaaaaa

SEQ ID NO: 63982 - DNA, 1090 bp, Cannabis sativa
  modified_base (447)..(448): a, c, t, g, unknown or other
gaccaggcgcacattcccctttcacggtttgtggcccgattattgtgggcgggaatgtaacagtccaattcgcccaggtaccatcctagtcgagatcctgcaggtgcgcctcagtaaccttggacggagggctcgcccaccttgcacccaaagtaccttgccttctatgaggaaccgcagcagtaagttcctcactggcgtagtccacgccctcaaccagcacatccccatcaacaacaactggctcaccggcctcattgtatcccccatagtttaggggtgcaacctcctcctattcctccgccttggagagactgctaggacggacatcgtcctgctcctcaatctcctagacctcagcgtccccttcatgatcctcctcctcttggaccactggatcttgttcagcactgggtaaggtggcgtgccgagccacttgaggatcanntgcgtcgaccctacgcattgtctttttggtacgagccatcatcctattgctggacaaaagatttaatgaagaatgcttgtactcaaagaagtttgactagaacgaagatgaggatgatcctcgtgcaagagttgaagcagatcctggtcgatttggtgtttgcttccccaaaattcacctgggttcatctacaaaagacaacacgcaagatgagtgtttggtcgggatatcaaacgttaaaacaggcaaatatgccgaccacgagtactcaacagattaaagaataagaatattcaacgaaaggtcaaaactcaggaagtttgaaattttagccagttagggcaaaagaatttcatgaagcttagaataggcaagataaaagataggcattatgcagttcaagaagcaagcattacggacgacgaaatggcatgaaccgtaacgaaggaaaatcccagagtttctaaacttagggtttcctacatatcttctacacaaaaatcgaaagtacattcagagagaaaataagcagagtaaacataaaggaaatggagaacttactcaaggaatcaaatgtttgggttcaggttacgtcaagccaaacaagcagttttgattaaagcacttcagcaaacttgaagc

SEQ ID NO: 63983 - DNA, 713 bp, Cannabis sativa
ttatatattttaatttaaatttattattatatatttttatttttatttaagtttttatttttctaaaaataaataaataaaatattccagtctattcttaatccaatcttttcctgtccagtccaatcctgcgtaccaaacgagccctatatgatttgcgtttctcaaaaaaaatgatatgtataaattaaatatttttaattagttcaagtttttaattttagagaggtattaaatacatcaagtgataagtttaaatttttatttgttatagtcatttttagattttcaaaatgtgttaatagaaatatttaaaattcaagatagaatatactattaagattgagatttgtaaaagaaaatggtgataactacaaatgagacacaatgggtaatatattatgatgataacatatgagatatagtgataattatgcgagaaagagtgtttacttaaataataataacactctaatttttctctaaactatcctatttaattagttatttaaaaaaaaaaaagtaactcaaaattctattatacaattaaataaataaataatagaatatatgaacttactgatcttcttaataataataattaataatatgatgaacactcctatttatttgtatgttttaataaataatataattatagatagtataattttacggagttttttcatttttacacttcaaactagtttttt

SEQ ID NO: 63984 - DNA, 1121 bp, Cannabis sativa
aattaattactaaataaaattgtcatttatattatttattagttagataatacaaagtctaaaatggacaccccgagtgaaaagttatggccaaaatataaaattcagcttttctcgaaaactgaccaaatggaattccgattagtaccatctagaattccatttttcaacagtctgaaatgtgattttcctcaactttaatccctccaaaatagctccacacctaaccaaatcattccaaacttcacaaagcacataaatattataaatacaagtctttatgtaaccattgaatagtcaccaatatatatataaattaattaaaacttatcacttatataataataatatattaataatattattaatattataaataaaaactttactaataataattattatatcattttttagccactaagaaatctctacttctgggcttggtcaaaccataaatacttctaattaccacaatgcttacactatcaatttgtcataacattcccattaaagtcactaattaaatctgttataatattttagcccctgatcgattctctaaagtcaccaaacctaaaaatatttttatttcaccaataactcatatatatccacacatgctatataaatctctgtaattaataaattacacttatttatccattaattacaaaattaaaatttatgctaaaataaattagtaggatcataatcctacttactacctgattaacccataatatatatatataaaagaattattggtttataagaaattattgggtgacttttttttttaaagttttttattcaaaaataacagtttttttttggagcatggcctctcttttttaactcgtatttgtgtttcagctggtttattaggccactattgggattcctgagccttttatttacatgtccatgagtaatgcattttgactgtcgagctggttatatatttttcgtacatacttaggtttctgtaaattaattttaagcctggattgtaagacaatgctttagttctttctgttagaaattattggggtcacaattgtatatataaaatgtgtgttgggtcattaaataaataagtcaaatttatgtggtctatt

SEQ ID NO: 63985 - DNA, 1221 bp, Cannabis sativa
aaacctcgagactcgcgaactagggggaaggaggcagcccaaaggaacccccaaaatgctcaggaaagacaacctaggaaactaggggataccttgaaggcgagatgccgtatgatcagccaggaaccaaggaaccggaagttcaccgtaggaataagggaaatctagaggcacaacctcgggcgcatgggtcaccgttaagggatcgccattattctctccaagctcataggaaaggagcttgcacaaatcccaatagggggaacgagacgaatcaaacctaagggagaagagcagggcgtgaagaggcaagggttaccgcaagatgcacggtaactcatagtcgatcaatgcgaggatgagagaatactcgtcgcaacgatgatcaaaaaggcaaaatatagtctatgggtgaaacaagatctgccaactgtcatggccaatcgaacctacgagaacggttgaactagaaaaaacttgatctttgctaacaacttggtccaaagcaaggggaattaatccatttgcaaaagataagttggagaataagttcaggagacaccaagtcaaggagccaggaagacaatcgagatgtaattctgttgaagaattcgagtcagaagcttcagggtcaaataggaaagacgactctaagaggtcgtccaaagataagaaacagaagaaacacgacaaatacgtacccatttatactgtctataccgagcttaatgaaactcgagaaagtatctaccttgcgcatgaacaggaggtagttttcaataaataaagcccatgaaacacgcgagacataaaagggacctaaccagacgatatgaataccatggagatattgggcatacaacggaagagtgtcgtcagctgaaagatgagatagaaggcctcatagcgcgagaacacttccagtaatatgtaaaggggcaggacaatgtccatgaccaactcgatctatccaacaacccaagcgaccagggaccataaccttcccctgtgggaggaaaggataccctggttatcttgggaggataatatattgtaggaaaagaacgatgacacccaaaaggggggtattaagaaggtcgcccgacattaattggactaggtcaactagttcagtcaagaagttatgtggaagtattgcaaagaaatcaaataccggctcgcaatggttgtcgtaaagagctacaacacagaaaagccggt

SEQ ID NO: 63986 - DNA, 1173 bp, Cannabis sativa
cattggaatgcttgccgatgattttgtgcaggctgcgattaacgccaagaaaagttaagcctattgctgaattgggagcataagttaagcctgcgtctacagagagtaatgaaaaagaaaaggaaaagggagaacaaagcaaattaagaaactaatataacatgacaaaatatgacatcctatgcacagaactaaaacttcactactctcgttcaaggaaatttggtgcctaacagaaggattacctgcagaaagcagagactattaagcacttacacaaagccaagcagagactattaagaaccttgcctagatggtatcacaccaatgttgtacctgttaaatgcaaatattcttaatgattaactatcaacaaccattaaaaaagtatatatatatataaacatacatggttatatgaacactccaaattctaaatgattgttgaaacacatgcatgtcacatggataaactctcaatatttacacatttttctctgcaacaaaagaaaagaaaaacactattttaataccaaaattaatgacccaaattgaaaagaaaaaaatatagcattgaagagaatgatagaaaagggactcacatattctccaagagcatatcagtcatttaaatacgaaaaagtcttttccattcatcttcatcaatatgttaaccaatttatgcaccattcgatacaaacccgaacatctgaacaaaaagcatttattcacttttaaaaatttcaaatgtaaatcaaaatggttatcaattattgaatgtttaaacccaatttttatggacaaattaaattctctcaataataatggaagaaaaacaaacaaaaattcaagttaaataatgaaaaaaaataaaacaagaataaaaaagtaatgacctgcttgtagggagaagagagaggattgacctgctctaaagttcaaaactttaccaatttcctcaatcgattcagccaatccgaaaaacggcgtcgtatgcccaaagtcctaaagtcaccaaaggatagttaacaatggtgggactttcacgttgaaattggggtctccatctagctataaaattttgaacctctttcattttgggtacaccaattttcaaccctaaaactccttgcatcgaatcaagatccatagaattagccgacccaagaaaat

SEQ ID NO: 63987 - DNA, 568 bp, Cannabis sativa
tattaaatatttaaaataaattttatagatatctcaaaaaaaaaaaatatatattttcacagtattttctatctctaattttgtagacttttattatttttactactatttaatttaaaaagttttcatttttaactgtaaaattaagatatttttttttatttaagttttttatatattacatatatttattttctcatctattctttttttttttagcttttatgatttaaatacattgtgatttagatacacttgaccttcgttttaggttttaaatattcattaatcttttaaatactcaattttagggattgaccgtttttaaaatttatgacaaatcctttaattagatgattttttttttatataagctattcattaattctttattataactattgtaattaacatggttgtatttatttattaattaaaataaattaggttattttaaattattttctctactattttattctgtttttaagtatagtatttatattgcttttaaacctttttgttgttttgatatttgtgttagataaattaacaattaacccaagat

SEQ ID NO: 63988 - DNA, 666 bp, Cannabis sativa
  modified_base (44)..(45): a, c, t, g, unknown or other
tctttattaataagtaaaactgattatattgaaatggattttanntagggcacaaaacccaacaaaagcctagtgctttcatatctagtcctctaaccaccataccactctcaccagtaactgttttaccttttagataataaatttcatttctaagttcgcctttcatgacaactagggatcctttcatgatcttaaaagaactatctatttttattgtatgacccctttcaatcaattcaccaatagaaagtaagtttcttttcaaatctggaatatacctaacatcttgaatggttctgacctgatcatcatggagcttgattcttacagttccaattcatgtaactctgcatgccttgttgtctcttaacaggattgatccaccatcaagcttcttgaaactatcaaataattctcttcttggtgtcatgtgaaatgaacagcctgagtcaagtatttatgagtctcctgattcttggctagagacaaccaatacatcagctgactcatagccatctgccacaacacctgtatctcctctttctttgctcttgtctctttgaagtttggcattcaatgccctgcattcatccttgtaatgaccatctttcttgcaatagtagcactattctcctatcttggagttagaccttggtttatgtg

SEQ ID NO: 63989 - DNA, 3905 bp, Cannabis sativa
atggttgggatgaaattctccattggttgaacccagaaatgaagaaaaaattgcaagaggaagcaggcgggaacagttatattcgaataatgaggggaaaaaacgcaaagcaagacagttaaaatgaaaaaaaaaacggacaaactgccacagagcaaactaaagggcagacaaggctcgacccaattaatttgtatagttgtagttatattttgtagaacagataggttttgaacttatgtgtcagttctcagattgcactaatccaaactaaaaatcgaattcatttttatttagaaaaataaccgatcaaaccgatagatgctagcctaatggaaattcacattttctcaaaataaaatctaaaatccgaaggttctttagcctatctctactggcgatctaatcagatcctcatcattctcacttctcaggaacacattccgttctgattcatcccttcataatagatgtaaatcaagctcttctatggaggttgttcgttgtttcccccattatgatcgaagttgtgaattgtaatggtgtagattggaattggcgtgagtagggtttccttcctacactcaaatgctggaccaaatataactccttttttatatttagacgttgaccagagttgtatgtggccataatcatttgtgattttcatgcttatgccgtcgaagatgcgaatgtttttggattcaatggcggtgctggcgttgcttctgtttctgggtttgagtaatttctccaattgcgtggcatctggtttgtcttcttcatctgaaactgagaccactatgcacactaacaactgggctgttttagtctgcacctctcgcttctggtaccaaatcaactttagtttcttcttcttcttcttactatctagtgtatgcatcttaatattatttctcatttcttcgtgtttttattttcttgaattttctgaattctgttacttgggtaatttcacttttcagatgataggggtttctttagtttccttaattttctggctttaagttgtaatttcatgccagaatttgaactggatgtctgattatggaattgtgtttgatcaaatttgcgatattggcaacaattcatacaatatgaatgaactaaaactcttctaggcagcgttaaatgtgcaaaagagcttgtttagataaacttaagcgtagggcaattgaagatttaatcgttgtagttcatgagtcatgactgattgacttatttgacatgtctttgtccaggtttaactatcgacatatggcaaatactttatccttatataggtaagtaagaaagattttgtccccctttggtccaggtgatcatctttcttctctttttaatagatgatttgcatggttgtcttccaggaccgttaagcgactgggaatacctgatgagaggataatacttatgttggctgatgatatggcctgtaatgctagaaacaagtatcctgctcaagttttcaacaatgagaatcacaagcttaacttgtatggggacaatgttgaggttagttttctgttccatgacttgcttttaattaatatacttgttcgtgtgcgtaatgtaaagtatttattaaattatttaggtggattatcgaggttatgaagtgactgttgaaaatttcttacgagtactgaccgggcgtcatgaaaatgctgttccaaggtctaagcgtcttttaagtgatgagggaagccacattcttttgtatatgacaggacatgggggagatgagtttttgaagtttcaggactcagaagagctccaaagtcatgacttagctgatgccgtcaaacaaatgaaagaaaagcgtaggtttgttggctttggcatttctgcattccctttttgcactttgctaggaaaaatgttgtttacctgttgtacatatctgttatgttctattgaacaattacattattggacttattattaatatttgtttttagagtaggaactcatatgctgtttcatgtatgtgtattgattttagatttaaggagcttatgattatggtggacacttgccaagctgccacactcttctctcaggttgaaatttgatttgtctttcagttctgaattttgccacactgatattttgcctgcatagatttacctgattttataaatttataaattatctctgtctccatttgctttcacaacttgctctacgttaaagtatgttgatggtgattgctttatccgcggtctgtctcttcagcttattttccggcaagagctatgtattatattgatatttgtcttggtcatgcttgtcctcaaatcttctgtattcaacattttgattcaagaatatccaatatttgatttagaaccgactacctgaaaattgagtttaattttatacaaaacatcatatttcttgcagcttcagtcgcctggagttttgactattgggagtagcatgaaaggagaaaactcatactctcatcacttggactctgatgtatgtatgaatgtgttatcatttcctgatcattctaagtaacatatataccgggctgaccatgctatcatttcttctctgtctctatttcaaatacaggttggtgtttctgtagttgatcgtttcacatattatacccttgccttttttgagaggctgaatatgtatgacaatgcctcattgagcaggtacgttgatgttaatttacctgaatgatcacatctcttatctcttcactgttgcgtagatcttgaaatttaagctatgtatcttctttgcagaaatcacatgtttgaaataccttttcatttcctgagggactaatgcttttttccattttcaaagttctaaggaaaacttcttacagaagagcaattatttttcctatttaactgtgggcataatgtctttttgggcagtcttttcaaatcatataacccaaacttgctgatgtcaaccgcatattatcgaacagatctgtaccaacgacaattggaagaggtagaaaggtttctcttagaccctgctttttttgcatctcagaagtcatggatcttctttttaatgtaactgaaaaggcatgtttatttatagaatatacgttaattatctaatctaaactaatataactctgttgagtatcattgtcacccttgttgaacttcacatgattaagacaaatatttggttgtcttttgtttttgtgaagcttccactatgtatgtaacaaacctcttttttcttttgcataaatgaggtcaaattatcctactaacctatcctttactctgcataggtacctgtcacaaacttttttggttcagtcatggaaacaatacacactgattcagcttacaaagctctatcaagaaaaacctctagcaaatctgatatcaagatctctccagataaatcaaccaacaacaatgaaagaaaactgacagcatcagactcagatcagcttcctgatacaaaaccaggggtaacttattgactttttccgttcagattttcatccgtgcaccctggtctcttgttgacattgttattaacacaaggaacataattctgcaggaacaaccgtgcccattcacacgtttcatgagtaacctcaacggcaacattgatagaattgaagatattgattcttatgtgaactatggcttgttcataatgcttccattgttgcttctttcctcatggttatcatagttttgagctttgagcatatgtaatctcttacccttgatgctgggccagttgaacccaatatgggtttttacagtattttccctatattttttcattgtctatgtagatttttggtctttttatagaggaaggaagatgctcaagtgacattccataataaattccttataatgttttttttttttttt

SEQ ID NO: 63990 - DNA, 1137 bp, Cannabis sativa
  modified_base (696)..(704): a, c, t, g, unknown or other
cgagaagtataggctattacctttccagcttgcataagaacatagctgagaccttgtctcaaggcatcacaataaacaacaaacttttccttgtcttaaggaagagttagcactggagcggtaactaagcgctgctttaactctagaaaatttttctcacaccgattagtccaaacaaacttcaagttcttttgggtcagctccgttaagggtacaacaatctttaaaaaaccctcaacaaatcgacgataatacctagctaagcccatacatcttctaacttcagtagccaatttcggtgttggccaatccaaaacagcttcaatctttgccggatccaccatgatcccatctttatctactatatgccccaagaaagagacacgagataaccaaaattcatactttttgaatttaacatacaccttgtggtctcgtaaccgttgcaatacagatctaagatgccactcatgttcctcttctcatttagaatacagcaagatgtcatcgataaacacgatcacatatctatctcggtaatccttgaacacccgattcataagatccatgaatttcgccagggcattggtgagtcctaaagacatcacaaagaattcataatgtccatactaagtacgaaaagcagtttttgagacatcttcctctcgaattctcagctgatgatagcctgagcgnnnnnnnnncttggaaaagaccatcttccccttcagttcattaaaaagatcatctattcgaggtaaaggatacttgttcttgatggtaagctttttcaactctcggtaatcaatacagattcgtagagacccgtctttcttcttcacaaacaatacctgatcaccccaaggtgagtagcgcggtctaatgaattccaaattcggtaactcttgcagttgtatctttaattctttcaattcagttagagccattcgatatggtgcctttgatactggttccactcccaaaaccaactcaattacaaattcaatctaccgggtaggtggcaatctcgacaaatcttctggaaagatgtcaaggaactcgcacaccaatcttatatttttaggtccagatgtcacaggttggctggtatccactgcagtgactatgaatcccaga

SEQ ID NO: 63991 - DNA, 1202 bp, Cannabis sativa
aggtttgggtcctaatccaagttccggctctaattttaggttcaggctcaggtccgggtccaggtctgggtgtgggtcttggttcgggtccagatccgggttcgggtcctgggtcctagtcttggtcaaggtctgggttcatcaggtcccgagtctggatttgggtctcgagtctacgtctgggtccaggtctgggtctcatctaggtccaggtccgggtcccaagtctgggtttgggtcttgttccagttctaggacccgtatttcgatcccgatttgggtatgggtctaggttcgggtttgggtctgggttcggttctaggtcaaggcacggatcctgatcgtggtccaggcctgggtttgggtctacaatcaggtcccgagtttagttcggttccttgtcttggtttcggtcttggtctaggactgggcccgggcctgagctcgggttctgatctttgtttggattcggggtagggtccatatctagttcttggtccgggttcttgtcacggtcctagtcctattccaaggtcctaatctagttcatgtttaggttccagttttgggtgttaggttcggttctgggtttgggtccttgtccgagttcaggtcctagtctgaatccaagctccagacatcgactatggatcttttcaagccccagttcccatatcctgagttaagatctggatctcgtcacaagtcttggtgtggtttagattcaggttccggggtcccagtttgggtcccaagttcggctctaggtctggtcgacaagctagggtacagttctgggtctcaagtccaattccatgtttgggttttagcttaggtttgggttctggtatcgagttctagtctgggtttggtttcgagtccaggtatggggttatgtctgagtttgggtccttgttgagttacatttttcggtctgggtccagatactggtcccagtcttgttcctgggtcccagcccatttttggttccggttccactttcaagtcatggggtacaggttcgggtctgcgtttgggtcctggtctgcatttgagtctaggtgcaggtccaggattgggtcccagatctagacaccgactacaggtggggtccaagcctctagtccagatcttaatcctagtctcaattcctggcctagttccaattcaagtgtcgggtcgcaagctcggtcctaggtatg

SEQ ID NO: 63992 - DNA, 4965 bp, Cannabis sativa
tagaaagagcattctattgaaatgctattccaatactttaaaatataaccaaacaaagaaatgaaaattgtttcatttccattctattccatttcattacctccaaccaaacaccacctaattatttcagaagttttaaagttcagaaatttacataaaatactattttagtagaaaaatttataccatttcaaagatttattttttatatttttataattttcagaaaaaaaaattacaaaaacaaccaaaaaaaaatcataaaccgtattttatgatcttaaaaatatttaaaattttgtaaaaccatatttttataatttttttttttttttttgtgtatttttgaaataatctgtttaaagttgtcaaacttgtgacaatgacaactcgttcaaagggtatagtatttgaaatatatataacatgaagattatattaacttttacatattctttaaacaatttggcatagtaaacatgaaagtgacatattgtctcagtttttttagggagaatgatattcaaaattaaaagacaatatttatcatacaaaatggattaatagagctgtgttcaaagaagggtagaattcatcagaatctattttcccacttaataagaagaacagatcatatttcttccataaatgtttaattagaagaaagcattgcccccacttaaagacacagctttagcagagagcatatactaacccatagcatacttctgagtccagcttcttgcagttgtctcatacttattcctatcagtcttgtacatatgggcgatctcgggtaccaacgggtcatccggattgggatcggtcagcaacgaacaaattgaaagcaatacctgaaaattcaatggtataatttagcatttggtagtaccaaaaagtctgtttcttgtgcatagcataataactttcgtgactcgtgatatgtgtaagatagcttcagctaaaaatgacaacaaattgagctagtggatagacttatttccaagtttttctgtaataaatgaaggaacacgtgaatgtgatggtccaaccattaatacaatcttgagtttagaatgaggacatagagacatttgtaaactttaaatgacttaaaacctatatacactgaattggagcagatttgtacttggaacaatcagggaatgtggggcaatgcaaactcattatttctctttagccatgtaactgtgggaccaatccaaactcacaattgtgttgtgccataaagtttcaagtgcatgtgacagaaattttaccttggatatggttaaggcagggctccactgctccttcagtatatcgagacagatactaccattgctgttgatattagggtgaaagacctttgttctgaatgcaacctgcaaaaaacatctccagagaatcgccagattaacaaagtcacgtgtttaaaaaacacaatattcctactcgaaatttaaagtatcttctcatagaatttgttatctgcagacttcagatacaacactattatctttttatcagactttcatttacagttattgacccttatacactagtaatttccactacagttgaggaattcaaggcctatactactcaactttctcctcaagaacagttgtagttacaaattccatgcaagataataaaaatcatcctaggaccaggatatggcgataagaaaaaccttggtgtgcgtgtgggaaggaaaaaagtacaaaaaggaaaaacgaataatcaaaagatatcattgatttgtcccttgaaacggtaaaaagagtaaagcataatttaagtaccttcggtggtttaaatggatagtctggaggaaaatgaatagtgacaagaaacactcctcccgcatatgggctgtctggtggacccataattgttgcttgccaatgaaacatgtcttcggctactgggcctaaacatgaacgagcacaatcaactttggcatatgagattaaacattcctaaacaaaatatcaacatttgtgtctacacacagcatagaaaatatctatttttaaattatgcacagggacaggctaaattcaaatcataaaacagcaactataagcattaaattaaaaagaaatagtgagaacaaagagactgtagtgtactttactagttcataaaagaaaaaagatacaatgattgacagttcaacaccgcagtgatgcaaatattctatattttgcattggaaaaatcagcaatttactgtagtccattataaaatcaaacacattgtttggcatgagaccaaatgctataatgtgcaacaaccaagtgcagtaaaaatgaggttctgcacaaacagaatcctattagctttgagtcgctacagtaagagattcatatgacttgaagattatagtaccaaattgtaattttagcttgttctgcctataaactgttgatggtccgaacttgaacttcctgtaaacttataaactgagaaattcttttgtcaagaggccctatattagaaagttctgattttgtacaaaattctatttcggtatcctctacatattacaacacaaaggaacagttctatttcattagctgtgtcatcatttaatgcaactctaaatatagtttaaaattaaagaacaacaaaatcaaatatacaaatatataaatcataattcatagaaaacaaaaaaaaatcaagaaaaatagcaatgacaaaacacctagtgaaagtgtgactgtaaattttatgttttggtattcccagcaatcaattcaacaaactaacaaccattaagcaatattaataacaaacaaaacatataactattatattaacaataaaattaggttgtgtgttgcagttgtacccctataaattaccacttattacacttaggtcctggaaagcaatttctttagcatttcattaactttttaaggctaattaagatttttttccccatgaactttgacatgtactaaatcatatcctctgaactttttaggccattaaaaatttcccttaactattgaaattgttagatttaaagacttctgttcaattttattcaattttactaatacgatgattatccatatactaaatcctacccccaaactttgatatctactaaaccatgctccctaaactttcagaagtacaaaattgtgtcccttaaatttttatccacgtcagactttgtttagtaaaattggacaaaaattcctaaatttaacaatctcaatagttcaggaggaatttttaacgacctgaaacgttcaagggatataatttggtacatgtcaaagttctgggggcaaaaatcaaaattaaccactttttaaatttataacttagattctaaaaaacctcattccgttaggtttttctgtcaatagttacacttttcacgcatgctactagctagtttaaagccagtttatttcaatactaaaaatttagggcggtaccaaataaactcattttttctccgttccttcaagtattaacaactaagcattcaaaatgaaattttacattagaagtcaagttgccaaaaaggcacaaactagtgtatgaggcaatttcaaacttattaagattgaataaacataaaccctagtcacatcaagtacaaaaagtgtaacattgacgaaaataaaggatgagaaaggtaatataaaatgttagggacttcaaagctaaaaatagtttttaggatctaattataagtgaaataactagtacatactatacaaaaaataaaaaaaaaaaaactatgtcaaagggattgcttggattcatcattgatttatgttttttgcttacatataaataattagcaaaattatcaaaaaaagatgtattaaaaaatctataatatgcataaacacgagtacataatttagaaaaagaaaaaaaaaatcaagcattttttttttaatttaaaaaagtgaaaaacaaagacaatatttctttcattgtaaaatttattttagacaaaaaattgaagggaattcaatcaagccccaaatgtttttctatacattttattttgtcatatttataatctgtccaaaaacgaaatttacgggcacttctgattaggtttttttgactaagtgagacaatgtataataatatcctacgatccaggcaaagaatttggggcaattagctaggctaggctaggctttactcagctgaattcttatatctcgttcttgcattcaattctatcatcaaaatacacaaaaactcaaatgaaaaagaaaatctagggcaacaacaatcaatatcatcaacatgcagatacaaaaacacacacagtactggaccctaaatcacacacagtacaatccgatcaccgaataatttaaaagaaattgaacgaaccagcgctgcaagaggtaggaggatccttttgaagatccttgagctctttcaagatccgcttggacgccatggctgcctaccttgctgcgattattaggatattattcaaaaaagaaatcaatcggagaatagaaaaaaagaataaagagagagagaactgacctgagctgagttgagttgagaagaagagatcctcttcttcgaatcttcttcttctttcccctcaatgctttcttctatatatatatacttattattaatttctttcaaaaatatatataatatacttattatttaattaataatttttcaaaataatacttatcatgttattacatcttcatcttgtaataaataaatagtttttggttaactttatattattagttcaaaattattttaaaattaaataaatttgtataaaataaaaaataaaatattttttaattatttttaaataataatattaggtgtataaatataaacttgctacatgtgtaagagtgtacacataagcagttcatgttggcaattaactgtaaaaaataaataataccttaaatttgctaacaa

SEQ ID NO: 63993 - DNA, 692 bp, Cannabis sativa
ctcttgctgcttgtttgggaaagttctagcgcctatggtggtggatgaatcaaacgtgaatgaatttgtggccaaaaactggaagattccagtctctgttgtggctttggtggatgaggacaagctgtataatgtgtttcagttgggtttcgagtgtcctgatcataggaactgggctcttaacaacgggccgtggtgtgttcgtgggtactccctggttctgcaagcatggtctcctacatttgatggtccgactgcttttaatctcctgcgtgtatggattcaaatccatcaccttccccaagagtatttttccaaagagaatggcaacctgctgggggcattggctggaaaagtggtgcaagtagagttagatgaagaaaagccagcttcttggggtaaatttctcaaagtgcaggtggatgttgaggttgataaacctcttttctcaggttgtttttttgacttagcttcgggtgtaaagaaatggattcaaatgaagtatgaaaaaattgggatattctgttatttttgtggatgcctggggcatcaacgtaaaggttgctcctttacaactccggtgacggtttcgaacctcgatggtatcccattccctatgtttggcccatggatctctactctatctgcttaccaaagtgtgttctctggcatgttacctggtgcttctcgta

SEQ ID NO: 63994 - DNA, 813 bp, Cannabis sativa
ttatttgaattcagaatgcatttgtatgtcatacataaaaatttcataattttgcatgttttgcgcccggctacgttggaacacggtgtttggttattagaatcacatcctagtatttttagtatagcgggacaataaaattagacattgggaatgtcgagattagtagtgttgaaatgaccattttaccctttaaccattttgttgattaaccttgtggggaagggtattttagtcatttacccctttatttggtggttgaattttagagtggcagctggcaacaatatgttaattaatctaagtgtaatattgatttattggaaaattaagaaaattagaaaaaagtcgtaatttgattttctctctttctcttgttcgaaaccctaaggaccagcagctttgggagtgttttcttgctgcaatcagagtattagatcaagtgttagtgatttccaagccaaggtaagctcctagtcatttcttctttagttttcttaagttttaagaaattgattttgcatgaaatggagtgtatagttgttgttcttgctgtggttgtttgttactatttttcaggggataaattatgtttaaataagttgatttgagcatgttttgttaagtagtttgttgtttgagcaagctttgagttttgaaactcaagcttggctctttaatggtgaaattcaattctgaacttgggtagttgttctattgcttgggaaatgttttttggggtctaatatgaaggtctggaaggtttggatttggttaggatttagattcttttaggttttctgggtaaaaccg

SEQ ID NO: 63995 - DNA, 1626 bp, Cannabis sativa
tcaaacataattttcgctccgagacaactagtagatgagagatacattctatacaattttcaagtctccttcatcgtttttcatagtcggcctacagtgatagagtgtcatgcccacacatagcaagttaagtactcaattatagtaggtaagacggtggtaattaacccgaaggagagaaagtagcgagatccaggttcgaatcttagtaataccatgcgacagaatgaaataaggattagaaatctgagcggaaggagtcatattattccgctgcaaccaatctaaaatattttatactcttatatgtttaatttccttgttttaaagatattcattgctgatatgatctaattgcctctctacaaaatagagactttcttttttaagttagattaatagtgaattagtgactctgctttttttttttttcaggaagaaactactttgcatctcttctgtaaatgccacattgcgaaagggctctggtttgagagtaaatgggggctaagaattgagggcctcaattggaattctgagtaggattttatcctctggtttgtggaatcaaatgatgcagattttcttttgtatggggcttgcatttgtgatacaatttggagatgtcgcaataataagttttttcgtggtgagaactttgacctgccttctttaaattcatctatattaatgcccgctccctagagttccaaagggatttaggcatggatttgaagtgtcagaagaatgtgttggaggactacccgaaggcgacaaaaatttttcaagagagctctaattttgtgttgaatgtggatgcatctttcgctcagaacgaagtttgaattggagtggtttgaaagaacggttggagatatctcatattaagacatttaagtgctatgcctcaagcgctttcaaagtggagctcttggcgattggggcaagactggagtttgccattcagaaaaactagaatatgatgacaattaagtttgattctcaaacggcgataaaggctttgtttgcaaaatacttaccttttgggtggggttcttatcagattgtcttagattatattaaaactttctagtacaatgaatgtgaattttttatttgtttccttgatgagaactgtgttgttgaccattttgcaggttgggtaaggacttctttatcttgtgtccaaggtatgattggggaggtagtcccttatgtggctactaattttaatgtttaattcaattgactgatatttacccagcacaaataaaaaaatgctgtttgtacaaaatttattgttaatatttgtatggtttttagattttatttacataaaatatattttttttaatgtatttttatgtagtatttttattattttgttatttatatattattttttatgttaatttttttattactttcctatattttttttttatttttataaaatttcttaaaaatatatataaaaaaaaagctttgaagatgaaataaagtaaaacttttataaattagtgtaattatctcttttttataaggaataattacataaggcactattttttataaaatatttacatttttacgttcaaagaatatttttttatatttttacgattt

SEQ ID NO: 63996 - DNA, 532 bp, Cannabis sativa
atcattatacttaagtagtaaatttatgtaatatcgatcaataataattataatattctctaatattataattattaattatattaattttaattgattttattaaaaatcaacatttagtttaattgacaaaatattctaaatatggtcaatgttgtttagttacttatatttaatttgatttagttgctcaaattaaatttttttattaattgttaaaatattatgacaattaattgtgttagatatcttgatagaatgtctcgattcctgaactcactactcattttgtgaaacatacagtaaattcatctaaaaagagtagagatagcttgaaattctgattacccacattaatcagtttatttttcttttgcagatccaaggctcgtgtgagattgaagcttaagaatcaataactgaaggtattccaatccttttcgttatatagtgtgtttcatctattcatatagatttctagcaaaaaagagacagtacgacatggttgtgccacccaactttggagacaagc

SEQ ID NO: 63997 - DNA, 2935 bp, Cannabis sativa
tttttttttaaaaaaaatagagtacataaaaagagagatttttttaaaaaaaaattaaaaaagaactaaaagaaaggggtcaaatttttttttttttaaaaaacacatgagatgaaaaataggtaaaaaaaaaatcacagaagacaaaaaatgatgtttccttttaaaaaaaaatggagcaacaatactcaaaataaagtgagatttttttacaaaaaaaatatatatataacttttttgagataacatacataattgaaagaaacattgagatttataaaaaaattaagaaaaaaaaagaggatttataaaacaaaacaaaaaaaaggacaaaaacaaatcgttttttattcttattacatagtaaatatataaaatcacattaacatctttgatctaaaaagatgtatgatttacctaagattaaattattttaattgttgggatttttattttcttgacattgttgaaaataataatcataatttcattaaactaaaaaaatatctttagaaaaataagactatcatctatctaaacaaattttatattcatagagttgtaatccataaataatataacactcttaaaaatattacaagcttgtgaaaagtacctttacaaaatcaatgtcaatgaaaagatattatcatatatataaataggaacacaagtgttaagcaataaatttggtgaaagtaaaaggaaacttacaaaataaagacaacgaatgaaattaataacatcatcaaatattaagtaaaaattagaatataaaaatatagaaatggaattcaaaatattttaattccatttgccaaaaaaaaaaaaaaaccaaatgactaagattaatgttgatatattaatgattaaattatgttctttttctaacaaatttaattaattgagaaccaaatttaaagatgtgatcactctattccatctactgacatattgaactgtttttggctggaaatatattttcaacaattaattaaccttattaatattcatttaagcaaatcaaccaattcatatgcatgaactatgcttttaaaacacgttactcaatactcgtgcatgcaccttaattatattattcatcactatttaacaatttacattttaatatgttttattatacaataattatatatagataaaaacattaataaagtgaactattttcttagttattatcttcagatttattgattgaaaaaaaaaaaaaacataagagaaagaatgttatattgtgaacggacaacaaaaaccaaaatattcagaccaatattgtatatatttatttatatataatatatattttttttttgtagcaatatatattatatactttgataaatcttaaatgagtaaaaactgacagatcataccataaattttttagttttaagtttatacatttgtatgattttggtatacaacgtaccgaaaattaggttaagcaaaacaaattttcttgggttttgaggaatttggatagccagagtgtattttaataaaagcttaaaaaattagaccttgtgtcactataactattaagtcgtatgaaagacagatttactatactaatcacattatgagcaaaaacccatttgaccacattatgagctgcaaaattacataatttaaaaataaataaaaaattacaattagtcaaaaggtttgagaacattttacgttgaagcacatagttactaataccccaaatagaagtagtttccttcagcgtgttgatcaccgtctccgaatcactgtttatcatcagaaacgaatgttttctacgggtcactgattctagggctaacaaacaagctgcagcttctctaatgagaggattagatcgaaattgagaatgttgctaactatctacaaaattggcttcttataatttctcgccaaggttaccacgtacattagtcactactaactttaacgctacagttgattttgatccaattatttaacgagggaccaaataagagacataaacatcaccagcataagaaacaaataagagccaaaatctatgtaacttataaaactgtagtcaatacattgcttaattatgtattgactatattttaattttttctcaataaatctcaaaggttagacatgcaacgcatgtttcaaaaaattccattgttcattttgctagatgactttttccataattaattatataaattttatttatttagttaattgttcattttactattgtctaccattaacctaataaaacaagctatgtacctttattggtacttgtaaaccagtaaagtctttctttagtgtaacaaattaatcagactttgacatatgtagatatataaaattaataaaagtaggtctctttatatattctaatctaaagggacttgttgtgcagtactgatcaacatattagctagtcagtgcttcataattatgtcaaaccataacaaaagaataatattcattatttgtttcaaccaaattctgtcttctcctgtaaatatttatatatttatatgaaatttatgtagcatattagggttgttttagtagatttttttgtttcggcattcaaaatttttttttgtctgattttgatttttcttttttttttttttttttattaagaagaagaattagaagatgtgtattttttttgtatctgtacaacaagacataatcgcctcaaactcctatgcaaactacaccagattgaaacttacaagtttccaaaccaatatgactatcacatcgtgtaaaacttttaggtacgtaagataaaattgattttattctttacattatacttgaatattttttttaataatcgcctacgttgtaattatttaagattattttaaatttttagaaaatttagcattagaaataagaatgtaaatagatcaagtcatga

SEQ ID NO: 63998 - DNA, 1136 bp, Cannabis sativa
aatattataacaagttattacatttggggtaagtaacctatttttattttatttaggtttaatattttattggtatgagagttgtcccaagctagttggggccttaggtgaataaaatggagaaaactacattatatacttttttaaattgatatatttaattttttttacttcctcttttaaaatctattatgtttacttatttttcattctactaattttacccctatcatttcacgataatctccattcttctcaaactaaaatttaatctcaactttcctacaaatctacacatctgtctccaaagaagatctatattatgtttgaaattgtttcttggttagttgagggtgtgacagtaatttgggtacaatacttataaaaaaaatatatttaaattaaattttatttagatataaatttggttaatatataacgaaaaaaggtattcttcaacttttccttaaaaaaaatgtattagttggctttgttttgaagaaaaagttttttgtttgttcaattttgatattagtgttaaaaattaaaaatggtatttttagaaagaattattctggtctttttataaataaaatattaaatataatatttctgaaaaacaaattacatctttttttttaaaagaaaacaattcattttttagtgaatattggtaaaattttaaaatatgatatttttgaaagtaaatttgagacttgtttcaaaattaattgttgttgcctaagaatgggtcttgggcgaggacccagcccagcccacccttgggtcgatcagattgttattagctttaacaaataattttgacaatagtaactagctaccaccttcaataaaatttaaattaaaaaaaaaaaaaaagaaaataataaactagctaccattaaaaattatattaatagtggtaattttcttttgagttatcaccatcttattaaactatgctaatgatgttattaagtaattcattgcattacttttgttattaatagtgtgtgagttcataccataatttttgtatattactaagaaaaccaattagaatccaatctaccaacaccaatataattaatagtgttatatgagttcactccaattgacttggatttgacacaaat

SEQ ID NO: 63999 - DNA, 936 bp, Cannabis sativa
aaaaaaaaattccgcaaatgcatcagatacaaaataatggcttaaaagcaatggagatggcttaaagaaaggactgcattctttcttcctctgcgaggtgggtgaaagtaacttctgaagcattgcttttctattttgtctcaacgaaaataaataaacaaacaaccacatggtacctcattactgtaatcgaactgaacagtattgcttagagtacactcgtttccttaccaaaacaataaataaaaacacctactctagttttgtcacttagcattgttattaggcaatagtagtacctaatactttttgacatgtcgttttgcgattatttagcgatactccctaaaaattattatatgaggcgtgatacaccaatagcaatattaacacataatattagacaccactaatactttttagcatttctctttgcgactctttaatgttttcatctcacttgactggtcaagcatttccttctctacatggtctgatgtgaaattctaactatcagcactgctaccaaaaactaaaacaagccacattaaaaccggctcttctactaccaaaaactaaaacaaaccacattaaaaccagctcttctgctcgtatgaaaaatctaaaggattaatactattttaaatcttatattttataaaatttatttatcggaccatctgatttgttaaataataaataaatcatgtattttataaatggtataaataagactttgaccttaattttcgataatctcatttaaatataaccaacttgaagataatttttaatacgaacagaataaacgtaatcagttttatcataacacctctagatcgaattatcattaaattttattttaacaaaaaatcaattcaagatactatgtagtattattttggaaaatgtaaagtccaatttgttatttatcaa

SEQ ID NO: 64000 - DNA, 4411 bp, Cannabis sativa
cagggaccagcaactaataaagagtattcctcttcaagctcccacggctttggaccacttttgttggactttggagacatctgggatttactctgttaagagtgcatatagattcttgcagaaggagaaaggttactggtatgatgatccaacttcaaccttctggaataaattgtggagtttgaaagtcccctcgaagatagcgaacctgctgtggcgtgcctgtactgaatgtcttcccacccttgttcagcttcggattaagagggtggtaagttgtgtcctctgtccgttgtgccaggccgaagaagagtccacaatgcactgccttgtgacttgcacggtggttcaggaatgctggaatcgcgtgggaattggtaccacgactacaccagcaatgtcttttctgcaatggtgcagcagcaagttccaagttttgagtggagaacagcgatgtacaatggcagcggtctgttgggctgtttggggagcccgaaataatcttgtgtggcagaaaaaagtctttaatcccataaacgtggtcgcgtttgcaacaaatatcttgatcaatggaagaatgctcgaaactccaatttggatacgtctcggtctgaagttcagttcggcgatggtaatgagcattggacacctccaactggtagtagtatcaagattaatgtagatgcggctttgttcgatggtggacacaagtatggtataggaatggtggctcgagaccgaaatggctttctcgtggaagcccgtactgttttctcacacgacctggttgatcccccccttgcagaagctataggtttgaaggaagcgctcagttggattaaggaaatgcaatggtaaaatgctctactggaatccgactgccttggtgctattcaagctactcgtagctctttaaaaatgctttctttgtttggcttagttattcatgattgtaagactttgattaactctattggtaatgtttctgtttcttttgtggaacgatctgctaatgtagtggctcatcattttgcgaaggctgctatgttactccctgatcgtcgtttcagtttggaggatgttccaactgatttgctaccttgtttagtagttgaagttattggttaataaaatattcgatcattcaaaaaaaaaaaattgatgtgactagaaattatttaaaaatgcaatttccatgaattttcctcaactctcaatcatatgtgtataattaatgtgatgtgatccaaaaaaaaattttagctgaaaaaatgtgatcaaaactattgtttccttgatgcttccagtgcactacactaataatgtacttacttttctcgtttcttgtaactttgagaaggaatttcgaaacaaatggatgtgtaacatatacgtttatatagatacatacaaagacttttgcgatttaattgaatattctagtcaatgattttaataacattaattttgttatatattatttgtcgtatatatatgcatggtttttattttatacatacaaaactttttttttttttttttttttgaacaaaaagatcacaaaacttttaggtacgaattttgcacatttggtaataaggtattctatatatccatttttgaaaacttttaagaaatttatattattaaaaataaaattcaaacaataattatatgcatatcttattaattgattattttgttttttattttttacattataattaaattattcaaataatttcagaatcactttaaatatttattataattactatacataatatcatataaaaataataaaaaaataaattttatatgttctgaaaataaaaaaacacccctaatatataccttagaaatagtcagtcaactgtattagatagtacacaatttaagaaacaccaacttgcacggtaggttttagcgggactaaaattcttctatatgactttatgttatttatttattttttaatagaaatgaaaactttattagtaagaatcttcaaccaatagataataattcagctagagtattatactcaataaaatataggaaatggataaaaacaagagctacgagcgatattatgagtgtagttttatttacagaacgtttaataaaataaatctcaacagactccaaagaagctaagataagcttacaatatatgaaccaataaatcaggtgacggcatatggccgatagagctatgcaaagcttggacaacaactaaacaatcgttacaagttgtactcccatccaaccctttttttatccaacttagagcctctttgatgccgacgatctcagcaataacaacatcaacacaacgaggcttactaattgaaaaagcctcaataagttggccatagcaatcacgggccacaccttcagtcccataccaaccttcagaaacaaaaatagcactatcaacattaactttaatcttatttaaacccgctttagaccaatgctcaagtcccgtgcctgaacctgaaggaaaaaataataaaccatgccttttagatcgagcaatgtttcattgattaagagttgttctagccaaaagtactacttcagaagttgtaggacactttcctcgcctaacgacatcattgtgtgtaatccaaacaaccatgactgcttcctttcgaactgttgcagaagcacgcgctgtagtaaaccagcaaagcagccccaaaaatcatttcccaacaaactttcagtgctgatagtagagcaattccagtaagcttttgcaaaggagcaagaaactagtaaatgaaatatagtttcttctgcttagttacacattagacataccacatcgactggaacatgtttaatatgaagctgtgattttgttgcaagaattcccgacagtgcacgccacataaaatgaagcacttttggagggacaaaaagattccaaagtagcttccacatagccacatcatccacatgaacttgtaaagagtaatctttgtgaaaaaatttgtaagcttattccttcaccaaataagtgccataaatattaaaagaccagtaccaaagatccatggcaacaaaacttatttgcacatttaaaataagctcacgatccctaagaataaaaatatcggctataacctcaacatcccaacttctacttcccacaatcatcaacctatcaactgtacaaccatcaagcccaaccaaatgagaagtaacaaaaggattattcttgtccgggagccaagggtccttcaaaacattaacagaagatctagggtcaatattacatctcgcactagtcttaattaagtgctgagtctcaaagatgccttcccaaataaagcttgggttatttccaagttcagctgtgagaaaagtacctcgaggataatactgagccttgtatacccaacttacatgaaaagaatcattcacttaattattatttcttaccaataatatgtatgtataaaaaataaaaatatataaattatatattattattggatgtgagtttgtgactataggtcgttacacctgaaagtgttaatttcagtttctatccagaaaatcggatcggatctaatctgatccaaaaaaaaaaatcgagcggggcggcagagcggatctgatctgagatccaataagtatctgaatatttcagatgagaagtgatccgtcagatcagagctccgactcgctccaactaaatgaatttttttaacatgcctatctgaaagagagcatccttaacttcttgctcaataataggcagtaataaagaatctatatggaagtagtgatagatggtgcaatcccgttaatcacaagagaagaatcactagatgaactagtaaacaaattattaaaataatcaacaacctacctctgaaagtcatgcatccccattaacccagctatcgtttcccctttgcggctcattaatagtattagaacgtcagtaagtagtcgctttagcatgacagaattactattttgatcaccttcttaaagtcacgggttctttgaacgttggcaccaaatatctcctttcgattcagctcctcaaaaagattagctttagcctctttaaacttctgaactgatgtagtatctcgaccctttttgaacttcttggcttcattacgccagaatttgatttgctccgcaaagtttccacgatagtatttattcaactcgtataagttagtaccgcaaaactgaatttatcttgaataccagtcatagaaggctccacccaattgtctttaataacttgtaaacacattggctcgcgtagccagaaattttcaaatctaaaccttctctggcctgggataataggaatagaaagaggatcaagcaatataggagaatgattagatgaggtcagtgttgggttttatgccct

SEQ ID NO: 64001 - DNA, 732 bp, Cannabis sativa
gttataatgtcttcgacaaagaaagatatggataggatcaaaggtccatggagccccgaagaggatgaggccttgcggaggcttgtccagaactatggcccgaggaactggtctctcattagtaaatcgatccctggtcggtccggaaagtcttgccgtttgaggtggtgtaatcagctttctcctgaggttgagcaccgaccctttactccggacgaggatgagacgatcgttagggctcatgcgaggttcgggaacaagtgggcaaccatagcccgcctcctcaatggcaggactgataacgctattaagaaccattggaattcaacactgaaaagaaaatgctcttctatgtttgacgattccaatggtgatgcccaggatcagcagcctctcaagagatcagccagtgtcggtgcgggtacagtcgttacgggtgggtttcttaaccccggtagtccatccggatctgacttgagcgattcgagtttacctggaatgcctttaacacaagttttcacacccctccctttatcaggacccattgctccgttgagtcatcatcatcatcatcagattgatacttcatcttcagctaccgatccacctacttctctcagcctctcgctgccatcttccgattcatccgaagtatcgaatcgcgggtctgggtccgcgttcggatcggttccggcatctgcgagtccgacccagactgtaccaccagctcta

SEQ ID NO: 64002 - DNA, 981 bp, Cannabis sativa
  modified_base (949)..(951): a, c, t, g, unknown or other
actatttttttttctaatttttttctcatttttaatctacattactttttttaaaaaaatctacattaataaataattgaaataaaaatatagcataataactaatataacaactaaaaaaatccctaactaatggtgtatatagtttctttctaaaaagatccatgtatataataaaatggcaaattaaccttcacggtaaaacttattaattatttgtatcaaatattttaatttaaaataatactaataatagtaataataaaatatgaatgtttgaactaaaaataattaaaatattgacatagtgaattaatatatatatacatatatatttacgtcacctgttaataatactaaatcaatatctataaatatatatatattaattctctatgtatataaaggagagatatgagacggtgacatgacgcttcaaaataattttattctactctattcttttctttttcttttttttttcacattttcaagaaattgaatattaactcatccaaaaataaaaataaaatttgattaatatcaaattttaaaaagaaatgtctaattattattattgttgaccgaggttatcgccaaccaatcaaatgagataatgatgagagattttgggataattaatgcagatgatttttacgtggttcgtgcattaataagccgtagtccaagagtctttgttattaatgagagttcttatacagagaatattcttggtgagtttctctctctcttcgatcgatccccgattcccatttttctcagaggtatttatagagattggtggggatggttcaaaagggataacttgtctttgattgccaacattgtatgagcacaagttcccaggagatacaaaaataggacattgataacctatgtcgtaggtatcttaggaattaggtgagattaatctttatccttccttgannnatgtgattcttcataatggagccgtcacta

SEQ ID NO: 64003 - DNA, 1380 bp, Cannabis sativa
gtttctcttggaaactctatataaggcttgctagtgagtccattatagtcaattatacaacttaggacttactatatgtcttagtagtaagggtacttaagacggtacatggtcgatgattggccttgtatattgtcttttacttgttggaaggtaccgttgttgggtactgctgttaacttgaatgtgtttgtagctttgtcacgttgcttacccctcttatttcttccatgcaggtagcactaggtgttgaataggggaggtgacagccgcgtaggtccatgttattttgtaattatggccagcacaaagtagactggtggtatagtgactctgtgcgacccccatgcggttaggttggctacatggggtcgagttgagacagtagaagatgctaccaaacctcatgttgatgttagccctaagaccgaccatagagatgagagtcccaatgttggatttgatctcgaggaggccgtactggttaagaggaaaagactcagaccttgtgttgtcctctccagctgtcctttggatcattatgatactaatggtaatccgctgaacatgctgggtgagcctttgacacttggcttggatcatgtctcggataagtcttctgagtctgagattctggatgcgagttcacaaagaaataagtcgttttcccctgtatcttctatctcgacagatagttttgagagaatgtaggctaatggactagtggtcggtatccattgtaagatacctctataggatcaactaccgcatagattggccctcaattggatggcgtcgtcagagtaccacatagcaaggagccatgctacctctttatccgtacttcgatgatgttgttgcttatttcaggatgttgttgccacgtgacaatttacttaacacttaacaactatatacctacaaaagttccagaaatagaacatgtactattattgtcaaaaattaaatttaggtatttatttacaactagaagttaaatttaagaatttatgccgcaaattactctttaaaataaaaccaaataaaggaatataataaaaattactttctctccattccatttcattacattccctccaactaaacaccaccttagtaaatttagggttaaggttggagatggggtaagtttttatttttttcatttacatatttttttttttgttgaacgatactatatttcaatttttgagcaaaaaaaatacagtcttaaggccattttcaatagcgcggtaagaagttaaaaacccatatatgctgttgttttttctccaatttttagggggctctactgtgtcgcactaataatagtgggcattgtaaattacgatatatattttttaataattaaataattta

SEQ ID NO: 64004 - DNA, 1309 bp, Cannabis sativa
aggaaatcaattataggatatgctttcacagtcttaagttgatgtgttagctggaaatctaatctccaaaatgtggttgccctgtcatcaactaaggctgaatatatggctgcaacagaggccataaaagaggcaatttggctcaagggtcttacaaaggaattggagttcaaatcaaatgaaataataatgaactgtgacaaccaaagtgcactgcatttaatgagaaatctaatattccatgagaaggtctaaaaacataaatatcaaactgcacttcatcagagatatcataatagaaaatgaagtgtctatgaagaaaattggaacgaaagagaacccaacaaacatgatgaccaagtatgtgagtttagctaagtttagactttgtctaaacttgctaaacatcctcaggtaagtccagtccaatcccaagtctctatgactaagtcctcacttaatgatcaagggagataattgttatgtttggtcactaattaagggacatttcctaagctacccatattaactatctgttatgacagttagaaccagttccaaaccttataagctataaataactactcatttgtaattctaggcactgacaagaggaaatctgagagagggttagtgagctatttttgagagaaaaaaagaaagaaatggaaggttgtaatgacatagtgtgtatctcatcactatagccacaagtgaggataaattgtaattgatgcaaaacttctttgagtcttgagttcaagtattcattgagtgaattgattttaatccaactctattcttagctcaataaagattctaaagccattggagttgttctggctggagagtaggctggtgatgtaaactttatcatcttgtttgaacttaattaagatttgatgttctattttatgtctcatgtattttgttaaattcaattcatcattttccttttagcatcgcacttgttctaattcacattgcatggtcttgtgtttttatgaatcacaacactaactaattaaaagaatataaactttcgtagcatatggttggccttgaacggtactactactcgttgctttacacaatgaaaattgctaataacattttaagttggtcgatatcacgataaatattatataatttttagtgtaatttaatatagaatcccaaatatattttaatactaacctctatttaattttaagtaaatactattttggaccttatattttgtaaaagttactaattcgactttctattttattaaatgacaaaataaactctgtattttctaaaattg

SEQ ID NO: 64005 - DNA, 1015 bp, Cannabis sativa
aataaataaaaatttattttcaaaaattttaaaaaaaaaattaaaaaattttaaatttttaaaaaaaaaaaaaaaaaaaacacaataaaattttgtcactaaaaaaaatagaaagttcccgagcaaacaatagtgttatcaataatttatttagactttatatttttacaaattttatttttgactttaactatcagattacacttaaaagttaaagttaaaagcaataggggtgcttatataattagtaatttgtgattttaaacctcaactaatccaaaccatattatttgaaatttagttaatttagaccgtttaaaattctctaatttggtcacgaccaaatcaatccatataattattttatatacttaatatatatatatatatatatatcttttagacaaaatatgttgatgtatgagaataatttttttaagttaaatattgatattgacttattgttatgataaaaactttttattattatttatgtatttatttgttatgttttgcatagaattctctttattgaaattatttaatattatctatatttgatcataattgattgaaatcatcattgattaatatcttagtataagttatcatttttaatgcatttccttataaatcaatgtattttggctattgaaaaaaaaaaaaaagactacaaacctatttaagcttccatttttaaacttttcattaaaataaaatgccaaaataaaaattttaaaaatttattgtcatagttatagggtccaaaataatataacttttttataattaaatatatatacttattgtcaggttgtaattaaacatatttgaccataaaatcctaattaggagtgacaaacaggttttaacatggcacataaacacgaacacaatacgaattttacgggttagggccaggaaaattagacgcggatcgaaaacaaattaacacgacttggcaggaaataaaaacgggtcaaacacaacgacacgacatgcttaacacaaattt

SEQ ID NO: 64006 - DNA, 596 bp, Cannabis sativa
aaaccaacaccaactacgggtcgggtccgagttcgagtctcgggtcgcaggttcgggtcgtggatctgggtttaggtccggatccgggtctcgggttcgggttcgggtttgggtcccaatccgattccaggtctaggtctagatctggtctctgggtccgggtccgggtccgggtccgagtctaggtccaggtcccaagtccaagtccaagtccgagtctcgggtcccgagtctgggtcttgggtctcggtccgagtttgggtccagatctcgggtccgagttcgagtttggggttcaggtcccagtcccggtccgattccaagtttgggtctagatctggtctctgggtccaggtcccgatccaagtctaggtctaggtcccaagtcgaagtccgagtctcgagtcctgagtccgggtcttggctcggatctcggtccgggtccaagtccgagtctggggtccgggttcgagtctgagctcggatctgggtcccgggtccaggttcgggtctaggtcaaagattagtgttgaccccaattcctttgtaaatattataatacaagctaatacatactatttgttatgtattaaata

SEQ ID NO: 64007 - DNA, 1199 bp, Cannabis sativa
ttggagtcgatgattgaaaaccatttgggttcttaatcagatcaagctctctaactcttcacccgatcaagcttggtttcagtgttttttttttagcttctttaacacgatcaatttggggaggagaagggagtgtttaattatgttttctgggtttagagatctgtagtttgagtaatttttcttgtgagaatttggagtaattatgagattctgttatggtttgtagggtggtggttgcgcccatgactagatgcagagctttgaatggaatccatgggccgactttggctgagtactacacgcaaagatccacccaaggtggattcgtcatcattgaagggactctcgtctccaacaccaccaccgcaccagcattcattaaagccatatatattgcgatatgagattttgcaaagatatagtttcattaaactcatatatatgttattgttattgtttttaattattagatatatatatatatattatatacagctctgatttttgtatcaaccatgcactcttggtgtttgatgaaaagccgaaatgggtttatatatatatttttggatgagcaataattgagagtagacctctccgcattcattttacaatttttttgatagacctcagtttgtttataaaaggagggggcgaatatgataaaatagtctattaatatcagtcttattttttatatatactctggtctctcagcattcattttaattgtgcataggcaccaccgcaccagctccaatggcggaaatcacttcaccagaaaggatcactctgttttccccttacaacatggccaacttcagtctctctcacaggtaattcacccgatcaagcttggtttcagtatttttttagcttctttaatttttaagcccatatgaatttaataaatgtaatcactatatcatgactacattacacattgtatttatttatatgtaatatatatattggtgcagacaatagtatacttacattgtacaagagttaaagtggtacatttattggtggaaaatcatatatcctccggtctttagccttttattgtgtataaaaagataccacaataatatgcctctaaacataacgatgggaagtgatcaataatatcagatttgcctataatttgccttttgacgtgaacgttagctttcttctatctgacatcagaggtt

SEQ ID NO: 64008 - DNA, 786 bp, Cannabis sativa
catacgaaagcttcaaagttttgcgtcaaaactttgaggcgacatttcgatcaactccggtcaccatttgaaaaatggttggtaccgttgaaatcagtgtcgcgagaggaacatccccactaagtcatttcgctcaactcgttactttttctcgatgagatttgggtatctccgaccctttggaagcattttccagcgaattcggcatttgtttgggctaatgggttgtacatccatgttctactcatcaaggtggtcgttttgatatatactattcctattttcagtgatgttttcggtacactaatttctactgccaccgatagttaatgtgcgccgcttatctaaggattcagaactccaaactttaaatatagtcatattatatgtcgttggactcgattttgaatgtagaatgcaatgatgataattatttagtcgcttgatggtataggtgacactgatatctaaaattggactaagcaattggagctcgagacttgagagcttaggatcgttttttagacaaagtttaacgacttgagagaggtaaggactaaacttgattattggacttgattttatatgtgttgaataatattagacatattttaatttttataatttgtaaattatttgaaaaattgaaaacttaatctgcatatttttctagactattctggggcactgaaggtcaaatataattttgtacaaatatttatgcaagttatgatttttgaatttatttttattatttgcctacttttggttatattgatgagagcc

SEQ ID NO: 64009 - DNA, 1166 bp, Cannabis sativa
ttggattggatcggatggaaaaatccaatatccaataaataattggattgaattggatgggtccaaatccattagatgtgatccaatgaacactcctaaaacaagatagttatgttaattatggcaaatagccttccttggattctaaaatcattacctatgtcaagaataacttatttaattgatattaaacttacataattcaaaaataaaacaaataagacaattattaattattacattgtgtaatatttatcctttgaccagagctaataatataataataaagttacttcaatactaaattaataatctatttgaaaataaatatgttacagtctttattcttacacacacatatatatatttacatgcacttgcatgtgtttttgccactagttttattatatttgtgggataaattagccggcttaaggcgtgtcacactacacaaattatttatttattgacaattttcatccatttacatgttcttgttatatattatatgtaacatcatcacaagagaattaatatggcgtttgtggtggaggtaatgaaataaaataaaattaaaaaaaaaaaagaaaattttattctatttttttgtttgattgtatattaatactttttatacactttaaattttattcctttctattactatttttattcttatatttttattcctccctacctaaaatcattttttaatatatatatatagagagatattagctagagaagagagaaagagagtaattttgaatattaagatatggaaaacaatagtagtattattaaggttacaaaaaagttagtaccaacaatattattgatatgttctttaagtgtaaatgttattgtttttttaaagagtggaagaattaattttgatgaagaaaaagaggtagtgagttggagtaaaagggcagcaatagaaggtgagagagtggcagcaatgtcatgctctggccatggaagagcctatttggatagttacagcttattatcacttgatgaagaagatgatgatgataatgaagaaatgagtgttgtttgtgagtgtaatacttgctatactggctcacaatgtcaaacctttattccttcttgtcctgcaaatgcccaaaggtacacaaaaattactctctctctctctctct

SEQ ID NO: 64010 - DNA, 605 bp, Cannabis sativa
accaaaaagggcttgttcgactaagaaagtctgacatttgcaaggaaagttgtataaagaatctagaaaggttggccaacgcgtaccaagggttgtcagcatgtaccaaggctggccagcacgtaccaaggctggccagcacgtaccaaggctggccagcatatggaaaagctggcaggcacatgccgaggttgcgggaacaatacctagccggccataaaggagcatgtgtcgaccagtctcaaacgaagggtaggttggtcggctcccatgttggcagacacaattggtgtttctgcagctttcaccctggatacacaatggtttactctcaactgggaattcactccaacaacccacgaaagtaggggtttagcttcagatatttacctattctttaagaatagttaataggttcttttttgtatattttatatgtaaaaaagaggtcatgtctcctcattttaagatattaacctactttaaactagatctattgtaagttcttatctatataaagagcactaagctaaatgaaaatgggctaagttctaattcctgagttttaagttctaactctagaaatcctagagcacttgcactct

SEQ ID NO: 64011 - DNA, 854 bp, Cannabis sativa
aaaaatgtaaatattttataaaaaatggtaccttatgtaattattcctataaatattggtatttttataatatgcggtacggtacaatttaaaccaattcaaaaccacgaactgcaccgcaccgcgcgatttaggaaaaattcaaaccaaactgcatcgtaaagaatttcaaatcgcatttttttttacggtgcggacaatttgagcggtttgatgaacacccctatattaatcagtatgatgagttacactcactacacttataataaagatgtgtgcattcatccctttcagaaaaaaaagttgtgcattcatccctttcagaaaaaaaagttgtgcattcatctcaaaggaaaactcatttaacaattattgcaatcattatcttaaagcatatggctacaaacttacagttattaccgtttattggacatcgtcactgcttaaactcttcgatatttcacaaatatgaaggtcaggagagggccaatcaggcccaagaccaacgccttaggcccaaatgaaaatggacccttattttttttaaaataccaacttttctatactcaaaaaatctcatttagaaatattattttggaataaattgaaaaatacctctatttgtatccattaatcaaaaatatccttatattatattttattgaaatatactcacttttttgagtggattgttcaatataccttcactctctacttaagttttacctataatttacattaacttaaggggtctaacggggatataatcggatatattttaaagaatataaaaatagagataaaaattaaaacaaaaaaagtaaagtgaatatactatggtgtcgtttggtaac

SEQ ID NO: 64012 - DNA, 814 bp, Cannabis sativa
ttatttttatatagttatttatttattttctttagaaaaaaataattttacttaaaaattttgtgttcaatttttttatactaatagtaatagttaactatgcaaaattaattacttaagtatttttgcgaccaatttatttatatatacaatagttctaccataattatcttttttaaattaaggcttttaattaatacccacgtgtcaatgttgcgaaaacgcagataactgtataaatgagaccctgaattgattttttgttaaaataaaatttaataataacccaatccatgggtgtatgataaaattagttatattaaaaaaattatctaaaattgagcccaatgtcatatttttaccattttaaaaaatacaaggtctatttatcatttattaataaaataaaatgtttaaccagtaatttttgcaaaacacaaaatctaaaacggcatttggcatattattattagaaaaaacacttaaaataaaattaaaagagaaatttatgtagagccacgtcaattttatatcaattacaaagatgtggttcaaaattttattactctaattaccgttatattgttgaattattttgtaaacagtataatcaattgagacattaatcaatttcaatcactttgtactgtaagtttattttctttttcttttttttgctccattttttattttattaaatatgtaaatgaacattgatgagtttctttaatattaaaaatgctctctctctcttaactagtagctaaaattagtttttttttttttaaaaaaaaattaccctatatactatttt

SEQ ID NO: 64013 - DNA, 1257 bp, Cannabis sativa
aaagactaacaccaatatcacatacatgacaaaattcctatagaatatttcggttttttttttttcaaaaaataaaatattttcttaaggaatttttaaaactcatattagtaattcccatttattttgttatggcattacacttatttttaatctttttttttgaaagaacttatttttaatcttatttatatatttattatttcttatgattagttattataagaatatgatcttaaattcaaaatttaactttttttttattaaaaaaatcaaatttaaaaaaaaaaatgactacttttaattttaatctttttttattataaaaaaattatagtatgtagcttcttagtcatcttttagatttatattttcatgaaattttaacaagtaaatcatacttatttatttatttttatttaagtatttattgagctatttcagggttaatactattttaaattttataaaagttatcaattaattgagctcaattatagatcactctttgtttaccatactatctctcaacttatctattatatctctatattatttaaatattatgtttttaatatttttattaatcaaccataagaagaacaaaaatcaatatagaaaatcaaatttcaacctccaaattcaaattatgcgtcttctactaaacactaaaataagctccaaaacaaaaagttatctatgaactaatcaattaaatcccattatcattattaatataaaaactaaacaaaatgagtaaacacatatatattgttgttgtaatagtcttcacttttcacaaagtaactgaaaaagtttgtatattgaaacaaaatccatatgatctttgttcatacaagcttcttaaggtcaaatgtgaagccttttgtggatgcaaaggaaatttacgaacctccctacccaacaaattcccgtctctattttttgtgatatcgatttctgaacaccataactcgacatatttttctcttacaatctctgcccacatcacaaccaacctctcattcaaattcaccaatttagaaaacataatattctttctttccaatacacctttaatcggtttccacgtcttttttttactgtcgtaaaaacaaatttcctgatacgcattacccccgttgtcataagacaccccatccactacacaatcattttttgttcgatgatacgctaccaaattttttgacttctcccactttttagtctcggtatccaaccggtgcacttgacaac

SEQ ID NO: 64014 - DNA, 1359 bp, Cannabis sativa
agcaacattacccttcaaagagtgcaatgtaagctcaaaagactctctaccccaagagtactcgtcctgtctacaactattaatattatcaatacacaaaatacaagatagcaacctttaaagctaaagcatcatcatccccccacatacaacctaaaataacaactttaacaaatttttgagtaatcggtttaacaccacgaaagtatgagtcaataatgtagtttgattcctaaacaaacttagatttgttacaatctctcatacaatccaaatcgcacaccatgaccacaaatatttgcccaaaattccttgacattcgactggtaggcctctcttaacaaaatatcatgaacaatttgagggtaaaatttaaaagacagaatgtctaaaaatttaccaaattatgtagactggaacatggccttcacattctgggaaagattctcattgaacttcctactcacttcataattacaagtagacacaactttcgccttgtaatgatcaggaatttgcattcccattcttgaaagcaaacaaaaaaaaagtaatgaaaaagtagaatgagaaaaatatatccaagcatcaatgataatacaactgttacgaaactacaagcaaaccactaagaatcaaaccataaacatttgttaggaattaggcctaataccaacatgaatataaaaatacaaaaaaaaaaataataaataacaagaaaaaataaataaaaaatgtgatacatatatacataaaacaataaattaaaaaatagaacacaaacaacccaaaatacaaactaattgcatgtattaaaatgtttacataattgaaaaaacataaaaaataaaaataaaaataaaaacatgaaaacgacaacaaaaactaaacccttaaatcaaattagaacaataaaaccaacataaaacaaaaataaatgaaattttagggctaggagtaaaactaaaatgaaactacaaacaaaccttaggaaggacatttggttccttcattcttttctgaccgtcagatttggattaattttttcaggcaaagaaactttcgacttcttcttcactggtcgacgatcacttttagcaacgaggggagcaaaatcagagtcatttggatcacttttccctttggacttattagcaactgatttaagacctattttgaaagccttttttcgcaatggaaatagagaagcataagaacggataatagccattatatacacgaaatgaaagatacaaaataaaaaaaaaaattgaatgaaaatggatcaggcagttatataaaaaagttagagatggttattgctcgaaatggatatgattgtggggaagaatgaatttt

SEQ ID NO: 64015 - DNA, 1047 bp, Cannabis sativa
tcgttcaatgaaattagcatacacggcttgtacgcggaagaatttttcaattatgttaaattctactcaccaggactactttgtactttgtacctctattattgaatattcaattacaaaatattcttcctcatttatatagaatattttaatcaattattttggtctcccattatctgttctctatttaatttagttcatttccccttttatttttgttctcttatttcttcacttttggcattttctaaagggttaattgagaatttttttaaaatgtatatataaatattttattttaataataattttattatgaatatatatatatataaatatatagatactactgctattattagagagtagctcttaaaaatatttaaacacaactatgttatgaagtattataattaatatttttgtttcttaaatttacaacactattaaattataacctttaaaacatatatcatgttaaaaaaaaaaaattaatgatctcttctacttacaaagatattatacttttataaattctcattcatgtttttttttcttcaacattatttacttctaaattatgcctccttttaaaataaaaattaaaaataaaataatttttttttttaaaaaaaataaaataaaattactctaatctaatttatatcattggtcaattaatatatttactgttgatttaaattgatgtcgcccaattagttacagcaataaacgggctatgttgtatctacaaggaagtaaattaccactaaagattaatataaatagaaaatgatataaatgtgaatgaactaaaaataataaaaatgatgagataagaaagttgatcagataaagagtttagtaagatagaaatatagttatgcaaattttattctaataccgatattaattcgaacgcagttgtgattctacaccattaattacaaccggaagacatatatgttaaaagcacaaattaattaatcttgcataaattgaatctcacctctaacttgacagcatatcatattatatatcataaat

SEQ ID NO: 64016 - DNA, 1177 bp, Cannabis sativa
atatatatatttttaccagtagacatattctagcttatgatatttgttaaaggaataatttcatttttagtccatttcaatatttaaaaataaattgcacttattttttacaatatttttacataattatttattaaataaaaataaaaaattacaaataatcaatgattttttttataaaataaataattgatgcctattatattttagaattaaatcatcagtcacgaatccaattttaaacttaaaataattattttttatatttattttattataaaaatatatgtaactttttttataaattacactgtttttaatattcatcacaaaattcctatttttctacattacaaacaatacatagaaaattatgtttctactcttaaaattttatttttataatatattacacacatcaaaaagttatattttaatttaaattacattactcaataagtaaaaaaaattaatcaaaatataaaaatattacaaaaattagacaaccgcgcgaagcgcggttttattccctagttttatatatttaaaatattttatttaaaaaatatattaattgatttaatatatatttaacgcatgagaataagaaaaaaaaaactttagatctaaaatattaattaattctcatcttcttaaacgcttataaattatcaatgtgtattgaataaattttattttttaatttgatagttttattataagatcatgagaattaagttggactaaataactaatgtttattatgtatgttggattattaggttttaaattatgtttatcatatatttttatgattgtaaaagtttactatcttctttacataatgtaagtgttcgttttgttagacgatcagctaatcgagtcgctcactttgttactaggcgttttcagtttttctctgattgtagcattcatgggaacgttgttcttaatgagcttcaaactctcttgtatgatgaatgctaaatttcaatgaagttaatatttcattttcaaaaaataaaatcaacttaaatggtatttaaaatggacataaatggatccaatccaataaaaactaattaatgcatctaataattaaaacctatctaattcaatacatccattaaatcggattggatcagatgactcaatttgattatattgaatcggatga

SEQ ID NO: 64017 - DNA, 1182 bp, Cannabis sativa
ggttccctttcatcatcatcgtcgtcttcaaaaataacctttgtttcttcttcgtcctccaggcacatatcagcccatttcatttgtagatcaccatcatttttactgctagacgccatgaagtagcaatgaaacagtaccaaaaaagcaataccaaaaaacaacaaaaggacaatcttacacactcaaaagagagcgacacacacaaattgagttaatttagtttttatttagcttttaattacaagtattttattagtaatatccgttattaaaacaaattctgacctttctcattctcttttattttttgtgtctctgccacccataacgacatggcaaaacaagctatatattggccgatgaagtaatcactaactgcagaccactcaacccatcataaccagccttcgcatctgtacattgtccagcgaagcccgacgaagttctggcgtaggcaaaagttctgataacaatcacccttcacacttgttcctttttcttaacatatctctctttttatctattcttatttagggttttctctttctttcgattatgctagattgtgtctcaatctttaaatctccacatgtcgtatgatctttattgtaattttgtagttgataaactctgcttgtaattagttattgctttttcttatttatgtgatggtcaatctcaaatttattagttttatttttcttttttcatgtgattttttttctcttattgtcttactttatgttgtgagattttattgaaacgaaatgtttgtctctatattatcatgtatatatatacatatatattattgatagatgaagaaatcaagctttgtagtttctgcaaccgattatgctatagactttggatgctcagattattacatctaagtttgtttttcattgaagttggaagatgaaaattctacagagctgaggagtttgttataggcaagcccatgtttcaacagactaattctctatgtttcacataaaggtagactttgtttaaactctataatgatactttcaagttacttttagattgtatttaactgatactattaggaagcttttgctcaatatagagatagtctatatcaataaaatccgtagtataatggctcttcataaaagtatctatgcatgtgataaattttttagtatatatatatat

SEQ ID NO: 64018 - DNA, 1210 bp, Cannabis sativa
aactccctgtacacttggaggacttggtcggggttaagcaactgacgaatgaacccctgaaagactacattagtcggttcatgacctaggccacatgggtaaaaggattgaccaaagaggggaaattagcaaaaatacatggaggaattttaccattgagatatttatggaaatatatcaataggctaatagtgaactccatggcagaattcttggaccggacagatggatttataaagttagaagaggcgcggtacgaaatgcttctccaagaatatattccgctggtcaaagcaaaagctcaatacgaccttaagtgcttcagttcaaaaccagggtaggagtagcaaggggaaaaaaaaggtcgaacggtggaaaatcaagaaaatggaaaaaatggaaagttttaacaattctgaacaccagcaccctcgggagaaagtccaaaggttacaaccttcattattctcactaaggacatagaaaccattctcacgaccacagcgttagtagttccgtacaagaggcccccgccaaagaagaacgatgcaagaaaaatggatcattcgaagtactgccgtttccataaagattttagccaggataccaatgagtgtaaaaatctaaaagaagagattgaatttctgatcaaaaagaacaattcacacataaagaggtatgtgaaggccgaccaagaataaagggccacccaaccagatgataatcaaaaccctttgatgccaccacctgtggatggacatttacaagtgattattgggggcccacatattgctgaagattctaaaaatgcaagggagaaatattccctagtacgagtaagatgagaaagtgttggctgcagaagagagaaatcctaagtaaccgcataggaaagatagaactataacttttagtgataaagactaatcatgtaatttattcacagaacgatcctcttgtagtggatgtctaaattgtaaacaaatagtggcatccaagttcaaaactacttatgaaaaaaatgtcgtgtctcgcatgcgtcccagtgtaattgctaagcatattgcacataagagttggtttagaattgaaactaatccaagtgaaggcacaacatgtcaagggcacccaatacttatattgggccaatggtgagctccgggatgtccaagtgacatcctcaacttcatagttcatctttttaggatta

SEQ ID NO: 64019 - DNA, 677 bp, Cannabis sativa
acaaggatccaagtcttgttctttagtaaggctagatgttcaacatccatggctttaagccatttttcattttgcatagcagctttgactgtcttgggataaagagaagccattaagactcttggctttcttattcccgattttgatcgagtacacattggatgttgattttgagtaacattgggagctgtggtatgtggatcagtcaatgtaggtgcagttgggggtaacaaagctgtattgtctgtaggaatatgggtcatggtaggtactgtggtggactgaggtgtaatagccgttggtgtggactgtcctacagtagtaggacaaggaggtactggtgtgatattgacaggacatggcacgggttgaggagtgggtgcaacagtggcattttgaagaggagtagggactgtttgattggttagggagggtactgttggaccaaaaagagatctgttggaaaaggcaggtattagactagtaggtagaggagtagtagggtgattgtgagatgcaatagcagctgtagcatatggaaaaatggtttcatcaaacaatacatcacgtgatatataaactctaccatctttggataagcacttgtaccctttgtgagacaaactatatccaagaaagacacatggggtggatctaaaatttaatttgactttgtt

SEQ ID NO: 64020 - DNA, 1466 bp, Cannabis sativa
  modified_base (236)..(245): a, c, t, g, unknown or other
ttacgtgatttttaacttaactatgctgctcattgccaatcaacgagtttattaaaaatcgtgaataattaaaacttcatttaactaattataaataccaggataacatacttgtattaaaccgggatctcgtttacaaaagtatttacaaaagttttacagtgcataacacaaaagtttatcgcctagcgactaagcaaaataagcccttctgtcccaaagaccgtacgctccannnnnnnnnnccccaacatgtacaatctccatctactcactctcacggctggtcaaccttagccttgcccttacctacgcatgcaaataatatttatgagtcgacagactcagtaagaaaagcataatcataaacataaacatataactagactgcaaccaagtgcccatacacctgattacaatctactaattgagttaggaacattcccgacaaagtatgactaactgcgaatccctcctatactcagtactctaatcgtactgatgttgtagctgataactcatactatctgatagcctagcatatatatgttggcatctcagtgcaactctacgtagacctcactgatgccctaatatgctaatttgatggctatagatttgcatattctgacggcaactaacatgtacgttgaacatgtatacatatttgcaactattatactaatcttaccttgtatccaaattcaggtgtgtcgaccaacctgagtggaatagctactcgacgtattacaggcccctaaatcacattattcgtaaaattggtgagtgacacactaaattacttttcggggacttaaacttgaaactaaaagtttcccaatcgataaataacatggcaatactctaaatattgcaaaaataggaaaaactaggattcccaaaaatgccccaaccagtagaccaattcacaactgaaattccggttctgcatggtttcctagggaccaaccagtcgaccggttcctacaagtccccctgaaccagtcgaccggtttactgcaagaaaaccttaaaaatacactactctctcaaatcaaccccaaactttaccaaaccttccagacctgcttaatataccataataaacataagtcaagcaacaaaataactccacaagctcaaaactaaaaattaccattaaagaccaaagtttgagttctaaaactcaaactttgtctaacaaccaaatcaaaccaccgactagcttccaaacatctcaaataatctaatcttaacctcagaatataatcgcaaacgacaagaattaccacagaacctaacccttagaaaaatcataatatacttaacttgaaacttaagaaaaacaacaaaggatgagctacaacattaccttgggttagaaatcactaagagctttctagaaatccttaaattcagcagaaataaagaaataaagctagtgttttatcccaattaactaaagt

SEQ ID NO: 64021 - DNA, 2342 bp, Cannabis sativa
  modified_base (690)..(691): a, c, t, g, unknown or other
ttttgtgcatttgtgaaattaacggtggctcttttttttggctcactattcctgaatcacaagtgacttttttgactttggctcttggatcaattttttttttttgatttttagtggctcatttttttttggctctacttcgattgattttttttttgggtcggatagtcgtgaggtttttaatttttgttttgctctaataccatgttagaatttgagataaggtgaatgaggttctatctcaaaaccaattggcaataggaggagtaacacattcctcttatatattctataatctttctacacattagcgatgtgggactatctaacataattaaattattttaaacatctcgtaccaaacggccctaaaagtaatattagatattttattatttttcgtaataagagtatactatatagtactgaaaaattagagttggttacttactgtcacctcgaaatattttatattattcttacaaaagaaaaaatatatatatatatatatatatattattaaatattgtatcaattagtgactgagagtgggagatactaaggtttttcttctaaaaaaagtcatgtgaaagggtaatttaaaaggtaaatgtttgcttgtaacaaaattattaattataaatgttagttgaacattttaatatatgtttgaatgttaaattattaatnnttaatattgaataatttatatatagatatcaataaattctttattcatatatgaggttgtggtatctttagtgagcatgaagctcgaggttctttaaatttttattataatagatgaatgtttaattagttgaataaaactttctatcaaaaaaattattacacattatttattatttaatatattaaacataatttaaaattttataaaaatgacactaatatagtacagatataaactataaactactattaaaagattaaataaaatattaaacgagtcctcgttaagatggggagtgtcattttcgtctcctactcatttaacattcgagaacataaaataatcctcatctccgcctcgttttctatttagataaagtccccacatcattagccattataaagaaaatatacatcctaagttagagagatttctaattaaaaaaaaaaatagaaaaagaaaaaatccactggaattttctttgttaaatactccaatttccaatttccaatttccaacacatttataggaatattagaatagacacatttttttaatcttaattacaaaaataacttaattttttttgaaagaaaacttagaagcggttgttgtctccggtggggcttttgatttcggattgtgttgctcttatgcaatcctcttttttgtttcctatttcaattaattttgttaaacggtccgagaaccaggcagctaactttttagctcgttcttctggttctattcctgactgtgttttccgtgggggttttgtccctgctggtttggaagctatcttggtagttgatttgatttaataaaattaattttttggctaaaaaaaaaaataacgtttaataaaacgttaataacatgtcctatccgctatcctatttttctttttctcttttgctttatatttttttttctcttctgtctttctttattttttctcaaattttaaaaataatttctggtcatatcataattcaagggagcctaaaaaaatatcattataatttacctttcaatatcaatatttgagaaatatatatttttttgctatttaaaaaaaaaaaaataataataaaatttggttactcatatattatatattgattagttattattttattatttttttaatatcagttaacattcattttaaaatttagttaataaaattatattatactatataataactaattaatttctacaataaattaagattattaaaaatatatcttaagtgatatttaaatactacaatataattttaaactaaataattggtaactgatttagatatttaaattgttagactgctcttaaccgttattgctcccctatttttcgtctccttcgcctgtactaccatgatctccgataaccaccattctcttccaccaaatgctcctcacgtcttccattccccccaacttaactgctatcctgcttcttctatttattcccctgaccaaagcatcttctccttattcctctgatttttataccctcttactgattggcttttgtttatggaatctctaattggtgaaatgtcttcaaaaattattttatctgaaaaagaaaggactactcatgtcctcactgagtctgatcttcaagttgcacacactaa

SEQ ID NO: 64022 - DNA, 809 bp, Cannabis sativa
gaaatggggtatgccttctccgcatgaggtcagcatgttttttgacctgaagtctactcccaagcaaggcaggtcggggtacttctatttctctcagctagacttcaagtggttgacgagcgccagggacaaggccgtgagcaaaattgggaattttgtcgacgagtattacatggtggaaggcatgggcaccacctatactcggttccagcagatccctatatattaccgtccacccttcacgctagctcttagggataaatctcaaaggatcgctcagctgccggatgatgcccgaaatattactttgttcacctcggaggccaactttgtggattacagactttatccaaaggatttcattccccaacctgtgaaggagaagaagaggaaatccagtgctggtcgggctgagggagctcatcaggagaatgaacccattcaactgaagcgtgaggctaagttgaagggaggtgtgggagccaagcatcatgctcaggaacatgttgagcaggaagatgaggttgaggaagagcaggagactccacttaaaaggaagaagaaactttcggcccgacacaggcctatcgaacatacatttcagatcagggagcctagtttacctgtttggccatcgactcttgtagtaggaaaggggaaagccgtcctggaggagcaataagacttgtcagatgatgatgccccttcagtagttgttcaggcagatgcccctgccaaagtgcaaggtactccatcttgttttcaaccttcttaattatcatgctttcatatttttcatgcttttttct

SEQ ID NO: 64023 - DNA, 873 bp, Cannabis sativa
ctcctcctccaccatggcctgcactaggtgggcaactcataattcatgatcctcttgtttggagcgaacgacataggggcaagggtgctcaaaggcccgatcgaggagcaggctcagctgtagggtagagggctatggagttagcccatagatgtatagagagagctgttccattcatgaataacgagctcaaggagcttggtgatggcaagatagataggctctactcaactggcctttgggatctatctatggtaagttgtacttttagctttcttcatctttctagcacttcagtaagttggtcaaccaagggattttctgcatggtcctggtcagccaaggttgtatctcttgaggggctggctggccatagcaacttcagagagaggctagccggccagtgttgtactttgatactaattttgtcttgtttttctttcaggccttgatgaagttgagctcttcacgtgatagctcctaggggtcctcagatgccctttgggattagatgaagaccgtggaggcctctcttctgccaaaggacaaggccatgtttgaggttgaagctcttcttgtggagaaaccggagggagtctgaagtcatagggcataaagagagaccgagtgcgactcttgattgccagcatgcccaaagggatgattatgttggcttgtccttaaaactcatctatgagttcaagccacgtaaccccagagctgatctatcatacatgggcagtgaggctttcttggagagcgcactagcttggggaaagatgttgttcgtgagccgattaggatcaggccagatcaccgcctatcaatgttgggttttataccctaaataaaactctttacaatctgattagt

SEQ ID NO: 64024 - DNA, 891 bp, Cannabis sativa
tttagttttcaatggttaatttgagacccatttgattaaatccataattgataggtaaaaattacaatacctattgtattagcttcctaatgtataatatattgaaatccacacagatttagatttgtatatagattaagaatggaatgaaaaaaaaaaaaaaccttagagctccaagaataataaatggaccttgtccaaaaccagcaaatctatttcatagaatatattatttggtaaaacttaatacataaaattaatccaaaattactaatcctaatttatgacatttcaaaacactaatcttaatttatttattatttttaaatatttatatacatacctttcaacaaaatatatcacacatgtacaatttttatagtcctattcacctgtggttggcatactaaaatacacaagaaccaactaataccacctaatcaactacttatttccactgaaccactacatctaatttcaaatctttctaagctttttttttttttttttttgaaagaacatcaagttcattaagctgaaagatagatggaaaccgcagggggagttccctccccttggactacaatagcagtatcgctagaaactctagcagattttgccaaaccatcgacaaacatcaagtcacttcgcttaatataaaagaaactacaactaataaaattcttaattaagtctaaaatagaaaaggaaagattaataaaatgctaattaggaatgcgtctcctttggttcaaagcttgggtaaccaactttgagtccgaaagcacatgaatactttgccaaagcttgggtaaccaactttctaagcttattattcaaatttaccccttatttcataaataaaagctcaacacaaactcatcctcaata

SEQ ID NO: 64025 - DNA, 854 bp, Cannabis sativa
aacatacatacacactaattaaaaagtatattaatgaaagttactttaaatatatattgaaagtaattataaaataaaaaagaaaattataaaaatgataaataattaagaaaaaattatcaaatacatataaaaaaatgctaattattgaatatttataatcaattcataaaatatatatgtacataactcatttttttttaaaaaaaaaacttattgaaccagattaaggtaatttaatcgcccccacacaaataaaaagaaaaataatttttggtcatattatatatgaagaatgtgttatttataacttagggtgactattcattggttacatttttattgtaactatatggttacattttttttgacctccaatagtaggttactaataggtaaaaattctatttttagaattaatttagtattattaactattttttaagtaattaaataaatatttaacaagaccttttttagcaattaaaatttataaatattttttttatttatatataaattcatctataattattttaacagttaagtcatttaattataatatttataatcttttttcttacaaaaattaaccttatttttatataaattaaaattctgtccttataataaatttttaaataattaatttttttttaacaattagatgatgatgcctcaagctagtgttaggcctcaagcttataataaattttcaaataattttttttttcttcctatttcttcttctatttccgtcggcacttcctttactcgttccctgttatttatcgttttcctcctttttgtccgtagtgctcccttatagattggcaacctggattggtagtttg

SEQ ID NO: 64026 - DNA, 548 bp, Cannabis sativa
aggaagttgaagaagaagaagttgaccccactaaatcttgaccatgtagatttagttttattattctaatttctgaacaatggcttttaggccgagacaatggttaaatggttagtcctttgtggcattttgtaatatttaaactttgctttgttagatggccaacactactaatttttatatatatcttgttatgctagtttatcccacttttctcgagtttataatgcttatgtattgtgtttttatttacaataatactttcctcgatttagcttgggatattttaggattagatgtatgccaatgtcattatcttattctttcatatgcgagcagttaatattttgccatatttttatgagcagttagtaatctgctatatttagagccaacttcaagtattttgaacagttcttttaagaactatttttaaatatttttgattgcttgtatgaatagttaatcctttattcatactttagcttgcgtattatttttgagggcatatttgtatcttgtttataatacatgctataatatgcgag

SEQ ID NO: 64027 - DNA, 1377 bp, Cannabis sativa
ttaatctcacttaaggcaatccaatcaaacacatgcaaaagactttttacaaccctcactctcaacttaaattgtaagagaattcatctcattttcaaactgagttttgtgtccctaaacttgatcccttcaacatgagtccttggaccccctatatatagtactcagttagttaagacagaacctaaccgacttaactaccaactacaaaggtagttaagattttgtctaagtaagctaaacctcacaatttacatgaggatgtttacaagaactaccttaaggttacattccaaaaagagtggtacccaaaaatgcagtgtgaaaattgtaaaaaagcttatatggactcaaacaatctttgagacaatgtatgctaaacttagtaccactcttataaataaggttttcattaatcccaaaatgaccactttttattcataaggcacaaattgagtgattttctaacccttctaatctatgttggagacattatagttgccactaacaacacttcagaattgaccaccatcattttacatcttgatcctcagtttaaattaaaagaccttggtagtctccatttctttctaggcctcgaaatagctcactacaacaaaggtatctctctgacacaaagatccttcacactccaattgctacaagatgttggatgttggatgaacaactaggttcttacaaaaaaactctctcttcacaaatgagaatatgtaaaaaaaatgaaagctagaatagttaaatgattggctgctctctaggttctatttatagagcatatgaaccctagagacagccacaaagtcaattccacagctgtataaactttcctaaaaaaaaatcctctttgcaggatcaaagacaggttctgtagcaacaaaccagaccagaaaaggaaacttgccaaaattgtgtacgatcatgtacatggacttgatacatgccaaaaacagtgtgcttgatatgattttatcaagacacaatcgaacacattaaagagaaataaccatggtcaaagccaactttccataagagaatttcttctcttacaagaagtttacaaacttagaaaatggacagcagaaataagattctttcctatgatagaaaagagcattaaaaacatattataaaggtgagaaaatcagtttattaacacaaaaaaatctcaccataaataaaaaatattttagcgtctaaatttcttaaaaaggactttacacacttatccttttttgaataataccatattttttccattttaatcctataaatatcaaaactatttatttaataattataataaattatcaaataaaattgccatttattttatttattaattagacgatacaaagt

SEQ ID NO: 64028 - DNA, 702 bp, Cannabis sativa
aaacaaccaaatctcgtttcagcatgatgggattttactgtagcatctcgtttatctttttctcgatgaccttcacatgagcagcaaaatattatatatgttatctatcatctaaatctttatgcattttacttcttctaatactaaaacctattttataggcataagcattataaaaatcgtaagcttcccattcagtaataagttccatactaatcttttgtattgcctcatcattaattttagaatgaagagattttatatcaatatttgaagacaatattccatcttcactttcaaaatctattttccgacgtgattgtaaattttcactcactaaattagttgagtccatcatcttcaataattatataaaaaaaaaataattatataacaaacaaaacagtattatagattatagaatatataacattatttttataattcaaaattctaattttattagaaaacattatatatatcattaaacctctatcacaaatggaggaaaataattatttttctacaaaagtttaaagtcaaatattataaatttcaatatatttatatatatatttattaatgaaaagatttaagccttattagttaaaggatatatgatatagtctctactaatattagatccatattggtttttataattaaaatgaaacaaaatacaaaatacagagtatatataaa

SEQ ID NO: 64029 - DNA, 904 bp, Cannabis sativa
agagatgctagggaaaagagatcgctatatttttttgtgggttagttgggaaacttaacgttgttcttcctccacatgtcaaccctaacattacactttaagatcaagctttattgtgggttggacatttgaatatcggtatgacccaaaaggcatgaattgggcgtggcccatgagagacattgggcttatgggttccttgtttctgacttataagtgggctttgtaagtacttcaatcgttgggccttttcgttgggcttagagcaatttttggccactacacatagcactgatctacagtcttgtttcctgttaatacaacacacccattagttgaaactaagcactgagttttagaaaaacttacagagaagttgttatcacatagttgactaatactgatgagattggctttgagcctttttacatacaggatatctgttaaatgagccactcaatttaggtttacatcacctttgtcaacaatctaccctttgtttccatcaccaaatgtcacggtcccctccttttcttctttgtaattaactagcaattttttatttccagccatgtgtcgagaacatctactgtaaaaataccactccccttcaacaaaagcaaacagagacagcttagccagcaatccaacatttggacttatgttagattttattttttgttctcgatgaggttcgcgcccttgaggtttatttggttgaggaaaactatttggtcgattaatcatggctttcaagtagttctgcaatttattgcacttggggcgaatgtgacctttcctgttgcagaaatgacaggttggaatgaatttgtcattttgtggcagatttccagcaccaatccttgtcccttcaaacttcagtttagtgggtccagatggaact

SEQ ID NO: 64030 - DNA, 783 bp, Cannabis sativa
ctaccgcacacccacgacttcatgcaaaaggcccttctgacccaatatataagtgctcctctgagcttctttcatgtgatcaatgatctatcaatctcccaaaaccataaatttgccctctgggttttgctcgtgtcggctctccgacactgtgtcataagtccatctcccaaaatcaattgtgcatcctttgacgactccctagattttgataaacttgatatcacgaagtcttactcttaagacttgaagtcatctcaatctgctatctcccatcggcgtatgctctctaaaccattcgacttacagtgtcccatacaaagcacgcccataacatgctgcaaactagctcagtcttaatctcagcctacacccatgcatattatctatctgcagcttgtattaatcatgcaagtcttgcactgaataagccatctgttgtagtgttttcctctggattcacacactaaaactgaacaagtaccctgattcttcaaacatatgaattagtgggctcccccacatcaacttgggaagaacttctctcttagaggaatacctctcaaggtatagctcgcatacggtccctccattccaaatgtcacattgatgaagatgttgaactaatgcatcagtcatactgactcttcgcccctcgacatttctatgttgcctatgtaccttagtcatgctgactttcaccttagaccaacattacaatggtgttatcttagtacctgagtcctgctgactttcaccctatataattggcactgcccgtgt

SEQ ID NO: 64031 - DNA, 1204 bp, Cannabis sativa
ataaacatttttactgattctaattttcatttatactgtacaaaaaagtgtttagatttttactcttttttttctttatgccattcaaacgattcacacaagcttttcttcagctcttcttcaagctcgctgccatcaagtacatctaaacttcagccaccgaccgccgccacaccaaaaacatctccaaccgcccgccgtcacgcatagcccgtctccaaccacctgctgcttatcttcatctctttaagttctatttgtaagttctttttcctcttcttaatttttggtaacaaatatttagttttggctgtaacggtaacaaatatttggtgttggctgctattttaacatttttgtatagattaagaatgatttcaatctctgctcagtatatttaatttttgttgtgaatttgaaattgtagtttattatatatataagtatgtttaagaaatacatctaccatgtgtttgataaaataccttagagagttgagtcttcactagcctcgagaaaatcccttcatccctaaatctccaaaagtgaaaaccctattgactgagtctattgacacgaggaatgttaaacaccataaatctgaaagaaaacaaaaaatgattaagatgatgatgaagatttcctttttctatatgaattatttgtatggtattgtttttatgctgtttttgtttcagaatttgtttaaggtttttttttctttttcttaaactcaagagtcatgtttggacagaatgattaattcttgttttcagatattatgttaaggggtataattattgatgttgttgttgttcaccagtatttatttagtttattatttttgtgtttgctaattatttagtttcagttattttaacaaaaccttttcaacaattttagatcgatacttttatattttgtcgtttcaatacctttcatgatctaatttctagtgatttatatttttctaatgttaatttatgggattttcgaatttatctgtcaactttttaaaatgttgtaatgcagttggtataattgtagttttttgagttgtgtacagatttcattgctaaatttgatgttcctataaatgtagttctgataatgttcttattttgctatttaaatattgtacattcgtgtatttaacactttaatatttgataatttttgatggttgtggttttgttttttctgt

SEQ ID NO: 64032 - DNA, 883 bp, Cannabis sativa
attcaaactcagccgcctcctccactcgcactagcagctcaccagtcgacccatctccatcatcccatttacttctctcttctcagccgtgtgccttccctcaaccttcgaaccaccacgttcgaactcgcctgaacccatagcagcccgagccctctcagttgcgcctcagtcaaagcacacgaacccatctccattccacctgcaaccgaagtcatccaagcacacaccattcgaaccaccaaatcgcacccagaaactgcgactccacctccattcactcatatcagaaccacgaagccaacccagccttcgatttcaccatcagcaatccccgttccacaaccaggcgcagcaacctctaacccgaaccaccaagttccataacccagcagactcgaatcacagctccatctccgttcccttcagcttgcatccatacgcccgagttgtctcattcgaacttcattcaaaacacagcagccgagaatcctctgtcaagccgagtttctcagccaatctaagctaagttctgatttggtgatttcatttgaaagttattttggattacagtgcttaattagtggctgtggttgaactgctagtgttatattcaatggtgcttgagattgtcattatgatttcaatgtggtagcagtagtgtgataatgttggtttggacgatttgaattggaatttggtgggatttttgactattggactgagaaagattggtgaatttgaaaaaaaaaaagtattgattgtgaacagagtgctgcatggaaaatgatttctttggtataaaggagttgattgggttacattgatcgtttggaattggggttgtcacttggacattgttggtgtgcatttgaatttcaaa

SEQ ID NO: 64033 - DNA, 971 bp, Cannabis sativa
ctatcctgaaaatatgaaagcttacactctacttgacatacaaaccaatcggatattccattgtcgagatgttatcttctatgaacacatttatccatttcacagcaacagtccaaataatgacattgctcgatttttttcttcccaaaccagttctcccatacctgcaactgatattgcagcacatgaaccaaatattgcagcataaaatactgctgcgactgaaattttataatccataccaactactttaattgaacaaaacaatttcagccgaaattacacaactaaatcgggcagacacattaataaacctactcatctcaagaattacatgtgtgaaacatcaacacaaacatcaacagctcatcccatttccaatcacttgtcttacaagagattttcaaaaaaattcatagctgcaatccttgctgcagaacagattattgaacctacatcttacagccaagcaatcaaatataaagtctggaataatgccatgggaacataaattaaatctttagaagataacaaaacatggatcattgtccctctaccatttggtcaacataccattagtaataaatgggtctatagaataaaatacaacccagacgaatctgttgaaagatgtaaagccaggttagttgctaaaggatatacacaacaacctgggatatattactttgatacctatgcccccattgcaaaattcaacacattaaaactcctattttctctagctgccataaaaaattggcacttacatcacatggatgtaaacaatgccttcctccatggtaatttacatgaggatgtgtacatgactctacctcaaggatacactccaaaaggtgtgattccaaagaatgtcgtatgcaaattacaaaaaaagcctatatggtttaaaataagcatcaatacaatggtatgcaaaactaggcaaccatttacttaaacaaggatttcat

SEQ ID NO: 64034 - DNA, 987 bp, Cannabis sativa
atttatttttgtgtataaattcaagtaattttatttttttttaattgtatatatatttattaattatttaaatttttcatcagtcctaataaaatttcatgagttcactgctaagcataaattttataatataatttacttaagtagtttataaaaactctttttaaaaaaaaaaagtactttataaaaaaaaatatattattttggctacaaaataatattttattacatatataaatagattttacaataagttctttcaattatttaagaaatgagaaagaatatttgcttatagtgcagaggaattattcggtagtaaaaattaatattttgtgtaagtgttgttcataaaaagataaattattagttcacatgtatatatagttttgtaatgtttaaatatgttttcattgattaaaaaatacatataaataaaaaaaatatgtgtttcttcttatttcggcatatttaaaaaatgtctttatttgcttttttttttcttcttattttgatatatttaaagaaaatatatataaaaaaaatattgtatatcaatataaattgtcttaaaattaatgcaaaattaaataaataaaaaacaataccattctttaagagtgagaactttatgttttcaaaaaaataaaagtttggggaccaatttgtcaaaaaaaaaatgaatatcagcttgccaaaacttatatagtttgggaccaatttgcccaaaattaaagtttggagaccaacttaccaaaacatatatagtttagggacttgacatacaaaaaattatattttttgttgaatttgcttacgcttatttgtattgcaggtccctaactatataagttttagcaagttggtccctaaactttattttttagcaaattgatcctcaaactatatatgtttttgcaagtttatccttaaactttattttttagtaaattggtctccaaacttttattttattagcaacattaa

SEQ ID NO: 64035 - DNA, 1173 bp, Cannabis sativa
aactttagattgggttagaaaatatataggataaaccacccaaactgaccgatgtacaaccctactttttatagattaacgcagaatttgtttttcttcttcttctttcatttcaattccttacaatctctgtttaattattgtaattatttcattcttaattgttatttatgaatcaaattgaaatttaaaaagtaacatttgatgtgctttgattgtttggatgcaaatttaatttagaacgaaagtatctaaattatttggtcaatctttaaaattgcaattgtttaatgctttcttcataattcaactttaccatagaactatggggaatttagattgaatttataattcttaattagattataaatactttgtaatttgttatttgaatagggagaagaagatagagttcttgcattaggaagtaaacggtggaaattagaggatcatatttgtcctaaattcattctcattgttattttattaatagtttattttctttgtttgaaaattctgaattttatttgatcaaatagaactaaaagattgattggttggtaattggtaactcagtcctagagaaagatacttaattttaccaattttattacaaaatgtgattgtgtgcacttacatagtataaatttcgtaacaagtttttggtgctgttgctgggaactgaaaacaaatatcaatatcagtctaattaattaatttttattctaattcgattttaacttcttttttttttctaactcttttagtttcttaatttgtctattttaggtgaattgtgttttatactcagcacaagatgagcatatagtcttgaatcctgagattgaaaaaaaaaatctgcaagtgtgagctgaaacactctatacatgagctcttgtcaattacagaaaacaccattattcatgacaaacgacaacgttcagtagacagcaatccaaacatatattaaacattaaaacatgaaaactgaaaacagtcactaatttaatttaaacacacaacacaatccaaatattacacattgtattccaaatactaattattgaacaaacagacaatggtgattggctaacagatcttccaaatgttgatatgagactatccccacacgccacagccacttaaattcatatatagtttagtcatcttctg

SEQ ID NO: 64036 - DNA, 2474 bp, Cannabis sativa
acattaaaatttttgtagtcatcaggacttttaacatctatctaaaaaatatttttagacgttcttcatctaaatcaattgcataaaagaagttgggattttctttttgcatctgcataaatagctcaagcattactttagcattaccttgctcaagtgctaaccatctttttttaaccaagtgattcctaatatgcttttccatgtatccaatatttttatatccattttgcttgtacttattatcccagccgcatcaatgtgattattatgggacaatgtgatatttgtgaaaggggaagcctcttataaatattgggagatgaaaatttactaattgaaactaaaaagaaataaccaaacaattaaattggatttcgttgagtatttgttactatgaagtcgagggtgtcatgaaacttttcttcttttacactcacttatgaaaatgcttcgacgaatcacattgttcaaatatttaaatatttatatgttaagagttctatcccatctatgttataactccgtaattaatttcatatacaaacttcatcaaaaatcctcggtatttaatttcatatacaaatttcatcagaacgaaatccaattatccaaagtccataaacaaaaacggagaaagttctattttgagaaaaataatagtgaattactgtgaaaaaaaattaagaaaactctctgtgtcaagagaaaataaatagaaaatattaactaagacatgccttgttggcctcaatgtgaattgattgtacaaaggtactctattccactcttcactcctacctgcaaatgcaaatgaagaaggcttagaatgcataccggtatattgcatcagctgcgccattttcatcattgctggcaccaattacattagccacagcttttgtcttctctgatccattactaagagcaacgcctagagaagcaagctcaagcatctcaacatcattttctccatcgccgatcgccattatctctttaggactaactcccagatgatcaaggaggagtttcaccccactcccttttgacgttccaggaggaatgatttcaagcatgtctgcctgagcctgcacaacactggcacgatctccagttgcctctgcccaataggggcgcaaagtagtagacacaccctctgcagtgtccatgaagatcactttctgtatgtcagcagcagccaagatctgatcaacagaagacattatctctgcctttggctcatgatacacactgtgcagcgactcaacttttgggtgatcaaacagagtaaggcagcgacccccgctaaatgcaattagaggaactttattctcccacgagtaaacacaagcctctctgcagataactggatccaaattcctcctataaatttcgcggccttgtgtaccatagacaagcaacccctgtaagaaaaccccaggagaaactgctgaaacaatgccaccacttccagctaaatccgccatcttgaaaatgctcatcacagcagctcgagttttcccagtggctataacaatcttcacaccccttgatgaggcttctttcaaagccttggtggttgttgaactaatcagacttttactatttagcagtgtaccatccatatcacaaaagatatagctgaacttcggtttataaaaccgaaggctgccttctttcttctttgtatcatcaagagaatcggcaatggcattgccattagtttcagcagcatcatatgcactctgaataagtcctttcccagcccaaccaagacttttcaagataagttcctcctccttctccatttccatttcagcctcttcactaatctcatgatcaaatcccaaaagatgcaataaaccatgtaccatgagaatccgaatttcgtcgataagactaatccctctctcttctgcttgccttgcagcggtctccatcgaaatcacaatgtctcccagcataagaatcggaaggttaagatcaggtatgtgatcagacattgaaagaacatcagtagcgtgatcctcatcccgccactccttgttaagttttcgaataaattcgtcattacagagaagcacagaaagctccacactttcaaatccaccaacatcagttatagcagtatctctagtcttgtactgcgactcttttaaaccatcaaatgctaacttcattgccataggagcattcaaacgcagcaactctgcaatactcaaaatttcaggatcgtcaggtaattcttcttcgatgcagatactgacattaagctccaactccttgttatttctcttggcagccgatctcctcctcgccgccctacgatagtccctctgcgcagcccaaactcttcccgaactcctcaaagccccccaccgttgtttggtgccgcacagggcgtgaaagctccttccgaacaccaccgaagaactggagaacgaagagaagccgccattgccattgcccccgcg

SEQ ID NO: 64037 - DNA, 1209 bp, Cannabis sativa
aaaaacacatgattactttcagcatagtccaatcttgtccagtccaatcctttctagtagggctgaacatcgggcagatttaccgagttttaggttggcgggtttcgggttcatggattttgggttcaaaaaaatgaaaccgaactcagacccgaatagggcacgggttggcgagttggcgggttgcggttggcggggttgaccggaatggcgggttgacacggtcaactcttaaaaaattaatttttttattcaaataattattttttttatttttttatttattaaattaaacatatacaatataacaatttgttcatcaaatctacaattgaagaaaaaaagcattaatcaatccaacaaacaaacaaacaacatgttcatcaaatcgaacttcatattcatgttcatgaatcgtgataaaagtaaaaactaaaatttttcaaaatacatgcatatccaatatccatagtccataaaaatctaaaatccataaagtccataaaataaaaatctaaataagtccataaagtccatattaatgtctcaatactaaaaaaatacttataaatccaaagtccatataatgacttgaaagttgttgggtgacttggctttgcctcctttctttttctgtcacgacatcatctgtattttaaaatggaaacacacgacaagatttagctagcttgaaccatgaaatcaacttaaatatataaaagatctgggcaaatgattaatcaacacatagtatattacgttcatctacaatttgtttatttaacttaacatgcaaaatgtaaatgagtgaacagcaaaaaataggatcatattttaacattctctgtacttattagttattatttactactacttgtacttgtaatatgttaagaatcaaaacacaagtagttatattatatatattattaaaaaattattatatttttgtgaatataaattattttatataatatatacaaatttttaatgaaaaattatacataaaaaaatatatttaatttatattatttaacagaaaaaaattttatataaaaaaataagttgagagagattgaggagttaccaaaacggtgccatggtggtgcggtgaggctgtgccaggcgacgacggaatggtgcgattattagaatattttatatatggaagttattttctaattaaggaaataattttctatttaagga

SEQ ID NO: 64038 - DNA, 711 bp, Cannabis sativa
tttccccttctggaagctgggatagaggtaagttaaacaatttttttgacaatattctggtggaggatattttacaggttcctatatcaggtcataattgcaatgatactatgatttgggggccagaagcaattgggatgttcacagtcaaatctgcctaccatctatcactccaatctcatgacatgcctacctcttcctcttttacttcaagcaaatctttctggtccaaaatctggaattctgttgtgcctccaaaagttaaacatcttatttggcgtgctatctctcattctcttccagtcgcttcctctcttttttttaggcacattattcctactcctgtttgcccagtgtgccagatgcaatcggagactgttgaacatgctatccttggatgtcatcatgctaaaaaagcttggaaacattctaagttttttactttttacaatactaataaagataggtctttttgtttgtttgtgactgctgctttggatgttcatactaaatttgatctggctttgatgttctgttttatttggtccatctggaactagaggaataatatttttcaccaaaaaacagggcattcttcataccagctttttgattatgcagctaactatttgcatgaatttttagatgctaatgctaaacagatggtttcgactccttctatcccgaggccaactagacgagacttccagc

SEQ ID NO: 64039 - DNA, 1396 bp, Cannabis sativa
aaaaaaaaaaaaaactaaattctagaccattcccaatttagtgtacaccaatttagagtacaattttttatttttatacaacaactccaataatttacactaaatatttcattaaataaatatattttacttaaaaattctcgtattttatactatttacattgatatattaagattaggtgaaattaattatgttaaattataaagttaattaaagttgtctccaaacaacttggatcctaagctctctctatatatatatattggtcctttgccattgtaatctgattatcaaataataaatcaataaactcttttctctctaatctgaaatcttaatatggtattagatgtaaaatatcgaagcttcaagaactcatctccaagcttcaagaaatagcttgtgataagagaggtagttggtgatagggtgagctggaattggaaatactgttgttacagttgtaatcctgcaagtgtgcaggtttcttaattaatctgctagatttggtagaagtaaaagcacctctatgggaagttgcaacaggagctattggggattctgtagcaggtgatatttgagatgttgcagtaggagctgctggaggttttgcaacagatgctgctggataagctacagtaggaattgcttgagatgtggtggtaggaggttctttggatggtgcatccacaccagactccctgaaactttcttctgtgacaacaatgctgctatacacatctcagaaaatccgtgtactatgaacacaccatgcaagtaaaaattgactatcatttaattcgagaaaagatcactaatggcaccatcaaaatgaaccacgtctcctccaaatccaacatagcggatatcctcaccaagcctctcttcccaactcatttctataatattgtgtctagcgacggagccagggtaaacatttaaaggagaccaaactatattatatattaagcgacaaatagttcaaaatatattattaaaattaaaatatagcacttgtgtcttgcatatcacaaaaattatttattgaatctatgctaacctttttagcaatttcttttttaatatacacttgcaaacaatcacttaaaatttcatcttccatcttgttgtgaagtgtagtcttcactatattcatagttgaaaaagatcgctctgtagtagctgtataaaattgaagtgtaagaataagagttatcactttgtacacaagaagaaatgcaagccacctaatttcctcaattgaagtttttaaacgaaatctatttttgcaaaccctgttaaaccaagaaaacttcgaacttctgtcacagattttggcctcggccaatttttcactgacccaattttgcttggatcaaccataatttcattctt

SEQ ID NO: 64040 - DNA, 698 bp, Cannabis sativa
tttagtaaacgcgcactagatgagtcatgagtgatttgataaaaattacgtcctaaaacacatataagcattttattttagaatggaagatcaaagtatttatctagagtatcaacaattaattaaaacatacctccatagctatgcatacgtgagctatatgactttatgaatctatataatataatcaatggaagctcaatatattaggagtgacttgtaagagagaaaccaataaagagcaaccgcggccacctttctctctaagcataccatcaattaaaaatgcagttaataaaaccgaccattccattatagtcttaattacatatataattggcattatactatacatatagctatccacatgtgttaatatcaacattgtgtgagcaaagcttaattatgtaagtcgatataaatattctaacattctctcacttaaactacataataagatcaatatgtgctcactaagcaatcgtgtcaacacacagaaatctcaaaaaacactaatatctataaaaactaattatccatcatattgtatcgatgtgatacaaatataatacataatgagacatctcaaattcatataactcagcaataactactgatttggatctactcactcatagcaccaagactatgtcattggctcgcatcaacaagtgtgtacacaacatcaaagagttatc

SEQ ID NO: 64041 - DNA, 1013 bp, Cannabis sativa
atatatatatttatagcaagtgatgctcatgagtcctgtaagtctgtaacatatatatgcacattttattaatatgtagtagtgttaatttgctttggcataaattcgaaccagttgggattgatagtgcaacgcgtatatatatatacaattaataaataatgtaagtgtaaaagaggcaccaaagaggagtggagagaatatattcttgttccatgcaaattttcatagatcgactagcattttttatttgtttattttattatagttgcatatgaatatgatcatatgtacagtacggtgtctccatcactgtaaaattatgtatatgacggtagactaaataaaaaatctcttttccaaataaataagctctgtaatcgttggcatcttatcttttacttacacttatagtattaatacattaaataaatgataatttttaattatatacaagtgaattaattatattacaaaaaaacatgcaaaaaaaaaaaaaataatatatatatataattacacaattttatacaattttataaatatttacaattatgatcatattcacattgtataataaaaataaacataaatatttacaattttaacatgtgaattatttttaattaattttctgaaaataaaaacgtataaaattaaatataaaaatacataagtcaatatttatattttgatatattactaaaattatacaaacattaaaattttgtttatattttataaacatatatgcatgtttattaaatatttaattattattaatatttataatactattattgatctaaatgtttattatgataatatttcaatagaattaatataatttatttattaaaagttcataaataaatttaaaaataaaacatttgtgtttattttgttttaagaaagaaaactatatataaccaaatgtgaaattatgtataaacattatgtttatattttatattgataatgtttataaattattataatctaatatatttaat

SEQ ID NO: 64042 - DNA, 815 bp, Cannabis sativa
tcgatgagttgccatctgatgatgaatggcttgttagtgaaagtgaagatgaaaatgggacaaggccatagaataaggatactcaacttggagaattagaattgattcattctactaacaattcaaactagcaagtagtttaaaaaggggttcgttaactctaattcttgttttaatttacatattgcattatgttaatcaattattgattattagtttgtaattattttttcttaggaaaataaaagcacttggtagaagttgatgaatatggatgggaggatattcatgatcacaatggggcttgtagcagtgacgatgatgatggtgatgatgatgagggcaacaatttttcgagcaatgatgagtttggtgatttctaaatcatcaagtcattattgctgaatttgttctaggataatagaatatgattctagttctagaaacaataatatatttatttacgtttgagttttattagacatttgatgctatgttattgttttatgagacattttataacatgtttggtattttataagacattacttattcctggtatttttagttactctaaaatattattttaattaaataattgaggcttacgcctcaatttacgcctcaatgcgccttgaggcttacgcctcgccttatagaaaaaaaaaaaagccatgaggcttagatccgcaattttaaacgttggttttgagttagactttttttaagttatttgtttaagttttattggatttttattatgttttattgggcctttttcttaaattgtgttattgggcttttttttttttttt

SEQ ID NO: 64043 - DNA, 979 bp, Cannabis sativa
  modified_base (855)..(858): a, c, t, g, unknown or other
tgttaaaatgttttgtaacctccacaaaattaacatccaatccaacgttattgttaaaagagtttttcataaaccgaagttattgctaaaaactttgtaagcttcctctaattaataatgtcaatcactttattgtaactctactaaaattaaaggaaaacaagaaagaaaaagagtattaaaacaaaaacttaattttctttattaattattcctattatttattagcaggacataagtgtaagagtatcttcaatgataccattctttaaagatactaaaaatcttcacattatccaaatatataatattttattttatttctcttccacatcatttttaacactcgtacttctaaaatcactccaatagtatatcacaattcaaaaatactataattataatctcacattattattttatttttttgcaacaataattttttagttttaattttttattaaaaagataatgatcgcatcaatactcatatatgacattcacacatatttctagaatgacattcttttttcttcaatagtatagcatcttaatattttgttacctcgtctatctacctcaacaagcatctcttaattttttaccattagagatgctctaacatttaaattcaaagataaccagggcccgctaggcccgtgcctagggcccacacttttcgggggcccaaaataaaaaataaaaaaatttattagacttttatttaagtaaaatttaagtgtattataagcaacaaatatccatagctcagttagttgaggtggatgacataatatttaaggtcatgggttcaaatcccataatactttgatattttttttatatatttttgannnncccaaaatttaattcgtcttaggctcatatattttaaaggtcggggtgaagctaattaataatagagtactatatcagttaaaaattttagtttttaaggattcaatctagattaaaaaaa

SEQ ID NO: 64044 - DNA, 1202 bp, Cannabis sativa
tgagtaaatagataaaatgagagtgaaagtagcaaactcaactaaacatgaccatcatttcactagaattaacttttgaatatcttttgtaaatggactacacagcattatacacccacaatctcatcatcctcaggcagcaaattcctcaaaatatagtataaaacagacaaacaaagaaataaataaataaaataaaataaaaaaacgaatatataattcaaaaatcagcaaggcagaagcatctatcaaatgatgagcgttaacttatcagaactattttaccaacggcatgaaatttcccttatgatcagataacaaagggtctgaagaaaaagaattcactaatgaaaatgaaaatcaaacaatgcagtaaaatcccagaagcgaaaaagctcaaatttttggcaagaaatgaaaagggtttttgagcagaataaaaacaaagtaattccaaactacaaaacgtcaaaagaactgtgaatgaaacaagtggaagtaatacaagaatccatagaagaaggatgaagatagaaagatgagacctttacctgttccaacataaaaaaaaataaaaaataaaaacaaatgggaaatgaatgactgagaattgtgattttgcggtgtcgttcttgggtgggttgggagtgagctttggggtggagtttggtttgggaatttggtatttaaagggaaaggagggaaacgttattccttccgcttgctcttttgtttgttttttttttttttctttgaagaaatgtttgtgagtcttttattcttccaacactacacaacttgtgtaagaaggcaaaaaagttcacagggaataataatattaataaataaaaacaaagtccaaactttctcacaaaggttaataaaagaaaagtttatggtgctaccccattctttttttttatttatttatttaagcgtttatatattatatcagcataacttggaactcgaacccaggactttcaacacacacgcaccccttatggccacttgagctagcctcaagtggttatggtgctaccccattcataattggaaaattttgtattacaattttttttaatatttgtggaattatttaagatattctctaaaatgttatttaaaaaaaggctaattaagatttttgctccctgaattttgacatgtatcaaatcatgccccctgaactttgacatgta

SEQ ID NO: 64045 - DNA, 870 bp, Cannabis sativa
tttcatgaatgctcaagaagaagaagaaattaataaaaagtagaagaacaccattgcattcaaatccacttcacatgatgatgtgaagatggtgatagtgaaatggaggacatatccctactaagaactttaagaattttttgaagttcaagaagaatgcaaatagatttgataaagaggtaactcaagggagagctcaagaaaagatgatcaaatcatttgttgtgaatgcaaaaagtcctatcatgtgaaaatggagaaatagaagaaggaaaatgatgtctacttggaacgaaagtgaggaagaaagctctaaagatggataacatgagatatctaacacttgcttcatggccattaatgataaagtaagcatttctaatcaaacaaatgattttaaagttgaaagtgatgatgataaaccttatatgtcttatgatgaattaacaaaatctttcaatgatttgtttgttggttttgaaaaattgcttgctaagaactcaactcaaaaaaagaaaaaaaatttattgcttgaagaagttgaggttttgaaagtaaaagaacatgactttttgattgacgcccaatgcaaaaattgttccttatttgaaaaagatattgtaaacttgaaagctaaatttgatgatgttaacaaggtggtttacaattttacaaaagggaaagagatttttgaaatgatgcttaatgtgctttttcaaaaataggtataagatacaatacaagtgtgaaacaaaaatttctttgttaaaatatttaattagtaacttggatttaacttgcacttattgtaatcaacatggtcacactaaatcctatttccatgtgaaaaagaatgcctattttggtaag

SEQ ID NO: 64046 - DNA, 796 bp, Cannabis sativa
aataataataataataacgattaattgagatacacttataattaatatatacatacttaattttaagctaatataaaatgtcccattttagattatcttttttaacatatgtccccctttatattagaaacttaattttgaacaaaattaaattaaatgattataggggtgtttaaataaatagttagggtattaattttggtaaaaatctaattttgagagacattttcatactaatttgtaaaatattgagagtaactaatatttttttataagatttgaagtaattagagtgtttctacatattagttcaataattaagttagatatttaaacaaacaatatatatattatttttagtttttattttaattatgtatatatatatatttttaattatataattagttttttttatgttattcaataaaaaatactttttactaaaaaaatatttaatttaagtgttatttatacaaagaaaatataataatattaaaaatctgttataaactataattttagtttaattattataatactttttattatttttgaaatattattcactttttctattttttaaaataataataataaaaatatattcttttagtagaaaatgataatagagagattttttttttctaaattgcaatggaaatttgaattgtaatattaaaaataaaaaactttatgttatgtagacatatttaatataacatagatatatttaatgattttaaatttgaattataatatttttttaaaggaaaaaaaaaacaacacttttgtt

SEQ ID NO: 64047 - DNA, 960 bp, Cannabis sativa
tttgtacagtttggtgggttttgtggttcttgtacaatgctatgccagcttcatttccccagtacatgacagaggccataaccggtcctttgccggacctgcctggtattaaattgaagaaggaaggagtccctgtggtgtttgtgccggggattctgactggtgggcttgaattgtgggagggtcatcattgtgcagatgggctttttcagaaatgtctttgggtggaacttttggagaagtctataagaggtaaattttaattgtccacaatttcttttgatcaatttatggaatttattatttttgctttatactgtaatttctttttcgaggctttcagattttatgcttttgtttctattagtagattggttaaaatgatggtaaaatcgatttcatttgctaatctatagtacagtaatctaatttcatttgtatagactattgaaagagacttgtttagtgtaaaattttcttttgtttgatgttcaaaactgtactctttattgtttttttgtttttggttttaaaatatatctcttactaaagaattggtaggaaattttagaatatactgtatttcatggcctaatctctgatgttggtatgtgggttgcaaacttcaattatgtacatttttataattatacattactcatcactatacttgtatattgaaatttagaactcaacagttttcatttttataattatacattactcatcactatacttgtatattgaaatttggaactcaacagttttcatttttataattatagtcatcactatacttgaaaattctctatgtataatagggaaatatctaaagtgcttgaataatttcagctttagtgtcactaataggatgaaacaacgttattctggttttctcatggagaagaaaggactttgaaattatcttcggttacaagaattatacctggacaaagaact

SEQ ID NO: 64048 - DNA, 1093 bp, Cannabis sativa
actgtagcgtgccttagcattagggcgttacattcaccaaggatcaaaccttacacacaaaaccatgtcaagagacaagaattgtttacccaattagttattatattaaaaaaaatggtaattgtgaatgttatacaaaaaaaaaaaaattgctttgctttttgttttttagttcttaattgtgtcaaggttaatgttgatggggcgatttttgaaaatgaggagcgttttggcatgggagctattgctcgagactcggctgggagttttattgcagctttcaaaacaagctttctgggcaatgttcaatcgggtatggctgaaattgttggaattaaggaggtgttgagttggatcaagaagcatccttggccaaaggttgttcttgaaactgacagtctgttgtgtgttcaatctattctcagtaatgccattcttacatctcagtttggcttgattgttaatgactgtcgtgctttactttcttctactagtaatattattttacattttgttaaacgatctgcaaataaggctgcgaattgtattgcgaggagctcttatttctccacaggtcgtgagcttcagtggactgattgtcctactgaagttcattctattgtaatgggtgaaatttcatattaatgaaattttaatttttattcaaaaaaatagaaaatggaaaatttgatgattgacatttatctcttacatatgtaatattaagtttctatacacgattttgcattgcaaaaaaaaaaaaagtttctgcacacgattatcgcctataaatgagtctatagacctaaatataagtgatgataatgcttaggatctaatatgatagctgttacaaataatcgacaatatttgatgacattccaacaaaatagttaagaatttaacggtgcaattattaaagtgtaattaaaattgaaataaagtatttgtaattacagcaaaatattaggcaaagcttgaacaaggagacatggacagctttgtgaagcagaggtattaagtcaaacaagggtatcatgatctctaccatgaacatcctaaagtgccgtggtgtaatctggtttgggatagg

SEQ ID NO: 64049 - DNA, 719 bp, Cannabis sativa
tttttttttttttgtagtgggaatcaattttgctgaaaaatcgttttctattgtgagaaattacattagaataaatattatttagatattgtaattttttaaaaattattggttagatcattttatttatttaataatactttaaattttgtattttttaaaattacacaaaataatatctcgagtttaatttttgtcaaaacaaccaaatatagaagtgttatgactagatagactatattttttatatttatttgtgctaaaaattagctttaagtttgttatattaaaaaataaattgacctatacaaatattggattagtgcttaagactatttttataatacaattattgaatatttgaataaaaaattattattcactcataattgtaatttatttacatgccatttatctagaaaaaattatttattatttaatgtgttgattcaaaaattcaaacatagacttttaagccaaactcactcgctaaattgtaaaatatatgttaagtataaataaagagatacatcaatttatagtagttcacttcatgtattgcgataatacgtaatagaactacgtctacttttgagtttttatactgggataagttgaaaaatgcctcttttattaatcaattaaccaaatttgcctctaattttatatttatttgaaacatacctctttttatgtgtattgtacccaaaatacccaga

SEQ ID NO: 64050 - DNA, 1154 bp, Cannabis sativa
tatggctatttagctaaatatattattttttgtggccaacgtaatagtcattctcttttaagataaaataagttttcatttcataaaaaaaataaaataaagtaaaaaataagaaagaaaaagaggagtaagttgaaagagacatttttttagtattttcaattatagtctatttgcacttaatcttccaaacttaaattttagtggtaaaataaaatcctccaaacgactgagctgttagtaaatttaaggtgtcatctatttttttacaggtaactgacaacatggactacttatgtgtacactcttgtacacgtagcacatttatattggtacacataatattattatttaaaaattatttcaaaatttataatattttttatttttataattttatttaattttgaaataaaaatattaagtgtaccaatataaacataccgcgtgtacaagagtgtgcacataaacagttaatggtggcagttagctgtggaatttttctctaaattttttcgtctctcttttctcttagaattcttactacttaagcttctatttatagggtgataaaatgaatactgtgtaaatacacttacgacaaattgcataggggaaatttgcacccaaaatattctaagattaatgtgaataattatagagtatttcaaacctaatcaacggtctgatcgccacccgagatgttctaagaccaattattacactaatcggtagtacgcttgttgacttttctagtcaaaaggcttagatttgtatcaatcaccgttcatatcacccatatgttgtagtttatgcttacattaaccatctacaaggtatttcgaccctaatcaacgatctgatcgcaatccgaaatattttaagattaataattatactaattgacattgttcttattgacgttactagtccaaaggacttgattggtatggatcaccattgatctcactcaaatgtcatagtttatgcttatattgactatttacgaggtattacggacctatgaaatagtgtgatcgccaccacaaatgttctaagatcaacaatggcactaatcggtagtgttcttattgactttatgtagtcaaaaggcttaggtttatgtagatcttctttcatctcacctaaatgtc

SEQ ID NO: 64051 - DNA, 910 bp, Cannabis sativa
  modified_base (543)..(569): a, c, t, g, unknown or other
aggtaaaaatgatagattttaaaaaagagagtaaaaataaaagaggacaatacaaaaagggtatagagtgtaatttcctcaacaattaattactaactttcgtcatttttttataaaaatactttcagatgatattttttacttttttactataatttttataagttttgtactgaaatatactgtattaagtttcactggtgttctactggtattttttagttgttttattgttgttttaagttgttttttttttgtgttctactagtgttttataaaaatacagtatttttaaaaacttttccgtgtgaaagtatttttataaaacttaacctaaattttaatatttttgtaagtttccctttgtttaagggattattttacaataaaaatacaaaaatacggtttcacatcattttaaatttttttacaatttcttttattttatttatagaaaattaggtattttatgttgtactcttgttaattattgttaattttttgttatctatatgttatgatattatttaaatgttattttcnnnnnnnnnnnnnnnnnnnnnnnnnnngttttcgtgttgtttttataaaaaccttataaatgtaaaaaaaaaaaaatctttaaacgttttttttaaaaaatagtatattatgtaattatttttttcatttaatttacataacagtcaactaaatataacattttttgacatttttttttattttcttatatttttaaaagtaattttttggttactaatagtattgataagaaactaattaattacatttacataattttttttatttttatatcataatttgtgatatattttagttacctccaaaatttatttctatacatttattaaatcaattacttatttttattttatattatggtagttta

SEQ ID NO: 64052 - DNA, 1337 bp, Cannabis sativa
  modified_base (1304)..(1311): a, c, t, g, unknown or other
gatggcttcataaagttggaagaatctgtcttgaaagccctgacaagagggcaagttgttgaatagacatagagcatcatatttccccaagtgctatccaacgtgctgaccagcgcagattatctctgccattcaacaatgagaatattggagtctagcacaacaatgatggttttggccaaaataatggtgaaaaagggaaattcaacaattcccttacgccatgaagtctaagggagaaggaggagaagtgtgcatgcttcactcttctgctaaaactcccaaagcaatgcatgcctaccggccatggtgagaggtgtcaccaaaacctgaagcacctgggccatcgagctcgaccaatataggtccacctgtgaacttaacatggccataaaaggctaaactctcaccagcttcatggctaaatataaaagcatatctccccatatctcttaagattcaggaaaaaagtaagagccaaagaagaaggaagagcaagtgcaagacaactcaacgtagaaggtgcattgaccacctactcgatgcaggcatggccctcagggcacttgggggcaatggctacacgaggaaatagaggctagtttcaaagcttctaagaatgaggctgaagatgaagctctaatttctggccccaggctatcacacgaagcgtgggctaaatacctaaacatacaccacaacgctcaattagttgtaggtcatttcctaggtgaatacgcaactcactacaaaaaataatggcctatttgagcttatttcaagacttgttaaattggctcaaaggctgtactagaaggcaagtccctaaagaagatacaatagctaatgcactcgctggactagccaccaacatctagtaagtcgaggaaaactcagcatatgctcagttctctaaagaactaggcatccctatttcaaaaggaatagacatgttgtacaaccatccaatatggatgacacccacagtagcatacctccaaacacaaaccttgacaaaaagtaaggaaaagggggatagttgttgggtgtacaatcctagacagtgtaatgcgcacaaacaggatatctcaatacaacctctaatatgtgttaccaagtaagaagttgagcagctattgacaggagtgcataaacgctctacgacagctatgtcgggggggcaaagccaactaagtgtaaatgggatcaaactgcaacatcaaaatagcctccaaaaggctggccgcgcatgacttcagcaagttgcccggccatggaattaaaaactgttgggttttatgccnnnnnnnnaactccatttcaatgtaatctatttt

SEQ ID NO: 64053 - DNA, 1307 bp, Cannabis sativa
ccactttagattgttgcattcattattttcatggccataatctccatgaaaacggcaaaatttggacatgtcccgtttacttatgtccttttcatgggagcaggtttcttgtacagaactactgacggggtggccatgtagatggtcactaggtcgtcagtcaggacagagaaagcagtaaacttggaaggattctctctaggggtctgttcggctttgcctgcaaactttccctttttccctttgccttgtctgcttgttattagatcttttaccgcccagatttgaactactaggatactggaggtcttggacgaatgttccagctgaaggagcctgcggttggccctgtctaggctcgacatctgctcgttgaatggcttctttaagcttgatgaaaccatctgctcgctcgaggaaatcacttatagagtctacgggaccacttttcttaatatctttccatagctctccaaggaatctcgatgcctcccagtatggtggctaacttcccttcttcagttaaacatgctacttttgtggcctctgtcatgaatctgcttatgtaagctcggagaggctctcctggtctttgcttcacttcgaccaggtcttctaaatgcagtgggagttggcgagaagaagagaattgtgcatgaaactctgaggagaaggctttccaagagttgaaccttcctggtgtcaacttgaagtaccattcctgtgcgacttctgaaagtgtggcagggaaaactctgcaacgcacatctcctcgtaccccttgtaaatcaatttgcatttcaaaatacttgagatgcgataagggatcttctttccctgtatacatcttccaggtcagcaatttcaacttgaggggtagctctagaacattgatctcaggagtaaatggggatctgtgtgctcgatctaactcgagattgttgaacttttgaccggcctagccttcgaacatattttttagttcatccaactatgcttgcatggatggatgaacctgtttggcctcttggccgatcagtgctacgttaagatctctttaagctggatcttgaatgtggattatgggctgagtggccagttgaacatattatttgtctaaacctctcattctattcaaatcatccttgagattatgagatgttcctagtcttttaaatattgaaacaccaagttgtctcagcgactgattggtttggccgatcacttggccagatgctctagtctgggcagagttattgggtataaccccaccagatgaattgctagataaggtctggccacctacc

SEQ ID NO: 64054 - DNA, 1932 bp, Cannabis sativa
atataatttaaactacaacgcttcaaatacccctactgtccctctcccactaaataaaccaaagcatacacgatgtgattgtaataatgatagtaaactgtgtagaaatattattttcttctctttatgaagcaccccttatatgatactatgaaatctcgtcaactttactggtgaattttgatcattgagtacagatcagggaaaacatacaaaacaatggattttgtaaccaaggaacaatgcaatagatgatggaccagaggaataaataaagtaagaaaaaagagtttctgtccacagtattcagtagttatgcttaaattctatccattgaacgttgtccaccaatcaatcatctgtgtgaaaacttagtacctaattatcaacatgtagagctattaatgaacagtacgtcacctggtgcaccactgctgagctaaaacgcaagtcccgcaagactatagacaaaatctcctttatctctgtgtttcaataaacaaaaaagtggtaatcacaacactttccacttcttcaatcaaatgaaaaatataaagacataataaatcatataataataggccacgactgaatacaaaaacaagtgaaaaacaacagaatgccctaaaaacatcaatgaacccttatttgggtcacaaatcattttttttaccttaggtcctcaacaaggaaatagtagcaccccaaggcgtatgataaataaggtataaaccatagcaacaagagtatatctctaacaatcacattaatataatagctactttaattacctcgattatcaaatgtctctggaacaacaagaattgcagcatacatgtttctttcagataggggaatatgcaatttctctatcaaaatccattcccaaattacaagcaagtcctcaagtacctgtgattaataggaaaagtaaagaattagactcaagaaatgaataactagagaccagactccatttcatgcagttatggaagaaatataagaaaagcaagtgtggctgcacacatacattaacaacaatgattttataaatctctatgtcttgcagcgggaagctgataaattatatttttacctgctgcatgggataatgttgtgaaatattcaagtgccccctgcgtataggacgacgtaagcaatagggctctgctggagatattttaagtgcttcctcgccaataatgaactggttaaaactgtttccactagaactaggttctttagcatccgcaccatcatgttgatccccggactcattatttgaacctttattgaccgaactttctgcggagtaaaatcactcatgttacaaattgtatgatatattgtaacaagtgaaatataaattaattaaaactcagccactttcatcactgattgtaaattcaagttacataacatatttgctttagtcataatatttcagctaaacaaacacatagaattgtattgtattcactctctttattcaggcattcatgacataatagaagcaaaactttgaaataatcatggatttcaagaaaataaagcccttcataaactgaagaaaatacatggaaattctctaaccacctgctgctggagatttaacattcttttcatgtacattcgtccaatcaaatgcagtgtccttcctgttattatggggattaaatccatcaacccgtcccatctgcaaaacagcttaagccagtttactaaccgtgactgtttaataccactagctatcatatcagaatctatttctaatatcacaaacatcaaaagtaactttagactgcgcaataaattgaactatacccataccttgcgtggcaaggaattgttggcaacctcttcatcaagaaatggtatcttcaactgcgatgcaaccttttaaaaaacaaggaagcaagtttgaaactagac

SEQ ID NO: 64055 - DNA, 995 bp, Cannabis sativa
tctcattctttgttgttttttttagattactgcgagaccggccgcctctccaagaccctaatttaccacgggtacgtcatgtctgaatttgggggcatggacaaggccgtgaggtgtctgtgggacttgtcagctgagaggagggcattccaggaggaggaccagcagagggaggctcaggcggaggcaaggcaccaggaggagctgaagggtgagggtgaggctgcttccaaggccaagcgcgagttgcgggaaaccaaggacgctatggttgagatggccgctaagttaaaatccttggaggagctgcactaggccgacttgctgtcgacggccaacctgaccgtggatgtgaaggagctgagggactttaaggaccaagccttgaaaaaggccaaaagagatgagctcctgacccccgttgtctgtaagcactcatcaagcgcttcgacgatggtgtttacatggcctggcacaaagccaacaagcttgacttttatcccaaacatgaggaagctcttgatcgcttgcaggagaagaagaagagactagacgccttgcttgaggagcgcagggggcctcatcttccatcccgtattgattaagccagccaatttcaccattatctttcttttcatttttacatttacaggctcttttcctttttttcagacaatttaattattatcttttaaggggagaaagttttttaaggcccgtccctaggcccttaatatttttttaggacttgtttgtgggtcaagacatcttttacatttaaatatatattttgctttagatacatattctgcttgattctgctaaacttttggcctgctttacatttgtccatgtggtatgccttactaccccccttagtggcatgaaaacattgttttttaaggcactcaactttattcataaatttagaggttgcatatacttttcggtacaaattctcttaacaaagcctaagttacattttttgactattg

SEQ ID NO: 64056 - DNA, 922 bp, Cannabis sativa
tagtatatagatatacgtcttcgtcacatatacaaatatattatatctacgtatatatatatgtatgtatttatgggtaagtctgccgtaaatcttataagagacgtattttagtacgattgtctatttattttgatatagagttttttaatttatttttattatttaaaatattttgtaaatttttaaaaatttaattatgaatatagtttacagtgtcaaaaataagatttacatattttattgtacgcgtaactgttttttttatacgcgtagtatagtttacactgtaaattatttgaatttttttaaaaatttataaatgatcttaaataattacagcatatacaattatgaaaaaaaaaatagattaaaaaacttttttagatgccaaaataaataaaaaatctactaaaataacccttttataaagagatctactgaaattttctgtatttcttatctttgtatatagtgtaatattatttctcaagaactaaaccacctgagactaactcaattataagtgatcataaaaggtgtagggaagtacgtgtacatagaaagctctgtattcgagtattaaattatacaatataatataatgtatatataaacgtttcaataataaaaaaaaaaaattctgaagaactagctagctagggagtatactatatacatttattatatactaatataatttaatatataagctatagcttttctctcctcatgtagctaccatgcatgttccaagaattttctcccccaatggccccattctttatttgagtgtatatttaaaagactatctaattgattaaattaaagacaaaagagagaaatgacaatttgcacctgatatatataacaattgatatatataaaacgaagcgttcgaataattattattttgccctct

SEQ ID NO: 64057 - DNA, 1867 bp, Cannabis sativa
caatcttattagatttctgatagtttttcaggacctttttctcttatgattttttcgtctctttttttgatataacctgccacaatttataatcacatataggcaattaattatagagttaactgtaatctttacaatgtttatcccctgaaatcatggagtttgattacatatcacatagtataaatgtggttattatttgaatatcacacagttgtgacttatccgcttttactgggtcaaaaggatcgtgtatttaaacacgttttaaatcacatcatttttggatgtctcgacaggaactcaacattaatgaccttgatagcaagctggaatgtttcccctatccttccgagattgatgatatacatctcgttgtttctttgcttgaagacataacacttaatttttaatagtcacgattctttatgacaaaaagagtacttcagccgccatcattctactatcaacttctgaattgtcaagactataagtctcactgaaagatgtctgaagttgattggtgaaagtaacaggagtgctccttcctataacgagataggtgcctcgctttttaggccttgtgtttacccaactaatatacttagtttgtatattatgcgataagtgtattcacaatcgatatgcatcggtctcgtctccgcaagggtaacgaagttgatgtctcactttatgcatccaatgatgtatggtttctcgttaatacatgagacaacggttcgtacatctttacctcgcataagaccttatagtcagcgagttgcaagtatactctgttacttacgcaattaatgagttatcccattaaaagtgatttcatcgatccatatttcccttggcttgacatgtgtcctttattgaaatggtagttgaattttggatataagagttgcaacttaaaaagttctttttaataaaaattactttttaataattacagagggcactttcatcataatccctatttggaaaaatgcgtcctttcattttgacgggtttacggttttgagggtcattatgaaccgtcttttcatcttatccctcactcacaaccgttagatttcccaacctttggcctttccgcttattgggttctgagtataaaatggtggcctaggcttgccatgttccatatgctcctggttttcggtgagtttcatcctgaaattggattgttattctcttgccaagatgtcccatccgaattcagaaacttgtccctccaaattcgtaacaccagaatgcaccaaccacttttcatctccgtatgctcccaataacttcaaacctcaatttaaatcaaaaacgaaggattccaaggctgtggagcttccgatcaatccaaaccaaggagatgtcgttgatcgttatgggaaatcctcacaagagatttttgagagtaagtatcatcccccgtgaatggtggtttgaactggattatatattttttttagttgctccattgatcttttatctctgtctccacaggaatggaaatagattctgagagcgagtttagaggtcctcctcaggctaacatggaatccaagaggaaggtagtctcaattgacgtggtcatggattctaccaaagaacccaactggcccaagaccgaagcttgcacaagatctttgggccagccaaactctggtgttgaaaaatttcttgaggctaggaatgagttctcggctgcaggaaatgggatcttctgatgcggagaatgaggtctatgcagaggttgagacattttacatgtagagggtctttcttgagctatgtgtagacagtctttcgtcgagctatgtgcagacggactttctcgagttcatcaacccccccccccctt

SEQ ID NO: 64058 - DNA, 1383 bp, Cannabis sativa
aaaattctaaatacaaaaaaaaaagttactttttaatttgtcatattttaaaaaataatatagtttagaaatatttgaacagctacgtgaagtgcaacattgttgcctagttaattaaataaaataagatatcaaactctataaaataccaacaagtatatatgaaactattttattaattttgtgatgattatattagatactaattagtggttaataaatttatttttttgaaagattgcaatatctattaaagataaacaataaagtacagagttaatacttcgatcatgattgagaggaaattctctcaatacgctctctatataagcctaaacaatctctcgctaagttatgagctaaagtgttgatatttctcgggacaaaaactagagatactttaggatagaaagataaggactcaacaatgattgaaattaaactagacaaggtcgaacgatccttttatttatgtttgattttttgaacaagctagaggcaatctattgcagtgtgagagagaagaagtcttattgccatacaccaaaacagagcaatggagagagcttgggcttctgcatacagggggagactgcaccaactcttggggaggcaagggttgcaatgactcggttttgacagtctctcactatagcccctaaatccgtttttccctatgaacatcaaaagcagcatccatattaagtgtaaagtatccaagtggatgggggttgtcattatagcttgaaatctctatgtttgagtttgatggtcgagcagtatgggcgagctagaaaggttgttcacttgggccttagcatagtcctacaaaagcttaacaacataattttttatattcatgttagcaccatatttttttgttaaaaagttcccattcctataattctaaatcatccataaaattccaaataagacccccactagatcctggggcagtgaatcaaactctcaaagaagaatatccttgatatcataatacttgttcgtagagtgcagttccttaaaagaggtttttttttccaaacaagtttagcattggaacattcaatgagggcatgagagatggtctcttcgttcctgaagcagaggggacgggttgggtcttggagaattttcctagtaaaaagatttaggctagaagggagggcgtgagtaaaagctttccaaatgaaatgttttatctttggaggtattgtggtcgtccaaactattttccaccagctttggaaacatgtagggttggatgttgtgggttttttggagggcgctttggacttgacaaggtggtaggctgaatttactgagaaaataccagaagggtgctgaccctagatgaaacagtcttttactgaatggtcaatg

SEQ ID NO: 64059 - DNA, 1803 bp, Cannabis sativa
ttttctttttgccaaagcctgaattgctgttaaacaatcagagcacaccacaattcttgctgctgtcctttgcttgatccaagaaatggccatccagattgcttttgtttcggcttccagtgcagaaccagcggctgccttttccaccttatacatccaggatccatctattacattgattaaaattgcagccaacccagccgaaccctcagaccaggctgcatcagtgacaagaaccacatcgaagtcccttctggagctacagggggattctagaagaggcataggaattggctctaccctctcagttatactcataaaatctccatagttctttctaacacgcattattgatgaggataaattaggctgacctcctttgaatatgattccattcctcaatctccatatttcctcaaagacacacgccatgtgcattaagaaattaggacgaataccaatcgggatagtcttcatcacaagttccacaaactctatcattgacgatccggggaagtttcctatcgtcaaaggaaaaataccagagatccagagggccctggagacttcacaatctctaaatatatggaggcaagtttcttgttcaagaccacatagcaggcgctctttatcctccacaaaaggcaacttattcctagttggaatagcttcattgagaaatctccataaagacactgagagtcttgggtgcatctcacctttccaaatccatttccaaatttcctttttaggattcatgcggtgtccctggtcaacccaataggcactcttcacagagaaggctccactcttgttttctttccaaataacttgatctttgtgagttggtggaagccttggaatttcaataattctctttcccatgccttccccaaagacttgaaatacaatttcctcattccaagtcgttccatcagacagatcagctagtgttttgaaagtgaatctgtttctcctcaattgttccatcagctggccgagttcttcatggttcaaccaaggaatccatggttgtctccatgcgtctatcagacttccatcagctgccatagcaagagatcctttaaggatgacatttcagacttccaacacatttttccaaccataagagtcactatgccttggagagactgtccagaagttctcatatctacaatacttgctaaccagacaattaacccacggcctgttttccttctgagccacagtccaagcgattttgtataataaagccctatttaaattttcaaaccttcttatgccaagccccccagatgatttcggctggcagatgttattccaagccttgtaagcaaggaatctatccttatccgctgatcctatccaccagaatttcctgaccatggcatccatataacgacatatggatagaggtattttcattgtggacatgttatacacaggtaaggaagatgttaccgatttaatcaacgtaagtctgcccgcgtaggatagtaactttgtcttccagccttctaatcgctttctcatgttattcttaaggaactggtactcctctgatttccttcttttaaacacaaaagggttcccaaggtgcttttcctggccattgacttgatcaattcccagcgcctgaagaacctctgcgttccttactgtattttgagagaaaagcacatttgactttgtcttgctacacgtctgacccgaccaagcttcgtacgttgatagacatttcatgatctcagaagcttctctaacatttgctcgagtgaacaaaattgtgtcatcagcaaacat

SEQ ID NO: 64060 - DNA, 1218 bp, Cannabis sativa
tatattctaaaaatacaattaaaaaaatcatcatcatataataagtgttatttgaataaatgaaatccaaataaaattttaaaagcattaatgacatacttataattgcttttttcaaaatttaaaagtatgtagtttttaaatagaaatttatatacttctttttctcacaacaaatacttcttttttttttttccctcaaaaaaaaaaaaaaaatacttcttttttcacaataaacaaaaatttactttaaagtaacacacacttccacatttccaataatgaaaaaaaaaaaaaaatacattcttcttttccaatgattatataaatgaaaaataaaaattaaagcaaaagtatacattatacataaataataataataaaaaaaacgtttcctcccttaaatatatttgcattaaagataatttattgtgtgttaaaaaaaagataattaattgtgatattcaaactaatcttagttttttcaaaaattaaaaaaaaaataattaaagttaatattatgtaattactaattattccttaaatctttcttatttattcatttaattcaattatatcattcccacgtttttattcaattcaaaaaacatccaaaaaaaaaaaaaaaaccttctcttttctcttctcttctcttctctttctactgttctttcttgcttttcttcttcttccgcctttttcttcttcttcttcaagcttcgttaactgagtctcattgttcagaagaaggatcacaacaccataatcggagagtgagtaaccatccaatgacttggtaggtaaatcttctcctttttaattttggctgattttttcactaaatgatcttttttgaactcgttcatgtctgaactaggtttttaatttctatttaattgaatggaagcatttcatttctgggttttctgtaaaaatcatttcttgtaagtttttgaagttaaatgtttgttcttttttagttactgtgcaagattttgattttttttttttagattattttgttgggatcagatcaaaatcaattactttgtgctttttttgttatttttcttgatcaaattactggttttatgaaggtgtctttttaaagaaattctatgttatgatcaaattagttgtatttatataactgtgattggatattatttcattctttttttaattatttaaaacttagctttatgtatcaactttatg

SEQ ID NO: 64061 - DNA, 708 bp, Cannabis sativa
tgtattgtttaactctcggaccactcattcctatgtggcagccaaatttttaataaattgggtagaccgtatgatagttatgagaaagggtttgcaaccttactgcctggcgaagaattagttatctccaaaatgtggattacattacgtctatcccaatcagaattattgaggatagggagttgagtgctgatttggtagaattgggtttagcggattttgatattatacttggaaatgatttcttgtccaagtactcagctagtattgattgtaaacgaaagatggtaattttccaacccaagggtgaggaacagtttgtttttgtgggatcagttcagggatcccaaattccaataatctcgatactgaaagttagagaattattacaagacggatgccttggatttctggtagtggtattggataccacacgacctgagtcaattcggccagaggacatcagggtggttcaggaatttctaaatatttttcctgatgaacttttgggtttaccaccacagagggaaatcgattttgttatcgatttagcaccaagagcagaactagtttctaaggcatcgtacagaatggctctggcggagcttaaagaagattcagctttagaggttgcttgacctagggttttcacgacctagtgtgtcaccctggggagctcccgttttatttgttaagaagaaagacagg

SEQ ID NO: 64062 - DNA, 1287 bp, Cannabis sativa
ggtatcttaggtatggcaaaaaaatccatttattcagatcgggttgaagctccaatccgacaaatcaattctgatccaaaatatttagatacttattgaattttgaatttgatccaacacgcctattttttttttcaatatattaaaaaaaaaaatctgagatctgagtctctaaatctattttatataaaatgtgactatgtaacaaaatttttagtttaatgatattttttgattttctacgttaactttaacagaatatactattatataatgtggatttatttcagtaattaggaaagttgactacagctgtatataggaatctattttgtattaataccaaatattttgtatatttattctttctaaaattaggggattttaatggtgtactttctagaatacgctatttatatttattaggtctgattctaagttgtatatatattccctctctttgagataataatacacagaaaatattcaaaattcgcatggtatcagagcaaggttctgttgcctagctctccaatttttttttctcctcttctctgtgtccatctctgtccttttctgactaccatggctgccgaaaaagacaactccatatcagaggtaacctccaagaccttctcaccagatcagcccatctctactccaactctctctcacagcaacaaagttatctccctggttaccagtcacaaatttaatgggcataattatcttcaatggtctcaatctttggtgatgtatattggtggaaaaggcaaggaggagtatctcacgtgtgaaatctctactccaaaacaagatgatcctacattcaaagcttggaaatctgataatcacgtgattaaatcatggctgatcagttctatgaacaatgatataggagaaaattttctcttatatgccacagcaaaggaattatgggatgctgtcaaagattcttattcaagttctgaaaaatacctcagaactttttgcaattgaagctgccttgttcgatctccgccaagatgatacctcggtcacccaatacttcaacactctcacacggtattggcagcagctggatttatttgaggaatatgcttggaaatgcagtgatgacactactctatatcgtgctattgtggagagaaagagaactttcaaatttcttcatggccttaacaaaaatcttgacccaatgcggagtcgaatcatgagcaccaagccacttcctaaggtcaaagaagcattttctgaagtccatcttgaagaaagtaggaaaaaggt

SEQ ID NO: 64063 - DNA, 1012 bp, Cannabis sativa
gtgtaaataccttaattgccacgtgtttatgagtttcatgtgaattttgtgctgggtttgaggggaatgccgtcttagaaaaagattttattttccttttatgtaaaagggtctttataattatagttgttattgaataatatgctatgactacatctttagaaactttcatgaagcttttaataatgtgtgtaacttagagtgatgttaatattttttaggtaaaacattgattgtagtttataagtttagattgcgtttagtaattattttatttttttatttttttaatcataaaaataaaagtaaaaattttatttttaaaataaaaatgtattctatcaccacttttattttcagttttaaaaacagagaaaacagtgtgttctcagggctggccctgaaatttagtgggccatagagaaaaaaatatttctagctctcatttagaaaaaaatgaggtatttttgaaaattaataaaaaaaaatgtataattttaaaaggggataaattttttttgggtgcctgagctaggtgggccctaggcacaggcctagcgcgcctatgctcagggccggccctgtgtgttctataagtataaaattgagggaaattttacaaaatcatgcaaggtgaaactaaaagataaattttattttaacccttgcacacattaagagaaagctaatctatttattcaattttattttttttttcttttcaaaataatcaaatatttgatatcattaaaaacatggagattgtttacttaaattcttaggtctcctcgttttgatgattattaaatatttgttactaatgatttgtggattttgtagcacaataaaagataaaataaatttttctaaggtaaacttaacactaagggcaaaatagtaattttactaaaattctcgaaagtgacccaaaatagattccaagactcaaggaactcaagacaagacttcataaaggtttatttatattttttttagtcttgtacagtgattt

SEQ ID NO: 64064 - DNA, 1052 bp, Cannabis sativa
tattttttaattttaaaaaataaaataataataattaattaataaaaaatcataaaaataaataaattatttacatatctttttagttttacttaacaattatttatatactagaaaaaaaaaagaaaagaaaaaaaagaagaaaaagggcagccttcgtcccccagttccttctggctaagcttcaccagtttcctccacggtgcaacctatccatcgacggtgagaccccttctgtcacagcttaagaaaccttgcccatcgttggtcgtctgaaatcgcaccacctccgatctcaccccatcaacccagattgactcatctaaaactcgcaagctcaacttctatcctccgaccaacctctgatcgtgcacttcagctttggttcgcatgatctctgtcaatctaaaaatcgcaccactcgagtcgtcgtccaccattccagacaaattaaaaaccattatcaataaatggtttttttttatttgcacattttatctcttcagtttatcgtcttctccccttcttccccttcatcttctttctcttcttcttcatggctaccagagttgggaggagctcaaatcttagatctggctgtgtttgggtaggtgtgatgggagcataggatttcataatttttccttagtttaaactaattttcagatctcacgaacagtagatctgagctaaggctttgtgggcatcattgcccattggatatggggtttgtatctatccatctttggcattaaaattacaaatctagtgaaacagcaggaaagtctccatcttgggttagttttaagctcggaacacactgtgaaatcgggatctaatattggggcttgttgtctctcatgttggagcttacgaaaatgcaactgaagatgggaaaggatcgagacgccggagcttgggaagaaggtcgaagctagggaagatgggtggaatggacaatcgaaggggaactgggaaagaagaagaaaaaacaaattaattagttttaattattgtaaaaaaaaaaaataataattttttagttttttttt

SEQ ID NO: 64065 - DNA, 1071 bp, Cannabis sativa
aggaatttcttccatctttttcttggatttttcatcttttgaggattgctctgttgtgaatacaaaatggctagctaaaggagcttgagtttcttttccatcctccatattgaaccttttaatgaccttttcaatgtatgattgttgtgtcagtagcagcttcttttctttcttgtctctcttgatttcaacgcctaggatttttctagcaactcccatatttttcatcttactcactgtttaggacatacttcagtttgcttatttggttttgatcctttctcataataagcaagtcatcaacatagatcagtaggaaggttgcagcttgtgaattcaaatttgtgaaatacaagcatgtgtcaaacttgaatctgatgtaaccaaattttgtgaccactgaatcaatcttcttgtaccattgccttggagattgcttcagaccatatagtgacatcttcaatagacaaaccagctccccttctttggattccaccttgaatccttcaggctgctccatgtatatagtttcttcaagttttccaataaaaaatgttgtttttacatccatttgctgtatgtcttagtcaagttgaacagcaatagcaatcatcattcttattgtcttcattttaacaactggagagaaaatttctaggtaatctaccccttcaacttgtgtgaatccttttgcaactagcctagccttgtacacctttcgttcatcctcagttaggtaagtttgcatgagtatagtttaagagtaaaccttgtttagacaactccaccaatccttgctaactgatatggcccaatttggcatgccaaagcttggaatcgatcttgtctttggtgactgctgcagctatgcaggggtcattgtttttccatccaagaagtacaagccatgtttcttgataactctcatgacaagtaatgaacctttagtgatcctcatagtcgccttaccagttttgtactcaaacctttcatcatcaagagtgtgacagtcagtagtcccgtgatccgtaaagggaaataatgggtaagctgtgcaatcccacaccgcct

SEQ ID NO: 64066 - DNA, 536 bp, Cannabis sativa
cttgtgttttaaaaattttaaaaattattttttgtttggcaaaagatgctctaaatcttttgtttggcaaaagggcgtgaaagagggagaggagagtagaccctccaaactttgaaaattcaattcctcaaacttttggaaaattgtaaaaaatgaataaaagaaaaaaaaaattaacacaataattatcttactaaaaagtgactgaaatttatattcacaaagataattttataattttactaatatttttttctccattcttccaatttcacacccaataccaaatgacataaagtagagtaactatcatctttatccttcctacttcccatcctctctaatccatccattccttctactcttcttttttcctaccaaacatagcgtcatcagtttgcaacagctttagagtccaaccattatgctaaggattatctataatttacatcaatatttacccaaatatccaaaagaaggtgttctgatacattttgtaaccaaaaattaagtcaatcaaaatatcgagatatata

SEQ ID NO: 64067 - DNA, 675 bp, Cannabis sativa
tttaagggaaatttggagatcaccaactttagtatcatattgcctcttgttttattttgtttatttttctttttgcttgaggacaagcaaagttttaagtttacggtgtaataaatagagttatttatatcttttttagtattaaattagctttgttctcaagtattttttatttattttagtgacttttattttgttttatttagttttgcataaatattaattttagtactgttagattaatttttaattaaattgtaatattttatcaattttatttagtttctcatttataagtgttaatctcaatattgtgtattcttgtaaaatgtttaaatgcatattttggacttatcacatgagtcaaattatggagctagaatttcatcaaagtgtcatcaaaatcactaaggcctaaattgattgataattatttatagtgggctaacaattaaaatattgggcttttaattcatcaattgatccaaatgttagcaagaggaaaaataaaagaaatgcaaaagtgacatttaggtggcccaaaaaagatgcagcccaaaaagaatatattaacttcatttgacttgaagagcctagcagtaggcgtgaataagagaaaagaatgggctgccttgtatatatatatatatatatatatatatgagcattgctatt

SEQ ID NO: 64068 - DNA, 1992 bp, Cannabis sativa
atgcataaatgctttgaaggggcaaaatagtcatgctcagtccgttctgataagatcaacgcttaaagaaagtgcaaagacttgcgcatagatcaacatcaacaatatgctactatgaacaacattaccgatcaaacatataagatacactagactaagctcaaacatactattcctaccttgaaaatgaagttgcatacaactaacaagggaaataaggtacttattgagtggtgacgattggtggataacgacattgtgtgaggtaacgcgactttggtgtgcctggtaaaatgcacaatcgggatcggtctggctgatggagttttgttcagtgaagaataggctgaatcaaaattgaagacctctggtgcaaaggatgaaaattttgaagtttgaaataagatgaggaggctatgggcatttaatacgtgctgatcagagtcccttctatgcaaagcaaacgatcccgatcatttgccaaaatagcatatattaatctaacaaatgaaaagtcgaaaagattgtatcagtataaacgtttttaacgtccattatggcatgtctcatgaagagttcttgataagtgaagggtcacctcaatcactctgctatcattttaacttcttctaagaaaatcaccatgttcacgcgtactgtcagaaattgtatttagagtgctgccaatttaccgtgctaacgatacaactagtgatgcattggtttacaacaattcacgtgacacaaagtgaccttaactcgcaccacgtgccaagaaccagtcatgagaaaataagggacactacaagctcccagaccgtgaagcatcccaaaagcttgggaataaatgttgtctggatttttgtaaaaacatgacacgtggaatccaatgaagaaggtctagttaatctttagatgattagagccttctgccctagcttctataaaaggcttttccgaaaggtacatccttcgcaaggcagagggcatgtggaggcacaagtgtgcatgctatctctccctccagcgtgcagaagaaaaggtgctcctcccagacctggagagagtcgcagaaaggcccttctcgtgtacgtccatgtaagtagtgaaaagactcggaaggatttttactcccatgcaatatcgtggaaggtcatctttcgtacttgtcagaccactgaattgatggcgatactttttctggtacaatgtcagtttttgtcccctacatcaggccatagtacgatgcatgcgcatcgtcgtacctgcctattgcccaacaaccatcgagtgattttagaaggaaagacctttgggtgacaagtattatatgttcgaacggtacgagtcattatctctgcacatcgcacgatgaagcgactacctaccaagcggatggtaagatctcttgcagtaagggtggtcctgaaggcatgttgattaagaaacctcctataaatacccctatttatcatgtacaaaaagagaacaatttcttaacctacggaacctttaattcctacaagcttcttcttcttcaaggggaacgaaaggaatagagagttcatgttcgtactgtaaacacttgtaatattcaacacttgcctataatgccaatacaacggactcgtggattaaggataattaacgcatgaatcatgtagaaaattatgtctattatttattatttttatttctcttaagttgtaattaatcggtttctgaaaatttgaataaagatttagtatactacaccaaaagttcatacagatcattctatttgtattttaatctgtaattctttatattgatcttgtttatcatgatatcattttccttaggttttttatttatcggttttgtaggatgtctcatgtgatatctttttctttaggttgttgttctccgtcttcaactcaagtcatatatgctcagaggaaatttgctagaacatccattgctatgtgttacgtgcagtctatgatggcacgt

SEQ ID NO: 64069 - DNA, 568 bp, Cannabis sativa
aaaataaatattccaacaaaaatagccttattttaaattcaattgaaatgcattttttttttataaatctattaccgattatactctcaagtactgttcaggaaggtgaggaaggtttttcttcattacataagggtataattagaatataacaaataaaagacggtataaattgcatatatagaaaagaaagataaaaataaaatgggttaacaaaaaaaagagtataaggtgcaattttcaccttaatgttcactaatcctttacaaattaataagtattagaggtataaactaatagtttaactcaatataaacatatttttttatataatgtaaaaagtgatatattttgatatattttttttaattaagtagttaaattaagtataaaaattcaaaattttcttttatttttcgttattagattaaaatctaatagtttaataattttaaaattaatatttataattaaattgtttagtaaccatcaatgagtaatacccattaagaagtgttccatatatatatattaattgcttcagattagtcattcgtcactcaatact

SEQ ID NO: 64070 - DNA, 1076 bp, Cannabis sativa
aaagcagaagttggtccttctttttccacaacgtatactcaggattaacacctccattaacaagatgctgagttggatgttcgccgatgaagaggatttcatctatgtcatgaccaaagacagtcggtataacttgggattttcaagaaaggaaattgttacgatccagcttgatcgtaaggttcgttgtgagagaatgggagaaaggattccaagcatgaatcgaagaagttggttgtgtagccatagcagcagcggtagtgattctaggatcagaggttgaagatgacatattgaagaatgtcagttggcgattgataccatgttaagtgtagaaacaagaacaatagaattctggtgcaatgcaccagagtagaaaacagagaaaataaaaaacaagagagtaacaatgcaactaactgcatcctctcataactaagctcttatttatatacttgaagtaatacacagggaaaaaggaaataacagaaaagttttaactaactttctaacagaaaaaattgaactaactgttaatactaacaagtattactataaattcaataattgtcaagaatctcatttatgttaataaaattctgaattaacatgtaccttataattttatattttatgtagattataactattaaatttaattgactcacattaatatttatattagtagcttttttattgaaaatattgatgatactctcactaccatcgccattgctacgcccactacttaagttgtttttactttatcagcgcaattaattttagttagatgatcttattagtcatcttacaaccgacagatctaatcacaactgttccaatataattggatattcaataataattggatcagatcaactgtaatttttgaaaattcaaatggatcagatcggttgttgaataggacatccgattcaatagacaatcgtaccaaattgatctaattattatctatttgccatctaatgatacttatatatttttaaaatatatttactaattttatatatttatttattgaaaaatattaattaattttatttttaatatgcatt

SEQ ID NO: 64071 - DNA, 1656 bp, Cannabis sativa
ggtcataaggtacttaattgctgaatgatcagtatacacaataaccttattcccaatcaagtacgacctgaatttgacacatgcaaagactattgccaacatctctttctcagtagttgcgtaatttaactatgcatcattcaatgttctactagcacaatagatagtgtaaaacaccttgtccactctttgtcccaatacatccccaataacataatcactcgcatcacacatcaattcaaaaggaagctcccaattaggtgcaatgactattggtgcagaaatcaacttttccttcaaagtttgaaaagccttcatgcactcttcctaaactcaaagggcactccattcataagcaacccagacaatgactttaaaattcttgaggaatctttaatgaatcttcgataaaagcccgcatgtcccaagaaactacgaacactcttcactgaaactggaggaggtaaattctcaatagtagacaccttagccttgtcgacttcaatgaccttttttgagattttgtgacccaacactattcattctttgaccatgaaatgacacttctcccaagtacgtaccaaattaaactcttcacaacgtatcaacactaactccaagttctacaaacaatgatcaaaagaaaagccaaacccaagaaatcatctataaaaatctatatacatttctccatcaagtctaaaaatataaccatcatacacttttggaatgttgtcggtgcattataaagtccaaacgaaattcttctgaaagcaaatgtgatatagggacatgtaaatgttgttttctcctaatcttttgatgcaatggctatttgatggtacccagaataaccatccaagaaacagtaatactcatgccttgccaatctatccaacatttgatcaataaaaggaagtggtaaatggtccttccttatggccttgttgagctttgcagtagtctattcaaatcatccaatctgtaacagttcaagttagaatcaaaataatctttatttttgttttaaaaaaataaacccacaggtcacaagatcggaacttgactcttatactgctgatgatttttcaattggtataaagtaaaatagttataatttgtatttggtctatagagtaaattagatataatatagaagtgtaattgttaagatgggtattagtaaatagtgtgtaagtgatgatgttggcaagttgagtgtgaattgattaaataaaagattattaaaatgtatataaagaatgaaactcaggataagttaataggattcattaattttggttgctcttggttacacaatttgaaatcctaaatggagtatttgtagttatttatcctatacactttatgattaaaattattttttctaaatccttcttttactaaaaataattatattcatgtaaatttaaatatttttaaagtcgatttaattactaataaaaatgtgtagcaagttttaatacttctacaaacagtttggatctctttcaataacaacaaatccaaagatgtgtgcaatattttaataaattagatgagtgataaaaagaaagaataaaaaaaataatttgcaccataaatatttaaaattaattacaaataagtatctaaatttaattttagttgaaactt

SEQ ID NO: 64072 - DNA, 539 bp, Cannabis sativa
cctcccaaatttagtctccatgaatcaaggaggctttattaaagggagattcatagggcataacataatgatttgtcaagatttattaagacattatgggaggaagaccaacaaaccttcttgtatcatcaagttagattttcagaaggcatatgacaccatagaatgggactttcttgaagtttcttgaagaaatgatgtagggacttttatttccatctaagttcattaaacttgtgatgacatgtgtgagaaccccacggttctcactgatgtttaatggaactttacatggttattttgagtcagaaagaggtcttagacagggtgatcctatgcctcctcttttatctatgctgggaatggaatacctcactcgaataatggggagaataggggaaaaaagagacttctacttccatgacaggtgtgcagccacttttctaaatcatttagcctttgctgatgatgtattactcttctgcaatggagatttcaggagtgtctattacttgctacaaggcctcaagctattctct

SEQ ID NO: 64073 - DNA, 1185 bp, Cannabis sativa
ttttgctgatttgaatagaaagatggatactcttattaaggtattattttttgtttcctttttaagtagtttgtttggttgtttttgtattgtttttttattcaagttttctttttttcctagtcttcgcattctgcttatagccaccggtcgagccaaacaacggatgtgctccgctcctcaaaaaatgatgatgatcttgttggtgatggtgaaaaagaggatgaggaagaaattgatttcgaggatgacgatgagcccggagatgatgatgttaagagtgatgatggtgttgattataatgccaattacgacactggtggtggtggtccagatgatgatgatgatgattgtgggggcagagatgatcgtggacagtctgtgtccattgttgctattgatggtggtgcaaagcctgataaagatgtagtagatgtatctactgcacaagagtgcataaaaattgctgataaattagttgatgctttagggatttttggtgatttgaaagaggtttatttttgagttgttttgttattattttactggttttcttgtcttgctttgaaatttttttttttttgttttattgtatttttttattttattaatcaggatttattttcttatgatgatttgattgatgttggtgcttctatggcttgtggtgttcaagtttttgaaaagatggtattttttttatccattgtttgttttaaagttgtttatgtttgtttttaaatatttattatttttattgttttgttatttttgacattagtttttttttttaagatagagtcttcctctactgctgttgttgctgatcagtcttctgtttcctctggtttgtaaggtttggttcaaaatgatgtctgtgacattgttgtttttgaggagacaccaatcttaattcctagagagagggacatgaagaaggggttgtgttaaagtctccctttattgaactaggttcttctaatgttaaattagattcaatgtctaattctcctaataattttgattttaaaatggtgaaatatgtgcatggattatgtccacttgatgataagattggtgaacccgttgagctaatttttgaggctgcttttgatgtttggttaagccagggtctccgattgaagaaatatatcaactcaatttttttttattattcctttgtgt

SEQ ID NO: 64074 - DNA, 2900 bp, Cannabis sativa
aaaagtacaaaagcattacttgaagggttacaagaaaataattttggggagtaaatgttatacccaattttctaaaaaaaaaaaatggatactttagcacaagggccaacatgccaagagtaccttgaagacactcaagtcaaccctgggacttggaacatgacttacaaaggccaaacaagttaagacattctacttgagggccccatggcacctctagatgactcgaaaacattaaccaaccatttggtgccgggactcacacacccaagtgtgctgaaactagggtttatgggcccgcacgatctttttcaccctagagacctcaatccgacaaggaaacaaacaaggacttgactcatttaggcataaaaaggcttgaacttgaacataatgtcaaaattgcataagtatcccatgcaacatggcctatgcaaccactgccacatgaacatggcagtgctctccttctttctgggagcactatcacaaggtgatggcagttctctctactctcaaaataccaaaggagacttgtcaaaatgtgttccctcaacacccaagagtacaacataggtgaaagaaaccatttcccaccaaggaacaagcctagccaacctgtgccatctttgtgcacaaataaatggcacaggtcggccacatcaaatggggatatgatttcttgccaaaagtactttttcatcatcaacatgtcaaaaccaagagagaaaaaccaccaagttgtatagaaaccacttagttgaccactgccatctttgtggcataaaaagtggcagaggttatccacatctaagaatgaggagtttctttggaaagtgtatttctaacatcaatgtatcaaataaaagtgagaaaaatcacccaagggtgtacaacccttataggtaaccattgtcatctttttggccaaaaagatggcggtgctctcttcaccaattgccaagaaccaatgtgaccacagtgattttttagcgtcatatgactaaaataagcaagaaataccatccaaggcttcccataagccatggccaaccactgccaccttttggcaccaattggtgacagtggtctccaattagggttttagacgtcaaaattaggttttggggtcccgggaccccaaaaatatggttcaccataaaaaattcaaaaattaccttgaggggtccgagtacatgcacaactgaaaattgccatttggacatggcagagctcacattttgagcaaaaaagtacatactacccttcagtaaatagggcataactcccttaatttttatcaaaattacatagttcaacttgcattggaaatatcttttcaagaaggatatatgtgtctctcatagtcatagctcaattctgaagttatcgagctcaaaattagctcacaagacaggctgatacactttactcgagaattgagcgatgtaattaagtgtgagatgttagagagctatgccacagcccatgtggaatcatatgcgagaagtgccatcccaaaatacctctttccaatacttctctctaatttcatgaatttcaagcttagaggtgacatcccttgtcactgctctctaatttggtatattctagccgagaataaccattttcctaatgtttgtgggatattggtctaggaataagagagatttttgtacatatttatttatttgtaatttttattcatgattggaaataagatacgggatttgaaagtgagacacactgacatttgggggatcattgacaaaccctaagcctatataaagatagtgataggcaagttataggggatcaattgcttgcttgctggacggctgctaagaacatttcacccattgatatttactttcttcatcttttttcccaagtccttcacactttgtcgacactaagcctccattactcaaacactattgatatacatagttgccaaaaacaagagaccattctcatttcttgcttccattggtgtattgttcccaagaatattagcaccaccattattatcaagtttatggtattgggtctcccgtgaatcttttacccataagctttgatatcaatttcgcatagaaatttctttttgtagtattatccatacactcttgtgaacataacaccagtgtcctttttatttattgtaattttatttagccaactcaattcattgcattcttcttattttttacaatcttcttagatcaattaacgaaaaactgcgtctgcaaatatatttacttaactatcttaattattcacttaattataaaagtgagtaattaattcgttgtttggtttgtttttttagagagaaaccctattggaagggatagtgatggctacaagtgaaatacggtgacgagaacatctttgaatatgatcaagtgacgactataggtgagatacaacaatgatagcaattttgaataatatagttttctagatttatcaattgtctttttttttttttttaatatatagatctctattttgtgtgatgataattctatttctaatatttttttcactataacatttgataaataacttaatatctaaaatataccattagaattttaaatttgattagttacaattttttctactttctcattattaattaatggattttattttgtacatttcttatatataaaaaaaaaatcaaatttaattatgtataaaagtaagtagttaactcattgtttgatttgttttgtatacacaacaaacatgttgggaaggatagttaactacaattgagatataacgataacaacaccttgaatataatgttgactagaagtgaaagagataaagtgatgagaacggttttgaaattaggggtgttcattaagtatccgatccaattcaat

SEQ ID NO: 64075 - DNA, 1050 bp, Cannabis sativa
  modified_base (884)..(884): a, c, t, g, unknown or other
  modified_base (963)..(970): a, c, t, g, unknown or other
agatatttacctaattgaattaattgaataattaattaaccaaaaaaaaaaaaatcctatagggacagggcataagctacgcgcctaccttgttgtttaggataaggttggtgtctcttgtcctgacaaatcttgtctcgacaaattttgtcttaataatttttatcttttttcttatttaattaatttgaaaaaaatatttatttattacaaaaagaaataattactattttgccaattcaaagtagattttcttttcgaatatctttatacaactttttatccttacccttgataatatttctaagtggcaattcggggaccatggacctacaattcgaaactccaataaactatattatttatcgagtctcatcaactaaataatctattgtttattaattccataattactccactataaatatgaaattgcactcttagtaattatagaattatatttactgagtttaactgtagtatccattgatataatcaattacagtgattaaccctccatgtgttggttcgtaaatagttttggtcaaaatgttgttttacctttctaattacttctttatcctttagttccattaattcactagtagaagtataattcaagatcccagttaaatttgtgcacaacattccagttttagaattaatacttaaagggaaccaacattcgatcttttaggaaagtcgtgattccataattgtacatcatattcccagccatccatgttattagattctcaaaacagaagttgtaacaatcatcttctctgagaaactttaacaagtgaatcaaagaaaataataacatgaatataagttcatgataactcaagatttaggtcgatctactattgatcatcgttatnatatgaattaggtctttatgataatgatatgttaataaagacaactttattcatatcggtccttgtcatatataatctnnnnnnnntacaacaccttcactttgatgtctgactacattcgtaatctaaactaagattacttgcaccgaagaacgagcatcggtga

SEQ ID NO: 64076 - DNA, 6283 bp, Cannabis sativa
attttttttttctaaaatatatatagtccccccatacataattataaatttttagagatttttttgatataattatataatattatattaaatatgactatataacgttctttttaaaataacacaatttaaatttaaactttaaatctctatttcttttatctcttacattatagcagtgcttggttagaggtaatgaaatagaatgtaataaaaaaaaaaaaatttattccattcttttatttagttacatattgaaatagaatgactttttcaattttttggtagaatgaccattccattataaaatagaaagaaagaccattacaatgtatgataatagttttttatgcattttaaattttatttcattacatttttattcttattctcattctaatttctattcttatgttttctttcctcctaactaaataccacctaattgtgtcttttttaacattacatttcaaaattaatcccatttcacacgtctaaaaaatatcttcatattaattttttatttaattcacatatttttaaaaaatatatttctattattattttttttaaaacaataaaataaaaaaattatttatattttttaacaaattattgttataacgttgttactttttgtcacgttaataaaaagagtataatatttataaagaaataaatattaaaattataattgacaataaaatttaaatattattaattttttttatatacatatcacttaaattaaatattttttaaataaaatataattttatttattaaataatattaattaaaaaaaaaattaatcttacataaccaaaataattacacctaatattaacctatttatatatataaaaaaatacactcaatagacttgatattgatatgggaaaaaactgaggggggaatgagaccccatattatataatttttttttttacgtaaacatctgattaaatttgaacagaaattcaactttaagttcttctggccctagacatatccaaatttcaccactgaccaagtatccttaggtgggcagtcaaaaataaggagatttccctttagacatgtccataaaatacaaatattgaaaaatcaaatttaaccaataagaaaagagggagagaaggattcagaaaaattagagtttcttctaacattataacactttacctgactgtacaactcttgattattagtccatcctcaaaatatatcccctaggtgacttccttatcagacatccggctttcctcacattcttcttcgcgttgttccgtgtcgttctcagttattcttttctcctgatttacacgttcctcacttcctgttcctgatgaaacaccttcttggggggcaatacccgctgctgcattttcaccgccctccttagaagtagcagatggtgaattttctcttacaccacttgagtcggtacaagagctacttggtggcagccacacaaatttcaaatcatgcccttgccaggatttcccattagtaaatgccttctcggctgagcgacgtgctatgaaactcacacgagcagagcactctttggataactctgactcactactgccattacaagcttccacagcttctagctccacattggatatgtcgccataaggtaaaaagtgttccctcatcacagcaacctagaatgcatgagaaagcatcattgttataattgtactatgaataacaaacctgaactacgactgaagaaaaaaaaaatattagcagaaataaatatgagatcttggtaagaggagagagaggcttacattagcaaagccagttggtaaaggtggaaggattctaaatgcagtaggacgattgtccaacttgtatctattcaccagaaaaggtgaccccgctggtgtaaaaggacgaactgggtgctgctttgagcccatagattcctgcagcacggcagttgtattggatttaggagtgtgagagattgcattttctcccttgttcttgccagatactgtattagttttaggactatgggagagtgcattttcccccttgttcttgtcagacgtcatatcagcatgttgtgatatgacaacaggagtagcagctttggtaacatcagctgctatctccactttaggtcttttagcaggctgttccatgtctaactcacccttggttcccgtagcctgcacaatattgaaactgagattcatatatgcacccattttatgtaataaggattaactaattcacacaaattttatcgatgaaaaccatttataaaaagataatatcatatgcaaaccattatacagtgtcttatcaacatatgaacagcaatgctaatataaaacataaagaatagaaaatttagggagcacacaagttgcacagcctgtatgaagcatgaaatattagtacaaatgtaattaaatcaaacccaacgtataaataattcaaatgataatgacacaagatcttacctgtttgttgagtttgtccaacttgcggcggaaatcatttcgcttctggtctagcatttcctgtttcttgcgaagttctatcttcagttgctctaaagtctctaacttcttctgtgtgggaggtgtaaccttggaaccatttgagacaatgggccttgggttgtcaaaggcagttaaagaagtatcatgagcatgaacgaaactactcttaggtgcaccagcttggaggacactatctttactactacttgcaatagatgaatggggtggaacagaaacagctgctacaccacggggtgttgcagaaatgctagtaccagggccactactatcatcaggaatactgtcacgatttgcccaaaatagcttgataaagcgattacccattacagcatctggtgaattcaaagctgcatcagcttcttccctctttgaaaactggacaaaagctcgatcactgctcaatggtatgtaaatgtcaataacctctccaaacttctgaaaatgagaaagaagagcctctcttctgttgtttttaagaggaatcccattgacaaatagagtacgcagtgctttttgaggtggttttcgattgtttcgaatatcaaattgtgcctttgcagataaatccaaaggtttttgaccagcatcctcagcaataattcgctttccttggcgaaatgagttttgaatccctgtagatgccaacttatcttctttgttgtcaccctcaatataatctgaggaagttatttgaggatcaatcttctcctttacatctaatctactttttgaaccgccaattctaccccaaacagatgtaccatgtgaaccaccaacagcatttccagtgcttcttactgggagttcattatcagcaggatcaccattcaacaaggattcagtttcatcaatcttaggtgaatttatacctaaaagtgcattagttgtttcaggaccattattattccacagtggttgatcaggatcgtacaaatcagctgcagccacacaactagaaccagaaaatgaggcgttcaaccccaagacatcatcagcgaaaccaggcttactcatgttgatatgtaaccctttactgttcattgatgtaagtgaagaggcactaatcgatggtatagacccaggcccagctccactgtttgttccaagtagatgtgcacttggaagagatacgggaaggttaaactgtgagagactctgtagtttggggaaaatgaaaattccttaatacaaccctaaaaaataaataaacaataacaacaacgatgtacgacagcatattatcatttaccaaacccatgtatgttcaacttgacaacaaaatcatgtgatgatgattgacatggattgtaacctaaatgacttaatacagatgcatatttaagtgcagatactttgaaaagcacagaaaaatttcaaagaagcacagctcttactgacagaaactacgtttacagtacacctacctgaacatcttcaacaactattcgattgacaccgtgctccattgggcacatgtcccctcttaaacaaaatccacgctcctcaaagtctctacatctttggcgaggaataccaatactcaatgaagaatgaatgggtggtctaagaggaccttgtaaaccaatggaatgaatagtatccatgcccccatttggtattccaggaattaagccaaatgcattccaagatgcattctgtgcatttgacacgtttggcaaccctcttccagcaaatagactaggaggaatagagccttgaaccacttgagatgcaatatctgagccgaacctaggatcacgttggttccaggttccaagatctcttcctcttcccctagcaagaccagggtcacctgaaaaagtttgatttggccagattctttgatttacatccaaagctgatctaggcaaggatgcatggccagggcgtctcttatcaaattttccattctcgagagggttagaattgaaatttctccaaggtgcacttgcttgagaatcattttccctgaaatgattcccattttgaaaaggcttgttccgctttctaaaaggcttcgtaaaagcttgatcaattgtatctctctccaaagattgagaacgtgcatccctcctacgatgcttatggtttcgatcatcatcatcatcatcactgacttctttctcctcgggatcactattacaatcagaaggagaaagacctatttttggagataaaatttttaactccatttttttaaatgttgttatatagcgtccaactatctagatctcactatcagcaatcaaacaccttcaatctctgaaatattatcacaacaggacctgcagccaaaaggaaaaagtcattggtacatatatagctaagattaaattcagtgttatcatcagaatttcagctcgacaatatgcaaagtagataggcagtaccctgagctgataactcgggatgcaagaacatggttaaatgcatataaaaagtcattggccaagaccataatatacatagcatatataatccccacatcatatttatatgatttttcccaaagttaagttatcaataatattatacagaaaatattatgttacagaaattgcaatccataccaattcatgtcagccccaccctcacgaccattctcaacaaaacacagataacagcacctaggaaacctaaatatcatcttctgaagccttggaaactttattgaatgaaaacctaattaaacatagtctgatcagttcaaactacacttgacaagaacaaccacggattccacttattatttcttgctatacatatcaaacaactcatctcccaactccttataaaatcacttgagtccgaatttttacccacataataaaaaatccatttagagttattcaagacaagtaaaaaataaagtcgacaaacaaaattgccaaccaaaaccaaccaaccacaaaaactctctaatcaacaactgaaaagaaaagaaggcaaaagcaacgctcctaaataaaaattcgcacgattacaaagcgaaaacgtaatataaaccgataaggccgaccatattacacgaattgaaaaccctaacaatagcattggttgatgataatctaggtttcaagaatgaacaaaagcgtaaaattgatcataatcgttaccggaattgggaagccaatgccgccaagtaacttcaaataatcagatattgaagaaactcgtatcttccttccctgtaccggaaccagaaggcggcaacgtaaaccggtaccgaaccgaaggggcgggatcgtaatagagaaacaatcgaaggagctttaattatggtcctgctagagatttggagggaacaaccaacaatatcagagagagagagagagagagaaagctttcgcgactgtgactcgtttgggggggtttgaagctttaggagcaaacaggaacgggagagagacgagaaagagagattagagttgaaaattgtatttttctcccattaattcatacataatacaatatctgtttctctttttattattttattttattttctcccacaaatgaaattttctttcatcttttatatatattttttaattctttatttattagttaagctgtatgtaccacgggttctctcgtgtacgattaccaaaatatttttaattatataagtatatattttttagaatattctatcaattttgttttagattagataataattaggggtcgtttagtatgcagttatttcatgggagtatgtttaacattgcttg

SEQ ID NO: 64077 - DNA, 929 bp, Cannabis sativa
aacatccaatcaaactaattaatattttcatttagcttgaatgagtaattaaattttatattgttatacgtaaaatatatatgtatataaaaatacacgttaaaattttactctttttttcttggatgggatgaatccaatgtaatccaatacatattggatctaaaatattagatggattcaatccgatcaagaaaatattaagtctaaaatattgaataaatccaaattaaaccaataaattatattaaatacatccaatggataaaactaatccaattcaacatccaatgtatatttaatcgattggatgattggattggatcggatagtaaaatctaacctctaatatatagatctgaataaatctaaaaacattaaatgtgttccaataaacactccaaacctatatgacaaaaattggcctaagatgcatattattattattattattattaaggaacagtacttttgtacgtactcgatacacaagtgggcagtgacacgtatcaaaaggagagcaatgtgcagagattttaattggcaattattgattgcaccatatgcattttctgcttcttcttggcatcattcgctttaaagctctatcagtaaatagagtcgtgcttgagtcttgactatgaaacacattccaagtcaataggatcgcttacaaattataatcatataaatacatacatatattttcttttttataagtacggtgattaaattattacaattattacatgcatgtgcttgcatttttatttaccttcttaaaaattctcctattacaaaaataaacctcttaatttttttataccatttaattctactaatttctatacttatccaaattacctttctcaattttttttttcttcaaaaaaactcaaaaactacaaaaattctctctctctctctct

SEQ ID NO: 64078 - DNA, 1548 bp, Cannabis sativa
cctctaccttgagccaatcaagaacaaagtttcaacctagagccatatcttgcattttccttggttatccaccaggaatgaaagcatataagattctcaatctgcatacaaaccaggtattttattctaaggatgttcagttttatgaacacatttttccctttgtaaagtctgacagtcttcctgctgcatatgatagtttcttttctgctatacccgatggttcacatggtttatttcacatggttcacatggtttatttcatggttgagatttcggaccattttacccctatgccattagccatttaaaaccttagtgagggcattttggtctttttgacttttggttgggtcgcttattctccttgtggcagctggccaatttttcattagtggataagttttaggaaataatcttagtgttgattgaatttgaaggaaaaaggaattagaagaaaattaagaaaaaattcaaattcttttctctctctcttggtcggtcacaagtgaaccatagagacctagcttatttctcctcttagttgatcattttttgaagatttgaggtgcagtagctcaagttggtggtgaggtaaggctcttctctcttcttctttgagcttatggtggaaaagtttagtctcgatgcatgatttttatggttagggttctgtaggtttaattttgtattcattatgtttgcagaggttgatttatagtttaagtttattcaagtttgatttgttgccttttgttatggttgaacaaagtttgagctttagcgctcaaactttgctcttcaatggtgttttcagttttagggtctattacttgtttttattacttggattaggtttgttatggactttttaggtactttggaagttttcgtttgatttcgggtcgaattgatgtgtttttttggtttttggggattcctgtattgaaccagtcgaccggtttagtatggacttgtaggaactgaaattttagtttatccccatgtagaccccacagaaccggtcttctgattgggaatcggtctaccagttaggccattttagggcaccctagattttcctatttttaaaatatttagggtatttttatgttatccatcgataggaaaacttttagttttgattttaagttcccaaaaagtgatttagcgtgtcactctccagttttaaaaatattgtgacttaggggtctgtaaatcgtcaagcaacagttctactcaggttgaccagcacacctgaattcagaaatgtggtaagattaggataatgatatacatatatgattacatatttagcatgcatgtttataaagcctgttagattacattgatagcgatatcaatattcgtagagttgaattggatacggataaatgtatgtttggctcaagtactgattggcgctatcacatctgcacgactagagtcccaattataggtcgatcttatgatccgtagtactttcatacaaatattctagactcagtactacatttgatgggggataggattgttgggttttgtgcc

SEQ ID NO: 64079 - DNA, 1095 bp, Cannabis sativa
taataatattataaaaagaatatttatcctcctctaaaccaagaaatcaaaaaccaagaatatttatccttttactttttttttccttattgtttaccttttgttttgttttttttttttttgacattattatctttttcatttattatgatttttttatctttttctcttaatcttctatttctcttaatttttttcctctaacatttaaatatctctcttactttaattgtctttgaaaaaggattatcaatattaaaagtaattttttttttcttttttatattttataacaaaaagtaatagaattttaaatttaataaactttaacatatcaaatatcaaataacatcatagattaccataaaatcttctgttattttgtatttaaaagttacgatatagtatatttataacaaatttatttaataaaaaaaatttgatatgttaatacaaaaacttataaaattatcaaatagtatcttataaaaattagttacattagttaaacataataacattagttacattataaaaattattgtatatatattaattttaaagttgatggatcaaaataagcaaccagatgtgtatgagaaaaaattatcttgaatcaattttttttttaataaaaagtaattaattgatatattttttatatcaaagcaactaaaaggttgttttttttaaaaaaaaaaacttgcaaaacattaaaatttctggaagtgagatttttcaatctttttccatttttagtaattattttagatttcggtatttatgctgacatggcatatcggtatttgtagaaataatttttttttagtatttttgtaaataaaatcaattttaagtataatattgaaaagaccattaattatggcatttaaaataaaaaatttaatatatatgggatatgccactttgtattaccataaaaaatattaaaatttcttttatatatattttttaaaacaatagaaacaaatgaaagaacaatgatcatcggagttgtcagcggcgactagaagtcaccagagttgtcaccagtctcaaaaaaatcatcaaagttgttgttggtgccaaaaaaaa

SEQ ID NO: 64080 - DNA, 1403 bp, Cannabis sativa
aataagaaaataataaataatccatcatttctatcactaaatattttaataatataaataattactaaaaaaaatactattggtgcttagtactttctttggtgtcaaattatttatagtgtaattatttatcgagtttcataaaacttaagaaaataacttttaaaaaatatcgtaaaccaatcactagtacttaatagtagtgcataaaataatataaatgatataaagtaaataaagaaataatactggcgatataaattttgtattataatctagtacaatatttgctacgtaacaaatttgcattactttttaacacaatattactaatttgcttgattaaaaatgctcttaacacactaatattgagcaatgttacatataattgtaagaggatagattaatagaataataagatgacaaaggatgaacatgctagcttctatcaacactttcctaccacctatttagtaaaaagctataaataatttcgtagagtttgaatcaagcatgattagccttgttcattcaattaatttgaataagtatgaattatgcttgttttagtatcatgtctcgagtgttttgaattaatgttagatggttagttgtgtcatgagaagtagttgtgttttattttatgtttttgttgtggagaaaaaataagtttattttaatctgtgaaaaatagttgttgcaaaaagtaaaatgaacgaatttattgaattaaaataatggttgagtcgtggatttggtcactcttttaaagaagtttccagcactgtctagaattgtgcaagcaaattatcaacttcatcgtcctcaggatagaataacccagtcgaacatactatgtcagagctctattgcacgatagagaaccgtctaaatactacacctaaaagccttactactgctcgaaatatttatgtaatataatcgtatgtatatatcgtatatgtttttctgtgagaaaaagagatgtgtttctctcgtaagttctgatgcattatattggcaatgcacaaaaggtagtaacgagaagaaagatgttactgaagggagtgttagaacgtgggatagtgtaggatcgtgggaacgatgctaacaatcaagaagtctttgtttcccaattaattaaacgcgtttaaaaacttgttttaattatttaaataaataaataataataataattaataaataaaatttctccaaaaaataaagtgatgccacacccgtcagctcagcatggtcggtcgatggcacgcacgcgtgtatagtggtccagtgtgtgaatttttacccatacacacaaaattgggtacccttagagcccccaccaagttataaacttgcacattatatacccaactcaacccaatcacaaggtacatttacat

SEQ ID NO: 64081 - DNA, 1013 bp, Cannabis sativa
tcacaatataccacaaacttttcttaatctgatggcaaaataacactggtgtcgtaatcaatcgctgcttcaactcttagaaatttgtttcacatttatcagaccatacgaactgttagtttttcttagtcaattctttcattggcattgaaatcttagaaaatacctccacaaaacatcagtattacactaccggtctaagaaaactttgagcttcagtaattgtccttggcctcagccaatttttaactaatttaactttccctgaattgaccataattccttcttttttgacgatatgccctaggaggatacttgtcataaccagaattcacacttcttaaactttgcttacaacttatgatctctgagtcattgtagaaccatttagagatgttgtttatgctctgcttctgtaatgactgcatgattatattatagattagtaaggaaattaacattaattattactattgtgttattgtatatgattatatttattgtggactctatttttataaaatggacattaaaattataatttctcaatttcaaagattttattaaactctgagagtattatcaatactaaatatgaaatatgcattttctttttctgattttagctcagtggtgatggaaaatacatctaatggccattaaagtcatatgggtaaacatagaacctttttattttaggagacaactatatgtttgagcttgaaatatcggggttaggtgaggttatggtattggaccattttacgtctaagccattttattatttaagcaccaaaataaggggaaagttggcatttgaataaatggaggataggtgtattatccctttaagtggttggtgagcactacttggttagtggataaacttaggttgttatcgatttacctcgattaagacataatcattaaaaatcaaagttaagaaaaacctatttcttgatgttctctttctaactttcagcttcaatgggaaaccagagaaaaagcttttc

SEQ ID NO: 64082 - DNA, 1375 bp, Cannabis sativa
tccaagattggtttaagtgatttattttccaaaaaaaaaaattaaaaactaatagcaattataaaattaaggacaatatttttaccgcactcgacacatatgtactttattccaccctctgtcatgtagttcttctttctcaaagaggaagtcactttatccttccttctttgtagttctaaattaatatattgtatatgtatcaattgatcagagtaaaatcataaaaaaagaaaaaaaaaatacacaagtttaaaaattattgctcattattgattattgatcttgaatatatattattgaaaggtttgaaagttactaactgttatcggttattgatcttgaatacgtgttattgaaaaagtttgaaagttaataattgttattggttattgatcttgaatacgtattattaaagatttaagagttattaattgttattggttatggatcttgaacatgtgttcttgataaacttagcaaccgatgttattgattattattaattattgattttgattatgtattgtcaacaaagttagtacatcatttattggttattaatctcgaatatgtgttactgataaaaatatacatatatgaagttgttggttgttttcaagttatatctaaaacatgcaacttgaagctatacaaatgaaattagagtttagatatgatgtataaatcatgaattctcatattctactattttcagacttagtgattaattattcaaagatatacaaataaaaatttaatttttataaaataatagagttttattgtaaatattataattaaatggcttaattgttaaataaattataatagagacttaaatataaaaataaaagtattaatattaattgctaaaaagggtcttattaaatattttagttaaaaattaattattttaagaaatagttaattatagttaatttaactctaaaaaagaaatttttacatgttggtaacatgttattacaggtcaacaaaaatgtaactatcatgattacaataaaaatgtagtcattgaaagtcacccatatatttatatactaagttgatattatatgcaattaatgtacacatatttagttatattcttatcttttaatttagttatttatatttttagttgtataattaatttttttttatgttatttaataaacaacatcattttattaaaacatatttagtgtaagtgatatttatatataaaaaaacataataatattcaaaattggttgtatattataaatttagtttctattttttttttaaaaaaattaatgaaaagatatatttttttttttgtaactacaaaaagtaacagtgtgtatatttttttaattgtataattagtttt

SEQ ID NO: 64083 - DNA, 910 bp, Cannabis sativa
  modified_base (836)..(853): a, c, t, g, unknown or other
ccggccctgcctgcatagcagaggcaggagccacctgctttttaggagcaggcattgcaggaacaccctgctgcgttagacgtttgatttctttgttttgttcattaattctggcttgcattgctgcaaacctattttcccaatcctgggcagcctgcgatgggttaacatctccccaaccgtgtgccctgcctcttggggctctacctcagccacgaatattcggggaaactgaactccctgaccaccactggatccgaccgagtttttctggcttctcgtgtttcgcttggtatccattctaatcatcattagagataagctcaactcacggctcagtatgcctttattgctttagtagtttattttattagtatgtttttaaaaaaaaaagcctaataggaagcatgttagtagcttgatggctgaataggggcatgttttaaacttttaaataagcgataattattaaattattcttgatcgcgataattattccatgggagtaagggcccaacagaggcttgaagcgggggcgttacagggggtaacgtataaaagaacaccaggaagagtagtggtattactaaggtgaagaagattacctaaattacttaaagtaatacggtaatgatggagagtactttataattggctggatagtcaatgtcatatataaggataccattaaaattttgagaaatgattactttattaagcaattatggaaagacattctaacctagaatgggaaaaagcttatgaattgagatgcaatttattgaacatgtaattgagtgattggtgaatgttagatcacaaagtaggttgtttannnnnnnnnnnnnnnnnnaattgagtgtaaaataagttttaatgtggttggccaagtatggagatagtgatgatt

SEQ ID NO: 64084 - DNA, 602 bp, Cannabis sativa
tcgataagactagggtttacaccttaaactcgaattcactcatcaatggaggttttgagaaatttaaaattacattatataataaaaatttacaaataaatgttttgtattacaataaaaaattcctataccacaattatggtgtatatatttttctaataaaaacatataaaattttataatctaaatttattatataattgatgattcataattatgccaatactataaactatccattcataatatatcaacatatacataaatgcatataacccaacacagtatttaatttatgtaattgtggagatgactctgatactatttgttggtttttagggttcatataagagtcgcaatagaagcacaaaatatggattaatgtttaaaaaaaatatattgaattcgatatgaaccttaaacctagaattttaacagaatataacataatttaaatctaactacttggaataaggatattacttattgatgcttattaggagatccttgtatctttccgtataattgcttgatcatatccaatccaaagctttatgggttggatgaagaatacatatcaaatcttccagatcagtgtcaac

SEQ ID NO: 64085 - DNA, 799 bp, Cannabis sativa
catttctctgttgccaaatttcaggaaaaaggcatccagtgtaaactagaaactcgttcctgttgacctcgatcgtattagagataagattctccataagtaggattgtagtatcccctggaatggcttcaattctcgtctgatatttccatacaaaccagagggcttttgagaaactaaagtcgcgaaacagatgaatggcactttcctctacgagacaacacaagcaacactctttatcaggaacaaaaggcagtctattcttagtaggtatggcctcattcaaaattctccacagcaagactgatattctaggatggatccccgcatcccaaatccactttcaaatattttttgcaggagcaaacctccaagattaatcaacacaataggcagctttaacaaaaaactgacccttttgattgtttttccagtacacctaatccgaaaagggaggaggaattctcagaatactcagaatgcgatcccccaactctatgccgaaaatttgtagtatcatttcctcattccatttgttagcggttgaaacatccgacagtgtttgtatcgtgaatctcatgctcctaatgttattcattagctctaaaaactcctggtactccatccaagggatccaaggctgcctcaagaaattgatgaattctcccgaggcagccactaaaatcgatcctttgaatagaatttttctcgactccaaaatacatttccactgatacgaatcattattcttttggtttacacaccgaaaatactcatacttacaatatttcttctatag

SEQ ID NO: 64086 - DNA, 599 bp, Cannabis sativa
aaaaatcccctcctctctaggtggtcgaatctctaggcttcaatctccttggaatttttgtgttatttcaaagatccaagcttctcatcttcgtcttcattagaatcttgttgcgggtaagctttctattccctctctttcacttgaattaattgattttgccatggatgcatgaacattatttcttgttttgaacatgatttgattcttatgctagtttttagcccattcattattttgatccgcatgatagccctaggataaaaaaagtgtgatttatagatgaaaaagaacagaatatgaccttcattgtaattcttggctctttgagtcatgaagaacatgaagaagatgtttgagttcttcaaaaatcatgtattttgatcaatgcacatgcttgccggccaaggaggctttgtttgaagcctggccagccatgggtggtttttatggggtttggccggccatggggattgtgtccctaggctggccggcctatgcttggaacttggattcctggtcggcctctaggctgggtcttaaggtctagcgagcctttaggacctggaaccctggctggccaaggccaaggctccaag

SEQ ID NO: 64087 - DNA, 686 bp, Cannabis sativa
tcttgattcaaagaagccgcctatataatgcacccaaaataccacctacctaaaaagctttacctatatatatgtctatgaacaaaaaaaaacttatacagttacaaaataaacaaataacattgatatatatatatatatatttatataattgtctaacagcttttgtcaaaattaaaataaaaaacgtatgtgtatatatataacaactttacattacctactactactactaagccaaagttgtcaaaataaataacaactgttacaaaacaaacttaattatcttacaattgtttaacgaaagaactagtcacagaagttgcaagtgtataagtctctctattcgcaactcgtcaaatagatcgaataacaaagaaatatcactgaccgcctataactgacataacaaaactaaagcatacgcacaccaagtcgagctttaatagaaacctaaccctaaacagtcaccacaatttaaccacattgaatgtttttagatttatttagatctgattcaataatatattaaatgttaaattttattatctttaattttaatcatcttatcgatttaacattcattgaatgttacattggatcaattctatccggtaaatgtataaaatcaatcattagaaactcaagcagccaccacaatgaatgtataaaagcttgtaatatta

SEQ ID NO: 64088 - DNA, 2970 bp, Cannabis sativa
aagtttcaattaccaaagggttgtgatgagggaaatgtaccatcttggcatcctcttctgtaaaggtaattggtcgatccatcagtcagggcctttgcatcgggagctagttaacctcccacaccttttcatcatgatccaactctttagcataacgctttaactcattttgggtagttcctccaatatgtggcgctctcgaaatcatggcacccctcccatctggcctgggaggatatccgagtgctggatggtattgagggggggactcttggagggactggctcatctgggatctgggctggtactctaggaggcactggtgttccaacttgtccattcatgtgcgacaacctatctataatccattcatacaagtgacctagccttattaggctctcaattttgtctttcaaattcttgcatttgttcgtggtgtggccaatatcattataatattcattcttttgttaaggtctctccgcgagcaatcccggtatagaggaagaggtctccggtagtgggtgttttatcttgtggctaagtatacacgctcttgggtgtccactagatcggtatactgtgtatactgagaggtgtaacctttcttttgtgtcttctttttttgttcgcgtgctttcttttgaagatcttatactctgagagatttgaggagcatctgctgcacttgttgcaggaggtgcagattgagaaggatattgtgaacttactctaggagctaggttaccccctagcgctccaaaactagactaagttggggtgagagcaaggttatgggtgtatcctagtgttactgagaattgcacactaggcgctatgcctgtttgagatgcaactagaagagtaactcctaaaaactgcattcttgacgcatatcctggtccgctagtgggataacaccctccaaaattcgttatctgtgcttcgtctaggttgatgtacttttgagccctcttttgaaagtccaaagacaagcagctccttcttgctagagctcattccaaaaaaggattctcgttcgaattcctgcttgaagtaatgccaattggtgtccatcatccactaacctatcatttgttccaacaatccatggatccaggttctagctatttaaaccactccttagcgaaccctcctgacgtcagtgggaaacacaaacacttcacgtcattgttaactctcatgactgtcatcacgcggttaaactgggacaagtactggtcactagggtctctatctcctgcgtacaacatcatttcaagcatttttaaattctttgggagctttgccttaaggatgttcctagcatagggttcctgatcctcacaatcagattctaaatcacctcacttttatcttcaagagactttagctatatccttctggaggatagcgagttcgactaagattccctcgtttaaggcactttttgagaatggtattgctcgtttctttctctccaagaaattcctaagatcaccgtgtttggcattgagtttctatctcaaatcgactggagggtttttgtattttttccccctctctccccttagctcttgccatacaaatatgcatttttagtctccccggttttgagggccagcattttcctttggaaacctgcccatctgtggaccttttcctttagggaaattggagcaaacttttcgtggatcctaagccttcttgttccttttgggaaaggatgtggggttttcccttggagagccttctgtggggtaccgaatagggcttggatcttgaattttatgcctttgattatttagtggagactcttctctcgttttgtctggtccaatgggcccaatatttggatgcacatggatgcctgtcgtttcgatatccttttccaaggcaaccactatttcttgcaactttctattttgctccttttgttctatcaactcagcttcatggtcagcgaattctgtctcaacactacgagttcggtgtaacttccatcatcatatgcatcatattgttcttggttgtcatcgtattctatattagtagttttgtcttgctcttctgcttttgcgtctactcgcaaagcaacttcttcttcatctggccccctaggaccttgacatcgatgtggttgacgtgcaaggtttctagtttccaccatcatacttggagaatttaattttaatattcgtcttatgtaaagccttctacaactctcaataaaagtactaaaatattgaccaagattttcggtaactaattaatgacagatgttttaatgattagaagagatttaatacgtatactttttacatggttggagcattaataagccttagtccacgagtcactagtatttaatatagtagtttttcttatagaggatattttttacacctttttttctgacccttttctagattatggttgggtatttatagctttatgaagagagtcaaaataattctattgtctcaagtgtttaaaccatgacttgcacaagttcctaggttcgaataataggttatgtatgtctgcacagtaggttacataagtttttcgctaggtgttaggtaagacaaacctttaaccttccttaattaacgtgatagtttattatgcagtcgtcgctaatctcatcaattagagtgtaattactaaagagtgggtttaatgcatctgacatgtcttttcaaacccattcgaagacgcttcctccatgccgcatttaatgcgcttatataagtcatgtctgggacctagccaccgatcctagagactttcctagctcctagagaagaacaaaatatcttggcatccagatatagatgaagctcccagagggacctctcggacacgtccatccaatccagaaattacttaggatttatcttaagtacttcatgatcttaagactcacttgctacatgtccaaccatggggttgccacgtatattgggt

SEQ ID NO: 64089 - DNA, 1026 bp, Cannabis sativa
atagaatttatacattaaactatatcatgaaataaatgatgtgaaccatgcaacataaaatgatttctgatctttattaattagtaaatctcattatattgaaatgggttttatttagggcacaaaacccaacagtctcgcgagtggcaaagaagataaaaatggaggttcaagccaggctgcgtctcgcaagaaacgacatataccctcagatatctcttttagaaatcacccataatgactagcaacttcatcctaattggtttttattaaatggtccctaatctttgcatcatttacttcaagtaaggattgaggtttttgggttttgagtttaaatggaagagctaattcattagtgcactctatttctatgaattctggaagagaaatcccgattcttggaagaaatttattaaaactagaaacttataaatacgatcaacctaaaatttttactctgtccaaatcctaaaaattacccaaaaaagttaaatcaaaactaccaaaactgagcaaagagaacggtaatgcaattagttataaataaaaaaataaataccaagaaaaatagaataaacaacttactggtcaaagatgaacgtttacccagggaggaatcctgtaaatggatttgagataaacaactaaatgaaccctggcaactttaattttgaaattgaagattaagtttgaagatactcgtaggaaataagtcaatgacaaagagggcatgcaagattttaaggaattggaaaaagagtttttcgcagaaaagctcaaagtttgttgaaagcaaaaatagtggaataatagtttcttttcaattttttataccttaagattggacaccgttagagtaaaagaaatagagatctaacagacaagaacaagggagaatttgaagagatgggtcattaaatgctaatgatgttcctggaaatcatgaaccgtcaaattcaaaagcatgcaattttttaaattggattaagacaaatataccctttgtaatcatttaaaaagtac

SEQ ID NO: 64090 - DNA, 1585 bp, Cannabis sativa
  modified_base (529)..(552): a, c, t, g, unknown or other
ccatttctgggttcctctcattttccacaaagtttacgactttttccaacaaaatggcttggaatggtgttagaaatgatttggctgttgaaaacaaatgtggggttgttcttccagcttctgaatcttatgttgaacaagcttgtgatgctcttagagttggtaaggttattgctgtgcccactgataccctctatggattcgcctgtgatgcttggtatgttccctactcattttgccttcaaactgtttgattaatttactcaatgaaactttcttgaatttcagcttaaatgtgtttagtgttgtcaaaatgttgttgaagtagtcattagtttgaatcatcttctttggttttgacatggaatttgagcttgaattttattacatagagctaaaagatagtggaactgaaatgcactttggagttaatgtcatatggtcacagcagcaaacacgttaatgcaaaattagtgtgcttattataagagattaaggttaagtttggttggagttaataaaatggaannnnnnnnnnnnnnnnnnnnnnnnttttagctgtattttaaagtattaaaatgtcgatttttctattattttagtggatgattattccatgaaatggaagaaaagactattccagttcaagattattcttgtgttttcattcctcctaaccaaacgcatcttaaggtcttgttcggcaaagcttttgtcttgaagaaaagttcattcatattaacactattcagaaaacaagtgctttgtatttttttttggttgctgatcaaaatgtttgatgaattatgcttagctttgtaagtttagtaaccaattttcacatgggaacctaaatgttaatgcagttcttcggaagcagtaaataggatttatgagattaaagggcgtaaacacactagtcctcttgcaatatgtgttggggatgtgttagaaatcaaacgctttgccgacacagagcatttgcctgatgggttacttgagtctctccttccgggacctgtcaccgttgtactaaagcgaggtttgttcttgataatttttttccgaaaaagaagtcaagggtttgtatcttttaggactaagatatgtgcaaaatagaaactttcttagttccacttgagaatgtagggttaaaaattcaagtttccataatatatctcatgagaaaaaaaattccatagtactttttaccaagcctttttaaagaagggtaagctatagaacaaagcaagggattgagctctccgccaatgaaagcaggtgactgttcctactgaattggatcaggtgcacccattggatgctagagccaatgttagttcttttaaaatcaattttataccgtttgctagaggttgtaacaatccgaacgatagttgaaataggattcgttttggctagtgctctatttttacagtttcgtggctggattagaagttcgactgagctatagtttcaagactagttgaccactgactttgagttaatatgttggctgattgcacctttgatcttatgtagaagagttgtgtccacacctgagtcaattttggtttgaaacaat

SEQ ID NO: 64091 - DNA, 866 bp, Cannabis sativa
gtagaaagcgaaagcctcgattatgattatgaagatgaagttgaagttgttttgttattgctgcgcagcttttctacctcttcttttaatgcttgggcctgttccttatctagaagtcttcttttttgttgaatgggccagaagtttggatcgatgtttagggcctgtgaaattatagaaggatcgataccgaccatgtcctcatgtgaccaggcaaaaatgtctaggtttgctcttagaaattttatcagagctaattttacttcaaacaattagaaaccttttccaattttgagtttcatggtcggaacacttgggtctattttgatttcttctaattcttccaccggcccaacatttgtatttggctcctcaagttggggatccacatcttcgtccccgccttgggcggttccctatttggcaatgctccttccccttgtccgaactctgacttgaggattcttcctttttggccttgcttagggcaatgttgtaacattcccatggaacttgttgattccctttcaagcaccctaccccgttctttgttggaaacttgacgcgcaaatagaatattgatgcacaactttcaagtcatataaagctggtcggcccaacatgactttaaaggctaatggaacatcaagtactaagaattgtgccatcacaattatgctcttcggagcttgtccaacagtgtggggtaggcgaattcgccctaaaggtgcaacactctggctagagaaaccatcaacggcctggagacaggggatcagatctttgagttggagccccattttttcatatggtgttttgaacaggatatttgctgaggctctattatctatcatagttcgagccac

SEQ ID NO: 64092 - DNA, 977 bp, Cannabis sativa
atcccaattaatgagggataatggtatttaagccccctgatacgaaccgattccacatttttccctctcatttttgctcttctcttcttatttgctctgaacttttgaaattttaaaccgtttccaaatttcttccccttttcctctagaaactcaatcctcactagtttcagagactaacggatttgatcaaaaagaaatcgacaatctcaaggttagttcaaaactgtttgcaatttgttttattctatgttttagggggtagaagatgcatgatataatagggaatatgcatagagccttatttttctacttaaaactgggtagttttctagagaaaataggcctgaaatttgcataatcgcgagtttcaggaagaacacctcgagtattcacatctttcttgtttaccgtcttaaatactcgcgagtattgagatgatcatctcgaatactcgcatttatatttttagaaaatctggggatttagccaccccaacccttgtttagaacttagggtttattattgccttatgtttcatacatgttttttgttgggaatactggttagatccttcaaatggtgggtgtgtttctgtaacttgatgttcatgcgtgtgttcgtatgttccttaagtcactgcgacacacccaaccatttgcgacatacagccagctttctcttttcttgcctttttcttttcatcgcatgttaggactagttggctttctcgaaacagtgaggattttccattgacccaatgctcatgcaagaaatgcatgccccttgggacactggagactcctcaactgtttcttgaggtacactgttagttgtacatgtgcgatgtggtttttagtcgcgtgttgtaattgaccagatttcttgaaatggtgggtgtttcccattaactctatggtcatgctcaaacgcgtgccccttgggtcattgggaaacacccagccattttttgagac

SEQ ID NO: 64093 - DNA, 633 bp, Cannabis sativa
tgatagaaatacttgaactcactatcatgtagacaatgacaagacacgagtaataactaccgattgatgagaccagtgagacgaataaagaaagtccatctcgagataaacataatacattacaaaattattaggaaagggtaaataatgagtttgcagcttattgacccacatacatgtgaggatattagtgagtttgtagcttatggactcatatacagatgagtctgatgagtatgttgaaagattaattaaagacaacaacctcagcatgattcatcttgcttctgtcacactgtaataagcgtctcatgtatacctcactcaatattaataaaagaatgcgaggaatactacaacatatacttagacgctggctcacgatgaagtatatataaaagtactattgaattgcaagaagtatgaagcatagtcagcataaccatctataaataaagacaaagagtggttacgacagttatttataattattccatgtgatgtaaatatgaaacgtggagaatatctcaagggaataattataattatattgctttataattgcgcaagtgtacacaatcacaaacaagtaatacaatgataagtaatcaaagttcgtctccacagggactt

SEQ ID NO: 64094 - DNA, 761 bp, Cannabis sativa
aagtgccctaaccatgggattgaaaagtggctgcaagtgcacaacttctacaatggactggctagcagcactcgaacactcgtagatgtcgcagatggtggggcttttatgaggaaaagtgcgaatgaggcctttgaactacttgaagagatggccatgactaaccaataatggtcaacagagagaggccagtctaaaaaagttacgggtatggatgaagttgatgttataacaaagttgacagctcaggtggaggccttgactaagttgatgattgctcaagaaaagcaagctcaagttacttatgagctatgtgggggacctcatacattgacacttgtttggtggatgttaatattttgccaatggatcaagctaaagccattgggaactatcctcaaatcaacaacgatggttacaaccaaggagggggtcatcatcaaaattttcaagggcagtttttaaattagtagcaacaaggattctaacaacagagaaatcagtctcaacagaatcaacaacaaccacaacaataaggtctagtggagggtctaatcttccaacaaatatgctacttcagttcatgatagagattaaatcttccattaaggtcttacaaactcagatggggcagttggctattcaaatggccaaccaaaatcaaggtaacttgccgagcactatagagagtaattcaaaagagaaatgtcaagcaatttccttaagcagtggaaagaatatgagaggcaaagggttgagca

SEQ ID NO: 64095 - DNA, 1142 bp, Cannabis sativa
  modified_base (211)..(219): a, c, t, g, unknown or other
  modified_base (1114)..(1116): a, c, t, g, unknown or other
agaaaagtaataacataaatcccggattatgatcagatgcccatacccccaaacataacccgatccccgtggcccgcacggtgctgagtctagaacgttcgtacgactgtactattgactaaaatatcagcctatactcggtacgctagtcatactctagacgtactgatgtgataatgtaaagtagtatggtactatcgaccataatatnnnnnnnnnctcggtacgctagtcatactcttgacgtaccgatgtgatattgtcgaattgtacaaaagccaatatacatatctgatgtaatttaacaggcttaactaacatgcacactaaacatgtatatacatatgtatactgttatactaatcttacctcgtttctgaattcaggtgtgccgaccaacctgagtggaataactgctcagcgaattacaggctcctaaatcacatcgattacaacaaaggtaagtgacacgctaaatcacttcccggggacctaaacttgaaactaaaagttttcctatcgataaataacatggcaataccctaaatattgcaaaaatagaaaaaactagacttcccaaaactgccccaatcggtagtccagttccccaatcgaaattccagttctgcagggtttcctgggaaccaaacgaaattccggttcctacaagttcccctgaaccagaattctggttcagtgtaggaaactttcaaaatttcatatctcacccaaatcaaccccaaaacacttgaaaccttccagacaggttctacacatcccaataaacaaattaaaggtgacaaaacactacaacatgcacaaaaacaaaactttccattaaagagccaagcttgagttctaaaactcaaagcttgctcaaacttaataacagcccatacaactaatccaattcaacatatctaaacctaatttaacttgtgaaaataatatcaaacaacaacaaccactacagaactccaaaaacccaaatcatgcaaaaaaccaaaacgaaactcacgagaactaaagagagagttgccaggagctatgatcttgcgagaaaacacaagatttactgaagaaaaatagaaccctatgttgggttttatgcccnnnataaaactctttacaatctgattagt

SEQ ID NO: 64096 - DNA, 633 bp, Cannabis sativa
ctggggtaagtgaaaaacattaagactttgtattttttgatgcctaaatgatatgttaacatcacttggccatttttttagatttggtgaagttgttcaccagttctcagagatattattttttggtgaaattaggtaaactcaaaattttttgattttgctaatattccaccttgttgaaagggtgaaacatcaaagtgaattttacttgtcagaattcttagctctcgtttactacgtacaaatagtcagatcctcgagacagaactagaattcgataagtagaacccaatgcaccaagacatacgtcaacatgggcgttggatgcttctcgggtggcttcctagggctttttgatacttttaagaaatttgagattgcgaacgaggtctctaccccatttttgacaacttgggcattgggtccctgttttgaccctataagattttgtttgctccctaaaatcacttgtatcttttttatttttggaaaaaaaaacaagatgcatgaaacacttttctagaaaaataactggaaatagcccaagttgacaaaatgtcaacttgggcgttgggtccagcttttttttcaccaaatagttcattttattctcgaaaacactcatatctcagt

SEQ ID NO: 64097 - DNA, 2310 bp, Cannabis sativa
aagccttctagaagattccaaatcatccacatcgctccaacaacttttgaacaattcaaaccacccacaaaaattgggattcaacaccaaaatgtaacttacctattttctagggtcttaactacgtgaaaggggaccaacctgattttattctgcacatccacttaacttaagagaagagctcaaaagcactaagacataacataaaactctctctcttttctcatacttctcacattgctttccacattctcataattgtagtactaaagagagcataactagaaattacaaggtttctacttataatctgcatggtattatctcaagagagaatacaacaaaaggggagtaggtcattacctgatcaaaggggcacaacctttataaattcttgtgtccttttatatttattatcattccgcacgtgacagtcataaataaattatatcctagtcagacttcgcgtcagttggctaaatttatagtcaacattttgattctttcattgagagcttgaaattcttattcaaaaagctctcatattttttttttttgaaaatatattctgcatagctgtcatgagacgtggaaattctactgaaccacaagaccatataaccacagatcctaatgtcaaagtgccacctgctgtagccaacctaaatgtggctgcctagccacaatgtttcgaccatccggctaaccacggaggtccagccaggagatcaatctcctactggacccactgtccaactaattgctgaagttcttgacacgggtgttggaccccgtgtttatgctggtgagactggacttggggttggcaaccctagcatttatgaatcccatgttaatctgggggatgactttcgaactcgttaggctgagagaggccgtagggaaagtacagggtcacacaaatctccttcatcatgaccaacaggaaacttgcgctgctataggcgatgcttttgcccaacagagacgcaaattctaagagtggatggatcagcaagatgcaatcctcgaagcctgtcaagtggatttgaattgctagaattgagaggttaacgacctgataagacagatgaacaagagagttgcatctcaagttgaagagccaccctcataagggaccccttttggggaaaaggtcctatgtcccatagggaacttagcaccctagggattatgggaaaacctcacagccagggggaccaattgcgtcccaaacaaggtcgccatcctatcagcccaataacagtcaaatgttgcctaaaagagcttatggtaggacaaacccatttcaaggcctgcttagaaatgaggagagaaggaaatatgtcccaccaaggcaagattgaagtaggtctcgcagtggggagtcttactccaatcccaatgaggataatttcatcagtcacacaagtggtgagcgcattaaccagagaactcaacatactgggtgcaacaatgacattccaccccgaaatgctcaaacacgttcttacttgagacccagggactccgcgtttaacaaaatggttccccatgtaagagtagatctttggcctagcttggaacgaaggagaaatgtttgggatgggtacatccagccccataacactcaaccaataggacaagacaaaccaaatcatgccaactttaaaagggtactacctgtcaacccaagggaggagctggctagacaaaggccagacagggttgatcccgcaacaagcacaattggatcaactcaaaaacatgatacaaggcctaaccaacctaaagctttccgacttagagcttcatagacctagaggatcacctttctctgcatgcatcaatgtgttgcccctgccaaccaagtttaagatgcccaattgtaagatgtatacagagaaagaggatcccttggctcacatcaaatattttgagatccgaatggatttacaaattatagaaactgatactcgttgcagaatttttccagcaaccatgttcgaaactgcacaacagtggttcttcaaactagctgctggaaggttcgatttgtggaactctttcacagtagagttctacacccaattctggtcttctagacaaacaccttacaagctagaagacttggttgaagtcaagaagagacttggggaacctttgaaggactaactctaaaggttcatgactgaggctacaaaagtcaagaatctgatggaggaaggaaggtacacaaccatcatgagtgacatagtgcctttgggtaagttgtggaaagatatgttggaatatattttaccaggacct

SEQ ID NO: 64098 - DNA, 1111 bp, Cannabis sativa
tgcttgttcgggaaatcaggtgatttgcggccacccaatttacaaatagtttgtcgatattctaccttgccaaaaatgtgaaatatcaaagtatgaatttgacttgccacaagttttacatcttattcttgatggaaaatagcttgatgcttgagacaaaactaaaattgaacatgaagaaccatgcacaccaagttgagtgtcaacctgggtgtaggagcagcttttgggccttgcagggtgtcattttggtacttcgatcatattttggtgtgaacatgagggctcctcccttgtttgggaccaaaatacgaagattgtctaaaaaaaaattcacatttaagtaacgaaaccacacgtgccatgttgaatgtaaacctgagtgttggagctagtgctcatgtaaacctgggcacttgctaggtcttctagctgccgaatcgtctcttttattttccaacaacacttgtaccttcgttgctaatgaaaatgaagaaaattcctgagaaacatattcaaaaaagttgtcagaagcgccccaggttgacaatatgtcaacttaggcgttgagagctgagtcttatcaacctgggcgctaggtctaggttgaaagtactcggatgttgtctttttgatgctcgatcttctttcttgtggaaagtactcataagaattcagttttgtcaaattttcacaggcgttactcgagaaacttgaattggtgtcctggcgcctgggtgacacaccatgtcagcctaggcgttgttcttaggggttgatcctcctaggcatagtttgacaaaactcaagtctcagttttgttccttgttagatttgaagaatcgagatgtaaagaagttcctgaaaagttaaaccctagttgtcatgtacccaagttgactgagaaagtcaacctaggcgtcgggtgcctgggcactctaaactggaagtgttccaatgtttttgggctagtatcttgtttgtggcatgtctctcatgtgtctgagtgtaaagggtgagcgatttgcatacaggaaatggcttcgaggaccgaaattgatgcattttagggcacaaaatgtcaacctaggcactgttgggttttatgccc

SEQ ID NO: 64099 - DNA, 4761 bp, Cannabis sativa
tgtcagaattctcttctttcaagttgaattgtagtaattactctattttcactttttgcttcttttttcttttttgtttctcttcatacgcttgtaaagaactcatgagttgctcaatagtcatgaattctaaatctttattctcttcaatgattgcatcaatgtactcaaaggttcattgcatagtactacgaacttttttataacctttacttcactaatttttttgccatttcttcttaactgattgaaaattgataattctttagaaaaataatcaaaaattaattcagtatcttccataaataaagttccaaactcacctctaagagcttgaagatgaatctttttcactttctccactcctttgttacaagtttgaagcttctcccacgcttctttagtcgtagttgcatttagcatcttctcgaatgcatcttcatctacctcttgatagatgaggtagagagctttcttgtctctccttcttgaatcccctaaggcctttcattgaatttgggaaagagcaacattgtcttgctccttatgacctttcttaacaatatcccacacatcttgagcgattagtagggccttcatcttaatactccaattagcataattgctcttggtgagcattggaacttggaaggggatcattcctccacttggcatttttttcttcacaaacttggctccgatacaattatttgagccctactctttcaccttattgggctaccacctcaccttaactcccatattagtatgatattttctactttgtgcctaagccctcacggtattaattttgggcaccttcccaaaaggcttcatactaatagagtagtgtgcatccttatacacccatgagagttggcccgccctaggattcaatcatgagagttggccagctccaaggtttcaccctaggaagctaatcagttcatgccttggttttacgaccctggctggttcttggctaattcatgggaccctggtcgaccctctcaagtcttgggaaccctggccagcctaagccttgtttcgtagtgaatggcaagttttttatcctcttttgacctcgacaagaattatgtcatggccttgtagttatatacaaccttagtctcatgcgtggtttccttagaaactctgtatgaaacttaatagttagttttttatactcgaatgctcaacttacggctcaacatttgtccacattgttatacttgagactttcactttgctgatacccagccttgtacaatgacattgtctagcaagtacccttgggtatggttgcccaaagttttgtatatggctttaaacttacaaataactctgcctttcgacttaaaacctgctaagaactctgccttgccttagagatttagcctagtatgtgctttctataagaactctatccagttcttctctggttgtacgattattgtggagccttggatttatacatttgaaccaattttttattcatattaggccttaaggctttcctgttcttacttttggcctataggcactctatttttgaacactactattgtttagccttaaagccttttacaatagacatatgatcatcgtggctatcttcttattgccttgacatctaagtatctaaatttacttttctttatgtcaagctgaagtatgcctgcacttgacttagaggtaggtttagtagtttatactaagcattaaaatttcattccatatgttctctgtgctagttcgatgcattgttaggtgtgggtgcccccaagtaagcacacaaacttacagtctcttggtcacttgcaatctacaaagtttcatagaccttgcttgggaattttcttggggatgctactgagtgtagacatgtggaactaaaaaagaataactttcagaagttatctttgttagcaaatggtttggacacaattggtcttatgtgtaacaaaagcttacaacttagtgttcgcttttaaaatcacattttggctacctctacttgagatgtcgggcagaggcaaacgttgaagattgatcataggccatgcttaaaagcaatggttaccaactcttttatatttggctatctctgtagtccttaccgtgaaaaggccatcactgaagagtaatggttactagctctttttatggaaccttgtgtggtgaaaccttagaggaaccactatacaagttggctagtgagagcacttaccgagatgttctctattatagtttttttgtagaagagccaattccaagttccttttgtactcttctggcttgtttgcactcttattgttatcatgaaacttgctgctgaccttttcactttagtccaaacatccttgctggaggatctttattgtcaacaaatattcttcagagcactaagtctcttacgaagaatttcttttcttgatttgttgttgaagtacctagtaactttttgctggtagaaatgtcaccttaagttggcttagtctcctcctttttcccttacatcaaggtattatactagtaagatatggtttacttcttggtcataatagaccaaaagtatgagagcagactattagcggattgggtcagccaagttatagacaaggtggccagccacattggagttttgcctagccattttgttgaagctattgtcggctagcctgtggaggtagtggttgcccaggttgttgattctatggccaaccagcctaatgaggccatggtcgaccagcctcttagaggccaagttgatgttgtagtgagatcccttcaacactcatttggcttttcccccagcatgattttcgtagagtctatatgcactcctatcaatagatatttaacttctttcttggtaactcttcttagaggtggtattgggataccatgtttgtgcattatgctgtactggattagacacccagagatatccccctcacccctacattttggcaaggtctttatttggaggtatgttgctgtggatgtcatccatatttgttgtctagcatgtctatttcttttgaaataaggattcttagctcttggaagaactgagcgggtaccaagtttcccttggttgtcaaggtgcagctggctagtcgagtgagtgtgtcagctgttacattgttttttgtggacttgacctgttaatatagcttttgagttgacttaacaagtcttgatattagcttaaataggccatcatctttttgcattgaactgtacaatcacctaggacataacctatgactagttaagagtcgtggtatatgtctaggtattcagcccacccttcgtgtgctagcctaaggccaacaatcagagcgtcatgttcagcctcgttgttagaagctatgaaactgacctttgttgcctcgtgtaaccgttgcccccaggtgttctgaggcccaagcctgcattgggcaagtggtcaatgcaccttctaggttgagttgtcttgctcttgctcttgcttcttctatggctcttacttttctcccaaaccttgagagatttggggagatatgattctatgtttagccatgaagctagcaagagcttggtctttaatgtaaatgctatgttaacatgtggccttatatcgaccgagcctcggtggttcacttcagtggttaggcaggtgcttcaggttttggtgaagcctattgcaatggtcggatggcttgcattacattgggagttttagtaggagagtgaagcatgtgtacttctcctctttctcccttagacttcatggcgtaagggaattgttgaatttcccttttttgccattatgttggtcagagcaatcgctattgcacttgcatccaatattcccattgatggagaattggcaaagatcatctgcgcttgtaggcatgtaggacaacacttggggcaatatgatgccctgtgtctattcagcattgacttgccctcttatttgggcttgctagacagttttttccaactttatgaagccatcgactggctcaaggaactccttcatgttacttagttgagatccttctaatatctttccaaaattcactcaattgcaagatgcctctgagtagggtcgtacattggccttttttttgtcaagcctttgaccttggcggcctcagccatgaacctttgaatgtagtctctcaaaaattcgtcttgtattttctttatctcgacaagatcctcttatcatgaaggtatttgtcttgaggtagaaaattgaacatagaactctcgagagaattctccccaagaattaaatctttctagggccagcctcaaatacaattattgggttatttcagccagagttgccaaaaagattcagcattgcacatctctagatatgtgttggagatctatttggatctcaaagtactttaggtatactatgggatcttctctccctgtgtacatcttccaagttggcatcttgaacttggacaagggaaaggcattgatgtatgtcgagaatggtgaatctcttgacctatctaggtcaaggtttgatggttttgggccagccaagcccttgagcatgtgtcataaatgatctaagtgtgcttgcatagaaggatctgttgctgcaagcgcctggttgattggccattcttgattcagctacaaccctagattggccaaagtttggctgaccataccctaagagagggtatgttcaaggccagctagctctaagcgtagcaactgttcatggctggcttgcccttt

SEQ ID NO: 64100 - DNA, 755 bp, Cannabis sativa
ttgacattaaactgatcaattaatcaggttatattcatgcatcttgctgatctagtaatgagacaagacatagtgattatgaggaataaaccctaatttactgataaagataaaatatagttgaagatgatatatgatgattacaattttttcattaatatctctgttcaattgtgattccgaagtactattaaacagtacggtacacataactaatgtccttcatctgctgtgcaccctaaaagtgcacagttcgaaagatgtagacatacactacccaaaccaaaattatgctgcacttattacaactactaattcaaatccagataaaaaaaaaatataaaatacaattcttttcctttttatttactatattttgttattggagttggttgattcatatattttaaagtattatttttttttatttgtacagtaaatttagtataaattataaatacacgatactttactgtgaatactttactggtcacctatacagccatttaaattggaactgaattcaattcgtaatccacactaaaactaatgcagcaattcaaattgcaactaaaattaaaaagaaaaaaactattaaactaaaaaaaatgtgtaacttaccgtatattggggaaatttcccttttttctttttatccctgctacaatgttcaaccaaagtcgaactcagtgctggtcgcttaattaaagttataagcattattaaaaaaaaaaaggattatttcacaaaaacat

SEQ ID NO: 64101 - DNA, 1279 bp, Cannabis sativa
aagcattaatagaattgaaaatggactttgggcattgggatagaagtgactaatgacaaattgttagctctttcaaaaattagattcattaaaaaaattattgggcattaaagaaaaaatatattgggccctttattttttttaggccctgtgcagtagcccaccttgcactcgatcatagccggcctgttgtcatcttgacttgtttatgaatatttctattttattttaatgaataacaagttggattaagaggaaatggtgggaggaagtgatcatcgagacagattcgttgattgttgttcaagtactcaatagctcagttcatatgacttcatactttggtttgttggtggaggattgtcgtttgattttatctactttaaagaatgttttaatttcttgtgtgtatcgatctactaacaaggctgcctattatcttgctcgggcatcttgttctttgtcaggttgtttgtttcatgagcggaatgctcctatctttttgaagaacattgtaatggcggaggctattccttaataaacttcttttaaaaaaataaataaataaataaaatatgctatagctcaaatatattagtttaacattcagatatatatctgacaacgtgtaagatattattataattataattattaattaaaaaaagacatatttataattagagtgatttggggtcatactctctaatatttcaatttgtatactattaacctcctgaatttttattttaagacaacacctcttaattttattcttatttgtaaatttgagatatcaattaaatttcacgattaaatagaaactatttaaaataatgtttatatttgaataattaaaattgcttgaaccaattaaaacatgcgacatgtacatatagtgacagtcttggttgacatttaatattattaattgatacctcaaatttacaaataaaagtgaagctaatggggtattatcacaaaaaggaaaaaatcacgcattaactatatacaaattaaaacataagtgaatttaacctcaaattactcttataattgagaattttttaaggtatttttaaaattagtttatattttaatcatatatttaaggaatttttataaaaatattgaattttgagtaaaaatttacaattttactgccacattattttttttaataaaaatactgtttttttataaaataaccataaaataacaaaacagaacaattaaaaacaacaatggaacaactaaaaaaaataacagtaaaaactta

SEQ ID NO: 64102 - DNA, 718 bp, Cannabis sativa
  modified_base (149)..(164): a, c, t, g, unknown or other
  modified_base (658)..(681): a, c, t, g, unknown or other
tataattttgttagtatgatatatgttaacgcagtttttcattaaccgaatttgagcctcacaaaggtgatttcacacagaaaaaataaaagttgtagaagtaaaaatttgaacacagatttttttacatggttttgcagttaaaattnnnnnnnnnnnnnnnntcaatcttattcagatttctgattatttttcagggtctcttcggtatgagttttttttttgtccctattttttgatcttgtttgccactatttatatttacatagtgggtagtttattacaaagttgatcgtcatttgcttacaatgatcatcccataaaatcatgggatttgattacatatcacgtaatataagcgcgattatgatttgaaaatcatatagttgtgattttctcacttttaatggatcaaaataatcgtgtattaaacacgtctttaattattgtatcttgagaagtctcaacagaaacttggtttcagtgacctcaatagcgagctggggctattttttcttccaaggtcgtcgatgcatgtcttgtgacgaatgtggttcttaaagagttcttcaaggcttatttgaatgttatcttctgattcgctagggttgtaagcctccctaacactcactggatgaagctattgttgggttttatnnnnnnnnnnnnnnnnnnnnnnnnataatcagatttacttactaatatagatcagaaataa

SEQ ID NO: 64103 - DNA, 1541 bp, Cannabis sativa
gtacgccatctcctccatttctgtgttttcctctagtgccttttctgctaataacttctcataagaaccttcgaaactttctggtgcacaaggatccctttcagactttctctcctagagcaaagttccgtttcaaattcaattcaatctcgcattgacattcaagtttcttcaagatttacagtggaatgaatcttgattatgcgatcttggtcgattaccaagctctgatttgtggaaaaaattatgactaatggtacagaatcaagatgatggaaactttaagcaatcaaacaattagcaatgacaagattaacaattaagaacaacaatcgaataagaaacagaagcaaacagagtatgtaaaactagaaaacaataactataaaaaataaagaaatcaacaccaagattctatactggctcaagttcgatagatcaatgtgatctatggctctactctaattctagaacaccaccgtaattcttctttattgattgagcaagaatacgtacaatacagtcgagacgagattcctgttgagttctcacaaagtgtttcaactttgacactttacacccaagaatcttcttcatctacagaagattctttctcttacctcccaatcttctttctctctcaaactctcaatctcctctaatttgagtactaaacctcgtgtgtcttaatcgcatctcaaatataacgagtcaatgtggtctttatagccttaggatcaagatcctaaagtcggtggctgcaagaaacgaggttgttaagttagttagaaataattaacttaaccaaatcctgttcgagcaaagtctccatgttaacttaactacgagagcctccgagaatataaatgagctttcggactcgagggccacaaacccttgccaaattaagaattaatgaaagtagtttgtgggtttctctgtaatctttgtcggctaagggatgtttcttcttcgttgggactgaggagtcaatctaagttcatgggtttctctgataggatttggggttctctctctctctctctctctgctcaaatagtgagtctctttctctccctgaatgaaatgatatggagttgttctcattcaatggttttgtaatgaataaaagcatttcatttcttagatttgttgtatttttgtttttttcaggtgtgatttgaatacgaaaaacatgcaggttgtggtggtgggagttggtgggatggtggtttcgatggtggtgggtttgaggaagatgagggggtgttttgggttatgagttttatgatttttggtttaatttagtttaatttaatttctgaagtttttttaatttaaaatgaatttttaaataatttttataatgtttaaataataaagttacgtggaccaatataaatgggatacgtgtacaaaaatatacacacaagcaatccatgttggcacttagctatgctaaatggatgacactttaaacttactaagagatgagtagtttggaggggtttacaagtaaaatttgagattagagggttaaa

SEQ ID NO: 64104 - DNA, 529 bp, Cannabis sativa
  modified_base (340)..(351): a, c, t, g, unknown or other
tgagacaaggggtctttgaatcttgttttgggtcagacactagatagggaggattaaaccttgattttctttttcttattgttgacaaattaagccacatgggtttctctttatcaaatcacactttgattttggattctcaaatctcaacgataggatttctttctcagtttactgctcctacatgataggcggcctacaggtaattactttgggctgaatttatttgggccttatttaagccacatgggctgcagttagtttgactttaatgcgggtcatttggactcataataagggtaagttgaaaaataccatttttttaatcaattaatcaaannnnnnnnnnnntttatatttatttgaaacatacttctttttatatgtattgtacccaaaataccctgacataaaagagtcacatggagagtatcttgaagtgacagaggcaaaattggtataatctttaaaaaaagaggtaaaaatgatagacttcaaaaaatatagtaaaaataaaaaagacaatata

SEQ ID NO: 64105 - DNA, 1348 bp, Cannabis sativa
aataattttttatactattattatactataagaaaaaataggcttcaataggaaaaatttcatcaatgacgggtgtcttttttgtgagtgatgactaccaatgatgacatgttgtcagtaaaaagtcgacgatgataacttgtgagtaaaagtattcaggacaacattcaaagtcgtcactaaaaataaatatcagtgacgacaatatcatcattgacaatatgctaatattttgtttaaaaaatggtagactagctatcaatcacgacttagtcgtcatttattatatatcaatgatcactaaatcattactgatacatatcaattttaaataataataattactaattgaattattttattacaaaaattaatttatattaaatatttatttttaactaattgtgtattaaatattaatatacaaaataactataccaagagtcaaacataaataacaaactaaaatatttcatatcaaatattaagagtcaaacataacaatattattaaattaagatactaaaagcgagtgtcataaaatataaattaaatgtaaaaacgagaattcataaaacgtaaacagaaatactaaaaaagaaatttgtagaagtgttatcatcatcactagcatctctcgaaatttactattgaggaacatccgatatctgtaagtagtatggtggcatatgcaaactcgccatcatacccatatgatgtcaacatcatctcaaagaaacattcaaataattaaacttataatatttttatttattttaataataattaaaaattaaataatttatttataaaatattacattaaaatttaattatttaataaatattaaattaattacctaattatttattattattttttaagaaaatatgcaaaacattttcttagttaaattacttagttttgcattaattattttaaatatttaattatataatagtaattcattttaaaattaattttttttataaaattactaacttactataattatcaaattaattctaccaaaattccgacatcataacaacaacattttaacctatccaaaatttttaaaatttgtactaaacactccaaaagtttctaaatacattacaaattcacactatttctacagacacaaaaaaattacatatatacacaaaaaatcaaacaacttattaacactacttagaagaaaaaaaatcacatattatctgtttttttttttcaaaactacacaaagctataataatttttttaaaaaaaaaatatacaaaaaaatattttatatatataatactaataacatatattaaagttttttaaaaaataacatataata

SEQ ID NO: 64106 - DNA, 1130 bp, Cannabis sativa
cccatactctacccagaattgttcgaatgagagtcctagtcatggttttgttggagcagaacctccccatgagacaggacttccccatttccatctcctgagcttcgtttatctcccatccatcttcgtcctccacccgtaggttactcgttcgatcaagcagatcatccatggtgaattcaggcgtttgaggcattcctacaagaaaggctcttctccaggagagagcaaaatcttttttaattttttcataaacatgtttttattgcattttatttattgtgttttcttttattttttttggggatttacttttatttttttatatttttttttgtgtaaatttaggaaacttgttctgttaattaattattacagtacacaatataaaacttatacattatttataaaaaaaattctacccacgataaaaaaaaataaaaaaataaaaaatttaatcacaaaaaaaaaaaaaaaacaattttgtaactaggcggaagggaaggcccgtgaaacctgccctataaaagagatggaatatagaaaatgaaaataacacatttcctttggcgggaaaaatcaaatctagcgtgatctcgtatcttactctttgaatttgggagtgaccgagaagtgagaatggaagatactcgaagcgacaccgtcttcgattccctcaatctcaatcctcagcttttcattaatgaagttctcaataccgtcgacgatttggttgacgacgctttcaattacttccaccagtaagcagtaactctctccctctatctatatacatatacatatacatacatctatatctatctatattcttatatatgtacaaacctgcagtccatatgtatgtgtataaaatattgatcattaattttcggtatcctccagacaggcttcatccaatctgaaaactgatggctccgataggtcactagatctaaccaaggtagcttcattttgtccttttctctttgtgttggttcgcgcgctaacgttttgggtataattttcgaaattatagacaatcttcttcgattctagggtttgcgagcttttgcctgttttgttttgtgttcaatttgttcggtatttattatttttaataataaaaatat

SEQ ID NO: 64107 - DNA, 1326 bp, Cannabis sativa
ttaagcataaaaatttaaatttatgatttcattattcgttattagatcaaaattcgatagtttgatatttttaaaattaatatctataattaactttgtttaataatcattcataagtaatacccattaagtgttcatatatatatttatataagagcattactattaggcatcaatagtgcctagtattttctcgacatatcgcgttgcgattggctagcgatattccctaaaagatattatattaaattatatgggacccaatactcagttgaactaatagcgatattgacacatagaaaggtgctaaacaccactgacgctctttagcatttctctttatataactaagttttggcccacaatatactcatgaatatatagcaattaatgagttggtgggtactctaatcgtaattgacaatttcaatgtgtacactgtacatgcacctatttaatatgagagatatacttctagtaatttcgcaaccactgcttttgccctaatatattggattttttttccatcacatattatataacatacgatacaaattacatactacgtactgatcttctacaattaaaactcactatgtttgcgagattcaacaatattttttatcttcataatttacttattttgaatgagcattttgattaatgataaagaaatacaaaaaaagttattcaatttatgtatagatagacagtacaaattacaattatgataatcatgatactcaattactcgactactattattgttcatatgtgttccataacatttcataattaaaataataaaataaaaaatattagagtaatttaaagcataaatttaacttttagttataaaaaaaatacttaagtttaaattttgacagtaataatatctaagttgtattctggaactacttcgtaaaatatcatgtcacgtgttattttcttattggtatatataaattaatttttttaaaaaaataaaaatataatggcatggaccaatcaaagattgtcacgtgtcaatttataatagtcaggtacctacagaagtttaagaattataatctaggtattataaccgctaaaaattaaatttagatatttatttacaaactagagttaaacttaattatttatgtcttaaattactcaaagatttttacctcttaaacttataacaactaaatgatgctcaaattatatttgccggttaaaaatactctccaaaataaatattactaataatagcaataggaatcaatggtatgttagataaattaacaattaacccaagatctatttgtatataacatagaacac

SEQ ID NO: 64108 - DNA, 4282 bp, Cannabis sativa
gattgttgttttgtttaggtttttcatagaagctcttttaaacaaccagtctaaagggactgcatggatagaattttaaaagcatttttttagtttttaaaatctctaaaaatattttgttgttgttttagtttccaataaggttttttttttatattaaaaaaaaacagcagagggtaaagtccagcaaactatctcttgtggaagaactttctaaaagcgaaagtaaagtgaacccaaccaaccaggctggtatggagtaactcctctcatgtatcaggaccaaagaatttttctattcagtagtaaaagttatgggaaatgttgatgattgtgaatattccaagtaagttgctaagtgagattaaattatgggaaatgaaaggaaggtgatattttattagacacaaaaacataaaaataaaataagtgaactcgtaattttcaaaccaaacttacctgttacttcccaacctctctcttctttccctttcttcctccccaaaaatttatacattacatactatgaagaaatgaaaaatcatatccaatgtaaagcattggaccagtacatatttccccctaactcatatcaacaagaacaatgtaaagccccaaggaaaatagtaaataatctacttctataaatggatgtataaacttgaagtagccctattttttctgtactttctcacttgacgcagctgcccccgataggctgttgtcatttattattactcagaaaaagagttctcgctgagaagtgtcacaaaatgagaatcaatttggttgtcaaagaagatcccaaaattgcaaaaccacaaaataatgctcactattcctcctcattcacaattgatgacagtttctctgccaagttctcgagcagatcatgatactcaacgaatgttacatgtgactgaaaaacacattagtcagggataaatgcaattagcagggtgttggtgttaaccttagctttatcattattcttaacgacagtttaaagagacaatacctgcaaggtgatgctgtatgctttccataatcgcatatcatgccggaaaagatcaaataggacctgtgcaattttaagaagcagctaaaaaggtcacatggatggtgaaagcaaagcatggagattcagaatttttttttttttttatttcagtagcccaaggacttgaagaaaaataaactactatccctgtcaaaaagtaagagatgtagcagaaatatcttgcacaagaattatatctaatatgcccatagacgtaaataatctttaaaccttggcaatgctaacgagctttccacatgaattactcgtgtataaaatgagcaataaaaatcccacacaaatgatgtgaacatgtttgcaatatgtgaggtacagattttgacagcattaagaccagcatacctcagaccgcctcaaaagagtagcaagcacgactatccactccttgaacttgacagaacacatatgtgccaaaagaaattctgcatccaaccgactttgcaatgttcccatttggagctggactcgtaagagagtagatttggtcagtaaaagatttcataaacttctagcaataaaatataatgacatgcattatcatgcttcattcaaccaagcattttacagtctggctcaatatcctaattttttctctataataaaatttctacatcatcacaaaattcaagatgtaatttaatcatctttagacaaacattataactggaaaatgattttgttgacatctaattctattatacaatcccttttactggtccatccccaaaacaaccgggactttatcacacaccataagatggtcgtacaattaaagggaatgttatgttgagctgtgacaaagtggcagtgataaatattaatgcagattgaagtagagaattttcagatagagatttgccttttggccaattaattcaagccctgcagcaaaattctccaacctagcagaaccatgtctctcccgttgaagatattcctgaaataaattgttagaacacttagaatcatttggcagcaaaaaaaaaaatccatattcctatatgacaagtgcaagcctttacaattaccactaaatcaaactgagtgcccttcacaaaagcaacaagtttagaaagttcttttccagacatcaaatagctagcatggttttctaagatgttcttaacagaagtgacatgagcactctgttctttgaatgaagagctgctccaaagaaaaatttcaatattagtatcattaattaaaaagctgcaaaatctgagagagcataaattaagggaaatgtacattaaccttttatccaaggactgcttcctgtaactagaacggaataagaaataacccaagaaccttggagatagattgtcggagtctgttgacgcaggttccaactcccttcctgatctcagcaagaaccttacctgggaacaagaaaaggaacaaactcctgttaacattcctgtatctataagagccttgtttgtgtttaaacagcaaatatgtgcattagaaaagataccagctctcctgcaagttcatatagagattcatcgagtgttgcctgcatcatgtgaccaattcttcttagaagcattatccaaagaaatcaatatccaaaaacaaagactatttttaaattgaaaactatgcaagtacctgcaataagcgtaaagcacagtactggctgactgcaggaccttcaagtttagcaataacctatgatatccaaaaacaaaatatattcaccaacttgcgtaatcctcctcaatcggctattttaagctgcatttgcagctggaacattttcatatcaaaaggcaaagttttttgaaattgtagtgctgtggaaagtgggtgtgattataaaccttataaatacaggcactatagaaaacatttcaaaaattatgcttcccatatatgtaatgattagagagcaatatgtaaaattttaaattttcatgctttggtcaacaaaaattcactcaactaacaaaactatacatcttcaatggaactaaacagattgtttacgaagtactagaattacatcccaattaccttgcaaacaaaataaattatgaaactagaaataaatgaatataattaactgcatttccaagtttagtttagaacggaagacatcagaagttatcaaatcaaatcgcttctctgacagaagttataactaattttgaggaaaaattattcttacgagtatgtagcatgctccagtccggtaccatctacgttggaaacattcctcaaataacctgtaaagtggaactacaaaaattaatgttttacaattaaaaaatatagcaataagataccaacaaagcattcaacaataatgggccctcaagtatttggaggtaattatgttacctatactatgatcagctacaaatgacttatttcctacatttcgcaaaagtttgttcttttgtcacttacagacaatgctaaaactattttatataattgactaaatgtgcacatattctgacgaacattagaagcacatgacctgagatcaaaattcagatccagaactcctaccccctttttcacaaataacatactttcttttttcaacttttaagcaatttcatagaaacataacttctgagcacctatttaagtactttgcagatatgccttgaagccattaaaacacagaagtacataaaaggatagaattagagaaatactcagttgatcttccggcagctgagaacaaatctgcccaatgtctgccatcggtttttcgggcaacactcactactacatcaagatactccggaaaatttctgattaattcacatgtcttatctagaagagagaaagttttggaattaggaacagctttctgattcttgttcacactttgcctgcacataaaatacatatgaacttacatcatatggacaatctggaataatacatcattttctagtgcgatcaaaaaatgcataggaatcatgaacagtcttgactaagtaaataattaacacagggaaccaggaagtaaattacagtttccattcaacaaaaatacctagttaacaaactagacatagcttgcagccaaactaattttcaccaagaatcaaatgattttcatacagtttaactattttcactaaaaggggaaatatcattcatgtgtccgacaataccttaaaacctacaccttgaattacttcataccttaactagggttaaaaggactaacaa

SEQ ID NO: 64109 - DNA, 960 bp, Cannabis sativa
tcgacgaattacaggctcctaaatcacattattcgtaaaattgatgagtgacacgcaaaatgactttctgaggacttaaacttgaaactaaaagtttctctattgataaataacattgtaataccctaaatatcacaaaaggggaaaaactagggttcccaaaactgccccaaatagtagaccaattccctaactggaattccagttttgtggggtttcctggggaccaaccagaattttggttcctgcaggtcccactaaaacggtcgaccggttcagtgctagaaaattccaaaattccattactcactcaattaaaccccaaatctaactaaaccttccagacctgatatttagaccataaagaacatattcaaggcattaaaacactacaacatgcatagaatcaaaatccaccatgtgagagcaaagtttgagctcttaagctcaagtcttgaacaaacctcaccaatagccatcaaaacccctcaattcaacacaaataaacataatctaactccagaaaacaaactcaaacaccaacaacaactacagaactctaaactcacaattcaagcataattttcaacttaaagcttaagaaactaaagggaaagatgctaggaaccttacattgagttgagattacttaaaacttgctgaaaatttctagaattgatgaagaaaactcagaaccctagctagttctatggtgttcgaaaaagagagagagagttttggagagagagtgtgttcttcttttatttgattttgtaaaataaaatgataattaaaataagttttatctgattaaaatcagcctaattatcagcatataaactcaattaaagtccactaaaggacaaaattaaattagggcaaaaagacaattttgcccccactcaagccaaaaagtcataaaatcactttggggtattttggtcaattctaaaatctcaa

SEQ ID NO: 64110 - DNA, 2046 bp, Cannabis sativa
aactattggcgctttagaatcttgaaaatctgtcttttggatttcccatgattcgtttctaaataattgtctcttctttttaaatttctcgctatctttcaggtttttgacttgggagaaaaggcacctgataaggtgttacaccagctatatgttactttggatgaactcaagggtagtggagataattttgcagctgaaattgagaagagattaaagataattgtgagtttacgtgttaggttggcacagacacacggctgattacagagatgatacattaagaacttaaatttaatctcgatttctttctcttcttacataaatttttttcaacaggttgcaggtggagatggtacagccagttggctccttggagtggtttctgatcttaaacttcctcatccacctccaattgctacagttccactaggaactggaaataaccttcccttttcgtttggttgggtaagtttctaatattagaacagtcaacatgttttctcttcattgaacaacaataactatatggatgaattctctcaacagttttaccatgctgctcgttttatttgagtgcagtgtttatcaatacaaactgccttgttttctcagcattaatattctatctgggtcttgccagtatttaaaatctgtttaatctcattcactcaatgctgaattatttttcatgttatttgtttgtcaaattttttacagggaaagaaaaatcctggaacaagccaagaatccgtggaatctttcttgcagaaagtaaagacagcgagggaaatgaaaattgacaggtaatataatcatgattttaacttaacattactcttgcccaaaccctcttaaacatgtgtaacggctttttgtatcactgatcattaacgagtcattaaaaattgagctaaaaggtctaatgcacattgcatcaccagtgaacacaataaatttacaatttggacattttagtgatataatgactgagatatgatctatgtgaactgtattcagcgttttctatttattggtgggttaaactgctgaatttgatatgaaactaaggatctgaaagagtgtgtttggatgttaaactaacatcatggaaaagtattttggaaatattttgagatggaattgctctttatttgaagctgttaggtggggattaatgttatgttagtattcatttggctaattataactgtaaatctaagctagcctcatattagcgggtgagaaaattgttttgtacctgaagaagctgtaaggtgctgtacggtttccttttgtcttcttaactttaaataggaagctaactgtggtaaatgaatggatatcttgttatagtattttgggttaaattttctcttgtttatttggtttcatctctttcctattttagctggcacattatcatgagaatgaaggctccaaaggaaggaagttgtgatcctatagcacctcttgaactaccccactctttgcatgcttttaatcgagtctccaaaacagatgaaatgaatatggtatgtgggattgacttattgtttcattttactgtttccttgtccttagtgtataaaataaaccctttgcaatttcccttttgtttgtgttattgaatgtaaaattgtatgcttattgccaattgctctgttttctgttctcaggaaggctaccacacttaccgtggaggattctggaactatttcagtatgggtaagaatgaattattgacataaagtacttatgtgatgcattggacagtttactgaggaattaatattagtcagacaattgaagtgtagtagtagtgaactactaatctctactttatttagaagcatacatttccttttgctatgtgtaatagataataatattctagtaactgaaattacagaaatgatattgttgtttctaatccacaatccctatattatacaattaattaacagtacagagaaaacgtcacttctgctttatttacatagctccctaacaattacatgttgttctgtacaggaatggatgctc

SEQ ID NO: 64111 - DNA, 596 bp, Cannabis sativa
aacaatctcaatagttcagggggattttttaatggccaaaaaagttcagagggcatgatttggtacatgtcaaagttcagggaaaaaatcctaattagctaaatcttaattgacagtgtcataagccttgctaatgtatatttttattgtacatgtcgaagatacattctttctcttataacttttcaagaggtcttgaggaatcatcacattgtgagctatggaccttacttgaataaatgctccttggttttgattaattaaaccaggaagcaccattgcaagtctagagcacaaaagcttcgatatacatttataaatcatagtacaacaagtgattggcctgtagtgtgcagctttaacatgactctcatgcttaggtatgaaagaaattaaattcaaatgaagctcaattggcataatacatgtgctaaaaaaattagtaatagcaaaatagaattctgctccttattctggccacaacttcttgaaaaatcctgacctaaacccatcagcaccaggggattttgtattcgggatgttgaataaagctttcttgatttccttgtttgagaaagttttgagaagacctagtt

SEQ ID NO: 64112 - DNA, 977 bp, Cannabis sativa
ttttgcaggatgtcttaaataaaataactataatttacatgatcatgagaaaaaatttaactaaaaaattatttcaaatactaaaatagatagagatatatcgatgcatgtcttttaaggaggtacattataaaattttccaaatttatgttttaaattctatttttgtttcctaatattggttctatccgttacgacccttgagtcgtataaaaagccaatgtttctttcaaaaatctttggagatgtaaaatatgtaataatatcttggttatctttatcaaattacatcaatacgtgtatatagtttcacattgatatttaagaacttaaaatctctcatttatctttgtggacattaactaatatatctttcttttagagtttccattaggtgtggatatttaatacttctacaaaaaatatcacttttgccagtatatttttacgctggtaaaaataaattattttttttttttcatgtattgacaaaaaggattggcaaaagaagttagcaaattaatgttagtattaaaagttttatcaggacaaaatgaaaagtgtttgctaaaaacaatttttttaagcacataaatccgctggtaaaaggtagacttttatcactacaaatgtccgttagtaaaattttgacatttttactagtacgagatatttttaccagtataataacgaatttacgggaaaattgattcaagatgtgaaagaagaaagtgtaaagataaggtaaacttttctagaatttatgcattaattgaacattttaaaatagaaaattaatgcatttgtatttactgatgttgatgcttggtactcgtggcatgtctttagcaggctttaaaaaaacttatttctatattgtttttcaatttataattattttttaattattactaattcaaaaaggaaacataaaattaaaagaacaaagttgtgacaacaaatttttttaaaaaata

SEQ ID NO: 64113 - DNA, 688 bp, Cannabis sativa
agatcaagcaatcaagaaactcttcttcgacgtaggtgtatatatttatttaattacatctcattttgaaacattacaattaaaaaacaatggaagcatgaatgaatatcagaaaaaagaaataaacagcactttattaatgcttaataataataatattgggcctaacttcaataccttcaggggtcgtttggtatgtaggtttcatttcatgggaataggtttaacattgctgggagagtgatcaagggaattataaacctaaaaaagcaacattactgtgtttgattatgtgaagtaatattatgatgatgcctaggaatatgaagattactttgtttggttgacataagaatggaatgtgacaatttttttttacaataatgattattttttaaaaaaaatactaataatttcatatttttttctttttaaatgttgaaaataatttttatttattatttttcatataattttctaaaaaaaattaacaataataaataattataaagagtaaaatatacatatatatatatatatgaatgtcaatccgagtcgagctcaaccagcattgacccggcccaagacggtatctcttttaccattcctatatatatacttgtcacaacaaataattgcaaatttgataataatttttcaagaatcaataatttaaacaacaataaaa

SEQ ID NO: 64114 - DNA, 844 bp, Cannabis sativa
gtgtgaggatgatgtgttacactataaaaaaaaaatccaaagaaacaatatgactaaattctaaaaaaataataataaaaaaataatattactgaataatttttaaaagtaattatattataaaaaatatataaggaaatatttgaaaaatataaaaaatacgttctgtaactacttttgtttttcatttttaaaaatagaaaacaaaaatgtgttatgtaaagttcatttttattttttgattttatctaagtcgagtctaggtccggagttggattcaggttcgagttagaggccgcggttcagcgccatggccgtggggagggatttgggtccaagtcttgtcggaataaaatattgattaagaaaaaaaaatattgaaagtgatttttttttttttgtttttaaaattttgattcttaattaaaaaattaaaaagtgaaaacagttttatagaacatgtttttaaaaaatatttttcaccttttcaattttaaaaacagaaaattaattaaaaaattgttaccaaacgccactataatttattgtttcataaatatactaccaaaaatttaaataggaaaaaaaattaaaaaaaacttagttttttcaaaatataaaatgggaaaaaaattaaaaaaaaattaatacaattaaataaataaagtttatataaaataaaaaattgtgttaaatatatatttaatacaatttaatatataaagtttatataaaataaaataaaatacaattaaacactatttatttatttatttattttttcatgaaaccctaatttcatccgcctctctcagctacgattaacctcttccaacctcccgca

SEQ ID NO: 64115 - DNA, 765 bp, Cannabis sativa
tataccaacctatacggggacataccgataggtgttttaaatgctgccctataggcccacaatacattatcaagcttctttgcccaatctttttgagagcattgaactgtcttttctagaattaatttaatttcccgcttagacacttcaacttggccattgctttgaggatgataaggtaatgctatactgtcacagactccataccttgcaagtaaggcttcaaactgtttgttgcaaaaatggctcctccatcactaataattgctctatgagttgcaaactgagtaaattttttttttgaagaaaattcagcactgttttaccatcatttgagtgtgtctctgccgcttccactcattttgatacacagtccataactagaaagatataagaattgttgtatgacggtggaaaagggcccatgaagttaataccccaaacatcaaacagttcaacttccaatatacctgtcaaaggcatctcattcctttttgaaatattgatcacatgccttgaaaaattgatgagcatctttaaagagtaggccagaaaaacccactttgtagtacctttgtagtagttcgaattccactaaaatatcctccagattgtaaactatgtccacgagttaggatagagaacatctcatcttctggcacacatcttttgataatttgattggaacaatgcttgtagaggataggcgtttcccaataataatgtttgacttctgagaagaatttctttaattattgcctcgtc

SEQ ID NO: 64116 - DNA, 987 bp, Cannabis sativa
ttgagttggatggatttaagggctgcttaacttgaaatgagttgaatgaagttttatgagttctatttcacttggatatacaattttgagtaaatggatgaattgtggtggtttgatgcatttgttatgttgtggttatgatattatattgatctggagcagttggacaggtttggtttagttttggtttgagtttggaggagaaaactcatgtttgcaatcctaccagaatcggtcgactggttggttctggtgtagcagaactggtcgaccaatttgtctgctggggaaaattcttagtttttgtcagggccgattttagggctcgaggtgatttccctgtctggtatagattgtttagaagttgcaaaaacctattttggagctgatagacgttaaggtttacggttatggaaattagggttattcccataattatggattaaggtatttattgaatgttgttgttgtgacataggacccgagatcgtgaagctttctttccacctaggtcagcatgtacgctaaatttctagactaaggtaaggaaaatattacataccgtatatggttaacgttataacttttagagtctcgattatgatcgaaatcctggtatatgtacattgtgacttaatcttaatcgaggttaacgaaatgtattggttgcgactcgattatgatcgagagaaatgataggaaatgattattatcattgtgactcgattatgatcgagggaaaaataataggaaacgattattatcattgtgactcgattataatcgagggtaatgatatgaaacgattattatcgttgtgactcgattatgattgagtaaaagaaacgatcattaccgttatgagtaattactgctgaaactgcgaataggttgttacttatcatttgctgtatcgggcaacgatagtgacatatgtagctcgtggttaacgagtggtaagaatactttataaagtaccaaaattgt

SEQ ID NO: 64117 - DNA, 1044 bp, Cannabis sativa
caattactatattttagctaattgtattaatgagacaaatatatattgaattcaaagttgaaatcaactactataaaagaaaaatactaatttgaactttatatttttagtagtcatataaattatatgatatataaatatataataaatatgtatatatgaaccttcttaatgtggatagttgagttagttcaggttgattggacgggttggtattatttttaactcgcacaatataaaaattggatgggtcatattttcgtcgggtttttcaatttgtaattttcgtcacgttatctcagtttggtttgagcggattattcgagtttggcggtttacaaaagtttatgtacagccctagtacccgtaccttgacctacacggacctaccttaagagagagaaaataaagagagataaagtaatgagaaagaaaataataagatagagaaagttatgagagagaaaataatgagtataatgatgtgagataaagtggaaaaaaaaattgacaaaagacgaattattttttagaacaaaaaataatattatgttgtttttaaaagggtaaataccatgttggaccctgtgttttgtaaaagttaccaattggaccttctgttttgttaaatgacaaaatggaccatatattttctaaaattgtaaaaataggactctaagcttaatttttaataattttatattttaatataatcaattttaagacaatttctaacacgaatagatacagaaaatgtaacaacttttgtcataatatctctagatcaaattattattaaattttattttgaaaaaaaaaaatctattcagggtcctatttgtacaattttagaaaatatagtgtctattttgtcatttaacaaaacagatggtccagttaaaaacttttgcaaagtctaaaatagttaaaccctttttaaaatgagaaatgatagtaaatggccccaaatcataggactatgttagtttatgtcctcatttcaaaaaaatatagcaaatgaccctaaatcataagattatgtta

SEQ ID NO: 64118 - DNA, 601 bp, Cannabis sativa
tgtgtcattttaattgcagctgcttgacactggtttttttcatgctgatcctcatcctggaaatttgattcggactccagatgggaagctagctattcttgattttggtaacaatttacatcattatcttttaaaaataaaattgtcgcatatttacatcattattagtattcagtgagaaacatgtttctgtattcatatcatgaataattttgctagaattacttattttgaacccagttctgcattcttaaaaggtaataagcgattttttttcctcggaacatctataaatgtggatattcctcatttatataagcacgactgacaacttcaaacagttagaggatatgaaagacaagacattaggcatccacttggtcaaatgaaatgtcattcatttaaatctaaggaataatgatcgaaaataaaattttgacaaaaaaatacaataaagaaaagatccattatgattatagatgtttgaaaattaacaaaatacattgcaccctttgctacaggacattcataacccatggcctttctgctttaaaatgcagctatgttttgatgtctttagttttcttaataattattttca

SEQ ID NO: 64119 - DNA, 739 bp, Cannabis sativa
aatctaacatccaatatataattagatcagatctagatagacctaaaaatattggatgtgatccaataaatactcctgagtattactattaagtaagagtatgtccaacagtttctataaatagaacttcgtaattatttagctatattatctaaaattaatttttaagttatactcatacaccaaaaatagaatgccaataataattttcaagaattatcgtgtgtaaggagaaccagcagaagcagcggtcaaagcgaaagagagttgagtagtacactagacactagagactagtgtactactttctctgtcagactcagatccactttcctttctcttttgcttttcccttccctccttccatttccagatcaataaaattaaaaaaaaaattgagtaattaatattaattaattataattataaattacaaatacaaatttaaataaaaaaaatggatataataacattcggcgtcataattggcataattgtgctctttctggggattgtttgtttcatcaccattgaaggcacttgcagacgctcttgattcactctctaatccaaacactcccttccctttcctcttccaatgcctttttctaattatacaaaaatgcttactatgctctttctccttttcgctttccctggtttggatctgagtcacgcttctcaggtctctccctctattgatgttcaccgatgtagtcacggacacgaccaccaccac

SEQ ID NO: 64120 - DNA, 833 bp, Cannabis sativa
gagatttttaagagtacgtaccagcggtttagcatccactttaagctcaggcagaaaaacaaaatccggagagcgagagctaatcagggacttcagttcaagaactgtagaggtctgccccaaccctctacaattccaagcaatgcctctcatgactcctgtggaggagatgcgacattctcctccataggggtatgagagtaagcagagacgctagaaccagagttttcaacaacaaacgatccaactaaaggatttttcataatttcggatctgttcagggatttcgacgagtcctcagaaggctcatcaaacaccattcttgaatcattatcaatctgtttagtatcccaagggaagtcacgaatgacaacaggatgcttccttgaattttgtgcggcctacaacagagggaggcagaggtttcaaattttcttttcttgaaaggagtggtcctctcatttatttcagaagaagtcaggaccccaatatccccgccaatcttacgaatctcgtacaagtcaagctctgcaaaatgtttgagatcatgtaataaattttcttgagcatgaaagaactgggatagagccttatcttcatccgattgcacttttgcttcataaaccccatcaggaacatttgagggagccaaagaagtggtcatctcaacttgttcgtccctctgtttactatgtctaggatcaatagtaattggaatacaacttacgggccttgggtttccatttccaccttcatgtgaagacattccattactatctagcaactcaggcccagagggaataatggtaccatcaggcaaagaaggcccaaag

SEQ ID NO: 64121 - DNA, 1111 bp, Cannabis sativa
acaaaaaacatgtccttcaatatggcatggcacgagaagcacgaataaactagcccgaatagcaggacacgcgacaagctcaaaaagtactacttgacatattaaaaatcttataatttattaataataataggatatgtatttatcaattataaataaattaaaataataataattaaatacaatattaaatattataattctataattaaaactattaaaacatgaaaaactaagtttagatattagtgtatttataagttgatataaaaaattgagtatttataagtaaatatttaaaattttatgatgctaatagttttttaatatgattataatgtgtaaaatattgttgaaaagttatataaatataactaaagctataaaatacacatatactttagtaattttggaagaaaatatgaaaaagtaaagcatgaattcaagcccgaatatgaaaacaagctaatttgtttaagaaatacgggccgacacgaattcgagcattagcgcgaaactaccgagcctacgggtcgtgtcaggcctatcctttaaaaatattagcacgacacgacccatatttttttgtgacacgacacgacaccacctgatttttgaaaagcacgaataaatagcgaatacagtacgcacgaacttacaacactaaggctcactactacaaaaatcactattctcgactgtcttaaaaaaactttttttggggagaccgtcgctaaaaaaattaagtgagtgtttaaaatcttcaaaaaaaaattgggtattcctgacaatttcaaacactcgtgaggcattcccaacagtttttaagcgtgccttaaaaattacagtttttctaaaaggtgaattgtggacggttaaaaactattaaaaccgtcgcctatggtataggccacaatttaaaaccgtcacctatagtgttataggccacaataacaatataggcaacagttttaaaccgtaggtaattagttcaaatttaacaaaatttaaataacacattttccctcgctccaatataacgcgtttttagattgaaaattttcacatctatacattttcaaatcgtctctctctctctctctctctctct

SEQ ID NO: 64122 - DNA, 751 bp, Cannabis sativa
gatgaatgtagttattctctacatgtatacatatgtggatcaattaattgcaagctcttatttccaagtatgtgggtcaatgagctgcaagctcttattcccaagtatgtgggtcaatgagcttccagctctttgctatctcgtcttgaatacttctattatatactttgtctatcctgagatggactcactatcttgccaatcttaactggtaatagttattattcctatctcgcatctgcttatgtgacaatgagtttgaatatttctatcaaccgtaattattgaaacgagttatttaagttgcatttaataacgcaatttaataatacaatcattgagctgattcatattctttttgaagtacacatgtcagcttctggttgatagccaaatttcgagtataacagtacatgtaaggaattcaagagataattaaaagggtaaaatagtaattttgaccaactataattatgaactaataattagagtgtgaattacttatattgattatatcaatggactacaaattagaattttgtaactataattatatattatcaaatagtataattctataattatagtggagtaataatagaattaagagtttaataattatcaagtatttattggagcttcaaaatataggtacatggttcctaaatcacctccatacaacactgtacaagagaaggtttaatttgaagaataaattgagaaagaataatttctataagaaataattctt

SEQ ID NO: 64123 - DNA, 1784 bp, Cannabis sativa
gtgttgttggagaaatatctatgctttagtagtcggctgagaagagaatctggcatttcaaaaattctccaagcttgttttgcaaggagagcttgattaaagtgtaacggaaacccatgccctccttcaaatttcgacttacaaagcaatttccaacttctccaatgaatcttagaaccatctttgtttgaaccccaccagaaatttgccatcattgattccaattgattacaaaaagttgttggtaaacgaaaataactcattgcataagttgggatggactggacgacagctttcagaagcacctccttaccaccaactgagaacagtttttcattccacgcatgtaatttttgccaaatacgctccttgatatcactaaacatttcttttttatcccgctctgaaaatgcagggagtccaagataacgttcatgacattcgctaattggcattcctaatgtttgatgaaagaaatcctaggcagcttgtgcagtgttgggcgaaagtgacatgactgactttgctgtgttcaacagttggcctgaagccttgtgatagatatctagaaccttgttaatggcccttgccgaactgtttgtagcttcacaaaagaggaggctgtcatctgcgaaaagcaaatgagaaattgatggagcatgtcgtgttaaccgcaaccctttgagattattggttgattcttcactctgtagcaatcgagataagccctcagaacagatcaaaaatagataaggtgataaaggatcaccttggcgtaacccctgggaaggctgaacatgaccaacttcttctccattaagcatgaaagagaaactagtagagtgcaagcaattcatgatcagagaaacccatctattgtggaagcccatctttcgcataacctcctcaacataggtccactccactctatcaaacgccttactcatatctaatttgaaagctgagtagcttctgttcccccttgtcttatgctttaaatgatgtaccaactcaaaagctacaagaatattatccgtgatgagacgattggagagaaaagcgctttgtgtttttgagattactcaagtatatattagttaatatataccttcgaaagtcatatgtatagacggttagtaaaatgttcctattgtatatggaaaaaataggtgtacccacaatagaagtctcctaaaaatatatttacttacaacaaattataatttttgtaattattattataattaattaattattttatttttagttacaaattttgattaaaagtaaaatttttataataaaagtagtaatcaaattttatattttatataattaccataattattaatatttttatttatatattatattattaccaatatagcatatttgcaaataatatgacaataatgatgaatatatagggtaattttaaggtatgctatcctgtttcttcctttatgctatagggaagtctaatcgaccaatcataattcaaagagtaatttgcgacaaaatccattcaactatcaatttacttgcaaaaaatcattcaacctcgtattttggtgggaaaactctctgaagtattgttctattttcaattttaaggcgtcgtctatccagcctcgttaaatcctaattttacccacatggtaatgacagtcactaaaaaattatcctagtggctatattttacaaaataaaaattaaaataagtaattaaaataaaaataaaaactttaagagtaatttgtagcaaaaccccccaactatcaatt

SEQ ID NO: 64124 - DNA, 771 bp, Cannabis sativa
  modified_base (713)..(735): a, c, t, g, unknown or other
tagcttacgagctagaaggataaaaaacagagtcttttctatttgttctatggaagggaatcgggtggaggaacctagttagattagtgaagctttcttaaagttctacactaatctattgggaacacagcagaaaaccagtaagattgaaaataatgcagcaggggccgaaactaacacaacaatggcaagattttttaattaagccatacatagctgaagatgtcaaagaagccttatttagcatacctggatgtaaagctcctagaccagatggttttagtagctatttctttcaagacaactaggatctcattaagaatgatgtgataaatgctgtcttttcctttcttcattcaggtaagcttttgaaggagttaaattgtacttcgctaactcttatacctaaagtaaaatgccctgatagtgttagcgactacagaccgattgcctgctgtaatgtcatttataaagtgatcacgaagatgatttgtaggagattgagaatagtgctccctgaattagtttctcagaatcagagtggtttcattcaagggagatacatagcctacaacatcacggtttgccaagatctggtgaaatactatggaagaaagacgctaggcctaattgcatgataaaagctagacttgaggaaggcttatgacaccttagaatggggattcattgaagaaattgttgggttttgtgcnnnnnnnnnnnnnnnnnnnnnnntaatcagatttacttatcaataaagatcagaaataa

SEQ ID NO: 64125 - DNA, 794 bp, Cannabis sativa
tgatggcctggctttcttcatcaatcttgtgatttatatttgccaatcctacaataatctcattaaatctatcaatattatcatctaaagaaagggaagaagtcattctcaacccgtataacctttccagtaaattgatcttgctagctatcgatggttttaaatataaatcttctaatttattccaaactcctttagcagtcttttctacgatgagtttctttcaaacactgtttgatagatacatgatgatcgtgtagtacgccatctcctccattttctttttcttctagtttcttttctgctaataacttctcgtcaccaagaaccttcgagactttctggtgcactaggatttcttttagactttctctccatagtgcaaagtccccagttccttcgaacttctccaattcaaatcttgccattgatgacattcaaaggtttctttaagaattgcagcggaatgagtcttgattctgcgttcttgattgattacttagctctgatttgtgggaaaattacgactaatagtgcagaatcaaatcaatgaaactctaaacaatcaaatgattagcaatgacaagattaacaaattgagaacaataatcatttgacaaataagggtgaatacagtaatgaaaaccagaaacaataaatgcaaaaaaataaagaaattaatacatatactggttcaagttcgatagatcgatatgatctatggctgtacttcagttctagaataccaccgtaatcttcctttattgattgagcaagaataggtacaatacagt

SEQ ID NO: 64126 - DNA, 2080 bp, Cannabis sativa
tcggttgacttttttagtttttctaaccttgttatctgtttcgaccatcaatttcttcttttgtaattgttgggatttgtttgtcatcctttgctatgattcttcattctttgtctctatgttctttcttcactgctttaggattatggtaaaaaataaattagctattgtgacagctatgatgttggtaatgtccaaaattaccgaccatgaactcaatggttcaaactatttggattggagaaagactattctcctcaatttacggagtattgacagagatgattacttgactattgatcctttaaagtcatattcaaaggaaaagttaatctaacatggcttagggatgatactcgcttattctttcatattcaaattctattgataatgaggtaattagtttgatcgatcactatgaatttgttacaaaaatgatgaattatttggaatttttgtactctaaaaaaggaaatttatcctaaaagtatgacgtgtggaaatcatattttattgtgcatgtggaaaaacaagataaattgtccataaactattttatggaattcaagaagacatatgagcaagttaatacattttttttccttaagtcctaatgtgaaggttcaacaatattagcgggagcagatggctatcgtgagtttattagtggggctctcccctgaatttaattttataaaaacaaaatttatttgagtccgacatctttgcaagatgtctttcgtcatgttctatgcactcaaactactccatctacttcacttacttaatacctcgtaataatagtaatgtgcctagaaaatcttccacctcaagtggagagaaggggaatatccacaaggatttgacaatcgagcatcttgtggaggcatttttttgcaactatagtgaaaaaccttgaaattcgaacaccaaattctgaacgcattttttgtaacccttataaacattttgttcacaccaaattttagtgtagaaagttacaatttaaaaattaccaaagacagtttgctaatgttccaagcaccaataatgtatctaaaaaaattagttgttatttatgttgatgaatttgccaagtaatcacttaagtcgatcttcatctctttctgttactattattattgatttaggtaatatatctaatgtattccttctttcgatgttctcataatgggtcattgattctagtgccacctatcatatgacaggttattccagtattttttttctacttttcaatctcatagttccacttctactgttgccttagctgatggatcttcctcttctgttcttgaatctggcgtcatattactcttacacttatgcttgctttttcatcaatcttacacttacctaattaatcatttaatttgctttatattagctatagctcacttgttatgtaaattgttgcatctcattcttttttaatcattatttatttccaaatcatatgatctatgggagatcagttgccgcaaatagtactttacaatttgttttaagaaagttttaattgttacgaatttttatgtaaatcacattttattataaattccttttattaacaaatattagcacaatgattataaaatatgtaacgtactatctattaaagtaaatattgattatgtaaagatactttttatatttggtgcttgagtaaattgtaaatctatttcttttacatgagggtatatatagttacaaaatatcttaacacaaataaattttgaataaataaatattgataatatttataagtatatcaatactattcacggcctcatcatataataatcataaacattgacaaaataatatgagaacacatatagttcgtggtgagttctatttttcttcgtcaatgatgtaattttgttctttactcttccaataatataatagcctatagctcaaagttcttgactacttgttttcataataataaaaaatgaagctattattttatgggatgtttttattaatggtaaactaatgcttgaacaccatatcaaatatatatatagtagtaagcttcctgtgaggaatgctt

SEQ ID NO: 64127 - DNA, 803 bp, Cannabis sativa
agcaaagaactatccaatcaacccaagttttaataaaaccaataaaatttaatgtaagcccaaataaaatttaacattcttctttttattctgctttctattccttaacccttcggagtaaaaataatacaagccttttttatcaagacaaacttttttttctatgataaattagtttgtgctttatttggagttcatgtttgtacttataacactatctatacttttattttctttctgaactctcaagttgcttcacatcagtaaactgataaaaaaatgaacaatatacaattaggaatgagaatggaaatgagaacagaaataagaatgaaatagaacaaaattcaaaatgcataaagaaaattgataaaataattattaaatttttgtcttatcttagcattcgaatcgtctttccttccattatataatagaataatcattccacaaacatagtagaaaagtcattccattggaatgatattttaatattttaaaatgcaaccaaaccaaaggaatgaatagaataaaaattgattcatttgcattttattccattttattatctctaaccaaacacaaagattcaacaccaaaagtgagattgtagtacattcaggtatatttcttttgtttttttttacagaaattcatagtaaaactagtaaagatcatttttcatacctctagggtgtatcagtaatactaaatagtattgacaagcattagttaattgtgtaatgtaatgacctattaattatgatttgaattgaaatagtcagagaaactcatttctttgt

SEQ ID NO: 64128 - DNA, 623 bp, Cannabis sativa
atacatgggtgtacaaggaaaaatataatgcagatggaacttttcagcgctttaaagctcgactagtggcaaaggggtttcatcaaagacctggtttagactttggtgaaacttttagtcccgttattaaagcctctaccataagaattgtcctcacgattgctgttacaaaaggctgggaggtccgacaacttgacattaataatgcctttttgaatggaaaacttgaggaagatgtgtacatgtgtcaaccacctggttttgaagacaaggacaaacccgattatgtgtgcaaattggaaaaatccctttatggtttgaagtaggcccctcgggcttggtatgactcactgaaacaaactctaatcaaatggggttttgttaactcacgggcagatacttctttgttcctgctgaagactcccaagtttgtcatcatggttcttatctatgttgacgacatcgtggttacaggtaatgacactcgagaactcaatatgttcattgatagactgaattctacttttgcattgaaagattcgggggatcttaatttctttcttggaattgaagtttttcgagatgtaactggcatgtatctttctcaagggaaatatgttatg

SEQ ID NO: 64129 - DNA, 792 bp, Cannabis sativa
aaacatttgagtttcatttcaatgaaacgatttttctactatttgggtagaatgactttctaattttgttgaaaaattttattcacacacagggtcggccctgagttgaaatgggccaacttaaaaaaattttttaggcccttatgatatttttaaaaattattaaaacaatatgtatcttttaaaaagtatttttttttatttgggcccttaaaataagtgggtcctaggtgctgccctagccaggccttgatcacacatagcatttatctaattaccgaaacttaataatggggttatagttttgttgctataagtgtaatataaatcttacaaatcaccgacacatgagcaatctagaacaaaacacacatgggattagactatttatttattttaatcatgtatatattcattcttattcttatcatcttaattaactgtttttaactaactttgacagttgctagttgaagagatgaacatcttaacaactgtgttcttgaaactcaacaatgaaaaggtttactatccaaactcggtcttgtccacaaaacccatcagcaactactacagaagttcagatatgggtgatgctgtcgagttttcgatcgatttcaatacaacagtcgaaaagatagcacaactcaaagaaaaattcaagaagtgagtttttacttactaatacttaaaatttcttttcaatgtcattttttttaattctatatacacattttggttttgttttggttattttttttaggtacatagaaaagaccccattacattggc

SEQ ID NO: 64130 - DNA, 866 bp, Cannabis sativa
  modified_base (811)..(811): a, c, t, g, unknown or other
tagtgtttctaataataaaaattttataaaaaaactagtaagtaatatttacttgaaatataaatttacaaaataaattcaattaattattgttatgaatttaattttttaataataaaaatttatttaaaaaatcaaaaaattaaataaaaattaatttttaatataataagttttaaaaaattaatgttaaaattataataaaatatgtagtaataattaattgaaagataaatataaaaaatacatttaatttatttttaattacatagcataaaatagcataagagatcatgaaacaacataaaattttatcattcaatttatctttatacttaaatattttatatgtatttataaaattttagataacaatcgccaagtcttgggccactttgcgaaatcgtagatgtccacaatattggaatggtctaaatgcatttttagagatggcctcgaaatgtaaagattgtgatggtagaattaggtgcccttgtgtaagatgtgtgaacaatagtcttcaaactttacctgttgtgaaagcacacatattcaattggagtttttttactgtttacgagaagtggacttaccacggggaagcagaatctatcaccactaatgtaatgaatgaccatgatggcgctgatgatgaccctgaaattgacgagatgattccgatagtggatgactttcttcagtcgacattcaaaatgaatgatagtcctgatgcaaatcaatggcgtgatgaattatttgaagagagccgaattgtatcccggttgtgattggatatcttctcttaactttntggcaaagttattgcatttgaaagttaggggaaagattcctaaagttattaaaat

SEQ ID NO: 64131 - DNA, 713 bp, Cannabis sativa
gatggctaatttttggtggggcacgaatcaaaatggcactaaaattcattgaaaaggtggaaatggttatgtaaatccaagcaataagggggtatgggctttagatcttttgttcacttcaaccatgcactcttggctgaacaagcttggagaattttttatatgccaaattaattgttgagccgcctactaaagcaaagatacttttcaaccacatctttcttggatgccaacattggtcactctccatcctatacatggtaaagcatctgtggggtagagatctcctggttaaaggtatgagatttaagataggaaatggtcttcacatagcttgtgatattgatccttggattcttagccatacaaacttcaaaccggtcagctataatggtccctctagcatgtctgtttctcattttgtaattgaatagagggaatggaatattggtttgttaaataatttttttaagccaattgatgttgaaaagattttgaccatccatttgagtttttttgctgctcatgataaactcatatggcatcactcatcatttggatcctacactgttaagtctggttttcatttggccaccacattggaagagcaagatacttcttctacctcagatccaaaccgtgattggtgaaagtttttttggaacatgaatttaccactaaaaatacgcatttttgcttggaaagtcctacac

SEQ ID NO: 64132 - DNA, 880 bp, Cannabis sativa
aaagtgttaccaaacgccacatatattttttattaaattaaaataagtaagacccgatattaaattgtattattatgtgttcaaaattttccaacttgttgttaggttgtaattttactaaaatttctatatttcaaattttgtggctcataattaagagccttgactatgaacactaccgattacttagaggagccctattgtattttgtatcatggcttatttttcaaagaaaaacaaacaaaaaaacatatatgtacgaaaacacccactaaatagtgtacaataaattgttccatatatataattacaattctttagggggtcctgccggcccctattcagcaagtggctctgtcacattacaaacaaatatatacaaatttggcaatggctatatttcacatcttgaaattaaaatttgtggtacaaaatttgttgtttaaaatatctatattaaaagtgataagcacatagacaaggtgtggtgcacatttctcccttaacttgtttcgtaggtagataattaaactttcctatatttgatgtggtcctaactttaggtacatctctcgaaccacttttcttcttttggcatcaatttattaaatgacaaattaataatttactgttgaaaacggcttcaactaggtactactactaaagggcactcataatattggtggctaattcttttgagtgtaatttaatatcagttttcacttattttattttaataaaaagtataaaaatcactaactaattataagataacatataatcaggggcggagccagaactaaagtgttagggggggcaatatcagacagtgcaatatacaataaatttaattttcggtgactttaataccttttaagga

SEQ ID NO: 64133 - DNA, 991 bp, Cannabis sativa
atagatattctcagctacttcattcgactgttaaggcccaattctcagtccatctcccagtccacatgtaaaattagtcagaggatcctgccaggtccaatcctggccgaacaactcctttgaggcagctggtctgtcactggttgtcctgtttgagtgccgagatccccgtttgctgaggtgctgacttgacctttttgttggtgagctgcattgctacatgatgttgattttgtctatgtaagcatgccacgttaggtaggcaaaaatcatgataataataagtaatatgagtttcgatacttattgtgttaataacaatattagtacgtaagagagtgttagatactattaatgcgttttaatatttttcctatcaaaatgttattaggtagtgaacaaaccactataatattgagaaaatagtagggttgcttcatgctttcttcacgtgttaaaaggctttaatcaaatgagggtcctaccttcatctggatgcccatgctcttgtggtaccatactccaatattatatataatatactataaattagtaggtattccaaaagaagatatagtgacggaagtctatacaatatatataaataatatataaaagtacatttttattggtgcctattagttattaatttttatatagcggattgttacggtggcgttacatttttattcaattttttatttttaaaattcaaaaagtgaaaatattttttaaaaacatattctataaaactgttttttctttttaattttttaattgagaatcaaaattttaaaataaaataagttactttcaatattttattaacaaatttttttaatcaatattttggactccaactagacccggacccaaattctctttccacggccttggtgctaaacccgacactgacccgaactccatttgctcctaaacttagaccagacttaaataaaatcaaaatatgaaaataaaaatgaactttaca

SEQ ID NO: 64134 - DNA, 768 bp, Cannabis sativa
accataattttaatgtttcttgttaaaaaaagaaaagagaaatattttaaaccataattttaatatttctagttcaaaaaaaaaaaaaaaagaaatattacttatgttttggtagttacttgtttcttttccattatttttatataaaatgacacaataacaagagtataacatgaaaacataaaaagtctttttactttaaataaaatttaaaatttgtaagtgtagaaaatttcgtacaactatatttttacaattttttactgtatataagtatattatgaaattattcctaaaagaaagagcaatgaatatttgttgaattaggtttttcattgagaaatttgaatatatatacttaataatacttaaaattggacctataatctctttttttttttttttgatgaaggaatcttttattgaagagggaaaaaactcagaaaacaaagttcatagtggcaacaaagggtgccacttccctatccgacaaagctctaaaacaactgaaattggcagcccaagcagcaaggtcatgagctgcaacattcaacctgcgtgggatccaaaccaggccagaaataggggctgccgacatggcctgcaaagaccgatcaaagcagcacctaactgtccaatccgggcatctcttggccttcaaaccagcaacaacaacttgacagtccgagagcaccaaggagttcgcccagttgcgtcgatcactcaaagcatacgcctcacggatggctaccagttcagcctccaagg

SEQ ID NO: 64135 - DNA, 1812 bp, Cannabis sativa
tcggtaatcatctatttaattccggaaattttcttaaacaaatctcttctttgcctttctaaccatttaccctcaagagtcatctgaatttaatagttttacaattaactgcaaacctaccaacccaggatatctatagtgtctaatcctagcacaatcacaagcgactgcaggtttcctttcaagcctattatcaaatggcttaaaaatttctaagaattaatgatcatagcaaaccatatgaacaaaaataaggtgcagaagattaccattacatttatgtcacttcttttttgcaataattgctacatttcttggtgataatgcagggtcaaaaattgataacatcagtgcttcaatggtatttccttgctcttgaaggaacaacagtctatcgagcaaaatatatgtttctaagagaggccccaaagcagctcgaagagaccaataaagtccaataaattcctgtatgaaatcacaaagcatggtcatatgaatgtaaattcattctcccatattaaattcatcaagcagcaattctcatagccggttatttattaattagctgagcagctaccaatttcttggcctttggtttaattgtcttcacctttaatttagtccttttgcactatggagagatcatttacaaaaagattgatagtctcttgttcctccaacatcagcaaacaaaagctgaattaatctcattgggcttacaaatgtagtattagcctcagcaactcaagactaaactaaagcctcagagaagtgcacacaggaaaggacttaaccctcatgtataacattcagatgcaaaagcctaggatccttcttgaagcatccagccttgatagaaatgtccaacagagacaagacttttcctgtctttcatctggctggctattagggattattgtttccttttgctaaactaactagtagatttttcgtctactttattagttaggcttagactttattgtatttacaggaaagaataaaaatcttatcacatcaatattaccttgaaagttgatattcaaggagaaccacaatggttccaattccaacaacgacaaaggatgagttcaaaggtgcaaatatttcatccatgaagcataaaataatatggtccaacaaatccatcaagttttgacaaaacagcctgctgtcctaccaagaaaagaaaaaaaaaagcatgctgtcttttaaatagtaaaaggtaacttacagaaaagggctcaacttccttccatattctatgtaattcaatatcctgcaaagacttgagacctaggtggcacaatccagactggctgtatctcaggaaaagaaaatcattatcggcggtgcaatttgcgttctcacattcagagccactgagagaatctctaccagataaagatgttgtctcagataccgagctaaagatatcacctgcattacattttcacactgttatatgcttcagaatgagttagtaggcgtagacatgtttcagcccaccatcaatacagcataatagaataaaaaccaagtaggcataaccatgttaaattatgctaagcaaaatctttacctctttctggctctgtactttctttcagcttagattgcatacgatgtgaagatgcacaagtgctatctttgtggttcagcgcggagtcaaaggtcgcccttttctgtagacgacgcaaggcttttccttgacgcccgattgatggacttcttgtcatgacttccggataatatttattaagaacctttaaacaggacacgtgtcatccacaataaagtttaaattgaaag

SEQ ID NO: 64136 - DNA, 1691 bp, Cannabis sativa
ctaacatagtcttatgatttagggccatttgctatattttttttaaaaagaggacataaagtaatatactcctataatttgggatcatttactataatttccctatttgatatcctatttgtattaaaaattttgtcttgactgaagctatttattaatgaatctctctagctcccccttgagtttcatgttcattgatagtgttctttgaaactattttatcaaaaaaaaaaaataaataaataaaaattccttctaagcttagacatttaagtttttaaattaatcccatcaaaagcaacacaaattacttttttttttttacaataaaaaaaggtcaaactagtcataaattcacagtagacactttcttatatcctttctgaaaagaaaaaacactttcttatatcctttcttgctaaattttcttttctttttaaaaaatatgccaagccatcatgtgcatgccatttttattgagatatgtatatttaaattgtttactaaaattcatattcaaaaaagttgtttactaaaataaaataataataataaaaaaaatgtttgatacatgtataacttattaccaattaaagtaataaaaacttgcacatactttgttttggtagtttttgagtactaattcacattgaagttgaaattgaaatagggaacgataatgaccaaagagagaagataggttatagggtcaaatttaggggatagtcttcatcttgtttaacaaactttggtattgtttggttttcacaatagtttcatgttcatgtcagttttaggcatctgaatttgaccaagaccacatctatagcttatatggaaccaaacaaaattaggtaagcaatcttgttaactaggtagcccattattaattatcctaataaaccttccttaatttaaaactactacctacttaattttccataccaaaactattattggctttcttaagtggtaatccaccaatattaatttaattaatagtagtggactacttttgcattaccacctttcatttaatacaaagagttataatcttagttgttgatttagacgtggccaatctcaaagttgaaccaaatggactaaacactaaagtttgctttgttcaacaaatcagtttatatagttataaaatatatggattaattgaaagatttatatttcttaattgattagacaatattaaacttttagggcatccaccacatttgacattgctcttcttcctgttttttttttcttcataactttcatatattaattaaaactgatttgattgttcaaaagagttccttcaatgcaaataagacaaataaagattatctcacatatataatatatatatatatataaatatatataatacagattgtataagaaagagtggaattaccaaaaaaaaaaaaaagagtgataatagacgacgcgatttttttaaaaataattaaaagtctctaatcatgacgtttaatacattgtcatttatgattgattagttagcaattagcatatgatcaattaattttaaatgtattacatgtgataataaaaggtgtacgtacgttaaaatatgtctactttatttttctaaatacatcattctttgatatataaaaatatttgggaaaaaaacaaaaaaatacaaaaaggaaaaaaaattacaaaaatac

SEQ ID NO: 64137 - DNA, 800 bp, Cannabis sativa
taaaagtcacatttagtcacaagtaactttttgttgtaattaaaagtcacatttagtcacaaaaaaattgttgtgattaaaatattgtcacaaaatattaatttttttttagtgtcggtgaaaatataaatatatacatggccacaaaattacattttggagttcctatctaaaataacaattttagtatgctgctataatgataaaactttttaggctaattaggatttttactttctgaactttgacatgtaccaaattcttaaactttttttcctgttttgagattgttggagttaaggatatatttgtccaatttcattcaattttactaattatgtgattgctcatgtactatattatgctccctaaacattgaaaactaccaaatcacgcccctcaactttgacatgtgtcatgtaccgaatcaagccccctccctgaacttccatccatgttagactttttttactaaaattagaaaaaagtttttaaatccaacaatcttaatagttcaaaagaaaatttttaatgacctttaaagttcaatgggcatgatgcgatacatgttaaaatttagagagctaatcctaattagccaactttttaaaactctaaaagtttaagaattgatctctacttcctaagttgaattccttatgaaggcctacggtgcacaccttgattgcgtcacctcacgaccagtaactgagggaaagaaactaaggtgccgtttggtaacacttttgtttttttaattttttaatcacaaaatggaagtaaaatttttgtttttaaaa

SEQ ID NO: 64138 - DNA, 1256 bp, Cannabis sativa
ggttccacctgtgggccaagcagtaggtggccagcccttatttcgaaattcatcaggaggtgttatacctaataactccacccagactagcggttctggctaagttcttggccaaaccaaccagtcactaagacatcctagtgcatctgtatttaatagactcggaacagctcatgatctcagtgatgatctaaatagaaggagatggttagataaaaaatatgttccactagccactcagcctaggacccgcgctgaagaaccatctcaaagagatcctgacgtgacattagtcgggcaagaggccgaacaagtttatccattcgtgcaggcatagttggatgaactgaaaaacatgttccaaggtctggccggtcaaaagcacaatgatctcgagttggatcgagcacgtggatccccttttactccagagatcaatgttctagagctaccccacaagttcaagatatcaacttggaagatgtataccgggaaagaagagcccttctcacatctcaaaattttgaaatgtaaatggacttacaaggtgtacgaggagatgtgaattgtagagtttttcctgccacactctcagaatccgccgaacaatggtacttcaagttgacaccgggaaggttcaactcttggaaggctttctcctcagaattccatgcacaattttcttctcctcgcaaactcccattgcatttagaggacctggtcgaagtgaagcaaaggccaggggatcctctctaagtttttatcaatagattcatgacgtaggcgacgaaagtggcacagttgaccgaagaagggacattaaccgcaatattggggggcatcaaagttcacgaagagctttggaaggacatcaagagagatggaggagtagattctatgagtgacttcctcgatcgcgcagatggtttccatcatgctcgagggcccattcagcgagcagaagtcgagcttaaatcgagccaatcacaagttccctctacttgaacatccgttaaacactcccagtacccaagcaattcgagctggggcagtaaaaggtctaacagcaacaacttgcaaggcaatggggaaaagggaaagtttgctggcaaagccgaacaggcccctacaaaaatccttccaaattcattaatttctctgtcttgactgacaatttggagaccatctacatggttactcagtcagtagccccgtacaagaaaccggctccaatgaaaaaggacataagtaagagg

SEQ ID NO: 64139 - DNA, 1915 bp, Cannabis sativa
aggggcgtgaggcggtttacacttgaaacagattgtcttggagcggttcaattgattaaagatacgaaagaaggatgtcgggacattgacggactgttatttcaaattaaagaattgcttttgcacccctctgttatgggtttgtcttttatttttagagaggccaattatgtggctcacatttcagccaatcaagcttagttatctaaagctagcgctatgtggattggggtttcacccccttatgttcgtcatgcttttcgagctgaggagccatttcctttgtaatcgtttgggtttataaatggattccttctaaaaaaaaaaaggctttttataataatttaaaaataaactgaaagactatataatccctcaattattttttagggattacagacttcctaaatatattgtagactattagattataacataggatgtatttttttttataacataggatgtatttttttatccaatgatggtaacttgttgattaaaaagtaaggacaaaaataatactatagtaggtgacttgattttttttgtgccatttaattttttaatgttagttgtctcttcttcttcaccaaactcattgtagcttctttatctagctttttttgtttcctattttatctatttttattgtctaatgagagcgaaattttttagagaaccaattgttgatctcttttgttggatatctgagattgcaatagattttgccgaagtttgtagtttttttggaattgcagaaacctaagagctacaaactaatgttcttgtgcttttagctctccgatttcaaattaattttttccttgatttgaatgttcttttagttctccaattttttcaaaaccaaagcttagtggtttacctatcctgaaagtttatgtcctcttccaatatatcatgcatacttttctcaggataaatttgacgaatactaacgatgccaatagagaccttttttttttcggacattgcaatcttgtcttgtttttgatgagtttgttagtggtttgctcaacgagtgttgtgatagcttcagttatacttatgcatttacagagaaaagactatagtagcttcttcgattcataatgagttatttattaagagatgaagctctgaaaatttaaaggtttggacttgtgggcatttgggaaataggttgaaagtgaggaagaatcgaacgggtttatgtgggtttgttataaaattgccaaaggaaggggtagaaatgctcaaagataagaagcaagttgtgaataggagaaaatgagtattcttaagtctagttggaaaatattttatggttgtggctgagttacctaatattgttcagaccattgatgaatcataagagagtggaaaatatgaatgctgtttttaatttcatgcaaaaggaaatttgtcttcaaaatttttcatatagttgcaatggaatgatggatcctttattctctgctcttgataattttttgaatgtggttgcacatgttggcatcctgggcagcttcaacccaaatgggtttgttgttcgtttactaattatgtaatgtttggaatacaaactcattcattgaaaatactacccaataaaactaagttatatatgtatccttgtcaatataaaaatttacacaaaaacaaaaaagatattaaaaaattatttatctcactaaaaattatgtaccatccaattatgaaaatatattttagcaagttaatttcacagtagttacaatataatatttttgtcctatttgaaggatgtcaaacctcaaattgaaccgagattttaaataggtttccaaattgaaattttgtaaactttccataccagaacactagtattttgtgacaatgtattttatgtaaaaataaactaaaagttgtagat

SEQ ID NO: 64140 - DNA, 686 bp, Cannabis sativa
agtatttttgtaaatttctctattattattattttaaaattttactatttttttttcttaaaaacatctttattttctttttctttacctaattctaaagaaatatgtgatatgttttttttcttttgtttttcaaaggtgtcataaatgttatttatttattttttatataaaaataagtaacacaaaaaaatatttttaaataaaaatatatcatattaatttataaaaatattagatgaatttaatttaattttttattttttacatattaaaatatgtatttttaaacattttaaggtcagcaccaactagcttattactaattattagcaattcaaacaaaaaaaatgttaaaaaaatttgcacgaaaagttacttaaaattaggctttgttttacgattttttttataccttttattagatttagtttttcactgttttttcaagaaaaaaatattagttatcgtagcagcaacatgatgacaacgaaaaaacaacctttcgtatttttgtaagaaaacaatataaatccgtaaaatgtaaattttctcattatttagtatttataaaataattccaaaatataaccaagataataaaatatcaaatcaaactatattaaataagtatgtatgtatatatatatttttggtacatacttttttgagtttttttttttttt

SEQ ID NO: 64141 - DNA, 543 bp, Cannabis sativa
ttctttgctacttctaggctaccatatttcatcaacaatacgaatatagttctaattccaaaaacaaagaacccaataacggttaacgactatcgtcccattgctttatgcaatgtcgtttacaaatgtatgtctaaaatactagctcttcggcttcggaatgtgttgccaatgatcatctcccctactcaaacaacattcgtcaaaggtcgatctatcatagagaacacatcgttggccagggaaattgttcattctatggttaggaagaaaggatctaaaggctttatgatgattaaactggatatggaaaaagcctacgataagatgaattgggattttgtgagagaagcccttcaatttcatggcgctaaggatccgttttttggatgaataatgagctgtatccaaattaaaaagctaaaactgatgttaaatggagtgagacatggtgttattatccctcattgcgggcttagacagggggatcctctttctccctatctgtttattctctgtgctgaaggcttttctgctcttctt

SEQ ID NO: 64142 - DNA, 1102 bp, Cannabis sativa
atatttgaccttcttcaagaatagcttctacaaatgccattctttccacatcaacatatttttaatccttaaactttctaagcaaatgaatagaggataactgctgtgatgcatctcattatcacctattgacaacacactgtcgaatccatcaattgtgagatctttcagagaaggtagctgtccgagtggtggcaaaaaccagcagcttttacaatcttccaacgtgattgacactaaattagaaaatgcataatcactaatccagttcgagaatgttgtacctctgtaattttcaatcacaagatgcttcaagtttgtatggggccgaagtgcgtcaagtacatctgattcttcttgcgaactatcaaccccatcaacatcattgttccacctcaaagttagttgcataaggtccttcttaccctttaaattagcttttgaagcctccttcgcatcattaatattttccagaccataaatctcaagctctccacgtagatgttcagcatctgctaactctgtaattttaaacccatcatcattatgcttgtcactcaataatacctttggtaagatttgcaagtatttcatctcattgattccttgtggcatctctttcaaaggtacaccttcaatatctaagtaacgcaacttgatcaatcttctcatactctttggtaattcagaaagctttgtgcaccatgaaagcaataaagtttgtaaattgtacaaactactaattgaatcaggtaacttttcaatttgagtacgagacaaatccaaataccttaaatgtattaggctgccaattgaatcaggtaacttcttgaaagaagctttgcttaaagaaagcactcttaaacaacttccctttctaagtaacatctcatagaggactgagtagtttcgagagacttgtccatgtggagtccaccatgacgatgatataaaggtacgcaaacaactagctgtattcaaactgctaagtttgttaaggtggtaagactttacctgacatgacacatgacgaacatttgttgaaaagccaaggaaatcatggctcaagtctaatctagaacaaaagtcacctgatacaagt

SEQ ID NO: 64143 - DNA, 795 bp, Cannabis sativa
  modified_base (601)..(601): a, c, t, g, unknown or other
ttggtatatttaatttcaaaaaaagaaatataatgatgtggactaatcagagattgccacgtgataatttacttaataattaataaccaggtacttatagaagttccagaaatataatttaagtattattactgccaaaaattaaacttaggtattttcaactagagttaaacttaaatatttatgtcgcaaattactcaatagatgataataatgtataagattgtgtatattaaaatgtataaaatccaaaattaaattacatttctctttacaattctaaagacaaactgaaaacactaacaagtttagcttaactacatagaaatattttagttttatgttaattttatttatatcactgttttggagtagtaattggtggtgaagttgttggcaatgtttgaatttgatgagtagtactcatttcttctccttctaagttctcatcatgaactaagcttttgttctctttcttttttccccacaagaatgaatacaatccaagtatgattaatatcattccaatcaacctgcaaatatttgcacacttagtgtttaattgggtatatgaaaaaatgtgatatatatatatatatanatatatatatatataaaaatagacaactctaggcacaatacatataaaacacatattatacaatataaaactaacacatgctacttataaatccaacaaaatgtgattattagtttcaccaattaaactttagagactttttcatttttatactttaaaataattttttttttgcatttttacagaattttaca

SEQ ID NO: 64144 - DNA, 542 bp, Cannabis sativa
cttttttatagggtgcattcaaggccgaccctgaaattaggcgggccttaagaaaataaaaagtatcgggtcttttagtcaaaaaaaaaaaaatgtagtaactttgaaaattattcaaacatatgtatatttttaaagaaaaagtattttttttagcgtttaggtcgagtaagctctagcgcaggcctagtcttccttaacccagatctagttttgggtgcattatagaatcatcctatatatattacacaatatttttttatagatatatatttaaggaaaatttttacaatgtaccccttaaaagggttgcaccgatgcacctctctctatttcggtatccgaaataattttttagtcaaatttttttctcatagtcatgtacgttatacttatttaagatatcatgtaaaattttaaaaatttagaaaaatttaataccctaaaaataaggttcaaacagtattgtgtaatatatataggttcaaacagtatttttttaaatttttataggatatcttaaataattacaacatacacga

SEQ ID NO: 64145 - DNA, 855 bp, Cannabis sativa
gctttgagcgatcgttgccggatgagtggattgccagttttcgtttgtcgaatgtggcgctcgtaaatgaaggtggataggtggagttgttgagaggtggtggagatagggttcgacagagaagaaataaaattttttatttttctaaaattaatttatctaaatattaaatattaatttgaaaattaaatttacgcaagtatataaaatagttcaaaaaaaaaaatgccataaaaataaccaaacttaaagctgccatataaacaaaaataattttaaaattaagtgtaaattctactatttcattgccaaaaaacaatttacttttcaaatatactatgtattttacagatatagggaaaaaaaattaggttggtctatcatttttctctcaatatagggacgttttcttttttattttcagtaagaaactatatgataatgtaataatgtatagtataattattgtagatatcttgctagaaattttgaataatttataatatcaaaaatatataattaattcttttttaattttattttcgatactgtaaattatttaaaatttcacgagtaagatatcgaatatatctattatgacaacaacataaaacatcataaaaaaattaagaaataaaagtaccaaaagtagaaaactctcttacggttttgcaaaaataatattcttagtagcacactacaaatatatatatgggtttttaaaaattattttataaaaaatatggaatataaagacagttttaaaatctaataaaagaataaaaaataatatcaaaatgtgaatttattgaattcggtatataaatatggaataagttgagaattgtttttttt

SEQ ID NO: 64146 - DNA, 1243 bp, Cannabis sativa
tatacagaaaatcctatgaggccttctcctggccagccagacacctacagggagcaagctggtcggtgttggtgttttccaaaggctaacagaccatagggctagccaagggtggcctgtcagcttctgtgagcaagctgatctttcacttgatgtcccgtttgagtgtcggggtccccgttggctgatgtactgacttagacttcttgttagtgagttgtactaccacgtggcgctgattttgtccatgtaagcaatgccacgtcaggtgggaaaaaatcgagataacgttttccccctaagtctctgtgtgaaaatctgtacggatagggactttttagttagattggtgcggttggaactgatgtagcctttgttgaataaaagttgatgcaattttagccttttgaaatactttaccttgactgtttgatctcatttattgtagcaaactgtctgctttatttgtctttttgttatgtaggtgaagcaagtgaaggaaaggggtctcatatgtactatataagtgattttgggagggaaactcttttcactttttacttttacttcttttagaaatttacatttgaagaagctcatccttcccgctagagggtcgaacccaagtgtcattctccttggatttttgtgtcatttcaacaatccaagcttcccatcttcttcttcaacgatttcttgttgtgggtaagctttcaatttctactatttcatttgatttgattgatttttccatgaatacatgaacattattctttgcttcacatatcttttgattcctatgttagatcgttgtcctttaagtattttgatttgcatcatagccttaggatacataatgtgtgatttctaaacaaaaaagatatgaccctgacctttattgtgattcttggctctttgagtcacgaagaacacgaaaaacgtgtttgagtttttgaaaaaacacgttcggatccatataggtcctaactgaccaatgaggtcttgtttgagacctggccgaccaagggtggctattagggggtgtgccccatgggctggccaacctatgcctggaaaatggattcctggccggccctagcctgggtcatggggcctggccggcctctaagacttggaatcctggccgaccaaggccaaggctccaagcgggtagccaattttataccctctgatgacctcaactagggtcccgtgacagccttggaggcatatacagctgtag

SEQ ID NO: 64147 - DNA, 1135 bp, Cannabis sativa
tagtgatattacttaattatttgtatggagcaattaatcatattgtatattttctatatcattaatttattcatatataatattacaaattatatccaatatatatggtgtatggcgttttattaaaaatttctacttagcttttaattatagagtaaaatatatgcagtttattattattgcaacgagaatataattaatgtccatactgtaattaacaggtaaacgtgttcagttgcggcggaatagccctgggagttagcgtaagccacaaacaatccgacggagaaactttgagttatttcctcaagtcatgggctgctctcttcaccggctcacctcacaaagtagttgtcccacaactatccaaagcggcgtcgtttttcctgccacagacagaattaccacccaactgtgtagctctcatggaccagttatggttcaagaagagcaactacgtcaccaagagattttacttcaacaacaaagccatatccacgttgaaatccttaggtaaaagcgaaacagtcccatctcctactcgaaacgacgtcgtcagctgcttcatatggaaacacgccaccgaggcttcttgggccatatcaggcaagcccagaatatccgtagcggcccacgccgtcaacatgaggcccaggatgacaaatcctcgctcgctggaaaattgcacggggaacctcttttggtgggcctccataatagtgaacccggcccaaaaggccgagcttgagctgagtcaactggtggcgttgactaatgaaattgtgtccgaatttaacggcgattacttggagaacatggttggagaagccgggttcgagcccatttcggattttgtgacgcagctggagtcgatgatggagatggattctgaaaagccagacatattcgcctttactaactggaaaaacaccttcaacgaggtggatttcgggtggggcaacccggtttgggtcggggcccatggaaaagtcggtccggagtttagaaatatggttgttttgatcgactcacaagggagtaatgataaggaggttgaagcttttgtgacgttggaagatcggcaaatggcaatacttgagagtgattcacagtttttggcgtttgcagggaatgg

SEQ ID NO: 64148 - DNA, 787 bp, Cannabis sativa
cacgtatgccacaaagattctggtgggaggcatttcaaactgccacattcctcataaatcacttagccaccccggtcctacactacaaatgtcctattcaaaaactctttaacctaacaccaaatctcaagtttctaaaagtttttggatgtgcttgttatccttatcttcggcaatacaactctaacaagttacaatttcgatccgcaaaatgtgtgttcataggatatagtcctcaacacaaaggctacttgtgtctccatagttcgggtcgtgtctatattgctagtagtgtctcctttgatgaaaatgagtttccatttgctcacggttttacctatccatcagcacacaccaattctacactaactcccagctaatacccacaatggttaccctattttcctactgtgacaccagaacatgcacctggagtaaacattgatacaacctcttgctctccaactcaagaagtgagtccattgaatccattgactacatcacaccagtccatgtcgactacaccacatcccacttcaagtccaacaagtccttttacaccacgacccacccaatcctaccccactgttttacttcatatttatctccctatctcacccactacatcacactcctccaccagtatctcatcccctcttccaacccgcccaactccacatatacaagcacaaccacaaccctcccatcccatgatcacacgggccaaagccaacattcacaaacctcgtgtgttcactgccttttccctttcacctcttgccttctt

SEQ ID NO: 64149 - DNA, 1240 bp, Cannabis sativa
agactttccctaacatatattttttatggcaaaagtctaacttttactagagcatttacgcactggaaaaagttatttttatcgacgattttcgttttgtgttggcaaaagttccaataccaacacagattttgctagtcctttttgccatgtgctggtaaaaataaaatttgttttgccaacataatcatagtttttgtcagcataaaaatgtggtagaaaagtctcatttattgttgtgaacagtggtatgtatcccagttttaacacagagaagtcggaagtttatgtttctcatcgagagacattgtagggtcactttcaaagtcctcattcaaccagagaggcatagcaatacttatatgctcccgtatagctagagtactgatcaaaccttcattttcttgctgttatatgctaattaaattcaaatatacgacaacatattcaaacttgaagcaaataaaggaaataggtatagcagaagaactgaaacacgcatatataaatcacacaatgaaaactaagacatctgccacccgttttgactgaaaatattttcttattttattaacaaaaacacacacagaagatgtcgtcttctcagagatggcgatgattggatgatgatgattacatgttcagtcggatgatggccatgaagaaagtggtggagtttcagagtccctccatgtagttaaggactgatcatatctatcacctttaactgcacctccagcagccaaagactcaagctcgaccatttcttctggtgtgagtttcacagacagagcaccaacattctggtcaaagttctcaatcttcgttgttcccgggatgggagcgacgtcgtttccctggtggtgaacccatgctaatgctagctgtgatgggctgcatccttttcttgctgcgatctccttcacttgctcgtatatcttttgattgtgttccatgttttcaggttgaaaccttggtagattctgtaataacaatattatatatataaacaaataatttcactatatagtaatatatggcaaggaatttgtacacattttattacgtatacgcgcgtaccttccgaaagtcatcatcggaaagagtttccacaatcttggggccagctgacatgaatcctcttccaagtggactgtatgccacaataccaatacctagttccctaaataaaaacataagattgtgtaaatatataaaaattacaaggtaaatatacttt

SEQ ID NO: 64150 - DNA, 1419 bp, Cannabis sativa
gcatgcaaacttggcacaatggtctgttattgttgacaggcctgggaccatttgttcgattgggaaatcttggcatattgtcagatccttaccctctgccagcaccattataaggtatatatgtgccatttcttgtgcccattgcaagattggcagccatttttgatgaaagatccagaatagttgagtgcctctccaatcttgattcatgagacattaatagagcttggacttcttcgagagagagattctcactttgagaagtgatgttggacacaaccgaatcaaactcggcaccaagcccattaagcagatgcagaataagatcaaagtcattaacagggtgcccagctatgccagagaatcacaaatagctttgattttatcaacataatcggagatggtaagattacctttctgcagatttgtgagttggcctttgagttgaagaagtcttgccttcgactaacttgaaaatttctgttctaaggcattccaggcagaatttgaggtttgataacaagcaaccgttgccaaaattccctctgtcatcgacgaacggagccatgacaacaagagttgatctttacgccgccattgcaagaactgaggattggtgctgccattgacaagttgctcaggaagagccttgttgctgagaagaagttcatcaagatcatggccaataactgtgggaatgacttgcgatttccaagatagaaaatttgtacgatcaagtttcaaggtgagtgaagctgtgagagagtttgaaaacgggttccatggttgtgccgtcgaggaggactgagctggcacaatagtaggatcggagcctctagcctgagacgagtggtcaccggaggaagccattgacgctagtcaagggctctgataccatgaagaaataaaataaagagagaaacagagtatgtttcataaaatagagacttagaaaaatgcagaaaagtcttacagctttattgatgagaagatgtatttatacacatcaattacaatcagtttagtcaactaaaattacaacaagaaagctaacggaaataactaccctaactaactctatccaactgacatttcagttagttggttatcattcttatttaagaatatcttttgaactttacttaaaacaaaaatttagcaacatttggggctttgggccccacgcaccagctgcctcacccttaagtcgagcatgtcattgtgtttgctttcaggatgtcttggtcttgatatactcaacattaactttatcaagtgtagtgacgcatttgtgattctagcattaagtgtgacgtgacatcaaatccttgatgatgcggttgttctcatgtggcaacgtcattgggagaatgattggatagttgtgattttctgttcctaacttttaggagatatgac

SEQ ID NO: 64151 - DNA, 817 bp, Cannabis sativa
taaaagctattatattaaattaatcaggagtgtctaacactttctcgacatatagtgttgcgattggctagcgatacttcctaaaagctattatattaaatatatgggacctaatacttagttggaccaataacgatactagcacataggagttaacatttctctttttaaactatctctatttgttttatatttatttgcacttaataggagactaaatctcattggtaagatttagactcattaagtgcatttatttttcagagtaatttgcgacataatccccataaatgcttagtttattgcaaccaaccttcaattctaaaattttggtagtaaaaccccttaaacctatattctgttagcagttaaccctttccatccatatttaagtgttaagtgtcaagttggctatccatgtgtacataaaatattgtccacataaatatatgtacacatgacacaatattattggcccacataaataactatttaaaaataaaaaaaaaattacttaaaacaaaaaataaaattattaaaaataaactattttctttctttatttttttttctttttattttttttaattcagccttttgttttttaatcttcacgctttctctgtctcgcctgtctcttctttcttcttcattatatacagaccaccaccactgctgtaacgcaccaacaattaggcacgctaccctagctgatttagaaaccctaatcccctaaaccgagattaatagaaagataagcgcaaaaagttaaacttttatctaaaacagaatgaaaattaaacttgtaataacttta

SEQ ID NO: 64152 - DNA, 1740 bp, Cannabis sativa
tttttttttttttttttgatcttgatgtgtatttagtttccgcccccaagttcttcacaaaattatatattgatatatatcttttcttttcttttttatgatttttgattgatatgattgttatgagtagttgatttcaaggtgggtaactttgtagctgactagcttctgtcatgtgtgatcacataagtatttaaagtggaatagtttgtatataaatgattagatttgagattttcgaaggacaaacgacgtgtcgtttagatgacaatggagctacctactaatcaatacgattatttcaaagtatattttaaattaagtatgaaaattccaaattttcacttattattggttattggataggtttgatattactaaaaattaatatttataattatttttgttagtaattagaagtgtatatattgattaaaagacaaagttttagctaacacaataaaataacattaaaaattaatttgcgattagtcgaaatattatatattttgcattttaaaatgttttagttgttgggaataacaagttctttgcgttaaaaggggttgtttgttagtagtgcaattactcatcttgcacaataattgagtgctcaaactacaatgttaaatgaacttgctacaatagtttcctgtgccttctgaacgatagatgaaaatgaatatgtgtgttcttaaggttaactgtgatgctgcaatatttttcattttattttatttttagtttgtttatcaaatgacctgagaattagtcagttgattatttgactcgtttttctaattttaatccttgtcgtgtttctaacgacggagaagatatcctgattagattgcagactgttattttagttgattgctattaacaaaattatataatttattaaaaaaaataaaactttcaaagcctaatcaaccagttccatgattccagtgagaattttaccacataaaaaagaccacaaggattataatttgtgagaaaaatctacttcttttagtcgtgatagtgatagtaataatttaattgagaagatctatctgagacgacaaaaaatgtctatctatttatttagttatttgattaactcaatgatttgttattgtagtttatggtaatactaattttatattttttctaaagaaacactaatgtcaattaaaccaaattgaacttaaaaatttatgtgttgcgactaacattagtattgaacaaaaggtcagcctatatgttatcactaaaaagttagtggctaaaaatattaatcctaaaaattataatttattgtgattaaatgtatttttataaaaaataatttatatttaaatactaacggcaatgataagttacttcttattgtaagtaaaatgatgttaagtaataaaaaatttatgttatgtctaaaaggttattacctataagtgatagctttcttttagggcttatttttttttatatatattaggtagatgttacgtgcaatgcacgtataattcttttttttttttttttaattaggttcaattaggtgatgttaagtgcaatacgtgtatattgtttatcttttttaattaggtagtgtattttttttttttttttaatttttgaaatgaggtgagagtttgatatttgagatttttttttagctatttcggttacattggtgtgtcctttgaatgtgattatatatatatatatacgtattttatatatacaataaaa

SEQ ID NO: 64153 - DNA, 1299 bp, Cannabis sativa
tttttgtaattggattggattggatcggttcggttcaattggattggattggatgatgcccacccctagttgtgaattgattgatattgagatattgttaatattattatataatgaaaagatttattggttgagtattgacaatgtggtgatattaaacatgtgatgtacgggctcacttgattaggtgatgcaattatgtaccaaacgtaagtacgggctcgtctgattaggcgatacgataatattggtgccaggttgtggcacgggctcacttgatcagatgatgtaattatgtaccgagcataggtacaggctcgtctaattaggcgatgcgatatattagtgccacgttgtggcatggacttacctgattgggtgatgtaattatgtatcgggcgtacgtacgagctcatctgattaggcgatgtaatatattggtgtcaggttgtggcacgggctcacctgattagatgatgcaattatgtaccaggcgtaggtacgggctcgtctaattaggcgatgcgatatattggtgtcaggttgtggcacgggctcacctgattaggtgatgcaattacgtatcggattatcgggtatggtacgtgctcgtctgattaggcgatgtgatatattagtgtcaggttgtgacacgagctcacctgattaggtgatgcaattatgtgatatatgggtgcaggtttttggcataggctcacctgattaggtgatgcagttatgggatatatgggtgtcaagctatggcacgggcttgcctgattaggcaatgcaatataggattatcaaattaaagcatcgacttacttgattaggcaatgtgatgtaattaagatggttattttatgagataacatatataatttatattattaaatgaatatgattcctattattggtataatagttttgtattactagatatcttactgatgcttattcatggtagatgccagtagtgatttggatttcattttatgaacaatgcgtgatggtttgattctgattgtgtataaataatgatattcgaataataaactatatgattattattatcgcttttcttgttgagtccttgtgattcacgggtgctatgtggtgcatgtaagggcaaggaaaagttagagctaccatgaggtgactaccttctatagcaatgtacatattaacatcaccgacctgcgtgtcgaattgccaggagttgttttgggctggctatatctattgtgtattttaattttgtgtttaaatggttgccgtatatatttctttagcaaaact

SEQ ID NO: 64154 - DNA, 551 bp, Cannabis sativa
  modified_base (249)..(257): a, c, t, g, unknown or other
aatcactgaaatagtaaaattgaatgaaattaaacaaaagttcttaaatcaaggaaaaattttaatggccaaaaaagttctggggcatgatttggtacatgttaaagtttaggaagtaaaaatcctatttagcctaaattttattttgacaaaaaattagttcagggtgctatttatatcatttctgaaaatacaaggtcaattttgtcatttaacaaaatagggagtccaattgataacttttgcaannnnnnnnntccaaaatagtatttaccctttcttctttgtttttaaaaatttattttttatagactagtatcttttttttgtgtatattttgttgctttaacattcatagcctatggctatcatgtttttaaatcaataaatatggttttctttttcttttttctttttcattcacactgttttttcctttcaattttactttagttcttcttcactttctggatttggatttcattaacataaaataagaaaaattaaaaattgggacaactaaaccctaaaccctaataataataataata

SEQ ID NO: 64155 - DNA, 1282 bp, Cannabis sativa
acaacattgttcttgtcaattttttaagttgacgttcaactctgggatccataggcttatcttgagtgggagtaggttgtgtgcgtcgcgacgaagattgtccctttagttttctccccactcatcgattaagaccacgcctttcaccaagtacttcattgagtactctcacttcaatctcctcaacaggtccagcgtcgagagtactggctcgtttttcataagttgaaacgagctcaccctacattaaggatataagttagaaaatattataaacattcataagagtattttatttagagcatatgaataattacttacatatttttgtgcagccaatggactaacaaatgtatttgtctttttcgacaaatgaacatccttctaagtctcaatgtaacccttgtccttctaaaagaaattaaaaaaaaaattagaaaatgtgcaaattaataacttaattaaataaatcttttaacttactctttcaaaacgcctctcagccatagatttcgatccctgtgttgtagggtactgcatctttattctattttccgcattaattttagaacgagcaataaactctggactggtgaagaaattacaaataggaagccaatcctctggtgtaagatctttaggcgggtgggcagcagcgttatcaaaatcaacaggacttttgtagtattttttaaagtgcacatgtcttaacaacttctgtttcttatatctatctgccatttcagcccatgcaatgtttgtaattgtctcagaatgttcattgttgtcgatatcgtaataatagtagaaattaaaactaagttagaaacataataattgtgagtaaaaacactaaaaaattcaatataatttttttacctgaactctgttgaagactgcatcatgatacatccttaggactttctcccaactaccacaatgtcctgggacgtggattctaatctctctcccaatcaaacgggaaaaagcgccactctcaactccaacaattttaccagcccagacgtcacacaaaagaggtagtggcactgaagattttttcttccgatcctctaatttattcaggacattacaaccacgtttcctcttctgtgaaatttcagaaatctcattttcatcttcagaagcgtttgaagcaaactcaccgccaccaccacactcggaggggatcctagtaggatctggtgggtcttcacccccaccatcacctccatggtatctagcaacatctaccgacattatactaaaaaatacactattt

SEQ ID NO: 64156 - DNA, 1062 bp, Cannabis sativa
aaaaaatatgaaaaaaaaacattttggactgatcttggccattgatgatgatcaaacggtaaacaattaaatcttggtaaaaataatcaatattcagagtttgaatctcgtccgtcggatcgcttttgagcaatctgtagaaaaaaaattgcaactatcttgggtacgaattttggacttgaaatatttataattgcaatatgagtgtgagacataacttaatgtatatttgaaatagcttcgaaacacatgttaaaacgtgtcaatcagatcaatattgagagagttatgatcgttttactaaaggttattttgtacccaacatcaggttgacaacccaatgcccaggttaacatcctgaagtcaacctggacgctgggtaagtgagaaaatgtcccagaattttattttttgatgcccaagtgatatgttgacatcacctagtcaaattctttattctggtgaagttgttcagtagttctcaaagatttccctttttggtaaaatcggttagacccaaaacttcctttttttactgatattctaccttgttgaaagggtgaaatatcaaagtgtgaatttgacctgtcacacaagttgtatctctcatttactacaaaaaaaaaatcgtcaaatagtcgagatagaatcaaattccaaatacaaaacccagcgccctaggtcacacgttaacttgggcaatgggtgcttctatgggattgttttgatacttcaaaggaattcaaaattgtgaacgaggtctcttaccccattttcgatcaaaataaaaagaattcttggagtaaattttgcgtttgaggagcggaaacatgtgaacccgactacatgtcaacctaggcgcaagtcccactgcccatgtcaacttgggtgttggatccttgtgaccccttgaaaatatgatttactccccaagatcacttgtatcttccttgttgacacaaaattttgggtcggcctccccgagatcacttgtatcctgcaactattgttgctaactagccacaatttggctaagctgttcaaaccggggatcagcctcct

SEQ ID NO: 64157 - DNA, 1605 bp, Cannabis sativa
gtcaacctgggtggagggctagggacccctcccaggtcgacctgctatgactcgagactactcaactctgagatgtcatctttctttccacagctggggcaacgtcctactcctagagggttttcttcaatcaactagagaatctcttctggatacagcatcttgctttcagagagctttctgtaattgatgatgcttttcttttctttttaatttttgtgatccaaggaggaacacttgcactagcagtttagatttatgaactcggtcattatattcttgtgagacctcaagtgtttatttcataacagttattaactctagtgagcaaatagtctgtatgtgtggttgttcaacttaatgaacttactagcactcgtactagcacttaaggattaagaaactcagttacttggaataacatcaatatttcattaaaccatagaaatactaactcaggtgtgcaaaatgccacttgctctcgtataccaaggtgtatgtgacatacatgactctcatgtaccataatttttgtaaatgctcatgtaacgtgcatagctcctatatactatgtcttatttgcccccgagtgattgaagaaatgccttcattggtcactttccatattgaatctcgttgggctttcttgatcatgggtctcagggagttgttgcatgtgtgagcacttgtccacttatctagagattcgtgggttggctgcatttaactcactaaaaaaataatcgtagttacttcaagaccaactctacaagctttgttcagcagtttagagtattgtcaggtctgtgaggttcaattgattaataaaaataaagtatcaacgagctttactcaacgctcttattccttagatattaaattcaattacaccactatgagctaagttgaaagaaaaagaagtaatagttgcataatttattttccatcaaagcttagctgaagtgatccccactacacaaatgccctgttcgaataatagtttaggagccataccttagcgatggacctccctacctaaatattactttgtcgcatcttgtcggttcgagaggcgaacgattcacttgcacaaggtaaagtgaatcccactgtgaagcaaactgtttagggaaaagtttcattattatcattacagatgctccccgttccaatatcttggtaccgacattggattcaagtggcagtcataccaaactcgaacatgtttgtcctgacttcaaacgtttttatgacgatataattatacgttccttccctctctcattgggagtctttagtgtcgctttcttggtcactagttttggaagactcataagacacctcttcattgttgctcccatgttcttggtaattgttggaaatagagtggaatcagaacaaccaaacttttaacaatcaaacgattagcaatgacaagattatcaaataaaaaataacaatcggatgaaaataggggaaaacaaagtaatgaaaaccaaaaaaatagtaattgcagaaaataaagaaatcaacaccaagatatatattggtttaagtttgatagatcgatgtgatttatgaatctactccagttctagaacacca

SEQ ID NO: 64158 - DNA, 777 bp, Cannabis sativa
ttgtaccattggcgtgaggattgtggaaggccataaattaatctatggagtttgcaaactaaattggtttatgcacaagaataagaagactttctcatggagatctcgtttgaagaaggcattgtttatatgcaagttgcaaaatatgccaatattttatagtagaaatttagcaagatgtaatttgagttgtactatatcttgttatcttctattgatatataaaatctctagctaacaaagtatccagtcccatataatttaagaaaatagcttttagagaatatcgcttacaaatcgtagggtgccacctatagagcgtactggacaccactggtgcccaatagcaatgctttatatgagaattgctaaaaggtatcattggtgcctagcatcctccatggtgtcatactgctattggtgtaattaagtatcaagtcccatataatttaaaaataaaaaatagcttttagagaatatctttaaccaaacgtagggtgccacctataaacagtacagggcactagtggtgcctaatagcaatgatctatatgagaattgctaaaaggggtgcctagcaccctccttggtgtcataccactattggtgtaactaagtatcaggtcccagatcacttaagaaaatagtttttagagaatatcactaaccaatcgtaaggtgccacctatagagggtattgggcaccactggtgcccaatagcaatgctcttatgtatagagagagagcattgatattgagcactagtagtgtctagc

SEQ ID NO: 64159 - DNA, 994 bp, Cannabis sativa
  modified_base (53)..(64): a, c, t, g, unknown or other
tcgttttagaagttcatctttagggtgttaaaacaacatacttgtgagtagannnnnnnnnnnngtaaaataaattccaacatgattttagtttttgttgatttgattaacgattgtaaagtgttgcttaatgatttaccctttgtctcgttttcaattgttaaacggtctgcaaatgtggttgctcatagctttgctagagcgcctcgttcataccttaatcgtacttttcagtttgagggatgtctcaactgagttgttatcttgtttggtaacagaatttcatgcttaataaagcttgaatttttcattcaaaaaaataaaaaataaaattattataattttttaagaaaaaatctttttctttcttttttctttccttttcttattccttatttccagagagagagacacacgatgggtctagtggttccaaatctctcgtggcttgtcccattctgtcactaccaaacttgtcgtcacaactctattggttttatggtactaaatcaggttcgtagcagaagaattcgtattatctgattatctttgtatcatagctcctaggatctccatatgtgtacattaaatcagaacaataaaaataataagtttagagtatatttcttgaagcctatcagggtaacctcgaaacttcttgtaagttgtatctcttaatccagttgatgaggaatttacaatttggactcacagtagtgtcttctaaatcgatctaccacacacaaggaatagtgtggactattaggataaagtgtataatctttgttcttgttgagttctcaacacatgagcaagaataattgagaagaaaaaaagtattttcttttctctctgtatacttcgaaaatatagtgttcaaaatttctcaaatcacgcttctatttaaagtagttaaatctcttttaattaaatcatatttaattgtttaaataaacatatatctataactaaattcggttactgatattaatga

SEQ ID NO: 64160 - DNA, 1153 bp, Cannabis sativa
ttgagattttgaattgttctgatttatttgtttatgaatttattgaaataccagatttttaaaaataattctcctttcattctaataacttattaaaatatatttaaaattcagattttttttttatgtttttaaataatttttaagagttaacttagattaatatttttaattaaaattatacttatcaccattcatgaaataaataaaaataattatcgagtttttaacttttttttttttttgctaagtaaaagaaatttgattcatttaaaataataattaataactgatatattaacctatactaaactccacctttacaaccctactcctatactcttgtcacctttaaattattaatctagggacaaaaaaatgttcccaccatacagacaaaaaagactttcctaccaaagaagtgttcttgtttttttttttttttttttgaaaggaaaatcaactttattaaccttcaaaattagctaccaaatgaggtagcacaacagctgggacattccccaaactggacatacgatcagggtaacaaatggaagctctagcaagactatgaactaccatattggctgaccgttttacaaaacataacgagacatttctcaactctttcagtaaacatctacagtcacaaattacaataccaaagaaagataacatttctacatgactgggaatcgcttttacaacagtaagacagtcggtttcaagaaagacttgttgccagtttttattcttgagccaactcaaagcctccctcatacttaatgcctcagtaagtgttgggtccaacttttcattgtaaatcttcgtgaagcctaagaagtgtccttgttatttatacattgaatcaataataaataataggctttggataatttctcgcctcttatttttaatgaagtgttctgctggtgagtctattgattacattatttgtttatttcttacaaccgattgtgttaggtaagaaaaattagttaattttttttaaaattatacaatttttgcactttttgacactaatgttttcataaatatcgaattttgaggggctctcgggagagagaagagttattactgtaaaatgataagtgaaataatagggaggaaaaccgtcttagagcttgtgcat

SEQ ID NO: 64161 - DNA, 945 bp, Cannabis sativa
gaactgagagcttaagacttagagagttagggtttgactaatgtcctttatatagtagagcttaatccctaatatctaggtaaataaaactatatttacataattaattaataaagttcaaatgactaaattgcacctcaaaaatagggaagttactaatattttttctctattttcgtgggttgtcaaggcccaattcgctgcttgacttgttgtccacggatgaaagctgcacaccaaaaacctactaggaaaaagctggtcggccatgcccttgctactgccagggtgcatgctggtcgaccacatagtacttcaaagctagccggactatgttggccatagggccgactaggtgtggccggccagcccccttgaggtggctggttcatcatttcgtcgtccctcctaagtactcgaacccctcgttggttgaagagctgagtagatggcttgaccattttgttggtgagttgtactctcacgtggcatttatgttggccacgtggacatgccacgtcaagtggataaaaatcgagataatatttaccccttaaattcatgtgctgacgtctgtacggataaggactttccagtttagttgggactaatgtagccttaatctggtagatcttgcagtatttatagtgtttgaaatttagtctaattttgaaacattgaaaaaaaaaaaattgtctaatttttttcttcgtgatcatctaatttttttttctaattttttttttcttcatgatcatgttcgtgtatattgtagtttatttaaactatttacaatgctgaaaataaaatttaaataatttcttacgacaggtataaaaacaataattatgcaacaaaatatctctaatgagtattatttgttctctcatttttttttaattttttatcaacttcataaatattaatggataaatactattttag

SEQ ID NO: 64162 - DNA, 960 bp, Cannabis sativa
tcaaaatttgatttattattattattattagttggttaacacgtgtcaaatcttttataattttattagttttgtaatgtttaaaattaaaggatttaaaaaaaaaaatattaaaattaaatgagaattaatttgattaaaattcattttataaaacaaacccgaccttaacaatttataatgctataagttttattttttaacataattaataaaattttaattaaattataattttatttaaactgttagtttactattataaatcaaagggcagtagcatacatttttttttattgaattttataatgaaaaataatatgtttttttagtatactaaataattaaagaaaaattaaaaattcatattctattataagtattttatttttataattaaaattttcaagaatttttgaatctttaaatttaataccataaaattatcattaaaaactttaagactcttcttttgaattgtaaatctaataccaaaataataattaaaaaaaaattaaaaaaaaaaaattaaccccagttgaatttttaaataaaataccaaaataatattataatagattaatgatattatatttatagctggcataacttttgtttagttattaaataaattactttatataaataaatattaatataaggtacgttcaaattagtttataattataaaatgtataataagaattaaaatttttaaattatttattaaaatataattaccatatatataatttgtatataaaaatgagaatatgtttctcatagttgagaaaatgtataatttttcataaataaattctttttacactaatataataaaattttggagaagaattactccatacattatttttttctaaatttatgttttaggttgatctcgtgattattccggtagttgttacggtggtttatatgagagttgttatgtgaatttag

SEQ ID NO: 64163 - DNA, 806 bp, Cannabis sativa
agttttattttgataaaaaatcacgtcaggatcctatttgtataattttagaaaatacatagtctattttgttaataacaaaatagaaagtataattaataacttttacaaaacacagggtccaaaatggtatttattctaattattattaaattaaaatatataagattattgcacacaattattatatttttttccatgtctcattatttaataatgcctccctcccctcctcatggatctcatatacattgataatttacatttatcaatttttaaattgcaataatatttacttaaatggatgacattttgtgttgtatttatgaagagagaataatgaagccactattatgagaagtcatatatatatatatggtaaattggtaattaaacaaacagatgcagagatatgtacacattggacctaagtaaagtgttgagtcttaatctaaatcactaatatttaaaaacattttatataatttataatttacatgtaaaataaattaatatatatagagaagtgaaaaacgaagacaaatttgtttttaaataaataaaatgtaatagtcggtattgggtggtttatgatgagcacatacaagcacatattcataataaatatgcataaaaattaaggataagatcatagtttgttttagttggataacaaaaacatttaactatataaatatatattataacgtttgtgacatgttgaaaagtccaaaacccaggttggtatatattaacatttatatatatataaatatgtaatgactgtaactactactgcaccttat

SEQ ID NO: 64164 - DNA, 1305 bp, Cannabis sativa
agctccagtgttgaggcgcacccaatattggtcaaaaacgatcttctcttctaaattttggccttttaatgccctaacatggaactatagtgttgaggctctactccattatttttaatttctttgccttaaagagctccaaacatatgggaacttttggatttttttattgaatgaatttcttagtgctcttgccccgagagttgatttattatttttctcatgttttttcaatatttctccattcttcttcaacactaaacctataaaaatatgaactaccaaaagcgtaaaattacacaaaacaagagtaaaattatttaaaaacacactaaaatcaacctaaaaatagtactaataaaaacctaacagtagtcaaatgctcttttaatttttagaaggcctcctcacattctttggtccattcgaatttcttgtttccttataacttattgaaaaatgggatgcacttgtctgttgattttgagatgaacctgctgaggacggttatccttccagtgacactctgtacctttttatgctttcggggagaaagcatgtcgatgaaggcttttattttttctgggttcgcttcgatttctcgagaactaacaatgaaacccaaaaatttctcagaggagacaccgaatgtacatttattgggattgagtttcatctcgtaccttcagagaaccaaaaagtcttcctcgagtctgtacaatgttctccgacagtttttgattttactagcatgtcatcaacatacacctccatattcctccccaattgattcttgaacattttattgaccattctctagtaagttgctctggtgtttctcagaccgaatggtatcaccttgcaacagtacacacctttatccgtgtagaagctggtgtgttcttcatcgacaacatgcatcttaatctaattgtatctagaataggcatccatgaaactaagcaactagtaaccagactgtcaggttatttttagtatttaatttagatttattttagtatatttttagttctcttttactcgtgtttggagcatttttatgcttgttaaatggacagataatactggtattttttactgatattagtgatagaccacatctccaagtcgtactctcgggtcgctatgaactgctttcaaaatatggattgtaaatctttccaagagtgaatcaatccgggagttagctttttccactagtcttcaacagatctggggagggtcaacgaaaaacacagacatttggcgccatcactcaccctggccacctgcattatcttatta

SEQ ID NO: 64165 - DNA, 932 bp, Cannabis sativa
agtaaatctgattatatgaaatgacttttatttagggcataaaacccaacactatgtgcctccagccttcctatatttgacgagcatgtcatccacatatacctccatattttgtctgatctggtctttaaacattttgtttactagtttttggtaggtagctcttagattcttcaaaccgaacgacattattttgtagaagtatagatccatatctatttgaaaacttgtatgctcttagttttgtggatgcattgtgatttgattataccctgaataggcgtccatgaagctcaggatttcatgttcagttgttgcatccacgagctgatcaattcttgaaagtgggaaacagtccttgggacacgccttgtggtggtcactcaattgaatacatactcgcccttttttgtttggcttgggcactagtatggggttagccacccaagctggttagaaatcttcaatgatgaacttgttctcgtgcagtctctctacctcttctttcactgctagcacccgttctttgtccagtagtcatctcttttgctggatgggacgaaagtttaggtcaatgtttagggcgtgagacatcacagtggggtcaataccgaccatattctcatgtgaacaggaaaaaatgtctaggttttcttttagaaattttattaaagctaattttatttcgagcaacaaacccttacaaattttgagtttcctggccgggatatttgggtcgatttccacttcttccaattcttcgattgtccctacatttttgtttgtttcgccaagtcggagattcatgtcttcgtccctgccttgggacactttctattgggcaatgtgttgggctttgttccctaaataaagctctattttaatgtaatattttctattcaattatcgataaagaaacagatttaatttca

SEQ ID NO: 64166 - DNA, 566 bp, Cannabis sativa
agtgaaaaagacaaaagttgttaaataaaaatttgtcaaggtaaaagttgtcaggacaaaagacaccattcttgttttaattgagacagggtagttacctatcctatagtagggtgtacctattagttttatctttttggattaattaattcaattagataaatctttgaatttaaaaagtgattaaagatattttaagttggttgaaatattccctgaaagtagttgagatattctctcaagtggttaagaaattctctcatcagaaatatcagtaatagaattcgattatagatatttatttgaataattaagtgtgatttaattagttgagaattaactattagaagtgtaatttgagaaattagatgattcacttattttcaaaatactagagagaaaagaaaaactaattttctctttcaaactgtttttgctcatgtgttgagaatttcaacaaggacaatttattctattgtatgctcttgctcactcctataatgttgtatttattttactattttgttggtgtagtgttttgttgttggtgttgattcagtctagag

SEQ ID NO: 64167 - DNA, 759 bp, Cannabis sativa
  modified_base (468)..(472): a, c, t, g, unknown or other
gatgattttgatgcatgttttggtattatttggagagtgaattaggtgtaattcttctctgtttatctaacttatgctaggtgaaagtttaatttgagtttgggttggtttagaatgaaagttggtatttttgatgcatttttcgaagctgaaaactgggttatctgagttttttaaccctgtggtcgcgactatcataggtctggtcacgaccatcacaatggcagtttattatttttttaggatttttgttttcaccataacttttgactcggattttcgtttggaacgttctttatatcgttagaaagctcgctttgagctttatgtgattatctgtaaattgaatgccaattttatattttgtgaaaatggatttagggattaatcccgaaaattgtgactaagattaccgacacttggtcaggagcacccggggatttggaatctccacgtttgcgggacatnnnnnaagacagtagttagcacatagagtatgcgcggtggtgcctatactgaaaatgatatatgtggataattgggaatcaagattagggttatcaccctaacatgagcggtttaatggtctaggattattaccctagtgattattcatgtgaatgtgttgtgccatgttatatataagtgtatattgagatttaggattatgtgttcaaggtataatcgtgttggactcggcaattagaaccgagatgaatcgcgttctaaggccttattgtaaatagacgtgtgagcgta

SEQ ID NO: 64168 - DNA, 1436 bp, Cannabis sativa
taaaataatttccaacaacttctggattagaagctgaagatgctagctactgagatccgctcctaaaagcctagttcttctttcctttatctctctcaccataggcgatttcttgaaccttgttagatcgggatttgatattgcccatgaacctatttagcagccccatttatagagtggctcgttgatctacacaaaacaaaaaaaatatccatcaaacaagaccacaacaaaagatatgatatttacaacacatcatcatgcaagacattaagaagatccaaaccattaattctagtataattgactttccccctagcaaaaagagcaatatcttctcgacctaagttagtcttgtattggaagaagcctgggaagtaaattttactaaatgtatccactctaacttgatggtgcccatgtggaatgaagtggttgggactcttaatgatgcaatctactctatctatatacctactgcatggatatctacgttggtctaagttaaagaaatattgatcaaatccacattgactgacaatctcaaaaattccttatagtgggagccctaattatatggaagggtgtctcaccactgctgaaggtactcgctcctgaagcaccctcattgcactacctccttgaatcagatagtgagttcttcagcctcgcataggctttctaggaattatctcctccaattcgccagccattgctcatcgaccttcactgccttcagagcctcttcagtaataataaatgtgatggccccattaacctcattggggtcccctcacagagcatcctggactgtgtccttcacaaaaagatgcaccacgtcctggtgtggagcaataagacctacttctcgaaggttgttcgtggtcacaagcttttatacttgaatttccttggatgagaaggacttttagaaagttatcctctcttccagctccaaattcagaggcaactagggcaggtagtctagcagatgcaaaaaacaagatattagtacatatcaaacaggaggaaaaatagaatcctaaagtctaaagaagggaacgacacttacttgtagtattgaattccaaactgagggtgggaaccctctttaatgggaagctggaggtgtagaagtagtactccctgaagtcgtgcatatacttcgtggaactggtggggtaaggaatactcctggtgtagcgctccagcctatagaattccaccttctccttgtggcccctcatgggctgagacttgatcttgtaaaagtacaagatctcctctggtgttgacatagatttgctatgttgaacacaaaagacgtaccaccttgatagtaagtggtacgcctgagaaataagctagaaaggtgttatcctggccacgacatagaaattagcaaaataacacctcagaggcaggtgtgcccccat

SEQ ID NO: 64169 - DNA, 1136 bp, Cannabis sativa
tacatttctatgcaaatcaaaacttataacaatctacagttttaaaccaaaaaaaaaatactaactacaatgagatgcatgcagtcttcatcctttcgttcattattggtgttatatttttaatttaacaattattataaaaaaaattactatttttacgatgtcacttcacagtggtgctggtttttttgctacttgtgccaaattggaatgctcaatttcaaacaacacccaggagctttaatttctttgattaataatttgttcttctaattataaaaagatgaatattatcatttactcataaatactactgtattttttttttcaagagagagaaggtagctaggggatgattctgaattctgatgataattaataaaatctcatgaacactcaaatcaatattggagtaaataatacatgggaatttgttctattagtatcttcatcatgttccatcgactaaactggattcctttcttttattgattattgatcagacttaatttattatcaagaatcagtagcagccaagccaactagagctaattaattcatcatttattatttatgctcatcatcataaatcataatattaattaaataatatatataaaccaaaattaatatatactttttttttcttatatatagatttactgacgtttgcatatcaaggccttttcttaatggtagcttaagcatcatcagtattcaataatgcttaatgttttgttctaaattaaagtacaatatatagtttgatttatatatggatatatatgctgcatatatatggtgtttttttttaccatatgctacttttaattacagaattagtactctaataaaacttaattacgtctattcctaataaaaatatagtaattaattataatttgagtagtaatatataggtagttaggagttttggaataataatgataatattattgaaagggtattatgattatgatctgagtttcttatcaatgattctatttctagctctttaactttattgtgtgggggacacagccgtactctccctattgctgtctaaatcttgattttgacatttcattgtgtctaattactatcaaattaattaagtagtactactaattaattgt

SEQ ID NO: 64170 - DNA, 799 bp, Cannabis sativa
agaaatccagtacactgataaatcataggactaaataatttgaaataatttttgtagggtgttgaaatagaagatttcccattctatattataaatatacaagggtaatttgaggctaaaattcctatacttttatgtttgttacggtttaacccccttattcgaaaaattatggctactccctaggctcgacaattattttgctctgtagtccttctctgtctattttggtctgttaagtgacaaagtagtttgctacggtgcacacatgggaaatttttattagtccacctaatattaataatttaaatattaaaaaaataatttaaaatatttaaaaatcagaaaaaataattaatatttttttttctttttcttcttcatctttcttcttctttgtttcttcccaaaaatcaaacacccccccctcccccccaaaaccagaaatcaaacccaacccgaaaattgaacccaaaaaatctaattccaacccaaataatccatatataaattaccccaacccacaaattgaatccaaaatgcaattctccataaaatccataaatataaacacaataataatgttattttcatttttttaaaaaatgatcaatcttgtattccaactaaagggcaagagtacctgcaaagtataaatcccaggcggtaacacagcaacgagaccgaccttatcgaactgctcaaagaaatcgctagtggggaagtcagggctctcagcaaccaatgcccagacccaagtggcaatgagcttgcgacaatgtaacgttcccgcttcaaa

SEQ ID NO: 64171 - DNA, 883 bp, Cannabis sativa
ttcaagttgacagtcatgaatgcactcaacaaactcagtttcagtctgatatttaactttgtgccccaccctttcatctttgcctaagatagcattaaagtctcccatcaacatccagttttcatctgttttcaaagcctgtaaatccttccatagctctaatcttccttgtctgtcattaaaaccatatacaacagtcaagaaactttgaaaggtactatccatagttgttattttcaaatgcataaactggcttgtgcatttgataatatcaactatgaaacgatttgggttccaagcaatcacaatcctcccccttgatgtcatgctatgtttgacgaaaaacaccatccattaaaaacattaaggtacaaggttcccagtttgtgaaccttaacccgtgtttcgagaagaccaacaaacccagcctcttgagttcgaatgaactgtttaatatgttgttgtttttgctggttgttagctcctcgaacgttccatactagaaacttatccattgccaagagagggtcctcccccctctcttgtataacctgtttgctcatcattagcccactgcatatccataaattccatatcatcattgaccccatccagaaccttaaaaccgtttgaagtgctagtctccttcacaccattttgttgttcttgcaccttttttcctttcaaaactgcttgaaaaccatcatcatcaatcttgggtttctctttccgtttatcttctttaataacccattcctttttggtaccatttttctttttacaatctgcaaccagatgccccaagccagagcaattagcacacaaatctggcttccattcatactttacacccacagataccatactaccatgttcatcctca

SEQ ID NO: 64172 - DNA, 1142 bp, Cannabis sativa
ccttgacggccataacaaaaagcactatgcctgggccttcaaagaaaaggtcggttagcgagtgtgactctcttggtgataattgctatttgtctttcttattgcatttcttcattaatcgcatgctttactaattgtttttgtgtgtttttacaataatgattatttttttacaataataattatttttttacaataatgattattttttttttgtaaaatactaataatttaatattttttttctttttaagtgttcaaaataatcttttttttttacataattttataaaaaaatattaataataaataattataaaaaataaaatatacatatatataagaatgttaatagatatatacatagagagagagaggagagacaaagaatgagagagagataccttgagtcagcaaaggaatgaagagaatgagagttgatatgtttagagtgagcttttcttagcaaataaaactcaactattttggagaggtggatattacctctctgtaaagtcaaattgagcccatagtaaaatgaacacctcagctaaaaaagttaaaaagcaataccaaacattagttggacttcatattcccattcctgagtaaggaaaactgcataccaaacaacctctgaaggatgcttagtgaggtggacatattatgtggcgaaatattgagatgctatactattagagagaaaaggatgtcattctagaaatttgcatggatgatgtgttgtgacattgatgctatttattttttttaataaaaaagtgaagctaaaaagttattgtagttagaaattagaatatatattaaataataatgtgtgagatcataaggatagtttaaagagtgctagacattggagtatttttagaagaagagtgccaaaaatgatttagaagagagataaataaaatattatatttttagatgatgtgtaaatttttagcttctttaaaagatgctatgctaccattcgagatactgatagcatcctttaaggatgctaaaaatctccacttaatccaaaaatataatattttattttatctctcttctacatcatttttggcacatttacttctataatcactccaatggtataacactctttaaaaatactataatta

SEQ ID NO: 64173 - DNA, 1010 bp, Cannabis sativa
tttgtcaccaagactcaagattattgcactgtgtgctttctccatgatctcgatcttttctttctcagtcttgtctttgatcttctcagctccaagaagagcatctcgaattccctgttgtaccagtaatgctctcatctttaccctccataatccaaagtcgttcttccctgtgaatttctccaaatcgaacttggcacttcccataattttcctggatgttcttcacgccttgtcacgcttggccttccttgaatcaagcctaagaacccgtccagctctgataccaaactgtaaggaatgcagcttcgatttgttaccttatgcaacctaagttcttggacataactctaacccagtaaccaaccaactaagaaaatagagtaatcaaacaataacttgtaaaagtgtattaaatcttattgaatgaattaagattgtatttacatatatacacaagtgtcttcaaagaataggctagctgaaactaggattaactaataatgccttatatacacaacattagttagttacaacaattagaaaagctaactagctcttatgacacctagactgttaagaaataactgtcaaccgccaatagtaaatgacaactatctcacaaagaagatagtgtgaaagtgaagaagatgataatagtaagtttgtggtgtattcaaaccaatccttcaaatcgattagccatgagtcgagttattgaaatgttggaagggagtgttgattctttggaaattccacccaaaccaattttgtattcacctccaaggtcaccacccctagaatcctctcagatatttgtataattgtagatactcttgtgttaattgtaaagtctgtgcttggttggtaagtaggattaggatgagtgagtgatttttcattctacaataacaacacttgaattaactatatcatccttatccttcctcatttcttttttcttgtttttttccttattagcaacacttcgtgactttcgcttttttttt

SEQ ID NO: 64174 - DNA, 2861 bp, Cannabis sativa
aaacccaaaccgtaaatttgaaataacaaattaaaaaaatagtatatgagataatttcttttttttttctcaaatataaaggtttataaactaaaacgaatgctagtggatataaaggaatccaccttccttagatgaatgttttcagttgtattcataaacgctgcccaagcagcgacatgatgagcaactctattattagctcttagaatccaaacaacacgaatattatcaaaagcttctaatgaattaaagagatcaaggaacaatatgtaaagattccaaggaatcttacaagaagctatagccaaagccacaacttagcaattagtgaagaaacaaataccagaagtggaagggttcctattgtagaatttaattgcacgaagaagggtcaatgcttcagcttcaagaggcgaggagcaatagaccttagttgttgtaatatcattaatggctctaccacgcccccaacataaccgcagcactaaaagcccaatgacctcaaacaatggcattgataaatatcaaggtgcaaccaacatatcccacaagagagaaaagggctaggggtgggacttccctcatgtgtatgactagataagatgcattgttgaagcatcaacacccttcattagccatcttagaaatagcagacatagtccaaaaggtaccttcatgaaagtccttattcctagcaaactacaagttgcagcacaacatagcccaaaactgaacaaagtgggtccgctctgagttagacaagcctagaataggcgtcgaggagaccaaccactcaataagctctaccccaaacatgagtaaaaggaggtcacttctcacagaccactggcttgtaaactaaagttgtctcataaaatgactgtaataaccgtatatttagacatagaaattaatagcttattagtaatttaattactatttttagatatatgtgcattaatacgaaatgatcgtaagactattgatgtcaaccaaaaagctcaagaggtctggggtttaggcgtttcgaggatatgaatagggccttgttggctaagcttaattggagtcttgcaaatgaagatcgaaagccctgggtcatatgtttgttgaagaagtactgtcgtcgggacaatttctgggcagttaatcaaaagagttttgactctttcttgtggaaaaacttgattgaaaataggagtttactgtgcaaagggtcttgtactctagtcagtagaggtgataaggttgctgtcagacaccaaccatggatttcgtggctgaattacagcgagtttagggatcttatgagtaggcatttgaaccttttccctcacttgaattcagtggcagatttatccttgggaaattggtggaatgagggactggtaatctctatttttggagggaatttgggacgcataatactggagattccaagattactaacctcaacatcggataagattatttggaagctgaagaagaatggggtattctctgttgagtcagcttatgtagaggacaaaaaatctcattttggagttaaagttgatcttggaagtggatttgggactcgaaggtgcaccctagaattgctttgatgctctggcgagttttaaacaatgcactttcctcttaagtgtaacctccctttccttagtgatacatcctgcctattttatcataatcgcgaggaaaccagtttacacttgttcaaagaatgtgactttgcgagggcggtgtggtttgttggatgcaaaccttgttacgttcactttatacccagggggagtttgcatcaagtgattgaaaattggatcagcaattcaggtacttctagatccaaagccctagtgtatattgcgtgtgttttgaccgtgatctggcagcaaaggaacacccttaggatctatgggaaaactgacccattcttcattattgtgcataaactaaaatcatactttggtgagttatgggaccctttggaggaacaggtgaggatctcttctttgctgcagaatgtgggaactccctgcaggttcgtgactatgactgatgcctcctggtcagatggtgtaactcgtctaggggcagtgcttatcgatacagtcacaagcaaatggtttctttcatcttcaaaaagtaaggcagggtcgattttggaagcagagtcggttgcaattttgatggccttgcaaagagctagtcaatgctattagaatgagatacatgttctgtctaatgcaaaagtggtggtcgatgcctttgcagcaggcaattgtccactagattaaaagttcttaaatatctcgttggaggttattgagtctgttaagtgttttagttgttgtaagtttttctttattagttgtaatcagtttgttgatgcactagcaaagagtgctagattgtctagtcaggatgctagcgttgtgcaaggggagggaatcccccctgtgattcccaattatctttccattgcttaatgaacaagttgttcttttaaaaaaaaaaaccatattgtcataaataggcctttgtgaaataatttatcaattatgaaaattttatcgtattctaagtgtgtgccatgcaagttaataatgaattttgataatgtttcatattttatgctggtgatagtggaatgcgatgatttgaccattagtgtcacagtgatatggttaagtatctaagaagcagggcaagagatatggacattttttagaatgtcggggttgtgcaaggtggtaatggtttttgaccattttaccctagttgttatggttacttagcaagaaagtaaggttattttggtcttttaatcttaaaatttatattaatgcttctaatag

SEQ ID NO: 64175 - DNA, 700 bp, Cannabis sativa
aattatgttttagattaaaaattaccatggaaatattttttttttcaccttataagattgattttttttacctaaaataatttagttgttcatcaataataattttaagatttgttcaagatgagataattaccctaacacctcaagcataacatgaagtaaataaaactaggatttttgaagcaacaattggtgtcataaaagttaaaacattaataggaaaccactactacaaattacactattcacgtcgatcaacactactgttcatagcgttaaccgacgttaatatagcccaaataattggacctgactatttaaaatcgacactaataatatatgattcacgtcttttgattaaacgatggtaaaaaaaaactgacgcaataaagcaaaaaattttaaaaatactttacactttgcatctgttggtaacactcgcctaatgtatttgtgaggtttaaaaatgatgctaaatacaattgagagagaaagaaaccgagacaaccagctgtaaaatccctaaatcctaaatcaaatgcatgtactattcccattttacctaaccctcatcctctttgaccttgctctggcgatcaacaggcggccccttcgtcctctttgaaaccatccactcgagccttcatccctcttcgaaactgtccactcgagcctcttgaccccatctcatccacttcaa

SEQ ID NO: 64176 - DNA, 639 bp, Cannabis sativa
tggtaaaataattccaacagcagccacattggctgttcgacgaacatgaattagggatacccttgaaaatttggacaacaaacttgccaaatcaaccaacaaattatgatccaagatcattaaaaaaatattgcctcttattaaaaacagacacaaatgtaaagcaatcagtttcaactatatgaacagtatagcctagagaaaaaattcagtccaaaaccatcacaatcgcaatacattttgcttgaactaccggaaaattaccttaaaaaaacacaaaaatatactgagattaggttctaataaatataattaaaaaataattgaaagaattataatttaagtacacagaaatatagctaaatatcaataattgcctaaggcctcatttagtagaatacgttttcttattttattttttaatgttgagattaaaaagtacataaccgtatatgtatactttttctttttccccaaaactatatatcactcatattttgatatataccaaagatacataactaataatttacaactaaaatgcctatttaattttctatcaatttaaaattttaaaatcatatattaactaaaaatacatatcttcttaagtaaatttttggtgattgaatagctacc

SEQ ID NO: 64177 - DNA, 685 bp, Cannabis sativa
gacactttcaaggataaatggctaaaaaacaatgaaaacccccttaaattaactaggaacatttatatggtaaaaacggatagcagaaatcaaaaaaaatcatatgaaaagtaaataggagtaataccaacaaaagaaacactggtatatattcattgcagcaaataaagtagatattatatataaaactctagcttaaaagatatcatagaacaacataaaagtatatagtatcaagtaatatattcaaataaagcctggtgtatgtgctccacctacaccactctctgttaaagactttatattattatactaatagtacaagtgtcaacgttaaacgactaagaaacaatgaaatctctcatctaatctgtccaaatttttaaacacactgacataacaagatttttcattcaatcactttgttaaacatcttgtgaagtcactgtataaaaatttggtgcatactttgtgtatacactacattaaaatgttatattatggttttcattatcaggatgtatggcacgttggtgactctgtgatggaacaaagagtggttccagttgtaatacgcagttttcttaattagttttatgatatactgttagactttaaagaagccagttttaataatagcttgcttgatatattgcttttagttttcacaattcaaggggctaga

SEQ ID NO: 64178 - DNA, 1463 bp, Cannabis sativa
ttaattagtaaattgagttattaatggtatttgaatataattaaatggtagttataaaaatatagttattgaggacttatttttatcatttatagggtgtataaatgatgtaaagttaatgtgagaagttttgaaccgtttgaagttattttgttaaatgctgaaaaaattggtaatcagttatttgctaccaattttttgaaattttgcactacaagtgacatgttgcctggccatttttatagcatgtatttttaacagtttatgaacgttgtgctcggttttaatagctcaacccccaaatcacctatataagttcataaacgtccaatgtaatattggtaacatctaaaggctttatgatggtcattcatattccaaaaaagagtgaaaattttataaataaagatcatactattcacttgtaatatgtagttgaaatcacttattgtggtaagaatcttgtgaggatatgcttatccttagatattaggttgagcatatgaggcttgaaaattcttagaagtatttctagagtttccctacgcgtccatatgagagaaaaaatgacttttatgataaaaaattttgagctttggtcaaatttattgtgtgttattctttttcttctcctctataatattcatttataaatgtgttccacaagtgtcatattaaaaaatattattgaatttacgtacaaataaaatataatctatgtaaatgtattatcaagcaatccatgaaagaaacaagcatggtattacgtcagactttttgcaaatatatatataagatataaagaaagatgctcaatgatcttatatttaaagtaattaaaggttttattttatattctatatataatatggctttattcttttttagtataaagtttatttattttaaagtaattgttacaagtactcatatatatgtttaatgttattaataacttccacactcgaaaaaaaatatgttattaaaaagtgatgattatatattaacgttgtcaaataattaaaatactttccatgtatcttctataattatctgttggttataattaaataaattttaaaaatattaaatcattaaataataaaagagaaatttaaatttctatgctattcaattaaaaattatatatcaaaaaatattcctttttatactatcaaaaatatatttatatacaaaatatttaaattaaattaaaatttttttatctttttatttaccgaaaaactttttatactgtaaaaaagaaagaattttctaattaaattgaaaaattaaacataaagcatcaaattttcttaatactacctatttatgagtagagcattgttattaagtaccaatggtgcttagtacttaagacgtgtcgccttgcgattggctagcgatactccttaaaagctattatattaaattatatgggacctgatactaaattagaccaa

SEQ ID NO: 64179 - DNA, 683 bp, Cannabis sativa
tgacttcactaggtaagtttgggtcagttgcggactccacatctagttcaacagtggccaggactcattttatggtgactaaagcctcttgcattcttttgttagcttttcgctacttttccaactcagctgcgtgctctacaacccaccattgcaaagaagctccatataatcatatttgtcgtcctcataaccttctcggtagttttccagcccgtaatctcgatagttgatgtcttcttccttagggtcaactcgggatgccacatcctcgttagggcattttggaggtcaggtggatgaggaggtctttgattatttttggttaatgccgtggtgacaagaacttttagggaagaagatgaagttgtgaaagcttcctacaactctcaatgaatacacaaaaatatttattgagttttttggcaactgattaaataacttataattactaaatggatttatgaggggatatttttacatcgttaggacattaaagagccttagtccacgagtcacttgtattgatgttgaaaggttacaaacatggtgttttttgtggggagattttggcagagtattttctctatttttccaagtctttattccttttacattgggtttaaatccctatttataaaggaatgaatgggctcttcgaggaaaactaagtttgttccctc

SEQ ID NO: 64180 - DNA, 5758 bp, Cannabis sativa
  modified_base (275)..(281): a, c, t, g, unknown or other
caacccgcacatgcaattttttcaattttccaaatcgcacctgcaccgcgaaactaaaaaaccgcaaaaaccgcaccgtaaaggtacgatttatgctgttttacagtttggactatcactaaataattaaactatcataaatacaacaaagtttgagcaacacttgtcaaaaataccataagacttgaaaataaaaatgacaaaaaagtttcaagtttcaacaatacaataattagtgggcttaggttgagccttcacatattggacctaaatannnnnnnaaattggtatttttataatatgtggtgcggtgcggtgcggtttgaaccgcatattaataattcaaaaccgcaaactgcaccgcaccgcacggttttgagtaaattcaaaccgcgaccgcaccgcaaagaatttcaaaccgtattcttttttgcggtgcgggcggtttgatgaacacccctactgaaaatagacctaagtaaagcctacgatacggtggattggagtttcttggaagagttactgaaaagttaccaatttcctaccatgttcattcactggattatggtatgcttaagggatacttccgatgtgcttatgatgaatggctggttacaaaaaagtttcaagggagctaagggtcttatacaaggagaccccatctccccgatgttgtttgtcttggttatggaatatctaactcaaatgttacaatatggtgccaatgagaaggagtttagatatcaccctcaatgtaagaacctcaagattattaacctttgttttgcagatgatctcattatcttctgcaaagctaataaaggttcggtgacttgtgttaaaaagatattttaggagtttagcaacaagacggggctcaaagctaatctttctaaatcccaggttttctttgggggaatttcaaggatggacaaggctgcattgcttgagatcttacaaattgaggaaggggattttcctctaaagtacctagggattcctatgaggcctacaaagtggaaagcgaaggattgtggggttattctcaagagaattaaaaatcagcttcacacctgggctagtaaacacctctcctatgttgggagatgtcaacttattaactcgattctcctggggttgagaaattattggatgaatatattcttgctgcctcaaagcacaatcaaggaaattgataagctaagcatgtggtttttttggggtaacaatggcacaagaagtaagttccatcttacttcatgggctaatgtttacttaccaaaagagtaaggagggcttggttttggtgaaggtgctaagtggaaaaaggctatgattgctaaatatgtttgggcaattaatcaccaaccggaagctctttgggtcaaatagattaaccatgtgtatttaaaaggacaaaacttttggttgtatcagctaaagagtgacactagttggtattggaaaaatttttgcaacattagaatggtgttttctcagcaggaggtggaggatgcaactagaaaaggaaagttctgtgtcaacaaattgtacaagggactttgtcatggagagttgttcaaacaccaaaggtttgtttggaatcggtttgctgttccaaaacactggtttatttgttggtaagcattgcaggacaagctgctcacctgagatcatctccatcaggtgtttcacattgacagcaggttgtgcccgatctgctgcaactttgatgagaatttagctcatctcttgttctcctgcaggttgtctcagcaggtattgaaggaaattaacaattggattggggctaattggtctgatcaggtagagaagtggcaagcttggactgagcagtttggaaaggagaggaagaatatggttcctgctcaattttctcagcaactatatataatatttggcataatagaaacacttgtgttttcaatggatattcttatagtgtgaaaaaaaattgtagagatgattaaaaaggactctaagtatagagttaacaattttacttttaagaagttgaaagatgaagagaggagattgttgtcaaaaattgactctatgtagagtgtgtgctagttgtgttgggttgtagggctagttttgtgcttgttgattaataaagattattcatttttatatatataaaaaaatatattatcttcaacttaatatatttattattttgatctaaatataaaatagtagtaatacatatattcgaaaatatactaattgctaaaataataaaatgttattaaatatatataaaaaaaatagggttaaaattaaaagaaatacaaacataactaatttcaaaatattatatttgtaagaattataggtattaaattatttcttgaacttactggattttttttttttttttgaaaaaaaaattactggattttagaatactgaaaaatagatttttatttgttgatattaaataaaaacatttatgacaattttctaaactaaatgttcactaataattaaaaaaaaaagagaaataataaagtaatgtaacccacccttgatttttctttttcttttttctttcttttgtaatattgggtaaaaaaaaccccgcctcttatgtcttaagaatattagttctggaaaaaataaagcattagtaaaccaatagtttttttttttttctttgctgcaaaaaagatggctaggctatagttgttcttccacctctatactattttgtaatattatgtattataacgtctgagtaagtatgaactcaatctcaaataaccatatatatgatgcttacaatattcacttataagaagcatagcaaaacgaatatgggagagaccccaaagccgcctccttttctaactatagtttaatctcttgccctccctgatctcctatttttaacatcatctgctgcattcattgtaccatgatgctgctgttggcgagatgacccaacccggtctctcgaatctggcattactctacttgaatgctgtgatggttctgaagatggaagcgcccaacctctgcgaccatcttgaccgctgctggtagctcctgaatagcaaagagatgggttagagttcatcatctttctcaaatgaaacacattttcagataacatctcggtttgttgcagacaaaacataagagaaagtactaactaacctgtgttttcaattccataagcgccaaaattaccagtccagccaggtagatgtttcttagcctttccactccaagcttcttcaaaaccagaaagctcatctataatttcagaagaaacaaagttttagttagtcaccattcatgttgaaacatagctatgacccttatagaaaaaggacatatgtatcaacaattagtaccttcattaagattgtgcaaggtttgcattgtatccaccttaccatctgaattaagctttctagcaacagaatgaccctataaatgtgaaagaatgtaagttaaggaatcatagagcaagaatggcagcagcaccatcaattcaaaaaaaaaaaactattttataaggattataccttatcatggagggccctagatattttgtggcttgcttgtctactgacagtatcggcttctttgctttcttcaatagtcaactgttcacacattgaattcaataaataagagacagcaacaaataaaagtattgatagtaacaattcagaaatacttaccccatcacttccggtcctcattgccttagatttagtataataagctccattggctccgccataagtgacagaggagctctgaaaggtgaagctatgagtttgaggttgcctctgggtgtgattgaacccattgtgagcttgcatctgtgtgttattgaacccattgttagcttgcatctgtgagtgattgagcccactgtggccatttccatactgcaaatgcctcctcttattctctgcaccacaaaggtaagaaaaacaatccagcttattagtttagagccaataattaataaaaactagaaaaagccaagaaaaggcacttgctgaaaacacttgtttaccttcaacttgatcatcaggatcctcaacatatggttcatttccggacttacggagctttctaggattttcgtacttctcattaccagcattgtcctcctcctcatcatcagaggtaatttcttcaatgattggcccccttgatcttttaggctccggagcttgttgctcaatagacccaaatggaggcatttgaggaaatggatttccaaggggactaaataaatttgactcgagcatgcctcctccaaatggacgactgaagaaaggatcatcaaacggatcccttcctccaaaaacacttgagaataaacttccatggccgcccattccaccaaaaccaccaaaaccaccaaaaccaggaaatggttgattaaagtcaaatagtgagttcctcattccaccacccccttggccttgaccttggcctcgaccttggcctcggccaccacgtccttgcattttcaaaaaactactataacccctgaaagtaaaaaagaaacaagcaaatccacaagcttagcattaagattttggatcaaaagcagcttattggccatgaatacaccacaccattaatcaaacgacaacatcatcaatcatcatataacatatcaaacccccattcaccattaacaaaatggcacaacataaagacagaaaattatttgtgcttatacatgatacgaaaacatacaaaacccaattaagccccataaaagaaaaaaatttgaaaagcatccgaagtaggacacatgccctactcaatcatcagaatacggattacattgaaaacggtaaattgatcgcaaagaaagcaaagaaaaaatcaaaaacaaaaaaactgcaacctaatgtactcaatgtaacagcagacaattccaaataaaaaccacataccaaaattattgaatcaaacaaaatctgtttaaaaccgccataacggcataaatctatataatttattcgaaaagggttgcgaaaagcgatcaaggaagaagtaaatctccagaattaatcgaaaagcagaaagagtgattacctgaacgaatcggcagaaggaagagaatctcttcaatcggtagagtgaaaagaagaattggaagtgaattttaatggaaaataagtaaaatatcttctattgtttattttttaaatcaaataagaagccgtaaaccgaaccgactatgaaattcaataggaaaaaaaatacacaaaaataaaagagaagtctctagactagacgctgcctgtgtaaaattaagattttttcatttatatttttataactaaaaaattttaaattatatatataaaataaattatattttttatttaataatatttaagtaataaatttacatcaaaaaaattttttgaatgaaaataatctttattaatacaaaggactaaaaagaaaggggaatatcactctcaaaaatttacatcaaattttaatattattaattttttatataaattttttaaaaatatatgagaaaatagatgtaaaataaagtcagacctaataatttaaaattttgatcttatatataacatatttaagataataacaaagtttgtaattattatttgaataatataattttttaagataactgaatacaaagatgctattagatacatttttgataaattcatacttaatatacaaaatcttaaatacaaaaaaaaaaaaa

SEQ ID NO: 64181 - DNA, 971 bp, Cannabis sativa
aagccttttattatagatatgtgatcgaccatgcggtctttaattctggctatcttctttcgctttgaatgtaattatctagatttacttttttttatgtaaagcaaagtatgcatgctctaacttaacggcatgtttaagcttatactaagctttaaatttcattgcataagttatctgtgctagtttgataccttgtatggtgtgagtgcccccaagtgagcacacagacttacggtctcttggtcacttgcaattcaccaagtttcatagaccttatttgggaattttcgtggagggctaccaggtgtatgcatgtggaactgcaaaaagaataactttaagaagttatcttgtgagctagtggtttagacacaattagtcttacacgtgttgttgttgtgcaatgtacatgttttgtgtaacaaaagcttacaacttaatgttcacttttgaaatcacattttggctacccctgcgcaacttactgcgcaagggccatcactgaagagtgatggtcatatagctctttaatgtttggctacctctacagagcttaccgtgtaaagaccatcactgaagagtggtggagacttagctcttttctaaattcttgcacagcgaaacatcaaaggaaccactactgaagagtagtgttttatacaagctggctagtgagagtacttaccgagatgttctccattcaggtattttggtagaagagccaactccaagttctcattgtactcgtcagacttgtatgcaccttttcctgctatcttgtagattggtgcagaccttttcagtttggtccaaacatgcttgctataggatctttggtatcaaggaatattcttcagagcactaagtctcttacaaagaatttcctttccttgacttatttgaagtactcggtgactttttgttggcagacatgacgctttaaattggcttggtctcttctattttgt

SEQ ID NO: 64182 - DNA, 1682 bp, Cannabis sativa
gcagtgggttttcatatacctagcagcgatctcacgagatacagactgaagaatccatgacataaccttgttgttgcaaatgtcccacgcagagcgagaaggatcatttggaggcgaacgaggtatggtgccttcaatgaaaagagttttgtttttggcagcgatgttaatagaggttgcacgcttccatgactggaaattttcttgacgagtcaagagaaatgaagcgatgaggttatttgggtgatctccaattcctagatgatacagagtaagttcatcatgggaaggttgatcaagaacgacacgaggtaagctgtgattagcagtagacaaagaatgatcagaaaaaggcacttggccttgatgtccaagaaaatgaaagttaccaccaagaaatggagaggagttctagacaggagggggaacgaaggtggtggctggagtcgtggtggtgccagaagaagtcggttgtgggacggtcgaggtcaagatcggagcaaaagatgccggaaacggattgtgtgtttgaaaagccataaaagacgacatcgaagaagagttggaaacgatcggggctgtagaggtttgtccaataattccacaaatggggagatcagcagtgtaaccgaagccaaacacaccagaagtggaaggattaaacatgggaggatgagcactgatcgtttttgacagagatgaaaaaattagaggagactggggcggagctacgacattggaggtggtggcgtcaatggaggagatgtcttgaccggagatggcagtcggaggaggcgacggttcgctgatggaggcgacagcaatggaagagtttcttgttctcggagccatggaagatgatgaacagtgggctaggaattgttgttatcgtctgataccatgatagaggtgaaaaccctctttattttactgctatgtaaaacggcagaaatgccaaaaagtcaattatgttaatacaacaggaagtatatatagggcaagagaagaggaagcccatgaagcaaatgggccgaaagtaatgggccaactaattctaatatacaaccaccttattcaacaagtctaaaaaaataatcttacatgtgagagcaaaaataatactctcatctaagaattttcctatatttatatatatcacaataaaataaaaataaaaaataaaccagagaagagaaaggaaggataaaaaaaatggatttttcatagtaattttcagtgcctcatacactttgaattgcttcatatcaattattaatagttatatataaatatatattttttgttaaataaaattaaattatttatataatatatagtgctaaattgtaaagacaatttaaaggattgtaatataattaattattatcttaaaatatatataaaggactagatatatatattatttgaaatgtaaaaattgagatatttatatctattataatataaatagtttattattccacttaggggtgtttaacaaaatttacaaaccgtccaactcgaataaatcgcccaaaccaaactgaataaaccgataaaaaaatataactcgaaataatacaatcaaaatccaaaccgcccaatgaatatattgggtggtttacaaattattctaaatcgcccaattaacccgaataaaccgaattaaaacgatttatata

SEQ ID NO: 64183 - DNA, 1528 bp, Cannabis sativa
accattcaataactttggcaaaggtgagctcagttagggtaatcaaggaataaagaacccaataagtaagccattgttgatcatcaattggggatttggtctcaattgccctgactgaggcatatctgcatcacaaagaatcccagatcaagataagaatcaaaaagtacatccacaaacattttaaacaaaccagcaagaaaaaaaaaaaggtaaaaagagctagatttcgacttacagaggataaacaagactaaccacaggcctgaaaagcacaaatcaaattagcaaaaaccaaatgtaaaataaacaattaactgtaaaactaaatgcattaagcttaattacaaggaaaattagaagaaacaaaatttatcaatacccggcaagaacatcgaagtttttgagaatcactttgaggaaacttccagccccagatcccatctccggtttctcaatgcgtatctttgtctgtgtcttgtcaactgattctgatcgaatgctccagaagaagctagagcaagggtttcgcttcttattgtgagctcagctgtgattcggtaacgttactctatcaaaagagatagagagagaaaagcagaacaaacaaaggtccaaaaagcaaaagcattaaactactgttgaaatattaaaaggagatggggaagtgatcccctactaccgagagtaccatgcaccgtcattggagagtcgtttgtagtctcacattagtttgacttgtgttgttacgattgactatggtgggtaagatctggtgaccaaactcatctcaagaactatagtcaaaatgagtcattattagtggtgatggggtaggcaaagtgtctaatattattgcttgttgggttttataattagttagtgattttttataattttcttgaaataaaattattagacttttattttactttagattaacttttatttatttattttttttttattactagcaacagccaaacaacaagcaagacaaacgaaaacaacagagaaaacaaaccatccgaaataacctacagacgaagacccagaataacaagggccagggaaaactaactactaagaaataactaaaaaaactacaaaaaggaataactactacagccgaaaatcacctacatagccatctgcaatccaagattgcagggaagggaaccatcaaaatcggacaaatcaaaagtgccaaagtggttattctgatttgcccatttggccaaagcatgggccacaccattatgtctccgggaagtccaatgagtctcccagttacataaagaaccagttgcactaaggaagcttgaaatcagctctctcgaattgtggtgtaatttcttgcaatctgaacgggcagtccgaattgcatcaattgctgccgccgaatcactgagaaagatcacatccttgtagcccaatgatattgctgtttctgctcctttgctgatagcatggagttcaccagggagaggatcacaatagttcaatagaaatgtaacaatttttacaa

SEQ ID NO: 64184 - DNA, 889 bp, Cannabis sativa
ccttcataatattccctataatcagattattttaaacacctcataccaaacgccccctaagtctttcaattagccccacgccctgagcttctctccctcacgccttctcgcttctttattagacacttagtctatggtcctttaaatctcacttgttttgaatttgtaatgctcagttctcactactatactattcaagagagctatagttaaaaattacaaggtttaagcctataatctgcgtgatattatctccataattaatacaacaaaaaagaacgtaagtcattacctgctaaacaaggggtcaaatctctataaattgttgtgtcacttttattattgactattacaatttatacgtggtgattatcagtaacaaagaaagtaacaaagaagacttcactattagttgatcaaattcaatgtcaacaatttctttttttacgataaaaaaataagaatgttatttattcttataataataaatagttattaacaattacaaatttattaaaaataattttattttttatattaaaataattttatatgatactaaatagtaaaaaaaaatataaaattaaacaaaaattcaaaaaaaaaatattaaaaattatttatgtaaaattatgaccttttaccagcgcagttcgcaagatgcgttaataaaagtgacttttgctagcacattatacatttgcggtggcaaaaattatttttaccaatacacttttgcgttagtaaaaagtatcaagaggagaatgtttacaaggcttgttatgccaacgtaaatataagttgcgctggtaaaaatagattttgccaacacaattatgtgttggtaaaactttgatatttttatcaatacaatttgcgaaatgcacaa

SEQ ID NO: 64185 - DNA, 1403 bp, Cannabis sativa
ttttttttttttttttccaaataaactaggggcaacaacaaaatacaagctatagttctggaaaaaaagatcttatatagtcttttttgaaaaaaaaaaaaccaacacaattctatatattatagaaataagtagtctcccattaccaatatgtacatgtgtagatgagctcttttgttttgactatttatattatatataagagaaatgctaaagggtactagtggtgcctagcaccctcctatgtgtcaatatcgctattagtccaactaagtatgaggttccatataatttaatataatagtttttaggaagtatcgctagccaatcgcaacacgatatgtcgagaatgtactagacactagtggtgcctaatagcaatgctctatatataataagagtttttttcacctccaaattcttttacaattttaaccttttattaatgtcttttattttaattttttcacaagaattttattgtaatttaaaaataactttcttatttaataaaaaaaattaattccctttatttattggatatcatgtcttttagtttttaccttttacaacttcatcctttaatttcttttattttaactttttcacaactattttattgtatttcacattttggcaactttatccttttaatttcttttatttttactttttcaaaagaattttattgtacttcaaaactaactttcctatttaataaaaaaaaaataattccctttgtttatcttagttttcacaaaaataatgcaagatgattgataactagggttgacaaatcgggtcagacatgataacacaacttgaaattcgcacgagagttagtggatttgggtttgccttaaatggaatcgggttgacttgtctaacccgtttaataaacgggtcgtgttcgagttgacacggctaatacgaaattaactcgttaatgacctatttaaagttattgtagtagtttaacatgtgataaatattataaacttgttgaatacttcataaacgtattattagttgacatgcttaaataaaatatgcttataaacgggttacacgggtcatgtcgtgtcaacccatttataaacaggtcgtgttcgggtcaagtatatacctattatacatgggtctcgacacgacatgaacacgacccgcaaacacgaatattgtcacccctaatgataacaaatatttatctctcagtctctacctttcaccatgtattgtagtattgttaatttattaccatcctcaatactcaccacctcatgcttattcatcttatttaggttaattatttatttgtattagctttttttcgtatgtgttctacaaatatatgtattcacatttttctaagtcttgtttaggcttaatattgtagaaattat

SEQ ID NO: 64186 - DNA, 1304 bp, Cannabis sativa
  modified_base (36)..(52): a, c, t, g, unknown or other
gtacataaacaatcactgaaacagtaaaattgaatnnnnnnnnnnnnnnnnntttaaatctaacaatctcaataatctagagaaaatttttaacggccaaaaaagttcatgggacataatttggtatatgtcaaaattcgagggaggggggaattgttaattagcctaaaaaatggtgaaaatgacttattcttatttagttgttaaaaataatttggtcaagtttcaataactttttatttgtattggtatatttcaatattcctatttatactttttttttctccattttctcttgtcctatgttactctcattttcttcttcttctttgtctatttttttatttttctatcttctctcaaactttaaaaataaattctgatctcgtcgttacttgtatgagcctaaaaaaaataacattgtgatttacttttcaatgtgaacattttaagttatgagaagcatatgttttttcgctatttacagaaaaaaaaaattatttaattactgatacagtgattagttactatttataatttttttaaagttttagttaacatttattttagaattaaattaattaaattatacgataactaattagctttcaaaataacaaaaaagtgtataaaataatcggtatgtaaaaatagtagcttgttatattacatgacaattcattaatttcaaaaatattttttaaagtgacctaaatgtattttaaattataatataccattatataacttaaaaataactaattagttactaagatgtatacaaataagttcttaaagagtaaccaaaatgtatcccaaattatatgatataaaaaataaagttttttatataaaagaaactaattattggtttcttcaacactattagtaaccaaaaaaaatcttttaaaaatgcaggaaaaaaacaagaaaacgttaaaaaatgtcaaaaatattagatttgactaacgtagcacgtcagtaatattaataacattattattgtaaagtaaatataaaaatgtatattattgtaaacttctaaaaaaaaatataggatcttttaataagaaagtcttgtgaatggtccaagcttctttatacttggatcggccctcttatataccagtaccttttctttgacaaaaaactatagtactatggaattagattttggaataattatatgatacattattttttgtaaaaaaattacatttttttacgtttaaagattttttttaatatttttagagttttctatagaaacaacacgaaaataacaaaaaaattacataaaagta

SEQ ID NO: 64187 - DNA, 1123 bp, Cannabis sativa
aggtcttcaacgtcactatattatgaacaaccaatggacccttattttccactaataccacattctccatattgtattctctacgagttatcaacggtttctccctaacctcatcatcgaaagtcttgtgttgttagtttggcttttggttcaaactcattacatgccaagcttgagggcatttttaaaaacaactttcaagttgtccagcatgacgtttattatgggcgtcaaccacttgttgatgtggcatgaacctaaggtaagttctcttctctttaaatttttatttcatattagggacaatgtgaaattttaagtttgggggaagggcttaattttatttttcattttttagttttatttgttttagttgttaattaagctaatgtcaatttttctgctgttgttatttgtggaatagaatgaaattttaaaccgtgtgcttgattttttttactctttgaattaatttggaggcttgtgaaaattttgtattgatgtaaattgtcaatagttggattgtatcataattattttactttggtttgtggtaagattgattgaataggatagaacttgcatgaattattttttgaggcgaaatccttgacaatgcttgtttggaaaatgatgaggcaattttttttttttggatcgtttgggcctttcaaacttacatttatctttattatccctagttttcctatttgagcttagccagttcaattgtttttagccactttatgagactaactttgagtccacttgcaattcttatccttgtgccttgaattataccataagcttagaaataagtttgggggagatgaattgtgtgtggatgaaattattattttttgtgggtgattaagacaatgtgtgaattgtaaaagtatttttcaacatcactgatgttatttatgttttggaaaaaaaaatgatgattagaaaaaatagaaaagaaaaaaaatgttgaataaataaagtgatgttggaactaagagttgtaaaattctaatcatagaaattttgtcaatcattaaaatttttgggcagaatttgagatatgtaatttattgtgggtgcttgatggtttatagtgtgcttatagtataatata

SEQ ID NO: 64188 - DNA, 698 bp, Cannabis sativa
taagtttgcaaacagtataaatttaatattttttaaaaatgtatattttttttagttttcccaatacaaattctgtttagaatttattaaaattgaaccttcaaaataactgatattacatatttatgtgttaactcaataatctagaatataaattttataagtgttttgtttaaggtaataattatagttttataaacattaaatatataaaactaaacattaaatttatttatgtttatatataatcaatttgatagatcccatattacgatcgtatccctatttgtgcacttcaatatccagaaaagtaaaataattatattccacgtgattgtgtgtgtgcataaacatattatgattagatgacatattgagtttttggctgtaattatattagggttatatgatatggaaatctaggtattattgtaaggtaaaggaagaaatattgaatatgaaaaagaaaatataaagtactgtggaactgttggaaaattgaccaattaaacagcctttcaataatatataattttggtggccataattagagagttgatttaatagatagtatatgtatctcctttttattatatctagataatatatgattagatgaataatatatatgattaatgcttagtatctgtatatttaactctcacatctccataaattataatttataattaattaat

SEQ ID NO: 64189 - DNA, 928 bp, Cannabis sativa
gattaacttcatttaccctattgatgtcacatataggggtccatcacatgtagtattcaatcaacaatcattttgaattgttggaggtattgaattcaatagaatctttttttatgtggggtattatttttgctcctaaggctattctttcaacattggctgctatatttgtaacatcatattaatggtagtaaagtacttactctattactttttcagaagtgctaccatcaacctctatgtccgaaaacatatgtcggaattttttttttaattttttttcaaggccatcttgtatatttttgaaaaatttcgaatagtttacaatgtcgaaaatacgtttaaagtttacagggatgatattgtaactataacaaataccgctatgaaaaaaaaaattgaaaaaaaatatttcggcatataatttcgaatgtgaaggttgactaagaggtaataggagattgcaattaacactcttatttttttttctcataattatttagatttaaagtgtcctttttggcatgtaaaaattgtatttttgtagtgggattaaaacacaatggaagtgaagaactttattttaaagtaacaaaacacaatggtggtggcggatgtaaatgagttttctcgatctgttgtggttttttgttgttttttttttcttttatcttttcaataagagtgggctgggttttttgtgtttgtagtggcattaaaacacatcattgattatctccactcaaacccgtgacttaatagattgattgggctgggcgcttgttagttgttactgggctgtttatttatttatgtgaaaattacacctaatatgagattttgaaatatttttatataaatatggtaattttaagtttggccattttgtatggcatttttttattttcaaacttatatatggtatata

SEQ ID NO: 64190 - DNA, 2285 bp, Cannabis sativa
  modified_base (534)..(534): a, c, t, g, unknown or other
  modified_base (1023)..(1024): a, c, t, g, unknown or other
  modified_base (1420)..(1421): a, c, t, g, unknown or other
  modified_base (2056)..(2060): a, c, t, g, unknown or other
tatctcacctataaatatagggtctcggtccccgagctcctcactcattctgtttataatagtaaaattctatctaaataaagttgagagagcgaggcccgaactctaacatcgaagttatcgcagggattgaagctcaaacatcaatggctgaaaatgtttcgatcctttcattgcagatacattttgatctgtttacggtttattttacattacatatcgtttatatatgttgtatttcatattatatgttatagtctacagttggtatcagagcagattatatatctctgtcttgattattttttgagttctcgtatgtatatatatttaatatatatccatcagttttgattataagggatctaatttttcatgtatatatttatatatataatttatatatatatatatattctattaatgcaacttttcgttaactattttaaagcctattttgtgattggtttgcacagaaataatagtagtataagaaaaggaaataacacaaagctttttacgtggttttgcagntaaaattctgcatagttcacgagtttatcttattagatttctgatacaaaactagggttctttctgcaaaggattttccccctttttcagtgtattctacccctatttatagttacataggagggaagttaattacaatcatattgatattccacaacaataatcccctaaaattatgggatttgatttcgtcccacgtaaaataaatacagttaatatttgaaaatcacatagctgtgatttattcgcttttaccaggtcaatactaacgtggatttagatacgctgtaaagtgtatctcgctgggtcaccttgctgggatagcaacaataaccctgacagcaagctaaagcttttcccatgtctttctcaggtagataatgtaaatactgtcgtttctgctattgaagacataacgctccatctgacaatcacagttcttggtgacaaggtgaactccagcagtcaacatcatttgaatgtcagctnntatctgagagagctgactcgacggggtagtggatctcattgaaagatgtctgaagttgattagtgaaggtaccatgagtatgccttcctatagcaagatggatgcctcactatttgttgttcagattctttcaactgttatgcttagtttgtataatgtatattgtatgctaagtgctctaacaatcaacatgtctcgtctacatctcttcatacgtggcgtggttggtgcctcacgttgtattactgatgctatccttacgatcgtgtcttcatatacgaaatagtttctcgtcgatatgtgaattaatagtttgtacattcttgtctcgcttaagacttcacagtcaacgagttatagatatactctatcagctccgcatttaatgagttattnnattttaatatctcctaatataattgttgttaacgcagattttcgttaaccaaatttgagcctaaccatgataatctcacacagaaaaaataaaagttataaaataaaaagtaagaacacacaaggtttttacgtgtttttgcagttaaaattttgcatagtccacgagtcaatcttattcagatttttgattgtttttcaggacctctcttgtatgagttttttccatcccttttttgatcttgcttctatttataattacatagtgggcagttaattacaaagttgattgtaatcttttcacaacgatcatcccctaaaatcacggggtttgattacatataacgtagtgtaaatgcggttatgatttgaaaatcatatagctgtgattttctcgcttttactgggtcaaagtggtcatgtattaaacacgtctttaattgttgtatatggggatgtctcgacagaagcttggttccagtgatctcaatagcgagctgtggccatttttttcttctgaggtcgacgatgcatgtcttgtgacgatcgctgttcttatttacaaagagttcttcgaagctcatttgaatgttagcttctgactcgtcagggttgtaagcctcactgacgttaacnnnnngaagttacaggaagccttcccatagcgagatgggcacctcacttacttggtctcgagccgacccgactgttactcttagtttgtacattatacaccaagggctttcgtagttgatatgtatcgcttttgtcttcctatgtgtaatgtccttgatgcctcgcaattcatattcagcgacatatggtttcttgctaatatactaagcaccaatttgtatattgattc

SEQ ID NO: 64191 - DNA, 875 bp, Cannabis sativa
attgtgtccttacacagtgactgatgctaccattgtcttaaccaaataatggtgatgtctttgtcttgaaatcactatatctttttcccaattcatttcaataataaatttaaaacaaaatatttatttcaaaataaataattacttttttgctaatttaaaataagatttttctgaacatcaatatataactttatctatacccttgatagtgttgcaaagtggtaattcgtggaccatggacctataatactaagctttaataaattaaattattaattgaatctcatcaaccaaataatcttatttattaaacatggaattgaactcttagtaattacatagttatatttattgagtttattgcagtgtccattattaaaatcaattctagtgattatccctccttgtgtcagttcgtaattatttttgttcaaattaccattttacccttttagctacttctttatcctttagtacggttaatttactaatgaaagtataagttagatccaatctaaatttgtgcacaatttttcaattctagaatgaacatttaaagggaagcaacataaggtcctgttaacctggacacttaccccaatgacgtggacatcaaattttgacacgtggcaagaagagttgagtagtcctgagtcatagcagtcgatttaggaaaggtccgtagccctgcacccaggttgactttaggagctccagaataggtgtttggatcccgccatgttatttccaactcactatcttttagtattctatactataaagacatgaagtatcaaagtccaagacttgggagctaaaaatacacgaaatagcacctcaaaagtcaacccgagcgcgtagggtatcaccta

SEQ ID NO: 64192 - DNA, 1650 bp, Cannabis sativa
aaataagacaaaaaaaacttaactcaataatggatgaatagtggatctttattgaatactgaatctaaagtatgagcattggagattagagatcagaactctcgactcagaccgcctttttagaatagaggaacccctatatatagttgttggtgggttccctttaagtttgtattaaatacaactattatacatagcagcaacttttttcagattcatctgttgagcaaatagatagacatactaacttgagaggttaaaggagtttaatcccaacagtttgcgaccttgatgttggctctttgttgtcacctatataggtttgtataatatgttccatgagctttcgtagatggaaaaaaatatttcccacctatttataactatatgtcatttcaatcagaatatgatcaagtcttctcctaattgaacaaccacaaaaaaaaaacacaaaaacaaaaacaaaaacaaaaacaaaacaaaaattaaagcaaatcttcttggctaaaatcttaaagttaatgttgcacaaccaacaacattacaatcccaattattggaatgtatgaagatggctacaccgactttgaagattagttaatcagttaattctattgtaatctactttatgttagttaaaaagttgttacaaccgattggttgatttcttatttctcttgtactctgcacctctattaatataaatattagaagttgtcctcacaattagttgagcagcataattcattctctccatctccacttagttcatttccattttctctctacttttctctgcaattctagttttcttgctttttttcatggtatcagagcttaatggccaacaatggcaatcaagatccaataaatcctcaagctccagctgcaattcatgctcaagaagctgcactaccaaacaacaatcttctaacactcaatctgagactcgatcgaaccaactacacgttatggaggtcactggttctagcagcaactcgagcctacaacttggatggatatattctggggataattcctcaacctcagtgttttctagctggtaatgtccctaaccctaccttctcctcttggttacgttttgatcaatttctaatgcattggttaatgaactccataacataggccatgcttggtcatgttatcaatgcacaaacctcctctgaaatctagacaatctttgagcaattgtacgcgacaagatctagggccaaagtacttcaaataagaggcttgcttcaatcaaccaagaaagggtcattatccattgatgaatatattctgaaaataaaacaatacagtgactctcttgatgcagcaggccaatctttgtctaatgatgagatgatcttatacattcttggaggattgggatcggaatatgaagctgtcatagtaaatcttacaggaagatctgaaagtctaacccttcaagaagttcaattcatgctccaaagccaagaattgagaataaatcaacttatttcagattctctcactaatgttcaagccaaccttgctaatctttccttcaaaaacaacaatcaagactcccaaaatcatggaggcaaaggatatcgaggatcatgttgggttttatgccctaaataatactcatttcaatataat

SEQ ID NO: 64193 - DNA, 666 bp, Cannabis sativa
cccagatcctcccaagtattgattaagtcaggtggtaaagacagtaaccaactcttcacgagatccctcagtaagaatgggaacaacctcaagcaaatagcatcgtcgttaactttatttatcttgaatgtttgacaaagctccacgaagttagctaaatgcatgttgagatcttttgacaacattcccccaaactggactgtgaaattgaaccatttgcaatatggctgacttaatttcaaagttgttgcttctatggcaggtggtcttataaaagatcgaacccccatcaaattcgataatatgtagtccctacggcaacaatcatgtggattatgaccgttaacctggtctgctatgacaccatattattgtcgttattagccataactacttcttgttcaaccctttcaatagctcttcctaacctcttgtttcttctattttgtctgcaggtcttctcaatctcagaatcaacaagcactcttgcacttggtccttgacgtcgcataaactacaagtacctgaaattagataagaagaattgaataaaagcatgttagggctttcaatttcaattgcatctattgattatggtttaacatgattctattcatattaccaaattctatgcaatagcagatttacttaggtaatttatagtct

SEQ ID NO: 64194 - DNA, 588 bp, Cannabis sativa
  modified_base (109)..(109): a, c, t, g, unknown or other
aggaggcatgatgtcaaagtgtcaaagttaagggggcaaaaatcctaattagtctttaaaaaatatatggttcttttagtacgtcatataaaagtcgtattgtattaantaataaataacactatgtttgaataaaacaatgtattgtactaattattacgaccaatttttttaatacaatatatgttgtattttttaatacataacaaatggttagtattagcttgtattataatatatacaaaggattccagaccaatctctgacccaacttggaccccggacccgaacctagactcaagacctggacccgaacttaggacccggaccttgactcaagacccaaacttgggacccggacctagactcgggacttgggacccggacccgggacccagactcggacccgagacccaaactcggacccgagacccagactcgggactcgaaccttaaatccaaatttggagccggtctgtgacctacacacaagacccgagacttggacccgaactcagacgctaaattcggaccatgacgtagacatgagacccgctacccaagacctgaactcaggacccgggaccc

SEQ ID NO: 64195 - DNA, 1150 bp, Cannabis sativa
accttttacagaaaccacccactgttgttactcactctgctctcttcttttcaccgcttcatccccactctccctccactccactatctttatccgcgccacaaaattcagcttctccactcacatacaattcttcacctttgtttttcgcttatgcttgcttatcaatgaatatcacaactcagctccaattgaaacttcctcggtcgggtggtggcctgtaatagcggtgaactttgttatacttcaagtgactttgagtcttgctttgttattttaactgcctttcatgtctgtattttgaacttatttttcatttgttttacttagttttgttcagctagaatttcttttgagagagtttgtagaaatgttctttggaacttaggtggtgaattgagaaaatggtggggatgattgtcacaaatgggcaactgggtatctctaggtttgaaggaaatggcgcttttgcttttaattctcgggggaattcgttttctccatctgagtcccctcttcgttggggacccagtttgggagtttatttgaacgttaatgataggaggcttagctttggaacaatttgtaaagctctgccgagaggagattctaatggccaattgattggtgtatcgcttccaggaaaggaagctgaatttaggccatcatttaatgagtacttgaaggttatggagtctgtgaaaactgttagagacaagagacaatctaatagttttcaaaaaaaaaaatttgttgataagtctatggaaacaggttcatctgaagggaatgaggatggtgtgaaattggaggagttggaagagcattcaaaccaagaaaaggattataaaagatatgagtcactcaacagaagagattctttaacaaacaaaaatggcattaggaaaaatatgacagatcccaagagcaggattggcatgaaagtaggcaatgtgattggaaaggaaacaaggaagtcaggtggtagggattcaatggacagagattggcctaaatatcagactggtagggaagaggtggagttagatgagaaccacttaggaaggaaatttactaagctagagggatataagagcactgggaaacgaatcccatctcaagctcatgacaatagtatggacatgggaag

SEQ ID NO: 64196 - DNA, 1419 bp, Cannabis sativa
  modified_base (837)..(838): a, c, t, g, unknown or other
tagatgaggaggttcggtggtggatgagaggaggttcagtggtggtggttggtgatctcggtgcctggatttgggtgtcttggtggtgcgagaaagaggaagagagagtgaggaatagaatgagacaaagagagaaggaaaatgaaagggagggtattttgggtagaaattaaaaataatagcatttaattgtataaattaattaggagtctaaattttattagaggatattttttaagcatttaaaatgaaatttccctatgaatattattcggaagaagatgtgtgttgagctttttatgcatggtatgagaaaggagttgaatggatatgaatctagttcagagtttactgagaagaagatacgtgttgagctttatacaaccattagatgtgagcaaggcatttcatcaaattcaaatttttgacagctgtgagttttgttctctaggtttactatgtatgagtcagtacaatcatgtactttgtatacaagcaggtttgacatttctacttgtaaaaataaatattttagttgaagttataaatgagcaatatttttgtttaagtgtttatgagattagattaacatgtatacttaggggtgttcgcggtgcgggtagtgcagtttttaactattttttcaaaccaacccgcacatgcagtttttttaatttctcaaaccgcacccacaccgcgaaactaagaaatcgcagaaatcgcaccacaaaaaatagtgcggtgcagtgcagtttatgtggttttgactttcaccaaataattaaactgtcacaaatacaacaaagcttgaacaacacttgtcaaaaataccataanncttgaaaataaatataaaaaaaagtttcaagtttcaacaatacaataattagtggatttaggctggaccttcacatattggacctaaataaacataaaaattggtatttttataatatgggtgtggtgcaatttgaaccgcatattaacaattcaaaattgtaaaccgcactgcgcattttaagaaaaattcaaattgcgactacaccacaaaaaattttgaattgcattttttttgcggtgcggacaggcagtttgagcggtttcatgaacacgtggcatgcattaatatattatttgtcgatatgcatcaatgaactaataagttgattaaattaaatatatacatatatatttacaaggtagtatataaaataataaaatgttaatatactatattattatgtggatatatatatgctattttaagaatgtgtgcattttatattttataagatttattatgatatgcatacagttataaactagtaggttcatttataaattatgttgtacaaatggttataaggtaaaataataggttaaatagattgttaattatgtgcatatatatatatatat

SEQ ID NO: 64197 - DNA, 1169 bp, Cannabis sativa
aaatgtgatgatatgaagttggggcgagatatcgtcacatgcaactatggttaattcctactttctgtgcgaataagggtatcacttaatggcaggggacatgcaatgcaacaaagagtacaagacgaaagagaacaaaagaaataaggaagataaagccatctcatagtaaaattagcaaagtaacttccgaggacagacttgcaaaaagccaacactatcagcctaaaagcaatagatagcatcaatcttcatcatacttgcacataatacaaacactaaaaagatgaagatcatatagcatcttcctatccttccaaacaaatccagggtattcaactttcataagcgaaagttgacgcaaatacttgtatgacggtaaaattagcagcaccaaaaaatcaaaggaagatgattcacgtaatcaaagaactgaagagcatttggacacaaaagaagcattcatggaccacaactattaaatggaacttacaactttcaagtccaatgtctatccgtcatggaagttatgccgtaaattaacatttaaatcgagagtttttaggtacatgccagtaataaaaacaatacttaatcatgagagaaacgaacccaactagctttggttcaagaaaagttagagttacctacaggctcctaacacaaggtctcataaatttccatgcttctaaaacatttgattcagccctctcagctatccaattacatttaatagcaaaatttttgagaaacatgtagactcaaacttaaatttcttggcaaaattgggctccatatcatagattgcaattttgaccaagatctcttgctaagttggtgacatgaacacaaaaatatccacaattagaaaaaataggataaaagatgaagatgctagacctaatttactatagttgttgaaggatggatccagatatgtgaaggagagggggtctttaatcccccatggtagtatgctgatcgtgtatcataacatgactttgtagtaggaggttatactgttattatttcctatatcttctttacaattaacgtgggcacgaaacaacacctgagactacaacttctcttatcactttttcaacccgtgttgcatgtgtatcattaataagcaataccctttgataaatgtactcatttattcagct

SEQ ID NO: 64198 - DNA, 1131 bp, Cannabis sativa
aaaaatatttacaggaaaagaaaaaggcaggaaactgctcctggtaccaggggccaaccccagcgacacgactcatagctaaagctaggttggccacgcccatgctatccatctgctcttctgaaaattccctctgtggggtttgtgttccccacaaaagttattcctctcgatccccacactatgtagagagagaggagataaagaaggctttggaggaacgcttagaagcaaagatgcgattcttacgcaagcgggctaacgtgctttctgccatgaggagggctgaaatctcagaaggtcttcatacctacccccaactgggcctataataaatgtagaggctttggagaagaatttggtccataagatggggagtgacactgcaccctttatagcaaaactcctagactgggtgtctagtaatgcctccgagttgcccttggagacttgggcaacatgctgtagtgtcgatgtttttgccctagcccatgccactaagcaacaagcaattggggcaaggttctgaacctctccatttcgacttctgccacaagatctagctttcttatccctgcttactacaacaggtagctttgctagcataaaggactgatggagaggttggtacgctggtcacagagcttgagcatgccaaggttgataatcgcaacctgtgtaatgccaatgagacctttatcgcggaactaatagaggccaagcttcaaattgagggcatgaagaaggagaaccagctgttggaagataactatgcccagtagacttgcctcatacggggcttaagggtcgtctccgaccttaacagggagaccatggagaggatgcctggggtagagtcttctaatccatccagcagaacccatacttaagtatctacagcatacaacaatcttcttcttttttttctagtcctccccctctttactctttttattttacggagacattttaattatgccctaactgcgggggctctttgtaataattttaggtctttacccttttccttgaagcttcacttctattttattatactgttttaagagctattatgttaggttgttttaaagtgtatggtttcaacaaccagcacttcaaaccttttttcac

SEQ ID NO: 64199 - DNA, 594 bp, Cannabis sativa
gattatagactctttatctactttcctaatatatctctgtacaacgtttcaacttataatattgatagagaattagtttggagagcttagctccccttttttgttgtaattgtaaccttgtactcgtttcccttttttcttgttacaattacatctaaaaaagtatagatgtgaaagtagaatctttgaagaaaattgtcaagtaatagtagtgcaagccatttagagctttattcagacgtcttctccttggtttgattgtgaatgtcaataaacagttaatgttagcttgccgaagtatttctattgattttgtaaaatagagttgcccatatacttgtttgaagcatctccagtgggagttgcccattaaagtgattttgccacatatgtaatgtgatctaatttttaaaactaattttatgtgaagtgttgctcaatatagacaacgactatataattttttttcattttttaattagaaaaaagttattttgtacccaaaaaaaattattaatttaatgtgatgttgaattatggtggacaatttttagagttttcaactattgaagtattttttaaaaaaatgtgaca

SEQ ID NO: 64200 - DNA, 606 bp, Cannabis sativa
ctaacaaaaacattggaaacaactgcgcgggatcttaatgcctacctggatgccccttgtggtaggtgacactgccttatcttgaaaagcggagttcagggtttgttttcctttatacaacgtgtcaaaaatagtgttcacgtcattaagctattttttagagcaaacacaatttatatcattttattccataaagggaatatttcttttcttttgagaacaacccaattaagattagccatataaaatcaaatcaaggcattaaacatttaacataatatttaaattgaattaaaatatattttgaaaattaaattgtcaaagacatttaacgattttttgctttaaaaaaatattttatatttatattttttatgttaacaaaccacaccaaattaaagtttcttttatatttaagtttttatttttcataaatgtgatcaaaaataaaattaaaaattaatattaattaattttatcaaatgcatataaatttgtactttagacaaaaaagaaaaaataaaaattttacataacataaatttttatatatttgtgatcataatgaactagattgtaatattattgttggattaaacctccact

SEQ ID NO: 64201 - DNA, 976 bp, Cannabis sativa
ccataaatggtattcaagcttcacagttaaatcaaggattctagaattaagttttgaagtttcaagaactcatcatgaatgactactaccaaatatgaagtagacaaatttatgagtcttaatgaattttttatggaggattagatgaaagcactccttgtgcatcaaagacttgtggatgcgaacatgttaactagttctaaggaagaagaagatgtcaagatagtttctcaagagattgaggtgaaagcacatagtgctattctttcgagtctatgagatgaattccttaaagaagtttttgatgaagaatctgccctaggattatggaacaagcttagatcaatttacatgaacaaatcattggccaataagctctacttgaagaaaaaactttacacaatgaagatggatgaaaaaaaagatcttcaaaagcatctagatgatttttgtaagttaactatggacctgaataatattggggtcaaaattgaagaagatcaagaagattcacacctagaattcagctgatatgttcacgaagagtgtaacaagagaaaagtttaggcatttcctaaacttgttgaacattgaagagcactaaaattcctctatttttcagaggcacaatagatggaatggtcaaagctttaaaggaatacaaggatatcttttaccaaatgactaaaatattgttggagattttagtaacttagtgtattgctactgctagtcacatctagtgaactgtcagatggagcaggtttgtgcagccagctctcgaggtagttaaatttcggttaactaactcgggtatctctcatattgagttttctatataagaatttatgtattacttcttaagtgatgatctaaagagaaatttagatgattattacgtttgtaatgagtgaggagggttgttatagagaataaatgtgcttgatcatacctctctcaagtgatttgatttgta

SEQ ID NO: 64202 - DNA, 824 bp, Cannabis sativa
gttagatattgatccaatttccttggggtctaatcatttgcaatcgttcatgaagcttagacattctccacgtttcatatttaggcacatgagataataataaataaccgcataactgctctttgtcgttatttataaacggctatgttgactgtgctttgttgttttcgtcattcaattaatatatatttttcttaaacatctccatggaataatatctaagtgtataatcacagtacatcttgcactcttccttaaatattgagtgaggtatattcgagacgcttcaacgcgtcaagagcgagatgaataatattgaagttgtccttattctggttacatactcacgggtatgcgggtcaatgagctacaaaactcattatctatccttccaaacaatttcataatgtattatgtttatcccgagatggacttgttcacctcgttggtctcattagtcggtagcttttactcatgtctccccataatctatgtgatggcaagttcgagtatttctatcaactatattttctaaggcaagtcatctgaatgcatttattgatgcataatttaagctagttcatattctagctttgttacacgtgtcaggttcatattgctgctcgaaacatgggtataacactaataaattaaggaacttttattggcctattttgttgcaccggtaaaagtcaataatgcaacagtgtaacgttttttatttaacctaaaatgaaacgctacattttgaaacacttttatcggcgcatatttgcgctagtaaaagtcttccccaccagccgattccccacgcgggaattttc

SEQ ID NO: 64203 - DNA, 3353 bp, Cannabis sativa
aaataataatattaagtgtaccattataaacgtgtcatgtgtataagagtgtacacataagcagcccatagtgacagttaaccgaatggtattttaaatttgctactagttcaatagtttggaaagttttactgccaaaatttgagcttagagggtcaaatgcaaatgaaacgacagttggaagagtttaaccgcaaaaagctccaaagaaaaaacagcacaagagtttacttggtttagaacaagattacaatttatatggttacaaacttaattaacatgagagttgtaaagtatttttagttctatattttgttgtaacttgaatgctcgatgcttatatcaactgaagatagatgaaaagtcgataaaaggtaataacttacatctgtttgtgtctaggttgttgaaggaggagagaattttagtgttggacaaaggcaattacttagtcttgctcgagtattgctacgaagatcaaaggtacttgttcttgatgaagcgacatcagctgtagacgtcaaaactgatgctcttatccaggaaacaattcgcgaagaattcaagtcctgtacaatgttgattattgctcacaggctaaacacaataatggacagtgatcgagtacttgtacttgatgctggtcaggtaaatcaaactctacaaattttttttcttgcaagtaatatgtatcacaaaacaagttaattttttcccaaattgtattaagtttcattatggtattgttaacatttttaggttctcgaatacgattccccagaagcattgttgtcgaacgaagaaagtgcattctcaagaatggttcagagcacaggatctgcaaatgctcaatacttgcatagcttagtactagagaaaacaaagaacaagatgggaatagagaaaaacaagtcaatttgtgctttcaattttggaaattagtgaaacttttcaaagccttatgcttttctgctaggaattctgatttgagttgctactactactgtctgtgcctactaatcttggtttttttttttggtatgttcatgctaaaaaatgaaaactacttcatttcaataatttcgttattgctgattagcttattgtttttcaatgaaaatccttttttattttttagaaaaagagggaaaaaatttacacgatagcttttctcctcattggtctacattttaaaacttaaaatgtttcacttaagtccatcattaagcaatacatgcataaatcacaatgatattattttattccttttatccattaattattttattctaatgatgttatttcaatgttagtgaacaacataatcaaagagtttgtgtctagtgatgatttgaattcataagatattatctatgtttagtagtaggtgaggtgaagaggatagttatttgttggagggaatctctcctctcactcttaataaacaaagaaattaagagtgtttgtaaaaatagccttaatcaatacctctatctctctcccttcatccatctctcctctctaccaaaaatgttagatgtgttgtgttcatttcacataagaaccttacagaggaggatgtaagggaaatcatttaagaatagcaataaaatatcctcaagcttagaagtgcaactgtgcaagtgcaacaaaattttcaactcctccttcactgcaccatttttaaagttaaagatcatatcctctaaactgatctaaccttctcagaacataggtttttcagtatacaaacctgaattgaattgtaagcataaaccgaaaagaaattacgaatcaaaagaacagaagccaaattgattccaccaaaatgttttaaggaatttttcaggacaagaatgtttccctaagaaacaatacatacaagaacatgacttaattctaaagacaattttctattcaaatttctgagcaaaagaaacaccacacaccacaataactgcataaacagcacaagtcatgaatacagtatcagctcccttcttaatcatcaaacctatctctaaagtattacctaattgtgtagccaaatcatttacatcggccgatggggtgttattttctcttctagttccttgtatttgaagaagttgtgcaagcacaaccgttgcatttgtaagcaaaactagatagagaggcctgaagcttattataatgctctttatgaacttgctgcctagtataggaaacccaaaatatgatagaacaacaaaaagggctaatgctattgaacaaaaaaggcgagtaagctctgtggctgcaagggcagaagtaatttgatttggagtaaaaaacctgtatttcttctgtgtctgagattccacctttgtttctgtagccaaatcagaaactgaagcacttggatcccttgaagagaccaaagatgaatttgacaagctgtcttctgaagctgagttctggcttcttctaggttcaaatttggtctgcaatttactcaacataggcatcaaactgcttccatcaaaatcatccttagttgggacagaaaagtcagtgctgtgattgtctttgggcaacacagggttagattttctgtcctctccatgagaagaatctgcgaatcagtaagtaagacaaaattccagttcattgttatttttcatagcaaggagaacaaacaaagttttcaagatttgacaatggttacaaccaaataaaagaacaatctttaaggaatcaaaaccataaaaagcttccaaaatgtgaatatgaaagaagccccagtaactcaggaataattagacctagaaatcactataatgtccgaaaaacacatcttcagattggcacctcagatgacatggagaaagttgaaattaaagcataatgaaaatccccaaatcgaatttgcaattataggttttcgaataattcactgcagtaccatgtccaaaataacatattcatgtatgtatcatgattaagaatatggagataaggagaaggagagagagaggtaccgttgattgaatcaattggacgagaatgatagtcgtggtgggaaagcacaggcacaggctgtgtatcttgattaagagtatggagagaaggagaaggagaaggatcaggttcaggaaggttatcgatttggcctgtgatgagagcaagacggtcggaccctcgctccaaaatcctccttctccgagcttctctgctgttcgacgccattgatgaagcaaggaagcttttattaattcgatttcaatttcttagccaaaagacggacccgaccacatcaagaagaaaagaaagggaaatttgattttctatgcttaaaaaatcctaaaattatattcctaaacctaaatgttata

SEQ ID NO: 64204 - DNA, 815 bp, Cannabis sativa
acatccctaaataacaatgctctttttaaaaagtattaaattatttaacttaatatttccactaattatttaattgaacttgtaactttttaatggcgattgaattaatcaaattcattactaggaggttattgttttttttttttcaaagctaggaggttattgaatgtgatgatcataacttacttttggctttgttttttctagtttttttatcctgtatcccacatgataaatgcatagatgattatacatttttttacttataaattatattaatatatttatttaaattcaattaataattttaacacatttttaattttaatttatcaataagttcttttctctctagaaaatatgtaagaggaaataacaaaaacttgtacagatgaaaccaaaagtcttcattctaggacggaatgatcacttttttgttatgaaattaactctctcaagctattaattatattattgaatcattaggcggtaggttgttcgcgagatgtagtcatgcttacatgcatactcgattttgatgagtgacgtactctctattccaaagattattgaataccttgcttaggcaaagaatgctgtaaagaattcttagcaaagtttatgactataataagattaattgttatggagctaaaagggtatcataaaaaaggatgcattacgttggagtatatctacatctacgagaaattgcaaattgatatgcattacatctgtttaattactccatcgtcgccaacatcgtcattatcttccttgttccttaatccattcattgtactgaaacatttttt

SEQ ID NO: 64205 - DNA, 912 bp, Cannabis sativa
tttttttttttttttcttcatattgtatcattctttaaattattttatttcatatttgttatatatatatatatatataaagaaataataaaagaaaagattttaaaaaaaaaataataaaagaaaaaaaataaattaatataattatgcctagtcaatagtatatgttagatcgatttacttttgttttattttttttaagtaaaaaaaaaaatattttcatgaatagataaaaaaaaaaaaaaactaattgatttaacatatatatacatatttgattagagagaaatttgagaactatttaaggtaatgtaaaaaaaataaaaacaagaattttttttttaaaagaatgatacgaagcaaaataaaatactatactgcatgataatttactctaccatgttacatgacaaaataactttactactataactcactcactcttatcaatagttatagattattgttttgagtgttaacgtttcaatacatttcatatattttctttttctttaaagggtttttatattcataattcaatttgatgagtaattatttcaacacatttgtcatgtaatgtttaaattgaaataatcaaaaaaatgaggtcaacataatcatacgttataataagtggtaattaaaagatcaatcaaattagattagagtagcaatctcattatttaacaaaaaaaatacaagagtagcaattaagcagctagcccatttattaaaataaaaagaagacttaaattttcacatacatttattgttaacaagatgctatatgaaagcatttctctcgagaacgtctttaatataaattattatgtgtgatcaatctcttaatttaaatattaatgatcaatagagacgtctacagatggtgagtccatctccaatagaaacaag

SEQ ID NO: 64206 - DNA, 2949 bp, Cannabis sativa
aaaatatagtatatagtgtaataattactacattactacacttacactgtgtaattaccaccctagtaattaccctacctagtaattacacagctacttccaaacgcaccctaattaagacttttaccttttaaattttaatatgtaccaaattatgtttcttaaacttttttggccgttaaaaattccctttgaattattgttagattagaagtcttttgtctaatttcatttaattttatcatttcagtaattgtttatgtactaaattatactcccaaactttgatatctactaaatcatgctccttaaactttcatccataatttttttactaaaattaaacaaaaatctttaaatttaataaatttaatagtttatgaggtatttttatcgaaatttaagattataatttagcacatgtaaaaattcttgaaaaaaaatactaattaacaaaaaaaaaatgtatgttttactcaaaaataaaaaaaacaaataaaaccgactttaccgctttgtttgcaatagctttcccgccaaaacggcagaatcataattttccccattttccttctcttctcacccgtttgattctgccgccatggatatggacttcgatctccttccggatgagcttgaattgctcgaagagagctaccgcatcaacgaagaatactcacattttgaccctactacggaaccctatccttacgaagaagaagaagaagatgaacacttacaacaacagcaacagcaacaatccacctcaaaagctaaatcaccttttccagaagctcaaatcaacgaccacaagcgtactaggccatcagacggccccgatgcgtctgctgagggagtattcagaccgtccgatgagaaacggagtagaatcgatgaagacatagtcctcgatgaagatgagggtttgcttcggtacttgccgcctgaggtaaccgagcctattgtggaagaaatagtagagaatgttgaggaggagaaggttttatggaggtttgcgtcggagattgatggagattttattcccatcacggctcctagcggtggtgatagggtctatgcgaaagtaactacggaggagatgaatgagcgacgggagaaattgtatttgaaaaccccttccgcaggttggttttcaattttcttactttgtcaatttttagttgtttgtttggcttctgagaaaatgtggagaactttgggaattctgagtgagacttgagcattcgaggtgaatttgtgagttgaattcagtttattgttgcaggtcttattggtgaatcaattgatgttctattgcataaagtggaacaagaggcttttactaaggtactacaaagtaatattatcagttcataatcaaacttatgttgtagtatttaagactcaatgttttggaaagaattcccatagtattttgatgctcatcacgttagcaatttgaaaccacacaatcacttcaacataatcgtaaaaacctgttcaaaaatagaattaccaagatcacattgggtttacttcgcgggaatcaaatggcaaaagggtaatggagcacatttgtaggtagatgcactattcagtaacttttaacattgtcttgctattcttttttaagaccaattgtagagataatgcggtattcactattcagtaacttcttacaatgtcttacttgtctttagaaggatcgctaaggtgacatatttttcagacatgccgagtgctaagtgtattcaatccattattgaaaaatgataagcgttggcaatttatactatttttaatactaaaaaataaataaaaaaaaaagataatgagaaaagggtctactatctgttgcaatgaacatgtctctcaagaggtctgtcattttgatgctgcagtccctacaagctagttctggaagccagagtgaaatggtccttagtgaaacaccagttgttcatgaacaactttgggtggataaatatgcaccattttcgtttactgagcttctaagtgatgagcatacaaatcgtgaggtattttactgctttgccagctttctaaatatgtgaggattatgttaaagattacttgaactcttagagaaaaaattccacttcaggttcttctgtggttgaaacaatgggattcttgtgtatatggttctgaagttaggagtacatcaactgaggttttatctgctttgagaagacattcatctgttggtcaacatcataaattttctgggtctaattcttcgaggaataacaaaggatccagatggaataaggaaaattttaaacaatcagatgattctgagaacaaaaatgctaattcagtagctgcccaggatttatggaacaagaagacaagatgtactggaccaccggaacagaaggtgtgactttgttatttcatagttccttattgtttatgaagaatgcgtctgccatttattcattgttagactagcttgattgctttgaatcttaaaatgcttgaaatgtagcttgtttggatttatccttgcagcttccttaatttttaaccccaactctttctcttcttctgtgtcttttcttcctgtaattctgcatcaaaagcattcaatgaattaggtattatgcagtctatgaaatgccgtcaatgctgttatactttctagattgtcttatgactaaatttatgagggtatgtgcccattgtttttactaatcactatttgccattgttctgttgtcaattaagaatcacttcagtatttctgtttaagcaaaacaatgtatcccttagtaacaaaaactttgcaactcttgcagattcttttactttgcggtcccccagggcttggaaagacaacacttgcacatgttgctgcaaggcattgtgggtatcgtgttgtagaggtatgcttttatatctggttagacacatagtggttgctat

SEQ ID NO: 64207 - DNA, 678 bp, Cannabis sativa
actcatttaatgtaccctgagacccatctaatgtactacggaatacattccgtgaaagtacatcacgagacaaaatcatatccctataaataatataactctttcttaatcaatgggtatgtgctcaagaaagtacaatagatctatggttgagtttatgactcatggtgatggagctgaactaaacaaaaggaatatggttaaggtcaatgtagttgaggctatctttgaacaccgtggttgttgtagcttttcttgtgttggctatttcgagttgttgtggtggtatcctccgaccagatcttgctaaagcattcagttgaataaagtgtaataatgcatggactaatgttattgttgagacaagttatttagttttggtacaggctgttcgtagtaacttggcaatgcaatcttattttggtcgcattgtacaggattgtagagctctattgtttgaattagagtcttgctcttcgtttttgttaagtatatacccctaatagggtagctcattatctaaatagaatttcctatttttttgcggacgagttttctaatttaataaagtgttttccattaaaaaaatagtttaataatattttttttaaaaataaatagcttttgatataattttggggaattaactcatatactatttttttttttttcaaattt

SEQ ID NO: 64208 - DNA, 2077 bp, Cannabis sativa
taaaataatttccaacaaacaacacatgggttgtagcattattctccaacatcacacacttaattacactactcaattctcgagtaaagtgtaccagtctgccttgttaccaaattttaaactcgataatttcagaattgagttataactatgagacacacttagatccgccttgaaaatatatttctaatgcaagttgaagcatgtcatttgtatacaaattgagagagttatgtccgttttaccgaagggcagtttgtgttgttttgctctagttgcgagcactaacacgaccaaatagcagctctcagtcatgcatgtgttttggacccctcgagctgtattttgacttattttttgatggcgagtcatattttggatgtcctggaaccccaaaacctcattttgaatatcaaacccctaacgggagaccattgccactagtcggggccaaacagtggcagtggtcagccatggcttatggaaagccttggatggtgtttcttgcttatttcaaacatatggatgttagaaaaccactttgttcacattggttgttggccaatttattaagagagcactgccaccatttttgccaaataaaaaagtggtagtagtcgcataagagggttatgggcccttgagtgacttttctcacttgtatttgatacatggatgttggaaatagaatttttccaaagaaactctcacttttatgtggtggccaaccactgccatcatttgtgtcacaagtgtggtagtggtcgaccaagtggtttctataccacttggtagtttttatcacttagttttaatatgttattgatgaaaaagtaatttggtaaataatctcatccccattccttgtggccaaccactgccacaatttgtaccacaaagatggcagtggtcggctaggcttgtccattggtgagaaatagtttctttcacttgtgttgcactccttagtgttgagggaacacattttgacaagttccctttggtacttagagaagggagagcactgttatctccttgtggtagtgttctccaaaaactagagagcattgccatcttcatgtgacaatggtcgcatatgccctattgcatggggttcttgtgtaattttgactttatgttcaattctaaaccttttttatacccaaatgagttaagtccttgttgatttccttgtcgaattgaggtctctagggtgaaaacgctcgtgcaggcccataaaccctagtttgggcacccttaagggtgtgattcccgacaccaaatggttggttaatatttttgagtctcctagatgtgccatgaggctctcaagtaggatgtcttaacttatttgcatttataagttttggtcaaaattgtagggttgacttgagtgtcttcaaggtactcttggcatgtgggcccctgtgcaaagagtatctattttattttattttttttgtgaaaattgggtataacatttgcctccaaaagtatttgcttgtaagccttcaagtaatgcttttgtacttttcccaaggcttgcacaaaaaatacttctttgtagagtgtatgaatgttacatctattctagagatgtgtgcatgggcacgcccaatgtccttaattattttgaataggtgtgcatggacatgacccatgtccttggacttatttgtgtagagttcttaaagcacgtgaatttaccttagaatgtgagctaagttatatctcatatctcatgtggtagtcgagtagagttatgtctcttgctcgatttttggacttttgtaaggtttaaaactttttgcataagttttctttttccaatttagagtaaagttatatttctttcttgaatttgaaactttaacgaagttttgtaatctcttgcttaagttttgagcgttgagtagaattgtatccctttctcaaactctcccttgagtagagttaaatctcttgctcaagttggttggcaagtaaggtttgccgtgaatagagtttcattctcttgttctatactttttggttgtgcattgaagttgggactcacatgtgtggatttgtatatgtc

SEQ ID NO: 64209 - DNA, 870 bp, Cannabis sativa
ttataaatacaattacatttgagagttttatatctttatgtatggataagttcatcttttattggttctgttccactatttcatttctactattaaaaatgttcatttctactattgaaatcaatgaagattcaaaatgttattaggatattttcaaatacccgctttataaagtgttagttaaaaatgttattttaaatataataatatatcaaataagaaatatcttttatttaaaaaattatcatttgaatttatagaaaatattatatatatatatatatacacgtgtgtcttctcaacataaacctaatttccaaacttagcttccaatttcgaaggttccaaattcagtccactaaagtctttcagctcattattctcaacaatcaatttacaggtttttttttctttaaatttctttttcttccatatatatacatgtatatatgtacgtatagatttatatatattgacatatattacgtttttctattaacattacagcttgctagtatttcaataactatggtgtttaataattttccacatgggattaaatttcttcctaatgatgaagaaattgttggattttatgtatacaacaaaaacttcaaccctcatctacttccatccaatcacattttggatgtgaatatatatgactttcatcctcaagaactcacgggtaagaattcaatataacaatattttctttttattattattagtttttctttagttttattactcatattatgcatctgttctcaataatttacagatcgatacccgccgatgactgaaaatgagtggtatttttattataaaaaaaattcattttccacaataaagaataataaaagattg

SEQ ID NO: 64210 - DNA, 1125 bp, Cannabis sativa
  modified_base (312)..(325): a, c, t, g, unknown or other
  modified_base (741)..(742): a, c, t, g, unknown or other
aatacaatacaatacaatacgatctaatacggcattccaaacgagctctaacattcttaaataacacatccatctcattaaaaaaaaaacaccctttctttgttgaaaaaataactccttacaattcctgaaaaagaaaaaaaaaaaaaactttgaaatgaagtttggttactctctctatcttatcgttatctcattacactatctacaaattgaaaataacgttcaatgagagaacaaatgaataagatgtatatattgacacaccatactgatgataaagatataattcataaataataataataatannnnnnnnnnnnnnaataataataataataaatgctaaaatgtaccagtagtacctagtacttttatacgtgtcaatatcgctattagtccaattaagtatcgagtccaatataatttaaagtaataatttttaggcgtatcactaactaatcacaagacgaaaaatattattggtacttaacagcaatgctcaataataataataataataataataagagcattgatattggatactagtagtgcctcactttttataggtgtcgacaatattttacgattgattagcgatattatttcttaaaagtttttttcttaaattatatgaaattcaatacttaattacactaataacagtatgacaaactaagaagaatactagacactaataatactttttaccaatcctctaataataataataataannataataataaattaataataatacatccaaaatctaacaagttttatccaaaatatatagttagtcaatttttttgaataatgaaagtcattcttgaccttttgtagccccacctacgtctgaatagccaaacacaattaatttatatctatatttttactttatttaatttatatctacaatatttatatcctctatatttttactttatttgttttgatattttatatcatatctttataaatataatttaataaataaattttattaaaaaagcatttatttaggatttttattaattagtttttaaaaaatataataattttggtggcgtttggtaacacttttttaatcagtttttttatttttaaaagtagaaaagt

SEQ ID NO: 64211 - DNA, 776 bp, Cannabis sativa
attgaattagtctaagtggcttatgttttttactttgtaaattattaaaaaaaaaaataagaatttgcatgtcttataactataatgaatacatttatggcatatttactaaattataattggaatcagaataatcaattgaagaaatgaatcgggttaaaatataaaataattggaaacaatattttattttgttgtttactaaactgaccggaaagaaaattagaatcattttgttttatttatataatcgcgaaaggtaatcggaatgacttaatttgactaaattactattgttagaacatgtaattattttttatttatatatttttgaagggcatacttgtctttttcatttttaattaatataaagtgagttaaggaaagaaaaaaatattccttatgaaaataggaaagaatcttttcttttattttttctttaatttgtgtgggtcccactagtttctcccatttcaaaatttaataaacaaatgaatggaatcaatcacatacaattgattctgatttccttttaaaaaacatgccattataaaaatatgtacattttaagtacatattctatataactataattaatatatttataactataaagattcatttttattactctattttttaaaatacatcattaaaatttcatttttttttaaattataaataaagaaaataaaaagataagataaatatttgtaatgactttaatttaaattataagatttagataaaactatagccacatttaatataatata

SEQ ID NO: 64212 - DNA, 828 bp, Cannabis sativa
gtgactcgtctgcaagtttatggcaagccttggagacgttgtttggtgcacactcgcgtgtgaaaatggacgagtatcgcactaagatacagacatacagaaagggaaccatgtcaatggcagattatctctgtcagaaacgtcaatgggctgatgtcttaactcttgctggtgacccatatccagaaaaacaacttgtctctaatgtgctttctggtttatacattgaatacttacccattgtgcttcaggttgaagctagaatctcaacttcttggcaggaacttcaggacattctcctaagttttgacagcaaattagacagattgacaactctgtctggaacctccaaacaacctatctcgggttctccatctgctaatgttgcagccacaagaaatcctggttttgcaggaaatagatccaacaatcctgggcagttttggcatggaaatcgtggaaactctaatcaaaatcgaagaggcagagggcctggtagattcagaggtcgtgggggcagaaatcaaagcaacacaaagcccacatgtcaagtgtgtgggagatatggccatagtgctgcctattgctacaattgttatgatgaagcttagatgggtactgatccaaatgcttcgaacagtggaaacaaagtcaatcaaaccagcaacaatggaaatggtacctctgccttcatagccactcctgagatggtgaaagacactgcttggtatgttgattcaggagccagcaatcacattactgccgactcaaacaatctcactcacaagaccgattacaatggtaaggagaccttgactgttggtaatg

SEQ ID NO: 64213 - DNA, 828 bp, Cannabis sativa
  modified_base (684)..(689): a, c, t, g, unknown or other
gagtgagagctgacttgacccgaaaacttactgttttcatttaataaatgcagtccaacatttttctggatcagagaagtcaaattctgtggctgatctccaatcttgaaatctataattaaaagatttacagtctagactggctatggtcagttccatatgaaacttcaaaaagaaaaactggtcaaaaaacaactattaatattggagcattactcttggataattctactgggttagtaatatttttttaaaaatatataaaatttaatatatatatattttttacaaaatgattagaattactcatgaatttacgacgctcacgtcttccaccggcgctggaacctcctcgaactaggagctcatcgcctaattgcagaacatgttttgtcaagctatgggcccaggggcaaagccaagacttgaatgcaaggaggccaaattttaaaatttagtatcaaataaaaatttataacatatatttacagtttctttcatatgtcaaaaattatctataaaaaaaatatcaaaataaaataaaaagtacactatattattcaaattagaaataataacgtatcctgagacctattattacatatcatgaaactcatttaatatacacgaaatacttcggtaaattaggacaaaatcgtgtcccaataataataataataatannnnnnataataataataataggtatatacatttcaagaattgatgatgaggtccataacatatatagtacgtactaagtactacatgagacagaaattggcgtgtgactacgtcattacttggtgtgtcttagtgcaactccat

SEQ ID NO: 64214 - DNA, 942 bp, Cannabis sativa
attgcttgtttctttttctccaagtgattcctaaggtcattgtatttgtcgttaagcttctgtcttaaatcaacagggggtgtttcagtttttccttcctctttccccgggctcttgatgcacgaatatgcttttttggtcttcccggtcttgagggccagttctctctctaaagagcctacccctctgtggaccttttccctttgggaaattagagcggacctttcgtggatcctgagccttctaattcttttctgggaagatgtgagatttctctttggacacccttctgagggataccggatagggcttggttcctgacttttacgtctttggatacttggtgcagatttttctcttatttttcctggtccatgaggcatggcttttggatgcacgtaaatgcctaccatctctatagccttttgatggggaccattatctcttgcattttcctattttgctatttctgtgctgccagttcagcttcgtgatcagttgcttctttcctcagggacaataactcagtgtaactgccatcatcataggcgtcatattcttcttggttttcttcgtactatgcgtcattgtttcttcttttcttctacctccacgtctactcgtgaagttgcttcctcgtcccccagttctctaggaccttggggggacgaggctgacgtctatgatttctagtctccaccattgtactctgaatcttcttatattgttgttatgtaagtaaagctttctacagctctcaatgaaagcaccaaaatgtagaccgagctttttggcagctaaatcattaatgcactaagaatgatttaaagagagtaaatacaagtatttttacgcaattggggcattaatgagccttaatccatgagtctctgatatttaatatgcacgtatctcttgcagagaatgttctgctctcttttt

SEQ ID NO: 64215 - DNA, 800 bp, Cannabis sativa
gatctaatccttgtgggagggccacgatagaggaagctaaaggcatttagcaatgtctggagttctgcgattgattgatcgggccagcgtgtaaataaacttaaaacatctataatactagcgatgggatgaaacggggaatttagcaagcgcatgggctcaacatggccatgaataatattaattatctaaggtttccattgttttgttatcacaataaagatgctgatttcaacttcattctggataacctagtcttgaaacttcatgggtaaaagttgaaatcattgtcttaggctggacgtgctactttgataaacttggtcgggctttccttacatgtctacgcgatgcaaaccacaaagttatccaagaaactagcatctaaaattgatgggatggtaagagatttttggtggggttgtgagccaggtaaccagggtatctatttaaaggcttgggatcagttatgccttcccaagtcttggggtgggcttggcttccgtaagactgtggaaatgaatcaggccttactagccaaataaggttgggctctccttattgaggagcaatcattatgctacaaggttttgaatgctaaatatctcaaaggtaaacctttttgaagtgttcatccaagaattctgactcttggttttggaagaatattatgaagactaaagaaattcttatgaaaagagcttgtaaacttattttgaataggaaggatactaatatttggaaagatctatgggtttacatggtcggaatttctatcctcatcctgcaatcgctcagcc

SEQ ID NO: 64216 - DNA, 1637 bp, Cannabis sativa
tcctatacattttggatataatagaaggacacataagctaggatagagggcttttatttttatctagttggcttttattttaaagggttgttttgtcttattattagtacttcctagttacactattttatgttatccagtgcctataattaagggggaaggattcatttgtgtggtagcttagaattagataagagtagactctttgtggagagaccaatcctcccaaaagattgggaatttggagagacgagcctcgcaaaagctcgatattgtaacttcgtgattgtttttcagaataaaaatcatttgagaaattcattactaatatttattttgggaaatagctgatataatatttctaatctaggactattctatcaaccgttttgtctcacaaatgatccatcaacgtttcatgctctcgtgaatgcaatttttcaaggacttacttcgctataatttgctggtattttttgatgacatcctggtatacaactcctctttagaagcccatgtcgatcacttggaagatgttttgagacggccgcaacaacaccagttgtatgccaaccaaaaaaaaaatgccggtttggacaagagtgttgagtatttagggtacatcatctcagcttagggcatttcagcagactcgactaaagtgcagctatgacacattggcctgttccaaagacactcaaggatttacgagattttcagggattaacaggatattaccgtaagtttgtcaaggattatggtacaacagctagaccaccaacagaccagcttaagaaggatgcctccgggtggactatggaggtccaaaatgctttccaaaagaagacacgtgttcagtgttggttttggccttgtttgatttttccagctcgttcattgtggagacaggcacgtctggggtcgggttgggggttgttttaatgcaaagcccatagcttatttcagccaagctttgtctcctcgatctcaagccaagtcaatgtatgaatgtgagttgatagaaattgtgcttgctattcaaaagtggcgcctgtacctccttggctgcaagattgtggtatgaacagatcagcgcagccttaaatacctactggaacaacgattggtgtgggaggagcaccaacggtggcgtactaagattatgggatatgactttgaaattcaataacggtcggggctcgaaaacaaggcagcagacgcgctatctagggtccataatgaaccattactggttgccatttctgctcccaatgtggtttcaattctgcatttgcaagaccaagtgaaggctgatcctatgctttctctagtgctttgagacttggaaaaaagattagatgggggcgggtacactctagtgctaggggtgttgcgtttctgtggccaacttctatgaccatctacttctccatacgttcccttattattagatgagtatcattgcagcaagattggtggtcattcgggggtgttcaaaacatttcagcgcttggcaggggacttgtattggtcaggaatgagaagagatgtctaaaagtttgtggccgagtgtgcaatttgtcagcaaaatacgtacaacctcttcccattcctgaacaagttggggaggatgtttc

SEQ ID NO: 64217 - DNA, 838 bp, Cannabis sativa
ctttcaacttactcctctctttctttcttatttttttctttttatgaaaagataattaattcatcttaaagaaaaatgactattaagctggcacaaaaaatattatattttgttcaactcctccctacttagaaaaaaaaaaatacaggaccagtcacgtgactgcatccctgtcccatgtggatgcatatatacacatggtgacatcacatgagatgtaaaattttcttttttaaaaaataaaatgaataatgtagtagtaaagataaaacatgtccaaaaaaatatagctccagtttgttttattttattttttaaataaatatagatatatatttaggttatgtgttttgatttttgaaggttaaaatagaaatgttatatataataattaaataaataatattattttagtaaaaaatatttattttaaagttctataaaatgaaatataatagtatatttatgaaataaataaataaatacaaatgctcaaagcttttagaaaaaattatgtcaaaaaaatttaaaaaaaaaataaaaaattttaaaacaataaattgaattcaaaatttattaaaaaataataataacaatgtcaaaattgaatgaagaaattttgtagattttaaaaattaaaagaaaacacacatatatattatatattaaaaagaataataatgatcttttgaataataataatatattaagacaattaaaaacttgtgatgataatgaggcaagattttttcagaaaaaaaaaataataaaagaaaaaggttgtgatcaaaacaaaaataaaactagtgataacaaataaaaaaattataaaaatttg

SEQ ID NO: 64218 - DNA, 1357 bp, Cannabis sativa
ttaccctattttgcaaccataaacaaagattgttattgtactgaatgaaaaatatgatgtaagttggatgagataaattttttctgagagttaagttggaaagggtgtatgtgcatagagagtatgatccaagtacattatgttgaaaaattctcttgtcgaagaaaaaagaaataaaaaacttcataatatgaaaaataataatagcaagagataaatttaataggattataactctaattatgtgaacaaaggggtatcaaatgagaaaaaatattatcgggagaaaaggaaatttatgatgaagggttttgtatattttattagatttgtaagtttatggtgtgaaactagcctaaatgacattcttatctaccatttaccaaaacctaacattacatgtctataaagtcctttttatctacatgactttggtttacattagtggagataaattgattatacaagcctatgattatcttgaatattttgtggtaaggaaattctttatgcacatagattacatgtccatagagttagtagaattgacatatacacatttttattaaatatacaatattggaagttaaatttaaatgggttgaaattctagtcctttgtttgaaggacatattgaataatggaaagagagtttgtattttgagataaattacctttggtctaagtttcttgatttgtcatccaataattgacttgttagtttttgtttctttttaatttttagttttaatttaatttttttcattgcttgaggacaaggactagtttaagtttggggatgtgatgagtgcacatttgtacactcattcttagtcaattattagatggattagtatttatttttatatagattaaatgtgttttctccaagtgtgtaggtttgtgctgaaaagacattttgtgatggactgagatctttgagcttatttttgagaatgatttcatcattttctcgaagagcttatgaaacccaaaatgatagagctcgttcccagcattccaaaacatgttaagcaaaaattatgcatgatttactaagcaaggtcgaagtagaaaatttttgtactgggctatagccccgggggtctgcgctatagcgcccgattgaaaaaaaatgattttttacggaaaaaaaaaaagataatttcacacgggtttgggattttttctcttgggcgctatagcgcggggtatagacgctatagtgttgcatgtatcatttttttaagaaattcataattctaagaggattgatctatctttgttggcctatataaagaaggatgtaaatcagattaaagggagacgaatagagagatagaaacaagcaactttg

SEQ ID NO: 64219 - DNA, 652 bp, Cannabis sativa
taaaaattaatcatacccaacatatataggagttcatagccattcaagcctcaaaaagtttagctcatattcaaatcaaaaaataaaatccaaactaaaagtttgtcatccatggctgttgccttttttacaaattatcaagtttgtagtatttaagacaagaaagaaaagaaaagaaatatataaaagaaaagggaaaagagatgcaaacaaataaggcttttgttcttctctttttctttcacttgggtcccctttttctccttcctcgtttgtactttttctttctgcacttaattctctctaaaaaatggcagctgccatcatgttgaagaagaaggtgtacttagtctcctatttttgttgttgggtaatagggtacaaaataataccctaaaaatagaagcccaatcctttccaatcttggctcactaggtttagtcttcttcctccataataaccagctggcctaattttgagtaactcacacgctcgtgctaatgtggacaactaaaattagtttttccaactctttctacgtcactgcccaaaatgctgaatttgttgtagcattgcttcaacaatttagtccagtttcagcttttgttcccacttcatccttgcctcttttcctttttcctaacaatttaat

SEQ ID NO: 64220 - DNA, 734 bp, Cannabis sativa
gggccttagaaaacggttctgctccaggtgccaaatcaatgacaaaatcaatttttctctgcgctggtaaacccaaaagttcattaggaaaaacatctaagaattctcaaacaaccttgatgtcctctggctgaacaaactcaggccgagtggtatccaataccacgaccagaaaccctagacatccatctcataacaattccctggctgttaatactgaaattactaggatccgagatccctgaactgatccaacaaaagcaaacggtttttctccttctggttggaagattaccatcttcctcttacaatcaatactggttgagtacttggataagaaatctattcccagtataattttgaaattcgctaaatccatttctattatgtcagcactcaactccatatcctcaattctgatcggcatagacataatccaccttttggagataactaattctccaccaggcagtagggttccaaaaccctgattcatacatatcgtacggtctacccaatttactaaaaattatggttcccacataagagtgactggctccagagtcaaataacacagagaagtaagatttgttgaccgggagctgacctgttaccactgaggggctagcttctgcatcagcctgagttatcgcgaacacccttgctggagcgggattcgcggcagtcttctgtgcttcagtcttgagttggggacaatccctcttataatgccc

SEQ ID NO: 64221 - DNA, 1097 bp, Cannabis sativa
aaaaatttagtacaattaaagatataaattttatataaaatcaaaattattaaaattgggtgtctttaaaaatttttagggtgtagataaaatttttcttcgtaaaatagcattgctattatgaactttatgatgctcaacaccatggtgagttgtttgtacttaagtaaatattgaatttgaagcatacggtgtgttattatatatttataattaaggtagcttaattatcatcatcaaaacatagttaactgtttgttcctttatatgtatgggtctgcttattatgcaaacatcataattagatagagtgtgttttatgaagtgcctaaccatttttaatattacatatatatattaaattaaaatacgtaaaatttaatagtgaatagtgcatgcgacatcaattgtagtattacaaataaaaacaacaaaataacattaattaaatataaaattaatatagaataatatatgagaaagaaaaagagtgattgtggtttgtagtggtgtacgaggatttggagtcctatatatatgttatatatgaatccataattaaatataattaataatctattattatattactttcttcaatatgatcaaagttatacttttgttgttgctagccacgatctgtagtaatccagtatggagtagtaattgcatagagaaggagagacaagctcttctcgacttgaagaaaggctttgtcgattatgacaatcttctatcctcctggacaagtagtagcccagattgttgtgcatggagaggtatcagctgtcataacttaactcattatattatcactcttgatcttcattctgtgtcctacaaagaccagttgggtggtgacattggtccttctttgcttgaattacaacatttgaggtacctcgattttagttacaatcaatttactaaaattcctgagtttattggttctttaagtagactcacatatctcaactttgaaggcaatcctattttgtccattcccttttctcagcttgggaacctcacaaggttgcaatcttgaatggctttctcatctctcttctcttaggatcttatcgttgagtgacatcaat

SEQ ID NO: 64222 - DNA, 781 bp, Cannabis sativa
agctagagttaaactattcaagatcaaactcacttgagtttcctaatcaatgatagctccatgattctcagcttcctggaaatgactaaccatcaagagtaggtgatcacagacatttcgataagggtttattagttcattgatgaagttcttggttgcttcaaaatgagattgatccgatgtcatcccaaacagttcagttaactggttcataatttctgcagccgtgagagtgttgccaaaccttatcttccgagtatcaactatgcaagacaacataaagtattgagctttgttgttagcattttgccaacgctcatacttttccttaactgtcttgattgcattctcacttggttcctcaggaacttctttagtaaacatgaacagtgagttttcacctatgagagcaatattaatgttctctttccatttgacaaagttagctccaatgagcttgttgtcagtcaacaatgatataatagagttgttcatagtcatattagatactacaaatatcaacaaatagaaatcaaataaggtttaatacaaaattatacacaaattcagaaattattaaatatttagcaagtaagaatgacatgtgaaaatacaaaaaaaaaaaaaaaaaacatatcctaaataattttcaaggttttcaactcaatgacataagtttcccgtttagagagtaaaatatatcactagttaaatatagttgttagcttatccaaaatagacaccattttagcaaccttttattcattcaagatgagaatcc

SEQ ID NO: 64223 - DNA, 1014 bp, Cannabis sativa
taactcatgttctctcctgaagagatacttctgataccggtcctccaccgaggctataatttctgcccggagcaccttttcagcgttcggggtacgaatgtttgggcaaaagaccttagagaggttgaagtcgtccaccgattaactccctgagatgagcttggcctttcgacagttctctgttgtgaccaactcccccacgttaagaccatttctgtcataggtggagaaaaccttggcatgttggaggaccagttgggtaggagcagtgcgaagtagaggagggatcctgacccactccgtgaggaggtccgggcgatccacggcttggaagccggaagagaagaagaagcggtaccgatactccttaacgctcttttaaaaattaaaagggaccaggccctcattagtaagatgggcccgaagagtgaaaaaaccactcttttttggagacagacacaagttcataaaaatataaaatttcaatcgggctaggtgaagcccagcctctggataaataaaaaataaataagcctaagagcaggtggtaagcttagagaataagttggtaaggcgcgaggccaacaaatacaaggaaattaatgaaataatcatgaaggggaagcatggctccggacataagatgggtctggctccacgctccaaaacccccacagttgtggttgggcttctttccgtcccgaggtaagcaatgaaagaccccagacgcggacagcttaatcccggcaactatcacgatcttctccaactgatgagcgcagattagggtggagcagagttcatccgcttcccagccattagagtggcacgtgtaattctcttgggcaaccgggcccttcataacttcctccatggttgccagagcagccgcccccttcttagaagagttagttcctgacgcaggagtagacattttttgttctaaaaaaagaaagaatccagtagttagaacctgaaccaaaccctaatgttaaaaaagggaatgggggtccc

SEQ ID NO: 64224 - DNA, 836 bp, Cannabis sativa
ataaaaaatgttcggaatatacatactcttaattttaggggcgttcatccaatttaatctgcataatagctcaaatctaatccaattcaatccgtaaaagtgcggtcattttagattagtttctttttaatattaaattatttaatatttatgaaaaaaattcacataaccagcaacaatataaaacaaattattgttattttatgtctccaataacaaattaaaataaataaaataacaaataacaaattcaaaggaagaaaaaaaaattgtatgtataaagaaatgtttaattttcttaaaatttgtatgtagaaaaaaattatatataagaatggaatatatatttgatctattatttattgaaatataattgtattatgtgcgttagacttttaaattattattttctttacattaaaatgttaattgtatatataatgtattaattttttttttttataatatgtattgattggattagatcggttacttttatatatatgtcaatcaacatcccatccctataagtgtagattttaaatttccaattcaaccggccaattcgtacaagtgcgaatatccatactctacgaattagattaaattagatcatgcaaattaaattagatcagctattttataaacactcacacctaattctctatctattcttaaaaaatgatatgaatattgttaaaacaaaatggatatatatgatatttattggaaattttttaagggattacaatacattctcttagcatcgagatagttctaattaatctcaaatttataattatagtatagtgtgtattaagagctcgtttggaacg

SEQ ID NO: 64225 - DNA, 3271 bp, Cannabis sativa
  modified_base (2365)..(2367): a, c, t, g, unknown or other
tgtttaagatcatgcaataaattttcttgggcttgaaaaaattgagataaagcattctcttcatcagattgcattattgccacacaagcatcttcgggcggagtagaaggaagcaagtttaagggcggccccggttgcccatctttttttctatctatttgaagtggcccactaggagaggatttacctctagcaagtctcgggctcccatgattgccctcaagtaaaagaggctccttaccaattactaactgcggcccaatagatgaatggttaaagacagaccgattgggcccaccaatagtattactagaagtaccctgcccaatcacagatagagtcggcccacctttacccggcccactacacaactctcttccttgaacattaatcagtgccacgtcaccattcttcttttccaaaagctcgtccattaagttcacattgagcccaacagaactcggcccagaacccaatctattaaccccaacggtaatatcatttgaaatatttaagccttcctttgaccggtcctcttcttcaatcctcaaattggtatactgaacaggtgccttatctgaacacaggagctctgtgtcacctcgaatgcccgaaaaaggagcttctctcacagagggaaagtccacagagagcttttcccttccatttaaattcatttcaactctattcccatttctggtaatccttggactccgaccccctgccgtcaccttgggtacccaaacctgctcgccaccctgagaactcaccatcacctcacgccctgtccctttcctccactttttcgaaacacgggcagcgctagccaactgccggaccgcctttccaccattagcaggggcagacgatgggccaccacgaggaggcaacaccgcctgagccgtacctcctgagaatacatcatggaaacgagaggccgtggacagccacggaccaaacaaaggatgcaccgaaccatccaccgcagccactgtgaccggagaagagaaagaacacccctttctctggtgacccagacgaccacattgataacaaaagataccaattttttcatacttaaactgaatccaccttttgtcccctgaaattaattcaaagaaacaacccgaagcaagggggttgagaatatttatgtcaatgaaagctctgagataaataccccaagttgccggtttctcctcatccaactcaatctgaatcacatcaccaatccttcttcctaaaagattaccattttcaatggagaagtactcttgaggaaggttatgaaactgcacccaaagtctaaccacattcactgaatttgaactctcaataccagggccccaagcatggagggcaaaggtgtagcctctaaaaagccaaggggcattatgcagagcccagtctctatcttccacttccttatgcttacttggaaaggtggttgatatctctatttaatgccctattttagctggtaacattcatggggatgtgtgatattaaatataaattctaaacactatataaaaaaatttaaagtgcttatttaaaaatgtaccttttttttttatgaacaaacatttgttagaaaacacaatatttgataactctctaagttatttcttagataatttcctaagaaaaataagtttttcggcaaaagtttaatactttgtttaagtcatagtaattctcactaatctacacttaaggttgtgagtgaatgcttcttttcatgttctttttcttcatgttatataatgtgatcatgaaatttctttttttctacttttatatatataatatacatagtatatatgtgtgtcgtaatatttatctaaccaatttcttataatatacatcttaatttttatcaattataataaaatctttaacaataaaattgtaaaatgtatgaggttctatctcaaaactaattaataatgagagaggaaaaaataactcataaatcttatataccataggagtttctcttggatacatatacatattttatagactcatgactaattttctttatttcttttaagctccttatcaatcatttcattcaagagaaaaaaaaaatcctgttcttggcttaattggactcaaatcttaggctttcaattttatgtataaatgggccgaccctaaaaatatatgagcccaagacgaattaaatttggggtcttcaaaaatatataaaaaaaaatatcaaaagaagagtgttatgggatttgaaccatgaccttagacattattacgtctacctcaatcagctaagctataaatatttattatttataatttacttaaattttacttaaataaaagcctaataattttttttttattnnnttattttgggcccccggaaagtgtgggccctaggcacgggcctagcccgcctatgcctagagccggccctgtgtataatcagcaacatgatatttgttcaataaaatgaggttattcaaaaaaaaaaagaaaaattatattaacattttgtaaaaagtattcataataattttcatttgttgattaaataaattgtaaaaacgcggtcttcatttaagtattagaaagataaacaactcttgtattattcagttgtgcataaaatttttatattattacttttaatttacatttaaatattcttgatcacttttttacttttttttattcagtactatttcacatgtgaattatatgctacatacatataaaagtaaaattcatgctaaatttacatatgaactcatgaacaacaagattaaagttcacacataccaaaacttttttttttctttttgaacaaaaaaacgttagaaaaaagaaaaattttaaacatatgaaatgttatattaagcttaaagacccactaattaaagggatttctttgtggtgactggttagtgcctttcttagcaaaacaatagggtcctctttgagtttgaatctatatattttgagagacttattatcaacatttttatgtttcattcaagttgttcaagcataaaataatattgttctttgactgaaattggactcaaatcctcagctaccaaaaactaaaaatactaatttataattatttgtaagtattaatataataatttggagcatatcccatatatattatttcaaactaaaatatatatatatgtgaatattaaattatactaataatatattacatgtaataataacaaatagactttaatatttcaaaaatgtaattatgtttaattaatta

SEQ ID NO: 64226 - DNA, 921 bp, Cannabis sativa
caaagatattaattaaatggaaaaagaacaaattaaataataataggaaattttacataaatgaaagagaaatttgtggtcatactttcttatattttcatttgtatatatagtacccttaatttcttattttttttttttgtagtattagcttaagtttatttttgtttgtaaatttaaattatctgttacttgtcacgtaggattattattatatacacatgacatatgtttatttattcaaataatcttaattatttaaacgttataaaaattattaaaaaaattaaaatcaataaaaaataattacaaaataaataaaaaatgaactaataaaatttaaaacactaacttgacggtctttctttcttcttatttctctttctttttttttcctctcgtgcatgcaaccaaacggcgaacggcgagctttcttggtcttggccgttggtcttggtcgggaagtcatgacagttgtggtaatgatggtgggtagaagaaaaaaaaaaaaaaaaagaaaaggaaattatttattttattgattttaatttttataatattttttttttgaaatgtttataatattaatataattaaaattacttagacagataaatatatatatatacaataataatcctatgtgacaactaacaattaaaattaacaaaatttaaatttgtagaaaaaaataaatttaaggtatatagtaattaactaaaaaaaaatagagaattgtatacaaataaaacataacaaaagtttcactgcaaatttatttaaattaaacacttaaataatgtttattatttttattttaagtttttctttttcaaaaatgttggctatacgccgtgaaatttggtcaccaagcaatcaaatttacaaaaatatttgggcattgggtatttggaatatgat

SEQ ID NO: 64227 - DNA, 1390 bp, Cannabis sativa
ttgatttaccattcaaaaaaaaaaaaaaaatctcatataagataataatttttttaaaaattatactaaccaataataataatatcaatatcacaattatctaaatactcatatcaatacttttttaggaacccatttcataattatttttataatatataaacaaataaaaatatatattagaatgtttaaagtatataaaatataataagaggaatagatgaggcttgtgaagtcgttttcaaaaatggagtttttggaggtgaaaaaaggagttcgatcgtgggactacaaaaggccaaccaccatatgagcgcacatggctccgttacccacctccaatttccaatttctgtgggccccacattttcttttcctttcttcttaaataaatcatttattaaaattaaaaattatcaaaacttcctaatattatcctttatatatatatatatatatatattacatagtttgctaatttttagttttaataatatttctgttcataaaatctttaatttatgtttcaaatttagagtggtaaaattaaattttgggatttcttatatatatatagtttaattattattaaaataatatttctaatacttaatgtaatggtaaagccttaaaaatctcttaatagttctaaaatttaatctttcatagctaaatattaaatttttttaaaaaaataaaaatagattactcacttgaccttttagtttaaagtaaaaaattctaccactacatcaaataatatttattatatttttttattaatattttatttatatattaatattttttcacactttcgggacctgagcaattaggagtccaaaatgcacgcctaactcgcctattctcggggctgacggagctagctaaccctgtccaaatctatatcaatccgaactaaattatttgagactaaaccaaattaaatttaatatcaatagttagtttgttcaatccgcactatctataattctctgaactgttttaaaaatttcattggcagttcgaaccaatccaaacagcataatacgtctttacatgatattatgtatataaatatttgaaaagaagcgtaattaacttggatttatattatgaaatattgagaccaagctagctagtatatatatttaatgcttacatagtaataaataataattatcatcatatataaggtgattttcaattatctttttttttttcataggttttttttattaattatctttaatcttatcattattattgaaaatcatataataataatataagaaaaaaaaaaaaaaaaagctagcagttgagagctaatagtacggcaaggcaaatgatgtacgtgttttaactcgttatcaatttttttttttttttt

SEQ ID NO: 64228 - DNA, 741 bp, Cannabis sativa
gaatgtacttattacattttgcaggagtagatttatcgattgaaagttagtaggtcatagaaccatcagagacaatttcattgtttaaatttcgataaagggtgatattattttttcaagaaacttcaaagagataagttttattttttcaagccagacgttattttttttaatttttttaatgttattttttcaacccaattagagaggtttattcatatttacttttttttggtaataactatcaacaaaggaagggtatttttaatgagctcgggtgttgtttgaggatgttatagctttattatctaatttttttagaacagttttatcacatgtggatttcgataaaaattctgcagctcatggtttgacaaaatatatctttcggttagacaaatgagttatcttgattcgaggaggtgccactgctgattgtgaattgttgcatcgttaatcatgtgtgattttttaaccatcatgttaaaaaaggttaaaaaaggttaagtgtataaaaattaaaagataaaagactatcaattattctttcaattatttataagtgatgataatttagttttaatgcatattttgtgtatgtgcatcatttaatatgtgattaattaacttttgaaaagaatggttcccatgtataggtttataggtgaacgttacaataatttaggcattaaaatgattcaatatatgattgaataataaatgaacaactacaacattgat

SEQ ID NO: 64229 - DNA, 1936 bp, Cannabis sativa
  modified_base (1832)..(1848): a, c, t, g, unknown or other
  modified_base (1911)..(1911): a, c, t, g, unknown or other
ttaagaaaatgacaaaatactttaagatgaagttaggtgaaggaggatttggttctgtatataaaggtaaacttcgcagtggtcattatgtagctatcaagatattgggtaaatcaaaaactagtgggcaagactttattaatgaagttgctactattgggagaattcatcatgttaatgtggtacgactagtgggtttttgtgtggaaggttcagtgcgtgcccttgtatatgagttcatgcctaatggatctttaaataactatatttttacagaaggcaaagaaagaaatgattcattaagtgatgagaaaatatttgatatctcacttggaattgcacgtggtatcgagtatcttcaccaaggatgtgatatgcaaattttacattttgatattaagcctcacaatattcttttggatgaaaattttactcccaagatttcagactttggcctagcaagattgtgtccattaaataataatgtagtcttaactacactcagaggaactattggatacatagctccagaactattttacaaaaatattggaggaatctcccacaaagctgatgtgtatagttttggaatgttgttgatggaaatggctaatcgaaggagaaatttgaacacacaaacaaatcattctagcaaaatatactttcctttatgggtgtatgaccatgtcgaagaagtaaagagcattgaattaaacgacatcacaaatgaggaattggatgagaaaaaaataaaaaagatgattatggtagcattatggtgtatacaaatgaagccttgtgatcgcccttcgataggtaaagtcatagagatgttagaaagccatgttgaatctctagaaatgcctccaaagccatacttatatccaccagattcttaaaataatgttgttgatagtgaggcactacatacaattacttaatggaataattattagagagccatgttgtatctctaaaaatgtctcctaagccatactttcatagaataattattaatatttaatggtaattcgaacatttctttatttgttgatgtttttatgttttatttatttgtctatagttaactagggaaccaaactatgcttggcacgttgttgctcaacttctttaatctcttgtagatatttttatacttagtcagtgatataatctaaaatgtaacattttgatatgtgttttataaacaaagtaatattattcaattttaaaataaaatttgttcttttttaaaatatataaaaagatgttattcgtgtctttgtcgagaaacatgtggataataaataggagtcaaggtccatcagtggacccaaataacacgtattataggccgagccatataccaacctattctttcaagaaagcaattacactcctcgctcaggcaagcttctgcaaaagctagtccgtatccagaaggattctagctccgtgtagctggacgaaccctccaatgtgtatctggaagccagctgtagactaaggctttcttagactatctcataataacactggctcatagactaaggctcattaatgccctaaccacataaaatctctgagtgttctctctatatttgattctttaaatcacattttctttagctttaatattaaataatttattttctaaaaatctcggtaaatattttggtaatttcattgagagctaaagaaaagcagtgataccatccactattacattcagtaattatggtactcacccaaacccagtcttgtcttcactatactgatcctaaaaaggatgatgttgatcccaaatctaaaactgttggaaattattttannnnnnnnnnnnnnnnnctcacaagtatgttgtttaacaccttaaatatgaacttacttaaacgatgaaataaacacatntaaagtttaggaaaccttacactgg

SEQ ID NO: 64230 - DNA, 1970 bp, Cannabis sativa
cacggccagaagtaggttgagtgttatcagtcgagttcttggagttggcatatggtcgaacaccaccaaaacggccattgccaaaggtcaaattagcctgcattttgacagctaaatctttcatagattgatgatgttctaaacggcttccatgagaaagaagtaaggcttgaacttcttcaatggtcagattttcactccttgatgttatccgtgctacaacagagtcaaaatctggtccaagaccatttaaaagttgtaaaatcaactcttgatcatcaactggtgaaccagtaacagtgagagcatcagatagagattgaatcttgtcaacatattcagagatagaaagacttccctttttgatattggagaactgacatttgagttgaagacgacgggctttagtttggctcgagaatttctgttctaaagcttgccacacagcaaaggagctttgatagttagccaccgatgcaagaacaacctctgtcattgaagatctaagccatgaaagaaggagctagtctttacgccgccattgaacatattcaggatttgaggaaccattgacaagattctttggtggtggtactccggtgaaaaaatttcgtcaagatcgtgtccaatcacggttggcacgacctgggatttccaagaaaggaaattaatacggtcaagtttgagagtgagagaggaggtgagtgaatgagaaaagggattccatgaggtagcagcagaagttgtggcagaagccattggtgcagatgcaggatcggttgtggaagaagccatggacggtagtcaactagcgattgatgccatgtaagaacaataccatggaaccagaggaacagaggaaaagaaaaacagagagaaaaacaaagttagaaggcaaaagctaatcgaagtgattagcaagactttatttatatagagtttgtacagagtctttacacagcaagaggacataacagaaaataactacctaactaataactaattaacagaattaacagaaagccaagataagttattaacacttaacagagcaaaatggacgtaaggactacagtacaaaacaattgtcgagcccaaggagtaaagctaaaatttttcgagtaagagaattaaacggtaacaaatataaaaatatagagagtttgaccacaaattaccctactaattatataaaagaaaaatattaatcacccatgaaccttccatttgagtgtgggtctagctccatcggcccacatcagataccggatctctaatatggcaatatatatttgttgttagaatgaaaaagtttacatttagagcatatcagatttaatttgaagggcaaaaaggtaattaactgccagagaagagaattgatttttttgttaaaattttattatattttagattatgaagtaaggttgtataatgcaaccataagctgaacaagcataatcaattatgtcccattattagcccatgtggtggtggtggagaatgaggtttgacaaaatacttcaattattttgagctgtaaaacagctttgcttaagtattattaggagacacctgtgagtttgtgggcacagcatatcttttttaattttttcttttttacttgtatgatttccattccaaccaaattaataatcctcaaaaaaaacataagagatcagatctttatacgtcgttcaaatgggccctaagaaatgtctaaaaccaaaactaccacacaaaaatgaagcctttggagtatggttgcttcccttttcaaacattctcctaatacacgcttgcctatatttttatgtgtcttagctttttctgaaaatcaacatctaaacagacaaaattgtgggtttttgtcgaccattattccaccacagtccaattcaaacaaactatatgatttagaaagctttcgtagaattatgaacataagtttgtcaacttctagtgtgtgt

SEQ ID NO: 64231 - DNA, 594 bp, Cannabis sativa
caatctttggactaacacattgttcacacaaaataccttataattgtcacacatttatcaccacaaacatgcatgaaattcaaccaaatattaactcccctttggattatttaataaatttatgaatcacatacacgcatttatcataatatttttattaaattaatttacacaaaagagatcactttggtgatattttgttttaattaatttaattaaatattagatatccttaataaattttaaatcaaaatttgaatttaattgttactgtattattattattattattattattatttaattaaaattatataataataataataataaattatcgcacaaaggattactttcaaagagaatcatatatactgtaatcattagtatatccaatatactatttatactgaaaagaatagattactaagtaatcacacaaaacgttggattgtgtataacttatccaataaaacaaaattgaactgtagatgtatgtatatatcaacgattgaataaatttgtagtggtgggacatatatatatttatagactttcaagattttcgtatactgtttcaaaaaacagtaagac

SEQ ID NO: 64232 - DNA, 802 bp, Cannabis sativa
ggcattaaaaatacaaataatcacgtagagcttggaacgagctttccaacaatatatagaactcccaaaacgaagttcggatcacaaagttatgcattatcaaattttaaactcgaatctgcccagaaacaggagggcgggccgcgacactcccagatggggccgcgacactcaagaccaattcccaggtctcaaaataggggcgagccgcgacatgcaaaagctatgccctgacacttgggttcccaaccaagaaaaaaaccagcaacaaccacgaatttcagccactaactaaatcaatttcaacccaaaacttaaccaaaactcaaaaaccatcaaataggtttttaacaattattcagagagtttagcacacaatttcatgcataaaaatccaataatatacccatgaaaattcaaattaaacatcacacaataacaagcttcttacatgagcatatacaatcaaaactcaagctcacaaacttaaacatcaaacccattcaaccttatttttttccagcaacaatacatcaaataaaacatgaattcaaacctagaaaataccgtaaaatctcatccaatactcaacaatatagaccaaaacaatatcatgcacttcacacccaaatctatcaagattaaacacaaattctctttacatggaaattcaagaacattacaaccttttgatgctctttcaacaataacattcagcaagaatttcaactaaactcagtaaaagaaagctacctcaattcaattcaaagccaaggtcaacaatcctcaagtaccaagctcc

SEQ ID NO: 64233 - DNA, 1111 bp, Cannabis sativa
  modified_base (385)..(387): a, c, t, g, unknown or other
agttcatctcaataaaatatgtatgaatataatatttagtatcttaaagatacctcatcactttgtataaaaaaataaagtggtcttaactttagttattctctatcggctgagctaagacggcttgtgctaattaattggaatagtcttaataatatacatttatttgtttgaataagataacgcataccatttaagggtgttcctccaatatttttaggtctatccaaatccgatctaatcatatattgaatgttagattttactatccgatccaattaattttagtcattcaatcgatccatccattagatattagattagatcggttctatctattggatgtatttcatatatatatttattgatttaatttaaatttatnnnatattttagacttagtattttttaaatcggatcggatccatacaatattttaagtacagatgcaacgtaaagtcttattcagactcttaggcatacattaggcttctaaaaataaaagtaaatgaatgttcttaatttattctcattccagatcattttatagatgttggcttgagttgaatttatcacacttaaagataaaagtaacacaagatgaataatgcataattttatttaataagagatgatgtcgctactctctaattaattaaaattacatatatcatatatattctttatctcaaaatagtaatttgaaatgttaattatttcaccttatatcgtaaactttatcattacttgcaagtaatctattgtctatatatgaaataaatattactctcaccgactttttagtatatatgattctataatgtctcttttcaaacctaaaggaaaaaaaataacataatgaaaataccacttttgagatgtttgtttaaatttataggtatatttcttaagcttgcatatgttcaccactattagagaaaaatctttatagtagtttgtataccttaccctctagttcactgtttggaattgattaatgaattaaaacgagtaacaaatcccaatgttactataataaaatcttttataaagacatgtaaatctcctttttgctattgattcttagttcaaaatgaacttcttaacaatg

SEQ ID NO: 64234 - DNA, 1575 bp, Cannabis sativa
  modified_base (1541)..(1550): a, c, t, g, unknown or other
tttttcatacacaaaatattgctaaagttctaagatttattaataaatatttgctacatatgcatagagaatgagcaagagagaaatcatgaaccatctacaatagaatgttagatgaaacaatatggcgtatcaaaagaagaaggatgtgatgaaatgaataggcgtgtggttattgcatggaaagaaataaacgaagagtttctgaaaccaactgaaggagcttcacctatatattagttcgtgccctgaatcttacaagggttatagatcttctctacaaaaatggtgataactatacacaagttggaaaagttaccaaagatagcgttgctgtcttgctcattgatccaattccataataaattagtctctcatactttttatatatatatatatatacatttatataatatgtactcgcaagactcctaattaaataataagcttgttaaataattaattaataaatagagtatttattaataaagctaaattacggcataagtttctaaaaacttaagtttgatgtagataattctccaatatccaaaattggcagtaatagtagttcccaagatcacgctttttgtttgtccgttagtcattttattaacagatccgttagatactaataaaatgccacatgttaatttttaattagtcctaattataattttaactaaaaataattttaaataaaaaatgaaaaaaactattttaaaattataaaattattagttttttcttttctttttattcttcttcgtcttcttcataaagtaaaaaatattaatagttagaaaaggaaaatttgaatatgtatgcattcattgggccaaaattagtcccctaaacctaagctattcaatatttgtagaataggtaattttttcctaaaactccattctacccctcccatttgaacaactgattctctctcttcctcccgtctctctctttctctcgaacccattctctctctcgaacccatgtgagcacaaagacccactcgaccgaacccaccatctcacgaagacccactcgacccacccctgtcgtctccctcgctctcagaccacgaagacgaccacaaaactcgaaccactaccacacaatgtcagccatggtaagatttcgtacctatggtatttttcaatgtttttattattgatttagggttaaaatattgtttattgatagatttagagtgtgtgatttgtgagttttgggttagatttggggttagaatatttgttatttgtgagttttaggtgagaaactataattttagtcaggcctgatgtaggcccgatgcatcctaatgttaaagatggatttaggttgaagatgaaggtcagatatagggctcgttgtagggcccgatggtttgtccgattgtctctccaaatttcaagtttttgagttaggcccgataggagcgatgtagggcctgataaaggatctaattgtctttcgaaaattcaattttgtgtttggtccgataggatcgatgtagctagtgttgggttttatgcccnnnnnnnnnntccatttcaatgtaatccattttat

SEQ ID NO: 64235 - DNA, 1120 bp, Cannabis sativa
  modified_base (87)..(89): a, c, t, g, unknown or other
aaatctaacattgatgaaaattcaggcggcatgatttagtatatgttaaagttcgaggggcataatttaatagatattaaagtctgnnnagcatggtttagtacataaaaaataaatgaagtagtaaaattgaatgaaattaaacataagtctttaaatctaacaatttcaatagttcatgaagaatttttaacggctaaaaaaatttagagggcatgatttggtacgtgttaaaatttagaagataaaatcctaattagccaattatttattaaataattttttagaaactcaatactctcttgaaaattctcaaaaattttatatagagatcattttataaaaattagatcattttgtatcattgcttaaaacataaagtaccattcattttgtttaaaagaaatcaagtggtgttgattattttccatcgattccaccaactatataagtggcgtttggttacaaaataaaaatagaataggaatgggaatagaaatggtaataagataataagaatagaattaaattaaatttctattcttttgtttggtaaaaactatggaatgaaataaaatttttattattttgaccaaaatatcctttacttttttaaaataattttgttttataaaattaccatcaaagtaaaaataaaaaaaatgatatatatatatatatttatgtatcactctcaaattgtattttttttagatttaattatcaaataataaaatataaataaatatttaatttaatagtctagtttacattaaatatttaagtatgttattcatataatttaatcatcacacatcctctatttatataattttaataataatattgctttcctataattctgtaaaaaaaatagtaaacatattattataatattaaatgttgtagaatatatttgttttaaaataaaaaaaatattgtccatataattataactttaatcatttatttatgagaatagtagataagggaaaataatttttggttggtatggaatgacttttcaagtcattttatttagaaaaagctattccttaatttacatgaattacaatttctattggaatggattttttaatgacaataaacaaaccaaaca

SEQ ID NO: 64236 - DNA, 656 bp, Cannabis sativa
ggagcctatccaataatatgcggtaggcggatttgtccaacgggtgcaacactctggccagagaaaccatatacgagctgagtgcaagggattaagtcttttagttggagtcccatcttctcataagttgtcttaaatagaatattcgaggaagctccattatgtaccataatccgtgccaccatcttgtttgcaatttgcacttctacgaccaaggggtcattgtgagggaagatgatgtggttgccatctacttcagtaaatgttattgttggctcccccacacgtggtaatttaggtttcctttcttccatggtcaagatttcttcattttgttcatactacaaggctcgagcatacttttctctaactttgcttgagtctccagcaagatgtggaaccccaataataacatgcagatgcccgtccactggtggaggcatcaattgattctgattattgtctgcttaggcgtccctttgatcttggtcaaccttgacatacttctgtaagtgcaggttattctttctaattaaaaactcaatttactactttaaattattacattcgtttgtgttgtggccgtagtccgcatgaaagagacaaaactgggttgcatctcttttgctataattctttttcatgggagatggttt

SEQ ID NO: 64237 - DNA, 947 bp, Cannabis sativa
  modified_base (363)..(367): a, c, t, g, unknown or other
aaaaataaaaaatagaaaagagccaccataatattcaaaatcctcttcttctcttctcaatatttcgaagccttgagtgattaaataattacccacacaattcaagtcaatactcaagatagtgtggaagattgtgtagaattttatcaactgaacggattaagggttagagatttgaacgaaataagtcatttaattctgctgcaaccaatgtaaggtttttttataattttttatgtgtttattttattgttttagagaattcatatttaggatgttagattatagtgttataatcaaacatacatgttagtaaatctagatcctggtaaaacaacatccaataactggcctcagagccannnnnatgatttattttcatgaaatatggatttaaaatgatgtttggttgatttggatgtgttcatgttggtttatgtgatatttgatgattgatgtgatattacaaaaaatttaatgaaaattaatgttattttcattttggaattattttatttgaaaagttaatgaaaaattaaacaacttttctttttaccgaacataatttggtttgaaactaaaaagttatgattttttgaagttttggaaaaatcggattagggtttcccctatccgtgcacgcgagcctgatattttggggccaatttttagacaaaactcagttcagacaagatcctaactgagatttctcaggcaaagctcgagcctgaccaagaaatattgcccagccaccctgcatgcagcctaaaacctcggcccatcccccttgtccgtgcgtgcatactccccggatttttttttctttctaatttacaaattttttaacttttaaaatcattttttaatgaagtaaaactcaaattttagtagatttttatgaagaatcttatttttcaaatataaattatcagattaaaattaatttt

SEQ ID NO: 64238 - DNA, 812 bp, Cannabis sativa
gagttgtttaagaaatatgaaacacatgtattttataatatgttagtaggtaaagtattttctcaagtagggaccttttttagccaataaagtgttcccacatcaacaaattatagagaaacacttgattatttttagttttattatgaaaataattagttaattaaaaactttaagatttcttcattttttttattgattttttcctaatttgaaaattattcaactgatcccttaaattctgatttgtttctgatttctttttctttattttgagttgttaaattatgaaacacattttataatatgttagtaggtatatagatacatggaatttcatataatatattataatttaaaaacaaaagagttagtagaaacaaattgaaaaagtcaaataaatattgcatattatatataaattaatagttatatatcaactatcatgtcaatgttatcttttggccatatttgccatgttatcttttcataacaaataatatttatttaataacatttcttttcatgatgttaataaactattaaatttatcattaatttattttaacaaaatataattttgaaacctcgtgatcttgataataagactttataattagaaaattaacataaaatagttcttataattttaaggaaatatactaatttactctttgtgtttaatgtgaatatccgatcggattttgtgttttgtttaaataaaaattcatatcttgcagtttacaaaaagatcaaattgatactttaagcttaatttttaattaaataatttttgaacaaattgacaacct

SEQ ID NO: 64239 - DNA, 775 bp, Cannabis sativa
aaaagatgatcaatacacattagacatatacatactggacaaatgagtataaaaaacacaagcaaaaagtgaaaagtttgtagatgtgctttcacctctcatcaaatacattaacatgattaactatttgaatggttataattatatcaaaacaatttcctttcgtatatagacaacatatcatgcatttgtatagtcctccaaaaaaaaacacttggattgggaacagtggtatacatgggttccttttgagtgaagtggctgccagatgtgagcactggtataataaccagtccagactataaaatcttaagtgaaatcattcacaggagactatacatgggttgtattcataatggggggaagccaaaacgaatatttggtgatttaaaagaaattaaactgagcacatatttgaatatggtaccgtggacaaacttcctcgttgagcctctggaggaatctcaaattctagttcaaggatctgcattcgacaaaaccaaaagaagaagctcacaattaaatcaaatacactatgatggcattcaagaaaactgtttaaacattgaaatgataaaacatatattttgaaaagagattaggaattaacctaaaatttgaactccttttacgacagcaagacattataaactagaaaaagaattgcagtaccataatcacaaacaagagcaaggtagtatagaaaaaaaaatgcccacttttcatgggaggcaaaaactcttacgctcttagagaatcaaaatttacttctcta

SEQ ID NO: 64240 - DNA, 2233 bp, Cannabis sativa
tgttctgaccatggtgaaacaatgacagaaagctttttgagaaagagataagaaagatattttaaacttctgataccatattatagatctaaaaatctaaactgtattcagtgtaaacaagatatttatacaaaggatcattgatcgaactcaaacaagattgatttggttacaactaaaaataaaaacctacctaacaacattgctaaccaacctataactaacttttagctaaccgattacataacagttttaataaactaaggacaccccttttcgaaagaataacttgatcatgaactatcttgtttcttttgtaccatatgcgctaaagaaaatacaacattgacactaattcatcatttgttaaaatatcaacacactcacagataacacatgtagaaatctatattaggagaaaaggacaagagactaaaatgagtctttgagataatagaattgagattggggctgccccaaagtgcatgaaagtagtctccaaagcttcataagaaactggacaaaaatgagtcgaaagaacacgatgagcaaataaattttttatagtagggatccaattcaagctagcctaccatgcaaagaccttaacctttgagggtattaattttatttttgacatctttagtttgacaaaaatattaaataaatgtatcattattttcaactgagttatttattttgtttccgtaattttatatttatattgattaaattatataatgtaggaaatgtgactagtttttctctatatgaaaagtgagccgtaaagaataagtttagagattcaaccaatatatctatctacccacctgtgtatatatgattctttgtaagtttcctaaaatatttttttagattttttgtgaagaaaaccgaagcaagaaattcttggattgattgaagatctattttaggaaagtgtctagtgagttgtggtcttgtttagaccgtgtgtgaattgtcaataatgtctatattgattataaatacatcttataacatctaggtcttgtatctctttcatacactttgaattgtatttatatctttaaaaaaaagaatctttgtttgttttgtagagaagagattgattgttcgtcgctttatctgtgtttatgtattttgtattgtcttgagtctataatcaagtctacaaaagaagaagaacaatagagctaccttcaagagaaaacttttcaagtcttgccttggggggaagcaagcactcttcaaggaaatcgaacggagttcgagcacttgacgcttcaacaagattcaattaaaaggtagaatacattaagcttacggcatacaatacaagggagtctaccaaagtcaataactttgtattttttagatctatctaattaattttatctcacgacgtggccccgtagactagtaacaatttgtaaaaattatttataccacgtacaaaaaccttgtgtgtttttattttcttgcattgtttgttttctaattttattttgcaattacagagttatattttgtagcctatttcaatactatatttattattaattaattaaataataaatttgtaatattaaaatacaaaatttcaaaggtataaataatcccaaatgtttttcaccacaaaccattaatttccgagcccaaaaattgaccccaatataatggcatttcaatagtacaaatgagggagcttcgcctattcaaggagatcagaatagataaaatttgttgagcttcatttaccgaaaagagagagtcaatgagctcacaatttttttaattaccattctccaacttaaaattactcacctgatatcacaatgttcatgaaaaagaaaaaaaaaaaaaataggagttgcaacttttattatgtttctaaatattatgttataaaatacaaatcacaagttttatttacaccccaaatcttataaaacattttattttaataatttttaaattatatatttttattatacatgatttaaaaaaattataaaaataatttaaataatttttaaaattgatacaaaataatataagaaaataaactttttaaagagtgatcttttaaaattaatttaaatttacttttattaatattagaatttacttatagtacaaataaaactcatatgtactaattaagcacatcaattcttttattgcattgatttgagcatggttattaaagatgatataggcattattttgt

SEQ ID NO: 64241 - DNA, 2441 bp, Cannabis sativa
aaactgatataatacccaagcactaaggaagttttggttaatttagtatgtcatctctaatatcaaattgaaaaaacaagagagcatacttatgatcgaatctatgcaattcatctttgatcatatataaaattatctcctaaataaaagaaataatattaaaaaacaaaaaatatatatatagaacatacctgtttgcagaagctcatcatccattctctttgtaatagaataaaaaagtaattgagaaaattaagagtagatagaaaagagtatatatatgtggtaaccaccaaatttagtttggtgctctttctaagcaaaactaaataaaaaattgcgctctttttttttttttttgatttttttccaacaactgcatgaattattttttgaataaaattattatgtaaaaaagttaaaccatatttatatataatatttaaacacaaattagttacaaacgatttttagttaactcaatttaaaaatagatctttataatatcaactatatataattagataaaaaaaaatcaattgaaaagggtcaagtataaataagaggagactctactttgctcataagattctcactatcaaaaacgttcttgaaaaattttgagtgtgagagaaagctcttccacttcaatgtgtactcaaaaaataacttgagaggaaaattaaattattaggattgagagaatacaagattgattgaaagtatagaaggttaccattggatttaagtgatttggaagctccattaatgatataaattgattctttgatagtgcagcaactgagcttctctttgaggtgagctccattgatgatgtaaatgttttgtgttcttctatcttttgcttcaaatgtgtgtttgatttgtattgccttaaaaattactgagttttggtttctcttctagagttttctttgtagatctgaaacaaaataatttggggcttttctttcttgaacaatttagggcttttattgatattgggaaaggaggtatttattaagagaagaaaacgacatttcttttaaaaaagaaaagcaaaaaataacatatataatttgattgagggaatacttagtctcaatcatagttctattaactctatagtggccctttgtatatatacgacaacatatatgagagtgtacagttgagtctcaatcgtggctctattacaaagattataaagattatttatgtcattaaaaacatatgattttatgagttgacatcataataaagatcgtagaaatgacggttgtatgagacacccaagcgattctcctgcatggatgacttttgatcacaaccacaaggatttttctgcagatcctcgaaatgttagacttgggctagcttctgatggaatgaatcatttcaagacattaagtgtaagttacagtacatggccagttattttaataccatataatcttattatggatgtgcatggaacaactaaattttattatgtccttgctcatacctggtccagaagcacctggaaataatactaatgtatatttggagccattgattgaagagttaaaggatctgtgggaaattggagttgaaacttttgatgcatgtacaaaaaaaaaaattaatttgcgagcatcactattatggactatcagtgattttccagcatatgctaacttatcaggatggagtacgaaaaaggaaaatatgcatgcccatgttgtcatgaagatacttgttctttgtggttgaagcacattaaaaagcattcttatatgggtcatagtcgttggttagaaaataaccactcatttagaaatgatgaaaagtcttttgatggcacaaaagagaaaagaatggatccaacaccattatctggttctatgatattggatatgctagaaggatacgaaattaaatttggaaagaaatttgttaatcctcaattgccatatggttggaagaaaaggagtatattttttgaattaccgtattggaaggataatttactaagacacaatcttgatgtgatgcatattgagaaaaatgtatgcaaaagtttagccgagattttattgagtttagatatgaaaaacaaagacaattttaatgcgcgtcttgatccaaagtttataggtatcaaatctgaacttcatccaaaagaactgtcatactgcctgcttgttctacattaagcaagtatgaaaaaattatcttcagtcaatttttagagacaactaaggtcccagatgaatatgctgctaatatttctagatgttttaatgtaaaacaacaaaaaattcatgggctcaaaagtcatgattttcatattattatgactcaattagacccactagcattgagagaaagatcaagttcacgtgttcgtctacatataactactttaagcaatcattttcgcatgatgtattcaaaag

SEQ ID NO: 64242 - DNA, 1769 bp, Cannabis sativa
  modified_base (649)..(654): a, c, t, g, unknown or other
  modified_base (686)..(708): a, c, t, g, unknown or other
aacatatagcttccttttgaacttgtaggagtgtcctgatgacttttctagtgtacgcgttgagagaaaacgtagtttatatgcactaatagtcattttaatcgaaatagtgaaatctcacatttcagataatggtacccctttagtaaaatgtggaccgcacccatctcgaaatatcttttgccattagtcacaatgaattcgtactacttagacatgaatatgaagattggtttcgattaaaatttggttaaaatggtcccgtatttcaaaattttaaaatattcttctttttagggtaaattttaacaagtttttcgttactcttacacgcgttagtgttctgttaatatctcaccctacagtgcccatctccaaaaattatgaaatttcacaggaacgaagccaagaccgttgtccaacatttttttattggacgcattgagagaagtagtttttaggcactaaccgtcattttaatcgaaatagtgaaaacctcacattttcgataacggtacccctttatccaatagaaaagtgatggacaatagtcttggcttcctctctgtaaaatttcacattttttttttatttgtgtagggtgagattttaagagaatacaattgtgtgtaagagtaaggaaaaaacnnnnnnaaatttaccctgaaaagaaaaatatttttaannnnnnnnnnnnnnnnnnnnnnnaaccaaatttaacatgaaactaatcttcatatttgtgtcttagtagtacgaattctttgtgactagtgaaaaagaaatattttgagatgggttcgaactacatttcacaaagagctaccactatcagaaatgtgagatttttactatttcgaatatactaagtgttagtgcttgaaaactatgttcctctcaacatgtccaatagaaaagtaatggacaacggtcttagctttattcttgtgaaatttcacgatttttcaagatgtgttaggtaagatattcagagaacactaacgagtattagagtaaagaaaaaaaattgttaaaatttacactaaaaaaaaattagtttttgaattaggggccattttatctaaatttaacgcgaaaataatcttcatattcacatcttagtagtactaattcattgtaactagtggcaaaaaatattctgagatgagtccgggtcacatttcataaagggccactattagaaatgtgagatttacactatttcgataaaaataattgttagtgcttagtgatggacaacaatcttggctttctccctgtgaaattttacgatttttcgatatgtgtagagtgagattttaagagaacactaacgaaaataaaaataaagaaaaaacttgttaaaacgacaagaatattattactttattttattatagatgaaaacaacatcattgtttacaaataacaatactttaatgaataatttataaaacaacaacattttttaaaaacaacagtaatttagaaaaataactaaaatataacataaaagaaaaaacgacaataaaatcataactgaagatttttttttctttttcgaaaatccatttttagaatccaataataagtgtcccaaaatatgtttttgtcattagttatattgtgggtattgtcccaaatagaataaatagtagagtattgaactatatataagaatataagctactccattcatgaccaattaattttgagatggaaccacctgattctcaacaaacaacatttttgacaaactgcaataatat

SEQ ID NO: 64243 - DNA, 1105 bp, Cannabis sativa
gtgccggaaaattcgctggagtttgttgtcggcaccgaaaaagttgacgaagttgctgtcggcgccagaaaagtcatcggaattggcattgacgccgaaaaataccaagaaactggtttcttggtaatttttcggtaattttttcggcaacaatgccaattctggcgacttttctggtgccgacagcaactctgccgacttctccgataccgatagctactccatcaacttttccggcaccaataataaataaaactgcctaaaaataaataaaaatattaaatatggactttgaaaacctaatttacataatggcatatcaaataccatcaaaatacctaaaaataaaaaaataaataaaaaaatgccatataaattgattaaacctaaaagtatcatatttaattaaataagttttaaaatctcatattgggtgtaactttctctttttattttaacaaataggagcatagtccattttttattttttgtcatttttaggtatttataaaaagagataattacacaaaacattgttttttgtaaaaaaaaaaaagtataaatttaccttttaaagaagaggatgagttattttgtgttatttgttattattcattatgttacaaaactagttatatttcaattataaccggtttgagttattttgcgttatttattattattcattatgttatagaactaattctatttttatttatatctcagacatctatttctggtgactttttcggtgataattttttcgctgacaataacttttccaacgacttttccaataccagcgacttttctgataactttttcgacgctagtgacttacccgacgaaacttattattacaacttttatcaaatttatttatttttttccacaaattttaaactttaattatttttttatcccatatttttttatgttatttatttatgcaatataaaagtaaacactattatattttttccatatttatgaaaaatcccctaaaagaattagtaactagattactttagtaggaaagtagcgaattggagactaggggtgttcaaaaaaattaacaaagcgcccaacccgaataaatcgccca

SEQ ID NO: 64244 - DNA, 887 bp, Cannabis sativa
tatatgaatgctttatataaatttgtatataatttggggtttttttatttattagagtcttcaattatatttgatatgaatgctctttaattgattttagtattttaaacattgtatgattttgttactttatatcatttgattggtttatgtactattaaattaacaaaaaaaaaataaggaaatggattaattgtgtatgtatgaagggtatattaagggagtgtgtagtgtatgtgtatatatttagtaatgataattttgtttgttattatatctagttttttttcttgaaatttcttgcatactttgattggcctagaatattttacttatgtgacaccttcgtatagaaaaaaattaggataatagttgaattaaattatatattttaacattaaaggtaggataattgtttgatttttaattattaattgtataacttttgttagttacacatgtctttatcatggtatcttatattttacatatattttttaatttctttaatagttatatggacattgtggtgtttgtgcgtgtaagaaatttacattttagacgaataataatgggtattttagtgctaataaatgcctatatcaaagttcaacaatattatgaaaaacacatgcttaaaaatcgaacttttgtgaataatgagactaggctaagtatactagatacttatatacgaagtggtgatatagagtgtgtgaacgaacttcgaatggatagaagaacttttggtgtattatgtgagttacttagacataatggaagattaaaagtagatggattggtgactatagaagagaaagtatgtattttcttaaatagacttgctcatcatgttaaaaatagaacaattcaccataatttcaagc

SEQ ID NO: 64245 - DNA, 1080 bp, Cannabis sativa
  modified_base (637)..(642): a, c, t, g, unknown or other
  modified_base (1052)..(1054): a, c, t, g, unknown or other
atattatttatttaaatattaaataataaaatttaaacatttgaataaatatctataactaattctgttaaaaatattatttttaaatttaaatagttaatttaaactagatatctaataatcgattgaaaaaatatctcaacccttgagaaaatacttcaatcatctagaagaatctctcaaccatagataaatatctataaccactttctaaattcaaatttaaataaatgtctatcttttgaattaattaattaattaattcaaaaataaacacaacggggcccagaattatagtaggcgcctatcactgtgcaaaaccacggtgctaggtgccaccttgtagtattattacgaaatggtgtcttgtcctgacatcatctttgtctccccaattcatttataaaataaattaaaaaataaataattgctattttgctaattcaaaatagatttttctcaacatcattaatttgaaccataccattgataatgttatatcgtggcgacctggggaccatgaacctataataccaaactctaataaattagattatttatttaatctcaataatcaaatgatcctatttattaatcccattattactctagtaaaaatatagaattgaactcttannnnnnatagaattatatttattgagtttactatattgtccattgatctaatcaataccagtgattagccctccatgtattgctccataattagttttggtcaaattacagttttcctcttctaattatagtataattttgatttgatctaaatttgcacacaactttcagttctaacattaacacttaagggaatcaatactcaatccatcaagaaagttagggttccatattttctctgagataaattttaacaagtaaatcaaagaaactaataacatgaatatgacttcataatttctcaggatttaggttgatctactaattgatcatcgttgtgatatgacttaagtctttatagtaaacaattatatagtttgacaaatacatatcccaactgttgggttttatgcccnnnataaaactctttacaatctgattagt

SEQ ID NO: 64246 - DNA, 4197 bp, Cannabis sativa
  modified_base (2273)..(2286): a, c, t, g, unknown or other
  modified_base (2713)..(2719): a, c, t, g, unknown or other
caaccctgcattcttcatatgaaggtgactcggggagtgaaacacactgctctgtaatgggattgcaaatgcagaatttggttggtgttttctgaagcaataacaaatcacgataagttgatctcacaatcggcttcggctccctcttgttctcccaccgctccgatctcttaaaattcaaaaaatttagataattactcttacaagagggactcaaccatgggcatggatgtcgttttccatggagaatctttgatggactgtggtcagcgtatctgaggagaagagaaacaggattgggtttgggtttgggtttggatttgtggtcttggtaatcttgtttgttaaataatcggcttaaataacattgggagcctgaaatcagagatgaccaccgcttgcatactagactgcactgcattacagaacgataatcagggatttgggtcaatattttgaggaataggtcgtcagtgagaacagatatcatatcgttataatcacggcgaatagacatcgtgggtgacaagatcctccttctagggtttctacgatctgccatgaccgcttaactcaacagctcattcaattgatttgattctgcattcatctccaccaagcaccagtttctcttcttaccagcctggacaggacggatcgcatgaaggataacagagaaaacagaccaaggaaaatttcagtttttaactaaatattaaaggtagttataaaataattaaaggtaatttatgaacccttaccaaacacctcccatttccctttttttcttttacaagcttatttttactaataaagatttttacccactaatctacctaccaaattatgccctcccttataaactttttctggccgttaaaaattcttcatgaactattgagattgttagatttaagtatttttgtctaatttcattcaattttactattttagtggttgtttatgtattaaatcatgctctcgagactttgatatctaacaaatcatgtccctcaaactttgacatgtactaaatcatgctccctgagctttcatacatgttagacttcttttttttactaaaattagataaaagtccttaaatgcaacaatctcaataattcagggggcatttttaacgaacttaaaagttcaggggcatgatttgatacatgccaaaattcgaagagcaaaaatcctaattagccttcttttttttgcttcaaaaacttcaaaagaacttcaataagctaaaaaaaaaaaatactgatgagtacatgcggattcacctccaactatcaaagctccagaaatataatgttagttttatagtactaaattaagcatgcagttgaagatttcttagtgattatcattgtactatatgcctaagatcaccatatgtatatatattaagctgaaagtaaaaagataaaaataatatttacctcttgaagcctatcagggtatcctagattcttttcgtatattgtattctcggaacggtgctgacaaaactcacaccttgatctttcagatctttcaccacatacaaggactagtgtgagcaagtaggatattagtgtatacaaagattttgtattctcaacacatgagcaagagcaatcttattgtagtgatagagagaaaaagatttactagttaatcctttttggacttttacaaaaattaaatataaatttttatatttcaaaaactatatagaattttgtatatgcggtatattaaataaatctaataaagttttatttaattaattatttaagttcaaattcttttattaaatcatatttaattatttgaataaataatttaattgaattcaattatagatatttatattttataaccgattgaggaaatctcctaatcacttgagagaatatctcaactactttttaaatttaaatatttatcttttaaattaattaattagctccaaaagacaaaattattgtggacatgtgcatgtaatgtgtttagacatagtgcatgtggcgccttcctctgtcttaattgagacaagggatgtgtcctttgtcctgacaatttttatcttttctcaatttaactaatttgaaaaataaattatttattataaaataaataattagtattttgataattcaaaataaattttttctgaacttccaaatacaatttttatccctacccttgacagtgtttcaaggtggcaatcaggggaccatagacctctaactctaaaatccaataaactagattatttattnnnnnnnnnnnnnnaaataatcttatttattaattacatgattactccactataaatatgaaattgaactgttagtaattatataattatatttactggttttactacagtgttcattgatataatcaattccattgattagtcatccttgtgtcggtttgtaattagttctggtcaaattaccgttttacccttctaattacttttttatcctttagttccattaattcactagttaaagtataatttagatccaatctaaatttgagtacaacttttcagttccagaattaacacataaagggaaccaacaatcgacccgttaggatagtcagaatttcataattatagatcatgttcccagccatccacattattatactcctaaaatagaagttgtaagaatcatcttttctaagaaactttaacgagtgaatcaannnnnnnaataacatgaacatgagttcatgattacttaggatttatgtcgatctacaattgatcatcattatgatataaattaggtctttatagtaaatgacatgtttgattaagaaaccttaattacatatcgatccttgtcatatataatctgtattatatactacaccttcacttagatgtgatgctacatcaataatctgaatcgagattacttgcactaaataatacgcattagtgaaccgcactagcaaccattgattaaagattcctaaactttattatattcatgactattttattcatagctaagtgatctcaattctctgtacaatacaagtcacaatgtcatgtatgaataaaaaactttttgatatttatatataatgattcaatattaaatattaataacgtaacattcatggatatatcaaaatattcaatttttagtcataatcagaaatgtctttacaggcttgtcagggcataaaccctagcaatctcccattttccctaaaagaaaattgggcatctcccttagccccacattagattatgacccataaaagattttactggtagaatggatctgccaggttatgttccaacacaatctacaagactgtcacatcatctctatctactatatatcttagtagatggtacttatctcaacatgcttgcctctcttatggctttttggttccttggagttgctcaccgctctactattgtcacaatagagcaccagtggcttttctacttatggaactacttctagatcagtgtagaaatttttcaaccaaaccgcttccttagctgctttgcaagctgctatatatttgacttccatggttgaatttgtaataagagttttcttaatacttctccagactacagctccaccaccaagagtgaatactaacctagatgttgactttcaactatctttgtctgattgaaaatcataattactttatccagtaggatttaactctccaccgaaatatgcaagcgatagatctttcattaagatacttgagaatgtgctttacaattatccagtgttccaaacttggattagattggtaacgactaaaaatccctacaacataacatatgtcagaccttgtacataacattgcgtacattaagctcccaactactgatgcataatagtactttctgatatcttccatttattgaggagtctttagatattgatccttgcataaagtaattctatgtttggatggtaactgtcctttcttggaattctccattgagaatctttctagcaccttattgataaaagttgcttgagaaagtgctaatgtaatgccatattttcttaggcacgctatagtgattttttacttactgtgcaagcctttactaatcaaagggtttctcaaaaatcatgtcaaatttatgtcagaaattattttaccaggatcttagatctactcaagatcggaagagcg

SEQ ID NO: 64247 - DNA, 924 bp, Cannabis sativa
atatgtgtagatctattcattttaacctaaatacaattaaaaataacttaatccaacaataattactaaataaattacacacccgaccattgtttttttcttcaagaattatgttggtaggaagtttgggatgctctacctacttggttgtcaatgatgctcctccaaatggtgctttgacaaatgaaaaatttggcaagggtgtgtgtgtgtgagtttacagagagagaaagagagtgatgagaatgagagggaaagatagggatttaggtttagttttgttatttgaggagtaaaattagtggtaaaaaaaaaaagaagtagcatattttatttgatgttttagagagatgtatataattagaccatgcatttattttaagcatgcatcgtcaaattttccatttaaaatatggaggagcttggagaggagaggacaaacaagcacctctggaaggagtaactcaagagatgtggaatgactgcattgcttatattggggcacagataaagaacaagtacgcaattatcaatgttagttatactttatgttttagtcaataataaataattaacaacatccaacacaaatatgttaattcaaggcaagattaataaaaaataaagtcggggttagatggaaattcaaggtggaagggaatcaaagcctattgtagtacatatttttgatgagatgggattttataattatttgtgattgataaatattattttttcttgtaaaaaatgataatcacacttatttttatttaaatataggataattctatgacaggagaacttttaactcctatagacactttttgaaagttctaccataaagacaacacttggcgcaatgaatatacacaacaagcttatggaagtttatacactactacaatatgggcctttagcttccct

SEQ ID NO: 64248 - DNA, 656 bp, Cannabis sativa
agggcacaaaacccaacatttacgtcatttagccgaactcagtttctctaatcaaagaggcgccaattggatgatgatattggcttcatcaatgcggcctcccaaataaagctttatcatttgaccattgaccttgaaaatctctggtttctctcatttgagttccaccgctccatatgggaatacctgaaccactgtgaacggtccagaccaccttgatttcaattttccaagaaaagcttcaaccttgcattgaagagtagaatttgatgtccgggttgaaattcttttctgaccaagtttctgtcatgccacttttagttcctttctttgtagatcttggcattttcattggcctcgttgcgaaattcgtccatctcatttagttttaatagcctcttttctcctgctgccgataaatccatattcaaagttttcatggcccaaaatgccttatgctctaattccactggaagatgacaagcctttccatactccaacctatatggtgacataccaataggtgttttaaatgttgttatgtaggcccatagtgcttcatccagccttttggcctaatcttttcgtgagcgttgaacagttttctccaaaattaatttaatctctcggttagacacttccacttggccattact

SEQ ID NO: 64249 - DNA, 742 bp, Cannabis sativa
tatatatatataaatttgattataggtaatgttgtagtatactcccttaaaaaatgtttccataaaaactctatatccgtttcgatacacaaaaattttttttagtcttattatatttttctcattatcgtatacattatagttatttatgaccacctgaatttcttaaaaaaattctacatagtttaacgtttacaatgccaaaaataaggttcaaatattttgttgcacgtataattattttttttttatacatgtgataaacaattatttgaatcttatttttagcattgtaaactattcaaaaaattttaaaaatttataagtgatcttaaataattataatgtagacaatcatgaaaaaaattaaattaaaaaaatcttctaaataccaaaatcgaaggataccaaaactcttttattcataggatacttcatatttttttcttttattttgtgttaaaagtgtcattattctgtttttattaagtagattaacaaaataaacaacaatatttatttgggatgaaaatataataagttaggtttgatgtttgtattgtgttcggaagcaataacggtatatgatacatcaaattgataaaaataaaacacagaattatctggttcagcaatttgcctataccacgggaggcagctaatattattaagctgagtagaaaatatacataatataaatacaaatttcctactaataatatgtaataaccaaaatatttga

SEQ ID NO: 64250 - DNA, 619 bp, Cannabis sativa
acggagaggtgcctacggaagttctaaaagtgtgacggaaggtatttttaccgccaaaaatacgacttaggtatttatctgctactcgagataaaacttaggtatttttgccgcaaattactcttttcttaataatggacttcagcaattttctattaagcaagttgtaaatatggaagggttttagagaaaattccttttgattttcttgatttattttgattagggtttaaataaaattaatttagcgaggatttagagaaagaattatgggtttcttttaatttgaggagttttacaatttctcttctcatccaagtgctaagccatcttaaccaccaaacgaatcgataagtccaagtgctaagccatctcaacgatgatgctttgtttggctttttgttgctaataatgttgtttccatcattatttttcgttagccctctttccattgttaaagtcatttttatttttgcctctttgatcctaggagtcttggctgctagagcttgccctattcttgttgcccttagtttggttgaggcctttagcgtttcactttgtctctcccaatttaataaattcatcaactctattgaggaagtctttcatagaatga

SEQ ID NO: 64251 - DNA, 594 bp, Cannabis sativa
gatgagtaacacaagtgtccaaaaagcctcaccactttccaacccgagtcataccgccacaccccaaaactctagcagctcccactccacaagctctaagtactgtcaagtccccttacctgaaaacatccttctcctagacactagcaaaagacttgaagccatgaatctcacttaccaacctggtatggccactccctcgggttcaaaggctttgaggaaaagaaacaaaccctactccaaagacaagttcaaaaggcaaattgaaatggtcaatggggagctccgtcaccaaatccagcattcccgctcagacaatccgtaagtcaacgaagtctcttctggaagtgcaggccttgccaccgagcaggcctgcctgccaccatgaagattaccagctggaatgcgcgaggcattgggagtgatcgtgcattctgaaacctctcccgtttggtgtcatcttgtaatcctactatgttatttattatggaatctagacttgctaagaatgctatcggttatgtaaaaaataagctccattttgattccggcttagaaatgcctaggataggtagaagcgggggcttacttttg

SEQ ID NO: 64252 - DNA, 925 bp, Cannabis sativa
  modified_base (97)..(104): a, c, t, g, unknown or other
aaatataatactaaatattataattctataattaaaattattaaaatataaaaaattaagatttaatttatttatagggtgtgatataaaaatatannnnnnnntaagtaaatatttaaattctaattacattgacaattttttatatgattatcactatttacattgttgaaaagttatataaatataactaaagttataaaatatacatatatttactttagtaattgtgagaaaaaatatgaaaagtaaagcaggaattcaagtccgaatatgaaaataggtagggctgtttaagaaatatgggccgacacaagcaaagcacgacacgaatccgaacatgacacgaaaatattgggcctacgggccgtgtcaagcctaccctttaaaaatattggcacgacataatatgcctatattttttctggcacaacacaacacaatctgttttttgaaaagcacgaataaatataaatcgagccattacaacatacacgattttacaatactaatcccaaacatgcccaatttgctccaagaaagggatataatgtgtttttggaggtatgaagaaacataaagttcacggtggtattcggtagaaatttgctttcaattagatcctctcttgcttttgcaattgtcgtagtgtttgaacattgaacagatttgtatcaagaatagatcaagatcattgaaggagataaaaggccaatcatggatatatgtgcatttattgtgtacttaatatttaaaggttttttcatttttacactttaaaataatgtttttttcgcatttttacataattctacatagaaactcatattgcaactagcgttgcaacctaaatcgcaacaaaaaatcgtatagcaactcacgtagaaaccaccagagaaattattttagaaacccaaaccgtaaa

SEQ ID NO: 64253 - DNA, 1361 bp, Cannabis sativa
tatgttgttatggtttcctaatataatagtttttggggtcagttatgctcaagtcacttgagtaacccacaaacaatctttttccattaagataattctaaattttatttgtgattttatcattaacttggaaggcactggctcctggaggagctaaggaacccattgaagttctgtcagattttcttggaagagaaccatcaatccgagcttttgtcgacgccaaatctgattatagtttgtgatcacagaggtagcatcgttggttgtcttcttcctcggcttccctaatcaggattctgcaattttggttaccaactcgagtacatccccttattgtataatctccattcatagttttttctatttgaatcgatcgtttcagtgtctaatttgtcttaatttattgcatatggaggtttgtattatctttgtaagttggctgttttaaggcatttttcttttgattgttgagaaaatttaccatggcttttatttatgtatttattagtttcaaaacaacttattttctccactctttttagggaatattatcatttggtatgttgtatttatcaaatgcatcggtggtaatttgtgttttcaataatgtttgtatggtacttagtattttaaagatgtatatatttgtagcttgaatttaaattttatcaataacttataaattggagatattttaattatattgataaagtcttattcaaagaagaagataaagtcttattgattaaatttgaatatttttcattttcattaggtccaaattggtctacaaccaaccttaattctaagaagagtggtcgtgtttcataattcataccaaagaaaagtttaacattaacttttgttcatttattttggtattactttattattaatgatagtaaatagatagatttcaatacttgataaagaaaaaaaaacatcaattacagcaaaagggtaaaatctaaatttagtgttcaacaccaacactaaaagggtataataatgctctattttttttttccttattctaattataatatgaaaatggaataatggatatacgtattatttgaaaacacaaattaccaattatgcatataactattattgaaaatataaatttttattgtaatccactataaggaaatagtgtcaaatcacactattaatgacattttagtgtccggttagagttatcttaataaatatatgtcaattaataacaatatacatattgatgcatctataaattatattaagggataattgcggcaaaagtccccaaaaacttgaggttgatgccgattagtcctcaacttcaaaaattggcggtgaaaatccttaaggtcaca

SEQ ID NO: 64254 - DNA, 1466 bp, Cannabis sativa
tccttaagccccttgcatttggatgactctgcaatgaataaaaaacatattaaaagaattaagatatgatattttgtgaaattaaattgaacaaagtaacacttacttttacccaatcatcaaagacactctttttagaaaccacacactttaggtcctcattccaaccgaaatcacttgcttgtttcaacatgtctgaaattgcattgaattgtttctttagtatttagatacgagactcaatgtggggctgtcctttcaatccgcaatgaggaactttttcattcatccatctttttaattgttgtagatagctaggtttgaaagtctcattgtctactttccatcttccactatctaccaactccaacaaacactcaactagttttgaatcctcaattgaagtccattggtgtttttttctaggaatcgatgttgcttgctccaaagcatccattttcttaagatatgtatatctcacatctacttgtaacaatatgtagcaataaatatattaacatatgaaattaaattaaaaacatagatatataaatttgatatccaacacataagtttaaaactgatatccaataatataaaaattcatacaaagtcaagcacaaataatattgcaaagaaatgaaatattcaacaatattaaaattcatacaaattcaagcaaatcaaacacaaataatgcaaagaaacacaatctaagtatgcctcctttttcgccataggtcaaacatctctctagctacaagatttgtaagtttttttttaaatacaaatatgttagcatttttgaacaaagtaagttttttttttttttgaaagatacaaggtaacaaaagataaaacagggaaaaataagttacaaagatttagtgagaatttgaaacataattgttccaaagtacctcttcatcagttcttaatacttgttgagcaaagttgtgaactaaaacattgaaacttctaggaataaatctgattgttgcaccaagaaagtaagataaagaggagatgattttccacactttatcagaaagagtcgagtgatccctaaccatttcaattggaaattggattgtgtggcaccagattaaagctctaagaagggcttctacttctgcaaaaataggaaggagtcatgagattgttgaggagtaaaaacctactataaatgtatcgaggctatcttggatcactgctccatatccatggatattattttggctttgcactactgcacccacacttagcttataattttcaggagaaggcaacaaattatcgaggacctttttatttgaggaactgtcttctgtgatggcttcggttctaggaataatcttgacttgtgcttcctcatattcctgcaagcaagaagtaataaaggattctatttcattgaagtatgacttcttatctgcaaaaagagacttgttacgataattctatat

SEQ ID NO: 64255 - DNA, 1185 bp, Cannabis sativa
agagagagagagagagtttgtgaaatgaattgggcaattgtgtgagagttagggttattatatttttaagtgtattgggctgaagcccataattggttttcttttttttttttttttcataaatgcattttttgcctcggttgtgcactgatgtaagttggcgttagtacaaaaccaacccaaattagtgccaaaattgatgcaaactcaacgtctattctcaactgacgtgaattttgcccattaatttttttgcgtcaattttgtaatttttatgacgttaaaactgaccaaaaaactagtttttgtaatagtgcgaagtctatctaagaagatcatccggcaaggatatttttggccaaccctcaaaaacgattacatagactatgtttggaaatgcaaacaatgtcaaagctatgccaaggtaccttaggctccaccaacctaaataatgaatatccttggccgtttgcagattgtggaatggacttggtaggacctcagcttcctactgggaaatgaggagtgagatatgccataggtttcttatactatataaccaagtgggtagaagcaaaaccaatgaacatagtcacttttaagaaggctttggactttgtaatcaagaatattgtgtgttgttggccacatgccgataccaatttgacgtgtcaacactttttgttgtgccccattcgatactatttacgaagtcttcctccaaaaactttcatatgtccctagtccaatcctcgagataccatgcctccacaattgtcgatatgccctcatgacaagccactagactagtagcatatgtcaaactattatctctttttatggtgcatctgtcccacacatgtatgcgaactagtcccacaaatgactacccgtgtcattttgtgttgagactcttggccaagataaatcatgttgtctttcagaggtttaggccatgttccctacgagtggcacattgacaagctaatggaaacgtatcaacgaacccctgacaacattctagatacactattgatttagcccaataacattcatgagtactccaactcatggagatatatgagtcctctcttggtcttcttatgcccatgcgactagtctcacagactagcagtagctcacttagcacttaggtcctaggaggtggcggatagttgacactag

SEQ ID NO: 64256 - DNA, 752 bp, Cannabis sativa
  modified_base (535)..(540): a, c, t, g, unknown or other
tgaataccctcttctatatagtttgccttcgatcattgtgtaacgaggcactgaatacaatagtttttgcgcctcatttttatcattcgaaagttgcccatcaagtaaatagttaacaataggcgccatccatgttggagagctatctatcactcgacgtcttctgtttcacatatacctggctcgctcagcatttctaccggaaccagttttagctcgtccagatcattctacgaggccagttttgctaaggcatcggcgttggagttttgttctctcagaatttgtttgattttaaagtaatcaaatctttccaagttcttccgaactttctccaaatacctcgccattttcaatcctttggcctggtattcctcgaggacctggtttatgattagctgggaatcactatgacagatgggatttttgacttttaaggcctctactatctttaagccggcgatcaaggcatcatacttagcctcattattagatgcgtcacattagaatctcagagcatagtgaaacttaaagnnnnnnggcgatattaatatcacccctacacccgaaccttgctcgttggaagcaccatccacatataactttcaggtttccgcatctcgctgattagatgggatttcttctaacagtacaccttccatcaagaagtcagccaaagcttaacccctaatggatgttcgaggatggtatgttatgtcaaactgccccaagttaatcgaccattttatcaa

SEQ ID NO: 64257 - DNA, 1054 bp, Cannabis sativa
tttgtaaataacaacttttagtttctatttttgtttattttctctatgtaggtcataaatgtaaatttttttcattttcagtttattatagaaaaaatccctaaataaaatatacattagcgaagaaaaaataaaataataatcataataaataaataaatattattaaaaaattttacaatgtatattgcaataaaaattaaattatcattttaatataattttaaacttgtcacaaaaaaattgtattaactgaagttatattcagtcatacttttcagttctcacaaaggaaaagtccacatttagaatttccataatcctaatctaaataaaattctatattaattacaatttgtgtctaaatatttattacacgtatatatattttttttataagaacatatatattgaatttgatgacattggattgcagtctgttaccaagatcttaaatttatgattgttttactatcagaatttcctactctaatgatttaaagatcattgttagagtttttacaagtttgctatccagatttccaagagtgtccttaatctgtgttgttcatagattaattgtccatgctcttcggatggataaacaacttacttggctagatatgagtatccatatttttttggatgtatagtattattttgataatcatgtcaattatagtatttatttgatgatcatgagatgtatagtattaagagttagtcccacattgctaatgcgtgaaaataaattgtaatatataagatgaatgggctactcctcccattgccaattggttttgagatggaacctcattcatcttattcccacattttaacatagtatcagagccacttgtgatccgttgtgagcccaaattgctactggttcaaaaaaagccatttgtgattcgttgtgagccaaagtgctgccggtccaaacagatacttccatctcccctttaacctctatttgggacctttcggccaaatttcccaacgtgtacaccaacaaatttctcgatatttggccttgtgagattctttcaaatgt

SEQ ID NO: 64258 - DNA, 1257 bp, Cannabis sativa
aacaatgggtcggggtgaccaaataccgaaaattcctaaagatatatacatacgagtattcgagatgttcatctcaatacttgtgagtattacagcaagcaaaaaagatgcgaatactcaaaatgttcttcctaaagttcacgattatacaaatttcaggtctattttctcctgagaattacccagttttagcagaggaataaggccctatgtgtattccctacaataacatgcattttctactccttaaaaattcaaaatgcagaatgtttctcaaaatcaaaagaaaaatttgcaggtaatttcgaaaactaaccttgagatttgacgattctccctgtgattagtttcaatcgcttctgaaactttgaagactcaagaagagaggatagaaatctgggagaggttttgagtctttgaaatttcagagaaaaaggaaaagaggaaaattgaaatgagagggaagaatatgaaatgaggggcttaaatatcattatccctgattaattgggattatgacacgtggcagaaggaatgtctaaggtcatcccatctaacggttatccatgggcacgcctacacggaatctaaagagtttcttgacgtggcaccataaataggattaagcataataattacagccgtcattttttaaaaccctcgatggaacaaccaaaggtcaccacctcgtgacatctcttcgcctgtctctcgattatagtttccctcatgaccgcatctgtcagtcgcgaaactaggggcatgtgttatagtgagatttttctaaaagagggcataaaagactgtctgaatcttccacgcacccccggaaaaagctaaagtttcgacgaatcacttgtcggaggaataagtgttgtagggactttccctcgctggaagcataaagataaattgtactcactttcctcgaggaaagctgagatgccaatcagagacccctcgagtacgaacctcgcctgaaccagactcagcgagatgatgcgaatacaaccaagtctaatcgcatccgtacgactcacattatgtatgaccaaggaacggctttaacccgcatatatcaggatatatgcgagtatccccacaaatcctcctgcgaaaacatagacatcgactctctatattgtgagctggtcccattgacccaacaaccttgataaaccaatatatatagactcgcatgtcttggctctatcagcttgttatatgatgtacgtacaagctgttggaaattatttt

SEQ ID NO: 64259 - DNA, 512 bp, Cannabis sativa
atatagaatcaccctaatctatatatctctcttctatatttctaacaaattaaataatgaataatattactacaagaaaataggtcatcaggaaagaattttttcgttcctagaaacccccaaagtcattccaagtatttatcatgtatattttatatattcttatacgttgttcttgaaaatcattattagaagggtacgatatttaaaattgttcttgataaaatatctggaacaacacaatgtcattcctaatataaaaaaaatcctccatgaaaataatgtttttttttttactaatttagaaactatcaggaataaattttggttatttttgtccttcccaataaatttatttttttaaaaaaaatatattatcaaaatttatttgaaaattttatttaaatatcaatttttttatatttcataattttattaaaaaccaaatattttttatattaattattatgtgagtaaatactaaaatgcaatgataacacattctaaaaaaa

SEQ ID NO: 64260 - DNA, 635 bp, Cannabis sativa
gacgttccaaacgagccctaaaaagtttatttttttagccttttgagacgcaaaattatttattaaataatcatagtaaaatttatttaatatttttttttgacaacattactatttcatttaatttttttaggaaacaaatgatcttaatcttaaataagattttataaattttagtttcaattttttttttttaaaatttcacaatattttataaaaaaaaatataagaacttggaaataaatcaattttatatatttatatatatatatataatcaagtatttttagttatcaaaatatctattataactttaaaaaattaaagattcattttatattgtttaatatattatcttcatccatcaattttaatatagtaaaattgaattaaatattttatagtataatcaggttttatttttctccacaaaattggtattatttaagtataaaacctataacataataatagagaataaaaaaaattaatttacttgtaaaagtagcataacattgtactactactagttacttataatatatttttttttaaaaaaaagaaagttactgtatataagaatactaatattagaatttgactttttttttttattattcttaggccactatttt

SEQ ID NO: 64261 - DNA, 1341 bp, Cannabis sativa
acacatggaatacagtcttgccaatagttagacaaaagtctccttacaaggcatggcagaaccgtcaaggaacaagtaagaggagttaagcaagccattaagaagatgtactaccatgttttgccagccaaatggagtatataggattgccaagatgagcttatatggctggccagggttgggcacaagttggccggccaaaagtgattttcagactaatgaggggctcattcgaccaaggaagtcttacctctaaaagaaagaggtgtacaaaggctggccaacacctactaaggctggccaacacatgcaaaggttggccaacacttgccaaagctggtagaaacatgacctgccaaaccttggcaggaacatgacctgccaaaccttgacaagaacatgaccgaccagaccctggtaggaacatgaccagccaaaccctggcaggaacatgggcagccaaaccctaacctatagccattatgaggttgatcagcctgcacctgcaggtgcatcgctagccaggttttacctggcatgcctttggtgcacagtcttcatccatggacaacaagttaagcaacaaattgggcattgacaacacatagaagttggcaaaaaatattagcaacttccctattttcaagggataaattagtcatttaaagtttattaattaattatgtaaatatagctttatttacctattattaagggatatttgggatgtaagctctaccatataaaaattattagcctaaccttaattttctaagtctcaagttcaaagtctctagctccctaagctctcaactctaaagtctgaaaccctaactctctctctccctctcttctacatgccctagggctctctcgctctcacttgagatttacctacttgattcatatattataatcttaagagagccacttcaaattccacaacccttgtgagctgagtggtgttatctctagtattaatacaaccaaatggggagtaggtcattacccaataactcagggggccaaacctctataaaaacttgtgtctcttttaattttttgttcttattgcgtaacacgtagcaagcatcaatagtaaatatgacttcactctcggttggccaaatctggggtcaacaagccatgttccaaaaaggtagcatttgtcgatacaaataatttatagtattcatgactataaaagtgtgcacctcaagtttcctctgaatagcccactaacatacacacttcctactgggagctagttttgctatcttcggctttagaacatgagcagggcaaccccaaatatgaaaatattttaaactgggttttgtc

SEQ ID NO: 64262 - DNA, 1189 bp, Cannabis sativa
aaaacgtccaagagtcatcattctacttgtcgatgataccaaaagcaattagaaacaattggttatttgcatcatattgttacgctaattttagtctaagttttgggtcactttctagggtagttttttatctttgtttccagttttaggactgttttacgcttaattctctttgtttcaggtccataaatgtttaaaggaagtattcgcaagaatagagtggacaaaaaagaaaagagttaagaaaagagcgaaagtccttttctggcaaagctcgccacgacagccattctttctagtcgtggtggagattggcagagagaaatttaattggagaggtcccaggcgtcgcttctacgaattcagtggtcgcggcaaagccttcttgatgagttatgggcagttacgtactttcacaaattttaaaaggaaaacttggctcatttagaagagaggctcgagatttttgggaattattcagaattggagacctagaaacagagaagagaacttcaagagtgggtggtggcgatctgaatcgatttctccaactagttatttcttctttcttaatttttctattttattttttgttttaaatttgattattgatttgattattgagattatgaactaaactcctattaggggagatgatgaatgttgattaacattatttcttgagtttatgataattgttatttcttctttcttgattgtaaatttgtctacatttgtgcttaattccatgtttgagtttgatctccttaggcgtgttttatgatcccaattcaaaatctgaaagtgatttttgggaatgctaaaattggataaactaagttttgaggtgaaacaaaagtatttacatagtgtttgtgacatttagattattgtttaatgcggatgatatgtttgtctatctctgagatgattagataacacacgatttaggacctaaaagatctaaaaaaatattaggttaatttttttatataatctttcattcacattaagaaagaggaattctaattagccattaacaaataaataattgtagccaacaggattcttttccctaatttctcatccttgattaaacacttttttttgcttaattttattttttggttattctttatttttatttgcatcaaaattattggttaccaaatagaaatacaagtccaat

SEQ ID NO: 64263 - DNA, 602 bp, Cannabis sativa
atatatatactctaatttatatgtatatttatatatataacacagatatttaaaaataaatacctaaatttataaaccctaaaaattatctatatagatttatacagaaaattttatatagtttataaatcatcgtataaaaatatttaaaacctaaaatatatagatttatatatatatacgcattatatataccgatttaaaatctcaaaactaaataatctcaaatgtaaaatagaaaatcaatacttaccaaaaatgggacaaaatggccggtacactactcagtcgactgctccgtcgtgtggggatcgaggtggtggtacgtcaagggggtcgaggtggtggttgtgagtggtggagaaatgggggaaaaattaaggatttgggatttgaagagaagaaagggaaaattgggaaaatgagtttgatggggtatttataataccattagtggcgaatagtccgccgctaatagtatttaattttttttattttgtaattattattagcggcggcgttcgccgctaataaaatttgaactgcatgggcaagaaaaatctcgcccgtttattagcaatggggtattagcggcggatccc

SEQ ID NO: 64264 - DNA, 2226 bp, Cannabis sativa
aggtggtgtaaattcatttccgactcatttccgacgcttttgatcattttgacaatttcggagatcacgtgtcggggccttatacatcagtttgctttaattgggttatcaataattacttaaaatgttctcatcacacgaatgacaccacctacaacaagctagtctttagaaggatcaagcctttaatctctttcgagagaggttgtagtgggtttcgaacctcgacccaagcaaaaaagaatgttagtaaaaacaatccttaccactacaacatacaacacgtggtatataccatacaatcttgtgttccaacaatctcagtttttttttttttttaggaaaaatgaaatgaataaataagatatatttcccaaattatgatttttgtagagttttgcccctgaacttttatctgttgcaaaaattttcactaaactataaaaatcgttgcaaatgtctccctgtaattgtattttggtcatttatttaaacaattttattgacatagaattaatataacattaatttagcccggttgaaaaatccagacaaaaaataaatacataaataacaatctaatggtaaattatgagagtatgtatgtgtattcttaaagttaatgtttgtatgtttaatatcaataaattagattttaggtagcttaaagctattaaataagtcattgtactgcaattatacatgtaactcatagtcacataactaaattattttaataaatgagtagaatgtaattggatgtggatatttgcaacaatttgcatagtttggaagagaatttttgcaatcagagaaaaaattcaagagataaaactctactaaaatcatagtttaaagtacaaaaatcttatttattagcgagtcgaattccaacactacatcatgctagccgtttcttttaatccaactcaatgcttttttgatgccaataacttctacaatatctagagctaccacgtcaagtcgacgaatctaacatgctttcaatgatctctccagcaaaattttgagctactatattagcaaacaaagcagcatcaacattaactttaatcgtattttctaattctttgatccaatactcagctccatcctcatttagtccgagatagtagaatatctcttcttcgagcatttatccatggacactacagcactaacaagtggtattttttccttccaaaccacaatcaaaagtcgaactcctattccacatgagtaggatcctccaattttgatatgcaccgccaagattttgacacgtaccgaacaatttagtaaacaacataataaaatattatttttagttattttatattttaaacccaacatttctctcattgattattttgattccagttatagtttagtaaacctgccatatgttaaattaaatataatccttaataatccaaagtaaactatatttatcaacttaataatccttgttaatcttcaaaataattatagttaaatatatgtatgtacaaaaagagcataaatatagttgaaaattctcaacaaagcaaaacagctgaaaattctcattgcatcccaaatgtagagctaggcattagtatcaaatctcagtatctgattttggttttcgaggccttcccctgtcttgacgtcggggttgttgctctttctgattttgaacacaaacccccgaaatcgagtcttcatcagtcttcggtttaggaggtcttcctcggcctaaacattttggtaacttctctttcatttgtgtttttggtttagaaggccttcctcgcttccttagtgctttcggtttttgctcattttgatgtccagaagatgcagcagattcagaaacagaaggaagcattggcggttccaaaatcgttgtctcggggactaatgcaggtatgttgagtctattatgggatctcagttgcctcttctgaacatgacattgatcatgctttcgtttcaatacgagacataacttcttttcgaatgatttaagcccgggaaaaacttgcataataggaagctctgaaatctgttccatattgatctgctcgcccttactactcggatcattagaaggggtaatggctgtttgagcagatgctgatcttgttttgcaactgaacctgattttgtatagttgttgtttctttttcactttagtatgttgtgtttgaacatcatttcggtcaaagctcattccaggctgtt

SEQ ID NO: 64265 - DNA, 1121 bp, Cannabis sativa
attggtatcctgacaaagtacatggcaaaggttactagcattttatctaggaattgaagaagggttggagggggtatcttcctactaactggacatatagagtccaatctagtgtcactgacactttgcacgaaggtcgtctagccccaactgctaatgtaatccctgttattgagtttgttgtaactgttgcgaggcacactactgaaaaagttctgcccagatgtaaaatgatggcgcgaacaaggaagaccactagaaagccttcaacatctgacccccatattgctcaattgtttgttgcagctggcattgaacaatcaagacctttgattgagaagggaatgttgctgttgggcacatcatggttcaagaagttgaggctagggtgatgtaacatcctactagtttaggcgtgctagagtgcttttcataattattgtgtaacctttgataatcaaagggtttatcaaaagtgataaaatttaaactttaataaataaacatatactgtattacatttgtaaaatttgggataccgtatctaaatttttcaattgtatataattaaatgatgtcacacagcgactacaaaattatgtgctctagctatcttgaagatccaatactttaggtcaaaaataattcatccagctccaaactcactgtcgtacaacaactgttttgcctttaccagtacataacataacatctgtgagtctacaaactcagtaagaaaagcataaaatagaaataaataaccgacctatggcccccatacacctatcaacaaggcataaagcatataacatgtataagtgagtctcaaacgttctggacaatagtataattgaccataataccacatgcactcaatactctagtcgtattagtgttggtagcatcaatccatactataagtacaactagccataataccacatgcactcagtactctagcgtactagtgttggtagtactagttcatacttttagaagtataaccaaccataatactacatgcacttagtacgctagcatactagtgtttgaagcattggttcatactttctgaattaccaaacacatatattcacaatatcaagatgcaatcatatata

SEQ ID NO: 64266 - DNA, 797 bp, Cannabis sativa
cttgatttggaagtggtgatccagcaatggctagggagtccgtgatcgattgcatcttgttgacataatcagaaatggagaggctaccttttctgagtgtaaagaactgacttttgagttgaagaagcctagccttggattgactggagaacctctgttccagtgcacgctaaacagagtgtgatgatgtgaaattggcaacggaagcaaggacaccttcattcatgggggaacgaatccaagaaaacagtagctgatcttgacatttccattgattgtaagctggatttggtgcaccggtgaccaatgtgacaggaggaggaatccctacgagcaagatgtcatcaagatcgttccctataacagttggaagaacctgagatttctaagacaagaagttagattgatcaaatttgacggttaatgttgaagaaagagagtgagaaaaaggattctaggaggaattctgcagattgatgtgggtgtcggttgcctgagtaaggaccggggaagccatgggagcttgaacaggatcagtgcacgtagactccattgaagacttaggtcaaggcgactgatatcatgtagtaaaacagaatagcagagaaagaaaagaatgcgaaaacgaaaaagaaaatatgaacaactcactttattgaattgaaagagatcagtatttacacaagtgaaataggctctagaaaagccaaagcagaaaaactgaaaaacagaacagttagttgagaagacacatcaactaactttaaccactttttaacagaacacttagttatctg

SEQ ID NO: 64267 - DNA, 1345 bp, Cannabis sativa
gagagagagagagagaggtgtacgtggggagttgggttccgggtctcaatctgagactgagaagccagaaccttcaaccctctcaagaagactccttcaatcgcaaactacctatggaagtggggctataatctggtgcaacctctctttctctcactcactttgtttctccaattggatttcagcttcttgtggaggtagcactatcacctttaggggtataaatgtcatttcggtaggcagttatttattttcataaattgcttctttgaacttatcgtagatgataatattaatactacttattggttttctcttaatctgaggttgaaactaatgaactaggcaatagtaataatttgttgttttatttaatgcagttgcatgggttatatctaataaactttttccacagaaatgtaaaataggttaacgcaacaattaatgctaccctaaatttgttgtttttatcccgaataaatataggtttactctctttcatagttttactaatcattgtgaaaaatatacatatttatgagattagtctggatattgaagtataatcaattgcagattattaatcaaaagaaaaaaagtgatgattttactttgaaggtgaaatttaataaataaattagaactggataattattgtcaaaggaaaagataaggaatgagtattatccagacctgatccaaatccttgggaaagaggctagagtattagatcctgatccacacccgctgaagcaatttaaccaaaaaagagtcagaaacgtatgaacagatggagagagagttcaggtttcataagataatttttgatactggttttttaatttatatatatatctttcaaaaaaaaaaattatatatatatatacataattgttaagcagaaaagatatttatcctaattagttttttattattatttttttaaggaaagaatactcttcccataaatttagtcatttataacaactgacaaaatggttgagtaaatatcctctcatcgatattagagcactcacaattattttttaaaataaataaattttaaaaaaatgtattaaaaataagctactgtagatgttttaaatttgtgagtaatttacaatttaaatatttaaatttaattcgtaattacagataaatatttaacttatttttttagtaataaaaatatattctatcaatattttgttgtaaatgaggtacctttaaatgacaattaaacacacacctaacattatttaattggtccaagtcatttatttttaatttattatattaaaattcattcaaaaattataaaatcatttaaaattttaaaaaatta

SEQ ID NO: 64268 - DNA, 2228 bp, Cannabis sativa
tgattggttagataatgccatatttagtggtatttactttttatgccatatttatcaggcccatactttatattttaaaattacatatttatacaaatatggtacaatccagattccagtccactccagttgtgaaacacatgatgaaagtaaggcccattcgattgataggctcttataaaccaaagtatctttgggtccatatgggcttacacaacaagtgtttgttactctcacaagagcttaatgagtttaatgggctttgaaaactgtttcatttgaggtattgtttcacatttaaaatgttttttttagagtttagttacaaatggtaaaacacaatcctgttcaattttcattgtgagatttatgttatgaacaaaatgtttttggagcatgtctctttggccaaatagaaaatttaaaacccattaaaatattcaattttcatttataatggatagttgctttctaaatatactttattttaaataaaaatcgttaacttgccttttttacaaataaaataaaataattgaagactatctatctcctctgattttgatagaaaacaataagagtaaaataattatatgttaaagagtaatagtagagatttgaaggaagaaatggtccaaaagagaagaaaacaatcttaccgaaaggtaaggagggtgggctcttattgtttcttacagttaagctaatctctttcatttgtcttactacttttttttagtttatcaagataacaacaaattaaatctttgaccaataatcaaatcaaattcacttgccgttttacaacaagaacagcacatatggttttttttaattcaaacaattttacatttatttttataaattaattatggttttacataatttgataggggttttaatttctttctcttctttgctattatgaaattatctgtatgatttaacaaggaaggaagaggtgaatgaaaattgacaaaaagcaacaacgaaacaaatggaaacaaattgatgattttggaattaaagtagtcaatcataaacatcgaacttggaaagcaaaagtccaaagagagaaaacaaaagaagataaaggttagagggtctggcgtttttgggttttagcaatataaattaaaatagaattggatttgtgacatgggtaaatagaagagagagagagtgtttaggatttggtccgtttcataccaagcaggctccctgttcccatgtacggacgaattacatattacataggataaagaagacacatctcattgtttcgtcgttttctgtgttcctttgtgattggatgggatgagatgggacccactctcaatccccaatccccaatcattttcttttttttctccaaaacctatcaaaccaaattacaattcaacaaattacgttttatgggtgattttcccatatcaaaatgtgcaaatcaacaaattttaacactgattgttaaagcttaaaatactaaagccacgttcttttatttatttgcctaacaaaagactaaaaacgtaagagcatgattgatatattttttttttctgtttttgaaaaaatgtttttagaaataagaataaaaaataattttttaagttgtcaaaacacaagtcacgtttggttagtattttttaaaaataatattgaccaaaatcgaattgttttttaacacagaaaataatattttgatgttttcaaaatttttattttttttataactttgttttctgaaaactgctttaaaaaaacaagactcaacaagcttaattgttttcaaaaaataattttctatttttaataacaaaaacaattttttaattatgatacaaaacacgcattaaataactcaacgttaagcaaaatgataaaaataaaatatatgttttgtgtttattaaaatttgagtatggtgacaactaaaatggtcattaggcttatttcaatagtaaatgttaaatttggtattgaattaacataaaaatgatagaagtttaacacaaattttttgaagaaattgcattgtatgcccacttaattttatttactttaatttttatcttcattcccatattctataagatatcccacttttataaataatgtctctaaaattatattttttttattattatattatttcattaaattataaataaacacaaattatatataaaaaaaaagtttatttacaaatatattatttaaatatt

SEQ ID NO: 64269 - DNA, 722 bp, Cannabis sativa
aaaaaagaagaagaagaagttacaatagtttaatttacgagtgtgtgctggtcattctagtatgtgaatggaggcatgtgtttcataattcattactaacacaattaaatatgtagtatgatccttccaaattggccactaaagagaaccaataatagttgtaaataaaccttaggtacaaccgtagaagtaggccaagcagaagagcctcattcattgactttttctttaattgatttatttacttattaattattttccttaaataattaatttataatcatacaaaagtataatatataattaattatattaatcacttaaccgggagtatccgctaagcatctcaaattgtaattataaaatacaggtgcatgtccttattatatcaaaatatgaaagtcaagtccttttcacattacacaatcaatcccccttgaacatgaagttaagttggaaagagagagaaatatgaagaggctaatagtataagtgtttgaaattagtgctcacattttctattttaatattaatataatactcattgcaacgagctgttggtaataggtacatggtgcgtgtgtatatatttataggagacagtagagtaatattatttagtacatgcaatatgcatgtcatatttaaatcacttcatgaatatgttaattggtcatttatttgttttgcgtgcctatgtagttttactcatcataatttct

SEQ ID NO: 64270 - DNA, 2080 bp, Cannabis sativa
aaatgctctccttgttgcattaataattaatgtattctatgcaaacagtactgcgaaaaagtttgttgatgccactttgatcatatttgacatttcttcttttacaaaatagagctccttttttaaccccaatgggtggtttagcgttaaggagtgttagaaagttctggtaggcatttgttccaaggtttgaatccccgtagattgaaaaatcttggggccacgagaagttctctcgattgaacttgctagggccaaaaatttaaaagaagaaaacatggaacccctttttttggggtaaagaaggggagccgatagcagcaccgagtttacctgaagaaggaaattcaaatagtggttatgtatcttattttctttgatgtattctccttgatgtctcaggtgacctgaagcttattgcaactcagcagtataagaacgtgtgtatgaaaatactaatcatttagaataacaccatagctatgagttatacttatggctttcataaaataagatagttaaaacatgtaaattgtcaggtgtgatgttttgtctacttttcttgacagctacatatatgactttaaactatctatagggttccatttctgaattttattttattatatgcaatatttgtattggtcaatcttattcattgttatatgcaatttgataatttgtgtttctatattaggctcaaactgggacaggttcactatcacaagatggttattaccctgcactgaaaaatttctcattgagtcaaaaagaaactgctcttcaagaacttctgcgtgaccagtggctgtatcgtaccccagatggtaacattggacttggaatcagatctttccttgatctacgaagttggttccataataatgaggttcctttatgtgaagtttgcaatgaagctggagtgaaggttgtacctatgtttctttccgttggacaagagtttttcttttccattattaattcgtcttttgtttttgtcattatactggacatgcatgacgataaatgcagcaagagcattggttgtctgtgattctctctgtggtttgtatgtgatgttgaatctaactcttggctacttttgacaggcggaactctgccagaatgaagcgtgcagtgttcgaattcatcagtactgtttgaagaaaatgttttcccagcacaaggtatcaatcttgatgcacatttccatcgctaaaagaaaatttctaaaatcataaattgcttaaatttcagggtgcaagagtttgttctggttgtggcacacaatggcagcataaaggacccaaagccgaagctgttgaggaagacgagaagccaactgtagaattgcagagtcagcggagtcagccacctcctgcacccaaaagaaagaggctacaaactgatgatgcagctgaatcgagtgcctctcaacctacaatcccaagttcaaaccgtagaagagttactcgaagttcttcccacacttgataaatatggttacaaatattcctaggtgaagatgagcatgctgtatattttagctcaaatgtgcatatattacctctcttggtggagagttttttgctacgattagagtaacattagagttactaacaatacatctcccttaatttaacattaattagtgaatttggttaacaaatttaatggcactagttcactttccttgtacgtacatacaccacaccacctggtgaaactactgagaactgaggaggaatctgaagagagaatggtgttcatcaactctttttgtttgctagtgataatatgtttttatttttatttcatatattttttatcaaaatgtgtgttccttgtgaattcatttcttacaaatatccatgttcttacatctagatttggttatacccaaaatagaactccataaaactgagttatgttatgaatgggaagcttttcttagaattaattttgctcaaataagtgaaatccacacaaagtcttattatttttttttttggcttttcaccaagtcaccactggatttctaaaatggattagcataaaagtttttgctccaagcgaaatt

SEQ ID NO: 64271 - DNA, 1182 bp, Cannabis sativa
  modified_base (1155)..(1156): a, c, t, g, unknown or other
gtatccccttcatttcttgatttcttttcattaattcttattttttactgtattagttgttgggactaaccatcttggagtttcatctcgaagagtgtcactaaggttatttcttgtattctatggatatgtttagggatagcagttctaccagtcaccctccaatattagagggtgctaataattacacctattggaggaccaagatgagtgccttttcaaggcattgaatgagcaggtttggatggtagttgaagaatggtggagatctcttatagaggatgaggttgaaaaggtcaagccaatgagtaattagactgtagaagagattgaacttgcaaactacaactccaaggctatgcatgatatcttcaatgttgaaagttaagactacattatttccagatacgtccccacttcatgtaactcgaagttgaatctttctcattagaagtagggtatctccattaaagccttggagttgaactagacaagatgttagaatagtttccactaaactgatagcttgaaaggcaatttcgaagagaatattgacagaatttttgttatctactaaaattttgacaccctcttatttttaatttgagcttcaattactaatgggtcattatgtggaaaatgcatgtgccaagcatcatcttctataaaagttattggaagattcatcatttgaggatggtgagcatgtgtgtgtacaagattgtatgtttcttattgttcaagctcattcacatatctcttttgagcatttttggtgctttcggcaatatgtgggcctcgagatattgctaccacatggccatctgaagttggtggaataactctaggtggatacgagtctcctggtccaggagcaactacaagtcttgccactaggaatatttgtaccccctgaggggcctgtatagtcagagcttgtattctaggagattgtgtaaaaactactttcttgggaggatttatggttccaggctatccaagaataatgttgtatgtgtgttattccttgttcaggatagatgacgggtatccgcacccaattggataagtgattattccagactaagccttcaatcttgtcctttaaatattcacatttatttgtagtgtgtccatgttgggttttatgccctnnataaaactctttacaatctgattagt

SEQ ID NO: 64272 - DNA, 1002 bp, Cannabis sativa
  modified_base (395)..(408): a, c, t, g, unknown or other
gcagccgtcatcagtcgtagtcgtggtggagaggagagagaaaaattgaaattggaattggattttgaaatattaattgtcagagcatttattagtcaaaaactgaagggatgcccagtcagccttacatagattctcggacggtcgcgcttgatacttgtccccatccaaaggcagaagcagctcggatgaagtctacacgcaacttcgaaagtcccgtagagacttgggggcaaatgttgtcccaatttcttgcactctgacgtggcatcgcataaatggtgacatgtggaatccacttggagcatctgctcgggaagcatagtccgagcaggatgcctcgctagcatgccctgagaaaagctttcagcaatccgcgcagagcaaccaacacnnnnnnnnnnnnnntttcgcatcgtgagtcatcaacaacatccatataacttaatgatcagatttcagggatatggcatacacacgatcccatgatcagtgtatacagcatcaataccacgatctttgtactcaaaattaatcacacgatctctctgtttatacacattgtaacgagaggggaaactcttcctctccaagcttactagccctataaataatgatgcatgttcactgggcaaaaggtcgcaagcagtttagttgagactataccataaagatattatctaagaattatatattcagagatactcttgtaagagctctaagaaaaggaaccattctccttgttcttaagtcaatacaagtaatgaggattaggctattaccgaactgctcgagggtgaacctctataaaattcttgtatctttatattgctttattatatatcgattgctataaatcacttatcgcttattaaattagactcgttgtcgttggtaaaagtgaggtcaacacatcctattttctcaaaaatgtcatttttccaatttgaccacttgaatgccaaatcttattatttaataattaaaataattattaaataa

SEQ ID NO: 64273 - DNA, 591 bp, Cannabis sativa
gtatggatttaaatgttcatactcgagtcaggttcaaggcggggacgggagagtagatatccgcgccgatatattatatgtatatatttaaattttaaaatcttaaatattacaattaaaataatttcatatttaagttttttattgattacattaatgagacatttcagttttcataaaatacctgcggtgatgcatattaataatcacacttaactgctttaagaaaatgacacttattttcgattgccaattatgtatctactaactctatttattatacattctacttatttttctttttctaataagttcttatgatattttttttaattctatttgagacatcatttttcttttcaaaaatatatatgtaatgggtacccgatgagaattcttcctttgccggataatccccgcctcgtccctgctttaatttaaacgggtattgaaggggatatgggggtgaagttatgaagtgggtatgggagtgagggagcgatccccgcccccccaccccgtttacatccctagtgaaactctctaacaacttaacctttaattactatagtatgtggaagagcttaaact

SEQ ID NO: 64274 - DNA, 813 bp, Cannabis sativa
ggtagtggaatattcatacccacattaccaactttgagcctggtaagctcaaaattattcttactaaattacttcaggtacaccttttaggacactcgcgaccattcttttttcataacatctttccaaccagaattaatgctaataagcattaccgtacatgcattaacatgcttaacaattttatatctaaattatcatacttctctaatagcttacacatttcagataaacaaacaattcaaacaatcaataaataatctactaatcaactaacaagtagcacttactaagccatgagtcgaatgagtcttcacatccaatgtacatatcaagccagtcttcaggatctttagaccttggacgctctgataccatgttgtaacgccctgactctcagggacgctacatgtgtggcttttgcaatattattattactaatttattagtttaggattaagtgttgtttaactaaatattttgattaaatttaaaataaaaactttcattcccaatattgtcgtaatatggggatcccttgctaataaaattcttttacaactaattgcaaaactgttattacaaaagaaggttacatttccattcataagaaaaagatttgattctgctgctcggaagccaatacaccacgcctgatatgtacattgctgggagacctctgactcatggccaaacacgactgctattcttcttaccagcatcatgaagcactcgtgagttatagtgactcaacaagaacagctactaaataaagaacatagaaagtgctaacgttcacaacataatatacat

SEQ ID NO: 64275 - DNA, 1062 bp, Cannabis sativa
tagacggggcacggttagcaacactgataccacgaagacttgctcttgattcggcttgatgtatcaaggaggagaatccctcagcacaaatgataaagagataagtggaaagaggatcgccttgtcggattcctcgggaaggaacaataggtcctatgattcggccattgtgcacaacagaataacgaaccgaagacacacattgcatgatcaaatttacccatttgtcagcaaaccccatcttagacgtgatagcatgaagatagccccattcaactcaatcataggctttactcatgtctaatttaactgccataaaaccttttttttcctttggtctttctttttaagtagtgcatgacttcaaaggcgaccatgacattgtcagagataagaagaccaggaatgaaagcactttgagtgtcagagattaccttatcaataatatgtcgcatcctattagcaaggacttttgcagctactttgtaaagcacattacacagagcaataggacgaaggtcggccatagaggagaagttcttcttttttggaatcaagacaaggttagtttcattaatcccagcaggaaaagaaccagtgatgaaaaaatcattaacaaacttgataacatccttaccaatgattgcccaatgagtttggtagaaacttggacccatgccatcaggtcctggcgctttgtcaggatgcatttgaaatagagcttgtttgacttcctcatcttggataggctgaaggagatcattattttgagcaatgtcaaccgaggaattgaccccattgataaccgaatgatactgggaagcattagcaatgtagagatcagagaaataatcaaaaatgacagtttcaagacccaaatcccaatcttttagaaccccacggctatcttgcaagacattaatttgattattgcatttttgagtgcttgcagaagcatgaaaatatttgctatttttatctcctccatgtaaccagtgttgttttgaccgctgcttccaataaagttcttgttgggccaggatttcaaaataattagtttgc

SEQ ID NO: 64276 - DNA, 1254 bp, Cannabis sativa
gcctttcatcctcaaacgaatgggcaatctgaacgaactattcaaatacttgaagacttattacgagcttgtgtcatagattttggagggtcatggagcaagtacttgcctctgattgtattctcctacaataataattatcaaagtaccataggaatggctccctatgagctgctctatggcagaaaatgtcgaattcaattcattgggacgaaacaagagaacagaaatatttaggccctgagttggtccagagaacaaatgaggcgttaaacaagatttaagctcgaatacttgcttcacagagcaggcagaaaagttatgcagatcctaagcgtcgggacattacatttcagccaggagaccatgtcttcttgcatgtgtcaccaacaaaaggaattaagcgctttggaaagaaaggtaagctaagccctaggttcataggaccttttgaaatacttgagaaggttggataggtggcttaccggttagccttgcctccagcattgtcagcagtgcacaacgtgtttcatatctcattgttgagaaagtacgtatctgatccaatgcatgttctaagttatgaggcattggagttgcaactagatttatcttttgataagcaaccagtacaaatcttagataagaaggagaaagtccttcaaaacaaaaccatagctttggttaaagtgctctagtggaatagtaaagtggaggaagccacttgagagttggagtctgatatgtggactcaacatccaaagctattcaggttagattttgaggacaaaatccttttaacgggggataattctagcgatcgcaatatttaaatatgaattagtgagattataagtactaattttattattattatcattaatattgacgtttcatgtgaatgattatgttaaatgtaaaatatgctctctttatgattttagctcgacgacgatggaaaatgcaacggaggtcattttagtcacttggggaaatataaagctttgtagtgatagagattatgtcatgtaagctcaaatggttagtgttagcgagcttgtggtattggaccattttacccctaagtcgattattgaactaggtttagtgatgggagtagtttagtaatttaccctttttgattgagtgtcttcaccataacttgacagctgccctttaattaaataaaggctagttaataaccttttattagttaaattgtgagtttagtaaatagaaaaaaaaaaaaaaaaa

SEQ ID NO: 64277 - DNA, 2056 bp, Cannabis sativa
ttttgttctaatttaaatggttattggcctttagttaattatcatgctatgaatgattgtcaaccagatttttacaattggaaccgcgtgaagctaagatattgtgatggagcctcttttgctggagatgggaagtttgacaatggggtatgatgattggagtctctttctttaatttttttatttctttttagcacccaattttcaaagttttaagatattacattcatggtgatttaggtccctttttctttttcacccataattttaccaaatcatagtcatctcactcaaaatgtgaatatcccattaattattcatacaaatatatgttaattatattcttacttacacatttattatgttctctaaaatgaactacagacatcattgctctatttcagaggtcaaaggatctgggaagctatcgttcttgaccttctacctaaaggtttaggacaggctcacaaggtatatcttttttcttaattttttttgggtgaatcagctaagtatttattggtcaaatttacatttgctatctaaacacacacgtacacagtaacacagacatgacatatatgatcttaaaaaaataacataatttaaaaaagggaatggtttatagtttttcaatatcattattttgatattttttctaggctcttttatcaggatgctctgctgggggtttagcttcctttttgcattgtgataacttcaccaaatatttaccaacaaataccactgtaaagtgcttgagtgatgctggttattttcttgatgagtaggtgatcatttctgtattaatttattaaattaattgctcttttttttttttttttaatttttaatatttttttttacagggctgacattagcttgaatcgccctatgaggtctttatacaaagaaatagtttctctacaggtatacctctttttcaataaaatttcatcacttaataagttatattgcatcaatatataggatttttcttgattaatttaattgcatatttatgatagggtgtagagcagaatctggacaagaactgtaccacacaccttaaactcccagagttggtattatttcctcagcaattttgaattaattcttttatgatctcattcttctgatgtttgattatagcttatatatattgttggtgcagtgcttttttcctcaatacgcattgagattcattcagacaccattttttgttctgaactcagcatatgacgtattccaagtactaatatgaaccaagttaatctaattaattaacactacaaattgctaatttgaaacaacttctaaaataatgttatttaattattaacagttccatcatgggttggtgccaccttctgctgatccacatggtcattggaaccgttgcaaacttaatcctgctgcatgtgatgctaaccagacagccatattgcaaggtcattatatatttgttaataatgaatttcttaaatggagctaccttcacattattaattaattatagttttgtaaggattagttctgcatttttcttaaatttgattttttttattttttttggctgtagatttcaggcatgatatgattgtaactctaaattattcattcacccaaaactcaagaagagatgggatgtttattaattcatgtttcgctcattgccaaagtgagtctcaagatacttggtttgctgttgattccccaacagtacacaataaggtatcggaaatctctctctctctcttcaaaaagaaaaaaaaaatattaatttttttctcaactacctttcttttcacttcaaaataaagtagttattctattaaaatatattttaacactttaaaatataattaaataaaaaaataaataaaaattaattcactttcatttcattcttttttattacctcaaactaaaagtagctaaataatttcttaagaaaaaaagcattgttataaataggggtgggcatccgatccaatccaaccttttttcctcatctgatccaatccaattagtaattggatttgaaaaatcatca

SEQ ID NO: 64278 - DNA, 1615 bp, Cannabis sativa
acctactaccccacggtcaacacctcatcctacccctctaaatgacaacctcaccactagtacccatactattcctatttctagcatagacactactaccaatgctaccactttaccaaactcattccataatacattaaataatccattacctactgccaacctacccactgtccctgccgaacacacttttgactcacctttacactcacatgtccaaacggctacaattgaaactgtgccattgcagcagatagtgacacatcctcaacagttacatactgtgcctcctagtggtgataaggacactacaagcacgggtactacaactacaaggactcactctatgaagacaagatctctcaatggaattacaaaacccaaagcctacacagctaccaagtatcctctacccgagtcccttataccatttgagccaaaaaacactacaactgccttaaacaatcccagatggttcaaggcaatgaaccaagaatttgatgctctcaaaaaggcaggtacatggtccttggttccttattctccacatatgactgtgattggcaacaagtgggttcacaaggtgaaacttgatgctcatggcaatcttgatcgactcaagtcaaggcttgtagctaagggctacttgcaaacacctggcatagattatgaggaaacattttctctagttgtcaaacctgcaacagtaagaattattcttaccttagccgtgtcccttaactggcaagtaaaacaattggatgtctctaatgcctttcttaatggtgagctacatgaaattgtctacatgagtcaaccagaaggttttgttgatcctaccaaacctactcatgcgtgtcaacttcacaaggctctctatggattaaagcaggcccctcgtgcgtgaaatcaaacacttagagacaagctactggaatggggatttaatgcttcaaaatcggacacttctttgttcacatatggctcgggtaacaacataataatactacttgtatatgttgatgattttttagtcactggtcctaacacttctctcatttcaaagttgattgctgatctcaacaagtccttctctttaaaggacctagggccggttcactatttccttggtattgaaatttatcgtgatccaggcatgtatttgtcacaaacaaagtatatcacagatttgcttgttcgtctcaacatggaaggagccaaaccttgttctaatcctacaagttcttccatcaaactctctcttacagaaggagaaccttttggtgatcatactctttacagaagcacattaggtgccttacaataccttactcttacaagaccagatgtggcattcattataaataaaccaagtcagtttattcatgctcccacaagtcttcactgggaagcttgcaagaggcttatgcgatatctcaaaggcaccattcatcatggtcttcatatcacaccagctccttctttaactttagaagggtattcggatgctaactgggcatcgtgtgttgatgatagacgaagtatagggggttatgtgatgttttttgggggaaatcttgtgtcatggtcagctaagaaacaacaggtggttgct

SEQ ID NO: 64279 - DNA, 1052 bp, Cannabis sativa
  modified_base (1019)..(1026): a, c, t, g, unknown or other
ttgattatgaatcaccatacccaagccactacattttcccaaagaattgatagctgcatctgtattgactttgagataaccaaactaggggattccatttcggtaccatctgaagagggcatggacgaggttccatcccactagtagggacgtcaatcgtctcccctataaggtgatgcctttatcaaggtctgtttgtcgtgaaacgtccccagataatcacgggcccaatgcacagtaagcatgggattcagctcaatgttgttgtggaccattttattacgtctgaaccagatcctccacagagtcgccataaccaattcagtcaactcctttgaaatggggtcaataaccctgtgaatgaaatcaagaaaatccacacaacgaacaagaggatcccccaacacaaactcacaacatttcctgtaatgtaccaacgtagagcacccccaaagagcatgatgagtagttttatcttctaacccacacaaaggacaaagcccataagataatagaccatgacgtgcaaggttaattttagtggggatccaattatgtgacactttccaagcaaagagtttaatcttaggaggaagattaaggggccaaatatttttctaccaactagaagcgccaccagatggagaagctcgaggtgcagccaaagtgtgaaggctaagctaataaccactcttaacagaataccaacccgacttctcaaagttccaaattattttatctggcaaatcatgagaggaccaagggatagaaagaatagattcagcttcatgaggtaaaaagttggattgaattaactccttatcccaatcacctgaatctttccttaacactgataccttgctagaaccatcaatttgactaggcgcagataacactggaggcgtcacacaaggaatccagttgttgttgtggtaattgcaacacgcaagtatacacattatttgaacaagtattactcacaaagagtgaggttgatcccacgaggattgtagttaagnnnnnnnnaattaaacttttacttctatttggct

SEQ ID NO: 64280 - DNA, 536 bp, Cannabis sativa
tccatggattgtgaaggcattgtgttatatcctgaaattataaagattcacgaagcataattggaatcatcgtctaaagtggcaacatcaaatcatccaattcttttgatgtggtcactccaatactgcaatcatatacaatcaactctagtgtttgtatgtctgctttaactataacccaatgatggtcttatatgtttaaagttatatacaatttttttccgtctttccaattctcaccccgtaaatgaggcgattcgcctgaaatgtatcgacttaactcattatgaatcatgtcaaggttagattttaagttgatggtcaccaattgaggaaaattttcatctaaaatgattgcattttgtgcgatcacatcttgatacaaatgttttcgccttctaatcccaaacagagcatcgtcaaacctcttttgttttccagaatcaatatttctcaaaggatcaaattggatatgatcacctcgatgagctttagtataatgaaaacggtccgtatatggtggctctaagtagtgt

SEQ ID NO: 64281 - DNA, 1101 bp, Cannabis sativa
cgttctattattttgaacgaatttattaattaatagatcttatgatttttattcaaaaaatatatatctatatatacatatagtttataaatttattttgtagaattaataatttatttaaaattgtaatacatgtataaatattatattttctcaaaaataattttattatgatataatattgaagattatttattgttacattaatattttttaatattttaagttttttcttaatgtaactctatttaattttaattcttaattaaagtataatattttacttgatctcaaatttattcgtaaataaatgttgtaatgtaactttaaatttttgaccatatgatatgcctatttaaatttccatatggccagccacatgacttcttctcatccattttccataggaatattcttggcaagtgggaaactgtcaccccatgtgacaaattgtcagtatcttacactaagatagtgtattttaattgttaaataaataataccaaaatgctttctaaatcaatatttgaatttaatttcttgatctagagctgatttgtcaactgcctattattttggagtttttgttttctttttattagttgcattgcaattttcaataaataaatatccattcacaaagtgacaactggcttttgtttactcaaaaaatcatatacacatatttgtatttatccataatatttgccatatataatattgtactttactaaaataattatatggaccaattctttaaacactgatcatagcatatttgtcatacataatattgtactttacgaaagttataattatatgcaattatttgctaaggcaatgagatatttattgtattttcaaaggctttttaagttaaggagttgtataatataacattgacttataaattaaaattagttaacgttccaacaacctaaaaattatttgtgtctttcatactatttctcttttgattatttataattagtttttttaaaaaatttcagtaaacaatatatataataacaaataaaaattaaaatatatagtatatactaataaaattatatgtcttgtcaacaaaagtagaatagaaaa

SEQ ID NO: 64282 - DNA, 1532 bp, Cannabis sativa
attatatatttcaaacagtatcagtgtatttaacattagagattattttttttatatataaatcaccaaacttaatatttatctaattataaaaaattactcgtaaaaattccctatactgagataaaaataaaaaatttcctgcacattttgaaaaaatacaagcaaagtgattattcaattgaacctgacatcttttaacaaatagatatcaataatgacaacttctatcaaatactattgcccagaaaggaatgagttttagttcttaattttttttttagaagaaatcataacaagtttggttcgaccaaataattaacaaattataatggagatgttcaaagtatttacaaaagtatatacaaacagttgtttcatactacataacaattttaagaattttgcagcaacatggaactatcataatacttgtgcattatcaacatagtacatgaaatctgaagcaaattgggaaatccagttcactgtcgtaccgaagaagagctcccagaaccagagatccaatgctagaactgaagaaaatataagcaatgccaaagtctgatagcggttcaatggccaacctgaaatttcagccattttcttcagaaatggaatggaattgctcttcaagtctttgttccttattgaccaagccgttatccaccgcacacgagatggaacaagatcaaaatcctctcttagacgccgtcccaagtctggcatgtggccacctccatagagtattgcaatcctgttgttgccctcatcaagcgacttgttaagcgcctcaattgctgctctgtttctttcaccaattatgaccgaactctcttctacatcagctgtcacctgtgtaaatcttcaacagatagtactctacatcagctccgtagaaaagcttaaagccagtggttagctccccactatttcttttccagccaaaactaattacactctttggcaatctttttcttttcttttttagaagcaattggcaattaattatcactctattgtgtttattcaaggctttctgatatatgaacttagtttaaaagtattaacataaaccagaagtgataagtatgagaattaaattgcaatgtcaatccaaccagtgaatatgaattttagatgaaagatcactacgttacctctagcacactaaaaagaatcgcagtaaaaccctcaagcttgtagaggggagaaaaagaactttatggtcacttactcagaagttaatctttttgctaggaagactttcattgcagcaccaaaatctagcctagacaaggcttcaagctctggaaactctgatgactgactttcaccgtctgcacagacacccccaatgatgagtaggccaactagtggcataggaagcacccttgacgcccatagaagctttgatctccaaggaccaaggtcttctcgaactgaagcagactgaatcatagcttttgtggatttaagagtcatatctcttgcaaaggagaaaaagctttcacctttttccatctgaaaga

SEQ ID NO: 64283 - DNA, 2180 bp, Cannabis sativa
acacagtgaaaaatatttgatttcttgggtcctggccttgaagagcatgatattagggtcttagatgaggactttactgctgatgaagttaggaaagctgtctttcaacttcaactctcaggggataaggttgtaggtttagatgggcttaatgcaaacttttatataaaaaaaaaataaataaataaaaattgggctatcttagataaggattttaccaatgcagctttggactgccttaataagagaattgatttcactgatgttactccactgttattgttttaattcccaaaaaacaacatgttaatatgcttaaggatttttggcctattagccttttgcactactttttacaaagtgctttctaaaatccttgctaatagactcaaattagttcttgacaaaattatctctctcttttagagtacttgtgtttcgggtaatgtgatttatgacaatattattattgctaatgagcttgtccatgtcattaataatagaaaagtaggtaagaaatggtggactgctttaaagcttgatatagttaaagcttttgatcaagttgagtgagtgacatattatttatgtttcaagagagtataagaatttagctcatcattttgctaaggcaagtttaagattaaacaatgagcttgtatggaatttgaaccttatgtatcttgctcttttagtaaagttcatgttttttatattaaaaaaaaagtattaaacataatattatttagagatgaaaaaaaaaggccttaatattatttagcaaattatgtttagctaggggaaaaatgagtggaaaggaaatttcaaatgagaaaactaaaacaaaaataaaaataaaaaataaagcatattcggtaagtaaaaagaaaaagaatgtaaaggaaaagaaagtgaaaaaaaaggtgagtcttggagaaaacttcgtttccaattttagtgagaaaaaaaggggtagaaagttctttaaaactaacaaaaatgtataattattataataatttatactaatgttattttaaaataataattaaaaggttacaaagtaattgtaaaataatccaattttatttccttgatgaaaacacattatactattttccttcttaaattttttcttagttttttgcctcccatcttaatttatttcctctctattaaatttaggataagttactcgggatgctagttaataaaatataaaaaaaaaaaacacaagattagttgactttttcatttttttttttaaaaaaagtaaattaataaaagatagaaaaactcaaattaaacttggaagtaggcaaaattgatgtgaaattggtaaacaagaagaaaagacatcgtgaaacataccataaccttccattccatcttttattaaagagaaaatgagctaccaggaaacaagtcaaagagaccattaaggaagacattattgttggatccatttcatagtattagtaaggggcaaaggcaaccttgtaactacgctgagggaccttcttaaagtttgcccatataaggtcaaaatagagtggaaattgagcaagagcaaataaagatacaggcaagcatgtaatggcatacacgggaaatgctgcatacttgagtttctcttgaagaacaaagaaatgaccagcacagaaagaaaccaacatagaagcaatagacacaaacaaagatgttaaccccatcaacagctttctcggcagatcacctccaaaatctcgttcttggtaccgagaggtgagtattgctaggaacatgaccactgaggtaactgagaaacacaaggccacaagcgaagctatcgcgaaaacctcaaaagccggcttatcttccagggttggcctaccactgatctcgttgttgcctcccgggacagtggtggacgtagcgaaagcaacggtggcaataagagcagccaccaccgagcacgactgtgaagtgcttgtcaaccattctccaccggccttgaggagacctgtgtgtgtttcggtgaaaatgtcctttgctgtcttgctagcgtggttgtagcgcacaaaaaagttcgctggcatagactttttcacatactgcatgaaaagacccaacaaataaatatgatttcattcatactagtttaacagaggatataataagttagaacatactattggaca

SEQ ID NO: 64284 - DNA, 2038 bp, Cannabis sativa
aacaacatagcagtctagtatttgaactgtaagtttctttaagactaggtcaacaacatatctcattgtcacttttttttttgcaccagaaaaagccggcccattagaggagaactcaatgttgtcatgggatacaacaacctgagaaagcccttttttgctttgggccgggcttaagactttatcaataaccttttcaaggtttgtatcagtgggccaagtaatgaaagtgggctcaggaaattggtggggtactcttgatttacaaacctcttcatgtggtctatcaaccatttggtcacgtgtgggccctatgtcagccattaggcttgctatgataccctcatctcttctcttattgtctatcttagtcatagggtgttttttagaattgggtactgatatcagacccatatttcccaaattgttcatcttctcctgctcccttaagcacgccttctttgccccatgtaccattttctgttttggtgaaagcctcaccccaacgggtctctgcgattctggccattgtctccttgcttcagacccgtcactttcatcttccaacatgaccatcttaccctttcccctgccttcctctggcagcttctcgatgacgtacgacactttgatttcagggactttcatcctcggaattgccgggtcaaaacagtttttaattggtactccaaccttaatccatgctccatataagggaactgcctttccaatgggaggatatgcatactccaatggtctatcgcatttcccataagagtgagctagatgcccacaatgaaaacatattgctggaagtttatggtacttaaattgcacccattcttttctatcccttgaaatgtttaagtagaaacctgccactaatctttggtttaggaggatatcaacttgaaactttaggaagcctctccttgcgattgtggccctcggatctctatcaaagtcaatgtactcccccacctttctcgcaatcacatcagtattctcccaagtgagatatggtgtcggtaatccatgagcctccacccaatatctggctttattcatatcgacaccctcccagcaaccatcctcaggccattgaatgatattcaacagaactccattgaccaaccaaggtctttctttgagtatctcttttttgtcattctcattgttaaaaaatattccccataagccaggtttcattgtcttcaatcgccaagaaccctcaagtttccaaatctttgataaaatttctttcacatggccactagccactgttcttcttccaaaagttttggtcaatactccttttcttgtgacttctgcacttagctccacatctgcctctaaatagagggtcatggactcaataaactggtgcctcatttcatctacatccccttctccctgagtttgttcccctgcagccaatacatcccctgggggttccaatggttcccctccgatgcttatctcttcttgtatcctggttacttccgtaagcttagttcccattcccatctctgaggtttgctccattgtttgaaaatagagctaacaaacttggtagaaattaccagagcaagcgcacacttcggcacagcccgaaatcacataaggtgtaaattttttctaaatgatctttctttagaaatagcaattccattcctaaaccaatggaatatgccccatactaattaatttttgttcaaagaggagtttttacgtgtgtagttagggtttggtttaagaaaaaaatctcacatgcatcacccacttaatttagttcagctaatggtgtattacttcaaaaaaataccctttaaaaactaaacggcacctttcaaaagtctcgacttctaattatttacaatgtcaactcaaaccaagctatatcttcttgaatagcatttcctttcttaacattgttaattctatatttgacattatattgcactgcttgtatatatgaacttgtaagtgtcatgtctttgtgtggcaaattatgtaaatacttttgtttagtatttct

SEQ ID NO: 64285 - DNA, 772 bp, Cannabis sativa
ctgtgacatggctgccactcatgtgtgacctggctgcttgtgtggctcctcaatatttggagattccctgtcagagggaatattctgagtatagtacaattcggttataacaaattcagtgccattgtaatcattgctgtataatattccttgtacaatctcttgccatctgtcctctgttcaatggtcaagattgattcttgtaaactttaaatatcaatgaattctctcaagctcattgagctgagttttgcaattctctattttctctgttttactaacttttccacttggtatcagagcaggtgctagccgtttgtcatggctacagacgaatctcagactcctggaagaggtgctgcacaaaccccttcgatcaactctggtgtcgtcttcactgggtcgtcgtctgcaaactcagcaacaatgtcgacacccttcagcaataccttaagccagcccttcacgatgaagctggatagaagcaatttcccgctgtggaaaacgatggtaatgaccattatcaggggacaccgattggaaggcttccttaatggcgctaaaccgtgccctcctgagtttctggcttcagaaaatgatgaagcagagactctaaacccaaatcctgagtatgaactctggataactcatgaccaactcttgatgggttggctctttggctcaatgacagaaggcattgcctctgaagttataggctgcagatctgctgcaagtctatggacagctcttgaagacttgtatggtgctcatt

SEQ ID NO: 64286 - DNA, 567 bp, Cannabis sativa
ccaccaccgccaaaaatgttagtctctgactaagccggtatcgcacgggagaaggcagagagagaatgtgggttgacaatgtaatgactgcatacataaaatatgaaattagtagacaattatcattaattaattgtattaagtgattatatatgtttattatgtgatgtgggccctatttttaagaaataggtatttaagttataatttctcagttacagagatttattaaacataagatgtattatatatgacaaacatgcattttggtatttttgtgatttatgctcggcggtggaaatatgatggtttggccactaaagtcacataggtttggtttagaaccttttatatagcgaggcaagtattattgatatttagaatatcgggtttagacaggattatttttgaccattttacccctaagttttacaattaagtgtgaagtaagggaaaataatattattttcctaagtcgttattaattcttgaataatttgcggcataaatacctaagtttaactcccagttgcaaataaatacccaagtttaatttttggcggtaat

SEQ ID NO: 64287 - DNA, 2778 bp, Cannabis sativa
  modified_base (2708)..(2738): a, c, t, g, unknown or other
aaaaaagttacttctaatattggttgttcgaagacagtaaaaaattaattttaaactttaaaattttactttttaaatttttaagttaattatgttaactaaatataatgattttattatttaagataccttagcgttatttttaatttaactattttttttttttgtggaggaaaaaaaatatatacttcccacatgttaaaatgatcaccttaaaaaatgaattgtatagtgtaatttttgagtctaaataataaatggtgtgacttaaaaaaaaatttaaactttaaaaaaaaaaaaaagataaaaaaaaaagactgtaatacaattttaaagcttaaataattattgtacgcttaaaaagatttttcaaattataaaaaagagagattgataataaatagcaaaactaataaaataataaactttattcaataaaaaaataaaataataaactaataaaaaaaagttaaaaaaatttaaaaaaaaaataataataattacaataccaacactaacgagcaacatatgttaaaagagatgagagagagaacgattaagaaaaaaaacatattgttatttgaatgtattgagtataccggttatgaatttaagatggatggtaatcggtatatgtctaaattttataagatgtcatatatctgcaaataaaatacaatttacgtctttccgtgcaattaatctttttaagtgtctttatttatgttttcttaatgtgtgtgtatttttggagcggattgttgctcgtttttcttaatttcaggtttaagcaaatgttttgggcatttggaatggcatgtggagagaaagtgctaaaccaagctcaaaaatacaagtgccaaaattgtattagggatgcggcactaatgtgctttacaaatgcgacaagaaatgattcacatattgaaatttgaagtcccatactgaattagggtcgcgtcgctaccgatggtgttatggcagaatttagcgtcgtggcgagggttgtggatgtcacgacgagccactacacaaaggatgacaatttcccacggtgtctggcaccgcgacaaatattggtgccatattggctttatcgtccatatgaatcgcaaaattttcaattttaaagggggcaaagattttttttcacttagaatcgctagggtcactatataaacacatttaagtgcgattttcatcaatttttcacttctaaaaagctcaaaaatttatttggaggctagggataatgaatattgaagcatagtgacaaccccaaatctaatttcttctctctctcttcctgattttaatgtcttttatagatttgattatgaacatgttaatggagattattagctaaactctaatttatggattttaaagaagattgtttgaaactttctatggattaatgctattttgattttttcttcttctattgatgtttcatttattcatatttatgcttattacatgtatttgattggtcatcctatacatgatttatgatttcaatacaaaagtgagtattgaatatgctctaattgaataaatataagtttcgacacaaaacgagagtatttatagggcttgtgtagcttttaggttattacttaatgttgattatatgtgtgttatacctcaaaaaagtaggataatgccatataatttagaattaatatgtcctactcagaatatatattattttataatctgttatcatactagatagaaaaagaatattagtttgcattattgaaataggaagtggaagtggaagaaactgaaattaatttccctatattttatttcttaattaaatcttatttattgttttgttatttaattctttcttaggttatttagtttcacaatccattttttaattatcaaataaaaacaagaatttaattgattggtacttagctacagtcctcatgagaacgataccacttacctgagtattacttatacaaataatacatataattgcatgttggatttattgcaacatcatagcctattgttaaacaaagccacactatcacgtagagcctctcgcaatcaaacaaaacatcatcttcagccactcttcttcttcttcttcttcttcttcttcttaaacaaagccacactatcacgtagagcctctcgcaatcaagcaaatcttctcctcaatagcgtttgcctcattagcctttggggggttccaagtgtcctccaaccccttcttctcttctccctttccgacacaaggtttcttctcttgcaccttgcaagttgaaccaaacggaaaacccagctccttcgaaggagcttccacctcttcaatcctccttttcttcacaatagtggaatattctaggccattaacaacatgaggtctgggccggtctctcaccaagttcttaccttttaccttgccattgggctgagactgtctatgggccagcttatcatttaccccaaaggcccctttaaaaatgatagctaaatgatttaccctgctttccatgttctcaattaacccacaacccttaggcccaatcgtggatgagacattacatccaccattcacattagccgacctcataggatccttaagtgtatttcgccacgtcaccatccatcgtaccattctcatgcacaatggtattaccactacgcgactcaggtagtacatgttgggttttgtgccctannnnnnnnnnnnnnnnnnnnnnnnnnnnnnnctaattaataaagattagaaatcgtttttatgttgcatgg

SEQ ID NO: 64288 - DNA, 604 bp, Cannabis sativa
atcttaggggttcggtggatataaccctttatccctacttgactgatgtgattcctcataaagtagctgtcactaggcttattcatcataacgtaatagttgcagaaagggagttatgccgtcagacttaatacttatggcagttccaatacgtcttctcccatgcggcattaaatgcgaggtgactgttcaaatggggtctggggcttcccagaggtgctttgctatagctctgctctctgggagtacgtggacctctcatctcttctccgggaggtattttctttgttgatactcttgatctaaaaagacttagttaaattatctcaaaaccatattcctcgaattcacgtgtcggagtcgcattggcccacgtattttgggaaaaattaagggcaacaactaccaaaatttaaacttaaatatttatttacaactggagttaagcttaagtgtttatgccgcaaattactctttatattaataaacaataaagggccttgtcactattgacttcctttttttttttgtttaaaattttgttttgaatgtgaaatcatcttcttttttcttaatgctttaataacttgtcttgcactttctt

SEQ ID NO: 64289 - DNA, 683 bp, Cannabis sativa
tccaccaccttacaataattctctccatctgcatttataataatataacacaacaaattcttattaatcaattaacattaatccaacttatatacttaataataattattatttaaaaataaataaattactagagttctttccttcacaatgtttggcaatccattaaaacttttataattaatttttttaacaaattaaaaaatttcaatgaattgaagttgtcattttactatattagtatatgacctaagaaatatttttcaattaactcaaagtatgtaccgaaatattaaaattaatacttttaatccataattttttttgtgcatatgttagattactatttttcagagctggttggagactaattaggcccttggtagcaacaaaattattagagatttttttaaaaaaagttgtagtaatttcaaaaattattaaaaaatatatatatgtatttttcaatttattagggtagattttaggtccgagcctaacctgccttagctcaagttcagccttggtactcttgcaaatagtaaattagtgtaagggagacactattttttattcgtaaatgaaaattaattaagttacatttttacataaataataacaataattaagggtacttagaagttaattacctcttgaaaaggaagaataaggatggtctttgt

SEQ ID NO: 64290 - DNA, 1296 bp, Cannabis sativa
tataaattaataaattaatttattaatttaataaattaataaaataataaaataatgaaaaactaataatataataataattttgattaaaatactattaaaaatatttagtgaaaaagtaaagagctccctacatttagagagcttcctattctttcgctattacatagagttattttttgtatagcttgagctcatttttttcaagtctcacttcttattttttagctaaagaatgtgtttagagagtatatttggagataatcttaaacaccttagtacctcatagtaatactcaattaaagcatctctaaccatgctctctaaacacactccttaacttaaataaggagtaaaaattgaaaaatgagcttcaactatacaaaaaaataactctatatgtaatggaaaatgaaattcttacttttttgttaaactttttaatagtaaaagtactattaattttttattattttataaaattaatttgtacttaacaaattaatattataaaatattattaaaataatcaaatattagttaaaataaaaagcatgattgaagcaataactataaaagtagctctttatttagtttttttaattattttaactaaaaaaataaaaatactcttactatcttataaattatataacaaatatattctagtcaaaagatttcatggaatagtcaataaattgcagcgttaaacttgattaacgaagccaaactgcttttttgaggagaaaaatttcaatttgagagtagaatttgataggcttttgcttataattaattaaagagtattgttttggacaccaatttgtagtgatattttataaatatatagttaataattttatataatttttattaaaagtaaaataaataatacttaatattaaattatactaacaataatattctatctcacaaaaatattagtagatttctcttaatcaataccatagtggtgtatgtatgttaatgtgaaacattataccaaacagtaaatgatctaaagtcttgtggttacatttattagacaccttgcgtaaactcatacgagctattattatatgttaaattttgagaaaacaacaatgaattaaagtgtgtgttttttttattttttttcatttgggtgtgaattgacagaaaagtgcatgatgccatgtttgtttttagtgggatttcagtatccttatatggaatttcctctactctcttatttactttatattaaacctctatttcccggaactttcttaggtgtcctaagaagaaactataatt

SEQ ID NO: 64291 - DNA, 906 bp, Cannabis sativa
  modified_base (27)..(36): a, c, t, g, unknown or other
atctagggtgttaaacaacatacttgnnnnnnnnnntaagatcttggtaaaataatatccaacaatgactgctgaagtattctctgttaataagaactgcgattgtcgaaatgaagtgttaaactttcaaacaaagaagcaaagaggcatacatcatcaacctcagaaaggtaggagaaaaagctccaactcgctatcaaggtcattggtattgagctcctgtcgagacatcccaaaattatattattcaaaacttgtttaaatacacaatcattttgacccagtaaaagcgggtaaatcacagctatgtgatattcaaataataaccgcatttatacaacgtgatatgtaattagaccccatgatttcagacgataaacgttgtaaagattacagtcaactttgtaatcaactgcctactatgtgattataaatagtagaaagttagattaaaaaaggaacgaaaaaaatcataaggaaagaggccctaaaaaactatcagaaatctaataagattgactcgtagactatgcaaaattttaactgcaaaaccacgtaaaagatcctttgcattcatactttttcctttactgtttatatatttctgtgtgagattatcactatttggctcatatttggttaacgaaaatttgcgttagcatatactttatgataaaactattaaattaaatctacataattccttgtgggataaattaagagaatttaatttaacatattatcctaatcaattatataaatataataaaatccctgtagggtaagattattatatccacataattaattatatatcatgtccattatgtgatcttgatccacttaatatatataattttatgtaattaaggatgatgtggttactccctaattatttaaaattat

SEQ ID NO: 64292 - DNA, 1109 bp, Cannabis sativa
gctattggcgtcatccagtttgggcaagtatcaattatttcgatctcttctgtgccggtgatgctaggttcttcgaggaactggataggaactaaatttgctctatcagttacattactacttgcaagttgggctaacgcatcagtagtcgtgttttcttcccttggaatttgtttgagagtgtagcttttgaaccatgcgagcagatcgtgtattttgctcagatatgctatctcattttttctctccgagctatgtattctccagatacgtgatttaccatcagttgtgaatcgctgcaaatttcaatatgctcggccttcatctctcggactagttttagactagcgattaaagctttatattcggccttattattggatgctttacatccaaacttgactgcagtgtgcaggtgttgccccccaggtgtgacaagggcgattcctgcaccggatagttgatctgtgctgacccatccatatgtagtttccaagtcggcttgtcttcactgttacttgacagaggtacttgtactggctcggggttgtttttgaaatgccttgattactgttcggggttggaaagttatttcatactgacccagttctactgcccacttgagtaacaatctagaggcatctgacttttgtaatatttagcgtaacggttggtcagtgtacaccgaaagaggatgagcttgaaaatagggcgttgactttcttgttgctagaatcagaaagtaagtgaatttctctatcaatgggtatcggccttcgacctcaatgagtcttttactaatgtaatagaccgagtgttgtatgttgttttcctctctgatcagcacggcacgtacaccatgctcagtgacagccaagtatatcccaagttcttctccgtctagaggttttgagagtatgggaggctttacgagctgcatttttagctcttgaaaatgtttttcacattcctccgtccactcaaattacttgtttcctcccagggtgttgaagaatggaacacacttgtctgttgattttgaaacaaatctgctgagtgcggcgatccgacaagtcaaaatttgtacttccttagttcttgttggcgat

SEQ ID NO: 64293 - DNA, 925 bp, Cannabis sativa
agctcccttctatgagctacaagtcgtttatttatttttcataaaccctaaaacacctttagacatatataagcttcttttcattcaaacacacagcctccactttaaaaactttagcagagaaccctatagctgccttcgtcttcgatgttcttctctgaagaacacgaaaacagcagcaccaatatcagcccagaaaaatcaaaaatcaaatccagaaaacaacccaatcccagttcgaacaaacccccttaaaccgaaccttcttcttcatggttcttctctgaagaccacgaagaacaccgacataaaaatacccagaaaaatacaacaccgcaagcaattatttgaaatgcaaaaagaaaataatggaaagagtgcaccgattttatagaggttccctaaaaattgttgttgggtacatcctcttcgagctcgcctcagattgctcgtttccattatagaccttcaaagatcaaaagattacaccaaatcacgggtacgattggtaatctataattatttagagtgtttgaaaactctctctttctctctgtttattactaaatcaatactgactttttctcctctcttttccatgaacaatcaccatatgagtttattttaactaagattagattgagtaaccaccatgctagtttaattttttatgctttgctcaaaaaagattcatactccaaatcattttttttccttatccacttatattttatttttacaattttaaaaaatacttttaacatttagggtcagtttggtacgcaggattagactggactggacaagattagtgggtattatttaccccaccttgctagatgggataaataattccagacatattagattagctgtaatagttatccagacttctaacattcccaaacactggattagacaaatt

SEQ ID NO: 64294 - DNA, 645 bp, Cannabis sativa
gtttggccgtaatgaataagaccactaaccaattataacttatttatctagttttttaattttattttgtcaaaaaaaaaaaatgaatctattttattgtgcatatcaaatttataattgtccttcaataattttagtatgcactttaatttatggtaccgctataaaaaaaatttacggttttatttacagtaaaatttgtgattaataaaattaaaaaagttgtgactaattctaaataataatttttatattatgattaaaatgtttgtggctaaagataatggttacaaaaattgcaatttgtagtaattttttttttttttgaatggacattttgtagtaattaaatgtatttttagtcgtaatatttattgtgactaaactaaattacaacttatatctaaatactatattttagttgcaaataatattatgttaaaactaaaagtcatatattttagtcacaaaaaaattatatttataactaaaaaaattatcacttaactattaatttcacatttacaactatgctatatatctaacaattaacactagaagttataaactgatcatatatatatatacatgtgatgatcatagtgattgcataggtgaaattatatgaaatatatataaatgtac

SEQ ID NO: 64295 - DNA, 3148 bp, Cannabis sativa
aagttcttaaagcaagtatttctagttctataattggtatctcttttaatcatattaaccattacattcacactataagaatatctattaaaaacacaagtattcctattataccaaatatagtagactgttgctgaaaaaatattgcaacaatcacagtcttgacattcttgctcaatccttccatccaagtgaatcaatctttaaccaataaaaactatgaatctaatgcaccgcttgctgagagaagttacaagtgaagaataaatgagcagagttctcatcaatcataccagagattggacacaggcagttttcaagctgcataactcgttgaagatgatgccgaattaatagtctgtcattcacaatctgccaatgtataaattgatgctttggcatggctactctgttccaaacaaaatgttgatatttaatcatttctctgttacaaaaacttctttacatcaggctaattctgaactttttattgcagcaagcatttttcgatctcctattgagaaaaggtatctcaaatatggcacaatttgtgccaataccaacttgtatcggacttaagccggtattgccaaaatccttggccctttaacattgttaatccatttaacccacaaagtctcatgtttgtgacttatggcccaaatgtacttagatagcattgctttgttccacttgaagccttcaccaaatcccaaaccccaaactcccataagcttttggctagaaaactgtagcccacgaggttaggtgaaaatttcttcttgtaccattattcccccacaaaaaccacatccaaagcatgtcaatctccgtcacaatactttgaggtcacatatcatctaaaggtttaatctttaaaagtagagaccacatgtctcccaaaactttctcctttacaagcaggggtctataatactcgtcttgcaaaaagttggtggaggtgtgcgcactaccctgcttggatataaaagacaagatctgatcttcgtcagaaaaagcataactgtcacttagtgatctggcttgcataaaaggtagatatctgtgacactccaaggtggtcgacatccacattaggcccttcgagtacccgttcgggtattggctgagcatgcttccatgtttagatctatctgaatctgggagaggcaatttgccttccgcgtctataggaagccacggtaaggtcgaataggcttccgtgtactttttcatctcgacatattcctggttccaggaggctttttcgtgataggattgtatcaaagaattttaattagggaattattaggctaatcctcctcattaaatatcacaagtcacacgtttgaaaatacggataacatacagatatagattattaataataaataatttaacaatcaaatatatttcaaaattttcaactttatttaaaatcaaaatgtctagtacaccttttcaagacattaaccctaacaaggaccccacaccactcccctactattagttatttaaattttaatatcaaactctcactaaaacaccctaaagaccccatgttaatttccctcccaaaaatatatagtaaaacctacttaaatgaaatcaaatcatcacacatcaaatatttgtaacatttacttgttctattcccttcatatcacataaaataattatttttcgtgaaataattattttagtacaaaaagtcctcacacgagttctcaatttgccaaaaattttacttttgagattttacctcttgagacaaaattcgaagcgactaaagtaaccgaaaaatcatgcaataatatataatctacaattattatccctaattcattttaatttaagcaaaaaatataaataaattgttcgtaatagttaattaaaaatatgagctttgatattaattaagattataagcacaatctatctactgtattgaatatgacaatttatcaggattggttgttaagtgaggttgacacaatatgataggagtgtcgtatacaataataaattgttgtacaagactcgaaactcaatgaaaaattataacttctaattgttagaatttatttcgacaggatcttatttactaacacatatttcaataattaacctaattattgaactacctagaacatacttttttaaaaaaatctaaacaccttaagtttgagtatacttacagcagtgacgctgcagaataatgactcctttcaatcactctaacatttgattcatttctatagcaagatattatcaagtaatgaacttggatttctctaacttccgagttggcaacaagaatgttagatctttttttgacaatttaattgtcaaaatattatttaatttgttgcgcaattaaattaatattttatgttaattttgtggctttgattgcccttttccttttaggaaacttttatttatagttgttcctttttatttaggaaacttgtcttacaagagaaagaattatctttatggaataatgcctatttttgaaaaaattgactttctatttctctgaattttaatttcagtttttttatgtatatagcaaatcaaataatctttatttggtaagtattgaagaccaaatcatgatcttggtcctttttggaaagtttctcgatctgctgcagcagaatccgagcttaatgctacaaatcaagaatttttttaggaaagttttggacaactttaaaaatgtgtttgtgactgtctctggggcttctatattatataaatggaacctggagagcaaccaaacattttttacatcttctaatttcatattttcatctttgtgaggagagagtttcttttgtgaaaacctaagagtcttcaactagattttagtgtatatttttttgttcttatactgttcgtagaattggttgaggaacttgtttgaacaagcgtgtgtattcgggagaagacttttcaaagtctcattttgggaggaagtgagcatatatctttgggagaagatttttttaagccttacttcgagaaaaagtatgcacatatcaatagctgaagggagttcactacgttgtgtgtttcagagattagaatagcaaggtggattacaaagggttgcggaaaatcatcagagagattctaaatt

SEQ ID NO: 64296 - DNA, 1125 bp, Cannabis sativa
aaaaaatatgagaaaaaagtcaaataaattaactttcggagcaaaagcaccatgaaattcattagagaaaaaaacaatcaaaagttctggtgcatttggagctcttaaggcgaagaaattataaataatggagtagccccttaacaatgtagttccatgtcagggcattaaaagccaaaatctggcagagaagatcggttttgaccaagatatgggcgcgcctcaacactggagcttagtgttgaggtagagatttgttataaacttgctgcctcatttttgctgtttaatgcctcgacactcccagctagtgtcaaggcccgggtgccagaaatatcaaaggaaatatcaatgccacaacacggaccgcgacacaaagggcctagtgttgaggcttgccccttgaattcaaaaaagtatatattttttttatctttttatctttttggggctataaaaaggagtgaatttttatacttttgatcaagcaattagagagtacgagttaaagaagaaaaaaaaatgattgagaaggcttttgtcaatggaattttttaataatttattcttctatactttctttttatgttcttagttgatatgtgtcgaattattacgatgaacaagagtagctaaacagttattagggtattgatggatattgtttgatatctatttatagttttaatatgatttgattctttctcaattttttatgtattatatttcattcatacttatttcttttaattgtctgaacactatattttggcatccatgattcacatgaaatcaatagtgagaggttataacaaatcgcttaatctccgtacaagattaaagcatgaaatttcgagggatgagacctaaactcccttagtgttttactcattaatagtaatctatcttaacactagtaaaaatctagtctttaagttcaataggtaataacaaatcaatagagtgaataaggtactcaattgtcccatctatggatcataagtacatgtggtaaaaattgagggttaaaaccgaaaagtttttttaatggaacttaaccttaagaaaactcactttagcttaagaagtgtctaaagagtggtgagacactaaaactccacctat

SEQ ID NO: 64297 - DNA, 880 bp, Cannabis sativa
tacatatatcaacaaggtgaatcttgtttttcgatagcccgtcacgaaagaactccacggttaagcgtgcttgacttgggataattttaagatgggtgatctcttagaaaatttttccaagtacagcttgaagcggagacattacaaaatcaacaataaattaacaagagtataacataaaattaaaatatcatatttctataaataaaatcataaaaatatttaaatttcgtacaccagtatttttgtatttttgcatatttgtgaaataatctcatataaaaaaattggatgggtccaatttgatcaaagaaatactatgtctaaaatattagataaatctaaatcaatgtaaaatagatatacttgatgtacaatcaatggatagaatagatcaagtccaacatctatggatagaatagatcaagtccaacatctaatggatattagattgatcagataactaaaattaattgaattagattgataatttaatgggatctgtatatgtttaaaaatattaaatgtccccaattctaataattgataattttaagagtaaatctattataatacactcttttaaaaggcatttatattttttgacatttaataaattttttataataattatttaagattatttgtaaatttttaatttttagcactataaatttttttaaaattttcaaaaaatttataaataattttaaataattataatgcacactattataaaatacaaaattagattaaaaaaatatcttaaataacaaaactagaatctaccaaaacattgtactacaaaaaaaaattaatatttttatatataatttttggtagttggaggaaaagaaaaatgttgtgaaatttacaaaaa

SEQ ID NO: 64298 - DNA, 703 bp, Cannabis sativa
ttaaaatataaggtatatttgcatatgagatatggtatgtaattacatatgagttactaataatttgtttggcaaaatagttagtaattacacgagaaaataatatatttttagaataattaatatatatatatttttaaaaaaaaacgaaattttgtattgcttcaaactttttaatctatacaaaaattgcactttctttttagaaagccattatatgtttccctttatacactaattacaattgttcaaaccattctatatctattcccctcatcttttttggccaaatcgcagtgatttgcaacttcacttcttgttaaattctctttattactgtgtgcattgtactcaatttttggtgccataaaagacttcatttcggcttctcttgtttgatctcttgcaagatctgtgggagtagcagcagccggaaggttacaaccaagccaattgacagttctttcaaagcacttcctgttgaaatggcactcaaaaaataagtgcacattgctttcatctcctaaatcacaaatcggacatctcttttctgtaataatattgaaatgaagcaacctatcttttgtttgtaatatattaagtacatcaagctagataaagaatcgatatttaggaattaagaatcgtccccatacctctccataccaacttttattttcatgttccagagcaagcaaagagt

SEQ ID NO: 64299 - DNA, 805 bp, Cannabis sativa
tacctgattcattgattatgccttttcgatttggatttgagctacgtttgtttatttgttgcttcttcttttgcagccaccatcggtgtagaggttcacccgttggactttttcacaaactgtggtaaaatccgtttctactgctgggacactgctggtcaagagaagtttggtggtcttagagatggttactagtgagtctccttctcttagtttaacagtttagtttactttggtctgggttggacttgtatgtttaattgattcaatttttgttctttcttttacctcaaatgcatatttaattatatattacactttgtttatgacattgtttgagtgggctgaggttgctgactttatgcgtttaaaagtcttcattctatttaggttttatgtttgagaagcaccgccgttctgacttagtatacacatacaaattacaaactctaatttatgttgatatgatgttttttactcagctcagggttgggtgaatgaatgaatgtcttatttactttccccttgtgatttgcagcattcatggacagtgtgccattatcatgtttgatgttacagcacgcttgacatacaagaatgtacctacatggcacagagatctttgccggtttgtgctatatttatttccaaatgagttttctttctgtacgcttcattatgtcgtggtgtgctgaatatattttctttgtggaaattttctcgtgtctgtcatttcagtgtgtgcgagaacattcccattgttctctgtggaaacaaggtggatgtgaagaacaggcaggttaag

SEQ ID NO: 64300 - DNA, 1293 bp, Cannabis sativa
taatctaacagacttaactaacatgtacgctaaacatgtaaaaatatatgcatatcattatattaatcttacctcgtttttgaattcaggtgtgccggccaacctgattggaacagctgctcgacaattttcaagcccctgaatcacattatttgtaaaattgatgagtgacacgccaaatcacttttggggacttaaacttgaaactaaaagtgtctctatcgatggataacatggcaatacactaaaaattgtaaaaaggggaaaactagggttccccaaaatgtcctaattggtagaccggttccacaactggaattctatttctttggggtttcttggggaccagccaaaattctggatcctacaggtccccttgaactggaattccagtttagtgcaaaaactaccaaaaactacacaacaaccccaattcgacccctaatcttacaaatacttccagaatactacctaataacatcataatgaagaaaattcatgcaataaaaccaaccataacaaccaaaaacaaaatccaccatgtgagaataaagtttgagctcttaagctcaaaccttaaataaacctcataactagtcaccactacacctcaattaaacttaaataaccttaattcaacttcaaaaacaatctcaaacatcaatcattaacacacaaccctaactctaaaaaaacatgcttgaactcaactaaaaacataggataaacaaagaagaagagctaagagggattatacattgaattagatcactaaaaccttgttaactactttgaattgcagtaaaaaaaaatctaaattgctgctagttccttgagggtttgaaaatgagagagaaagagaggtgttttttttcttgattttcttatttctttctgttttcaaaaatgcacaaaatgaagataaattaaagtcattaatctcatagtggccagctgccacactaaaaaccagccacctcacccaagaaaaaatgacaaaaatacccttctcaaaaagcttaactaataaagtgttctaggggtaaaatgatcatttcaaaaaccttagattttctcgacaatgccaatgtctatctaggttgccctgctgttactaaaatatcaaaatgtaactctaatggccaaacgtcgcgttctaatattgtcggacacaaatcatgcaaaaatataaaatttcacatatgacataaataatacaccctgaatttaaataaatctctatataatcataaatcataaataataatgtagtttcataattaaactttaatt

SEQ ID NO: 64301 - DNA, 974 bp, Cannabis sativa
  modified_base (66)..(69): a, c, t, g, unknown or other
ccttttatgtgtttattttcatcgctttagaaattcatatgaggatgttaaaaacatacttgttannnnatttagatcctggtaaaatatattccaacaaaatatacttggaataataaaaacttcaatggcagactcatcaaggaacgattggatagaggatttactaatgggaattggagtgatttctttgttgattcccaccttacacacttggatttcttcagtttagatcatagagcaatacaatattttattttggtaccagatcatattcggatagcgtgaaacacaaaatccagtttcaattcgaacaattttggcttaaggatgatgagtgtagagatgtgattgtcaagaattggaatgattcctcacttaatgttaaacctgaaatttggctaacacgtcagaggaggacacgtgtcaagctgggataaatatgaaccaagacacgtaattataattacatttgaggtggaataacttgttaaaagcaaaattgacagagtatattcacaactcggttgactgaatagtcttatgcaagataaagatatacaaactgttgccttgcgcatcaacgagaaaccatgtaacttcaggtgtacaagacgcgacactaacctcgttacgtggacaaaatataatgactaatgagacacttaacgtataatacacggtaagatagtcgtataagcacatacaactaatagtgaggtattcatctcgctataggaaggcatgctcgcggtagccccactaatcaactcttgacatctttgaatgagattcacagctccgtcgagccagttctctcatatagaagttgacattcaaatgatatagacagttgaaaattacctgtcaccaaaaattgcgattgtcagatagaatgttatgtcttaagagcagaagcgacgagatttacattatcaacatcggaaagaaataggaaaagctccagctcgcta

SEQ ID NO: 64302 - DNA, 525 bp, Cannabis sativa
ttttagaatgcaaccataaaagcagtggtgcaactttcttactttttttttttggacttattgacaagtgaaatcttgtttttttatataaggaaaataatgtacattataattatttataatattttgtaaatttttaaaagaatttaaataatttatagtgcttagaacatgattcaaataatatgtttcacatacatacaacaagatatatatggctcgtttggtacgtcgtgttgtattgtatagtgttgtggtgtataatattgtgttagattgtgtattgtataatagtatttaatacaaattatgtctagtattgatttgtatgaataacttgtgtaaaattgtattaatattatcataaactcaatcccaacttcaacctcgtccgagtctggggttcgaggtatggttggggtctgggactgggtttgggttcgagttcgaagtagggccaggtttagggttcatgtttggggttagagtctgaggtctggggccggggcgggagccagggttggg

SEQ ID NO: 64303 - DNA, 1519 bp, Cannabis sativa
atatatataactaaatactaaataactaaaatattgagttagctagagtgaaattacttagttattagaacatgtaaattacaagtattaaacaatatacactaatcactaaacactatatagggtttctcacaaaatgaataaataaataaatgtaggtgaaccctgatcatagataatatcattgattaagctatctcaaatcgacacaatggacaatatttatttattcttaaccatttaatgatagaatgatgatggaacatgtgtgtacatagtaacctagtagcttgggaatccacgaaaccattatctaaacaaatggagcataaaagtcgatgactatctttaatccacactttctccaaagtgttaatcgttctttcactggttccaacaaaaccactatatcttcagcttgaaattgattataattattaggatcattattataattagcaatagaacattgctattaggcaccagtggtgcgtagtaccttctcgatatgtcatgttgcgattagctagcgatactgcttaaaagctattatattaaattatatagaacccgatacttagttggaccaataacaaaaattcggcttttgtggttaagtgttacaaaccgtagagttcaagtgatttacccgccaatatccattgaaaaaatggctaaaacccacactgtccactgcgaacacccatacacattgacatatctctcttatctttttttttttgaaaggaaattttattaatgaaaaaaaccaggactacaccaaaattagacagtcagccttacaaaaatttgctaaccaaccgggaaaagagtgatcaaagaattgagtggttctatcagctagacatttcctagctaatatattattggttctttttacatgaataatattgacacaatgaaaagcctccatctgaactttgatctggtgcaatatagtgctgacagcactgaaataatgtccttggttcttgatctcttccaccaccgatttgcaatccgactgaatttcaataggatcagttgcagcagccggcggcctcttgattgcttccagaatggcccacacctcagccatctccactgtatcaatactggatagatatatcatgccagctgaaagaattttcccttcccaggtccgccaaatgaaaccaatgcccacaccagttgaattcttgttcatagcagcatcacaattaacacaaatgctgccaatttcaggtgtctgccactgcttcatgatcggggtggggactgcatcaggtatcacaacagtatccccaatgagattagaagccggataagctgagaaaatccatgttaacggctgaaccccattcatgatcgagagtttattccacttcctgttgcgattttcccaaatagcccacattgacatatctctcttatctttattataggagtgttcaacaaaatttacaaactgcccaaaccaaaccgaataaatcgatgaaaaatacaacccgaaataata

SEQ ID NO: 64304 - DNA, 2783 bp, Cannabis sativa
  modified_base (27)..(28): a, c, t, g, unknown or other
  modified_base (690)..(690): a, c, t, g, unknown or other
ctctccacctctctctctctctctctnnctctctctctctctctcacccttgagaaaccaacaacattttgaggatttctttagctcaattcatgattttctagcaagattttggtgattcaacccaaggtaaacatcatagctaccttctctttgtttttcctaagttcaagctaagtttctaggcatgattttaggaattagggttctgtgatgttaagtggtgtttgattttattttcagaggttattttgatgttatttaagctggtttgaaattgtttgggtgtttgagcaaagtttgaactttagagctcaaactttgctctcacatggtgatatttgtttcagtggttgtttcttggttttattgcttggattaggtttattatgagttgtttatgtactctaggagtttttctgcagtttgggatcattttgtggtgttggtgttatttttggggattcttgtactaaaccgatcgcccgattcagtatgacctataggaactggaattccggttcatccctaggcaggccccctaagaattggtcttctggttaggaattggtctaccagttggggcattttagggcaccctagattttctcattttttacgatatttagggtattgccatgttatccatagatagggaaacttttagttttgattttaagtccccaaaangtgatttagcgtgtcactcatcaatttacgaatattgtgattaatgagcctgtaaatcgtccaatagctgttccacccaggttgaccggcacacctgaattcaaaaacgaggtaatattagtataatgatatgcatatgttgtttacatgtttagcgtacatgtttattaagcttgttagattacatcaataacagtatcaatatacgcagagttgattggataccaatatatgtatgttcggctcaaatactgatcgacgttatcacatgggtacgactagagtactgagtataggctgatattatggtcgatagtattgtcgtatgaacgttctaaaattagtaccacttaaggtatggggatatggttacaggttggtgtatgggcgcctaattgtaatttgggttatatttatgagtatgattttgcttttcttactgagtttttcgactcacagttactgtttgcatgtgcaggtaagggcaaggctaagagtgagcaaccgtgagagcgagcggatgaaaattgatgttagggtagttagatcgggagcgtacgatctttgggacagctgattgtactttgtattgtctataggcaataaattttctatcaagtattttgtatcacagtcgtaaatattttaaacacgggatcccgactatataagagttatttgttttcaactcaatagtaatcaagtaaaattttaattattcacgatttttagtaagcacgttgattagcaatggattccacaattaatataaaatcacgataccacgcctaaactagtagagtgttatacttaccattttaaaacataaaaataaataaataattgtggttgtcgagagagaaccccatgggagggcgggaggagtaaaggaggtctgtttcctttgggttgcgtgctatgaagattggagagggaggtctagattctgtctttggcactggtgccagtagtgctgcactttcagatcctcgtgcaacttgtttgcaaagggggaggggcaaaggttcacgacggctcgactgaggaagagaggaggtgggtcgtgagagagaggggagagggaggctaacttcaagcatggttttaatctttttagttttagattttgtgtattgattttagttttagggtatcaagttatttgaaatttaaaaatatatatgtgtgtgtttgatcgggtttatgggcgagtttgggttagacccaaatccaagcatacataaaatagtaacccgaacccacgggtacaacttgatctgcccattatatataagttttttcactaaaaggttttacggatcaggtccgagcaggtttgacccaaatgttcaaccctaaattctatgtatatatttttggaaaaattacataaattgctatttttagtaaaatatttacacttttacatttaacgttttttttaatatttttacggtattcaataaaaacacaagaaaacaataagaaaatcacataagtgtaaaaaaaaacatcaaaactacataaaaaataatatacaaataacaaaataacaagagtacaacataaaaatgcatcaaaagacaatattttatgtaaataaaatcttaaaaactataaaaatatttaaaattctgtacaattgtacttttgtaattttttatttattatttttgcatttttttttaaaattatccccatattttttttaagcacccacgacccacttgattttaagtttatgtatttaaaaataggacaattttgtttaatacatttgccacgtttattagcatacttttaatatgatcacatagagcattgctattaggcaccagtggtgtctagcaccttctcgatatgtcgcgttgtgattggctagcgatactctctataagttattatattaaattatatgggacctgatacttagttggaccattagtgatattgacacgtaggagggtgctaggcaccgctggtgccctttagcatttctcgattacatattcacatgtatttattttacttaattcattcatatttttagggtaaatactattttagaccatgtattttacaaaagttattaa

SEQ ID NO: 64305 - DNA, 1172 bp, Cannabis sativa
tttaacgatggtgacatggcaagaataacaacacgtggcacgaggataccgggattggactgatgaggaatatgtaaagtcatgactgttggtatggatcgttagtcatgatcgttgaaagagaagtttgatggtcacctcttcccctagcttgagcgaggtggctacttctagagggacaatggactaacaccctcatagatgagataaacgatcaacatacacttacagtgtcaaatcagtctagggatagatgccaatatccctacctcaaatgtaatgatatactcaaagggtaatgaagttagtctaaggataaactcctaaagtgctacatcctcatggtccaagaaatttattctcctccatgagagatggtaaatatagcacatctcccataacgtcgaagattaagtgaaaggggtcttgggggcaaccctccgagatggcgactgtcaccccttcacaatggatctcaggggtgcacccctaagtattggctactaaccccaaaggaggttaacgatcataccacactctaaggaggggacccttatggtcagtgactaattcaaatatttaaatcccacaagaaactcaaagatggttacaaatctacaaaaatagtaggatattatcatgagaattagattttaactacatccaaaaactaaggagacagttgagatatctacgcaatggtcgtgtctcctgaactgagaaatactgaacttttcctctatataaggagtcagcaatgacctaggaaagatatccaaaaatttgagtacttagaggaaaaaaaaaactctaccattattatcttttacattcaagagcctagattttgattttgtaactctaattaataaaacacaaggggagtagactattaccaacatttggggtcaaacctctttaaattttgatgttattatttacatttattgttcttttttttgtttaaatctcatgtattacgactccgtatcggttgattaaaaattcagtcaacaaatatatactataatcactaacataaattaaacaaatattttaacataaatcaaatactaatcatagtaatgaattataaaaacaaacaaaatatatacacacaagttcttattagtgtgaagaaatatggctttcatctcaaaaccaattggtga

SEQ ID NO: 64306 - DNA, 863 bp, Cannabis sativa
aaaattaactaaaaaattattttggatgctaaaacagataaggatacatcaatatatccattttaaaaaagtgcattgtagaattttctaattataatcggcggcaatacctcctcgaacctgcaggaaagctcattgtctaaccgaatgacatgttttatcaaactatgacccccagaaattttatcgtgagccacattacacaaaactgcttccgaaaattttgacaataaatttttatatttagtatggaaagaaaataaaaaaaaaaaactttattcaacaaatatatattttttttttattcttcacatttttttccctacattttctctcttttttttctccaccaaaatttaatttctaatatatagctaagagaattaatcctaagattatcaaccatgagatttttttgcttgtaaaaaagcaaaatattagtcatatgacaatccaaatccaatatgtttactacatggattgaatatgtgtattgtctacataaaagaaaaaaaaaagattagaggggtgttcgtatagatttttaaactttgagtactttgattgtgattagcttgagatgacctatattataggggagactttcaatcaaactctaaattagaatatttgacaatcaatgcaaaaagagttttgggtaactaaattaaatcaaattgttacctaaaataatatttaccatacttacaatatttaaccaaataaacaaaatattatcttacctttaaataacatctattaggacaaatttaatgctaattaaaagttaaatttagtattaaatcaacactaaaaaaatataattttagcattagataatttttttctattccaaccataac

SEQ ID NO: 64307 - DNA, 1084 bp, Cannabis sativa
agcatcctttgtcgtatttttttttcaactgcctctgaagcttctcttactacttctggacctaaatattgtctttgtccaactttatcccaatgaagtggtgacctgcatttttgtccatacaacatctcatatggtgccattccaattgtagcttgataaatattattgtaggataactctattataggtaaatacttactccacgagccaatgaagtctagtgcacacgcttgaagcatatcctcgagtatttggatggtgcgttcagattgtctatctgtttggggatgaaatattgtacttaatctcaatcgcgtccccattgccttatgtagactctcctagaacttggaggtgaatactgaacctctattagagactatcgcttttagaactccatcaaaccacaatatctcatgtatgtacaagtcaacgtactgctctacgttgtaagtagactttaccgaaataaagtgtgctgactttgtgagtctatctataattacccaaactgagttgcttggttgtttcgggtagtcctgtacaaagtccatggctatatctttccactttcattctgcgattttcaagggttgcaacatccctgctagtctctgatgttccgtctgacttgttgacatgtgagacttctatctacaaatttagcaacatccttcttcatccatggccaccaatacaaggtttttaagtcattgtacaatttggttgaccttagatgcattaaatagggtgtagcgtgtgcttctatcatgatccttcttttaagctcgatgtcattggcgacacacattcttcccttatacctcagcatgtcatctgtaccttcagcgaaattctttgccttcttctctagcaagcctgcccttttcttctgtaagaactcatcagtcatttgtgcatctttaagttcttgtaccaacgccgagacaatggttagattagctagtctttgtgtaatgatctttatatcatttctttagagttcctgtcgtagtggctttctcatttgtgccagtattaccaagctggcattactgtgtctgctactacgttggccttc

SEQ ID NO: 64308 - DNA, 787 bp, Cannabis sativa
aaggcagttcctcccaaggattagatccaagtgttaattcacttgtgattgaaccttgtaatccggttgtgttctcttcttttctccttctggtttatgtttattgctttctagtttatttgatctggttttggtgttcttgaatggtgattgaatcaccataaatttagaatatgataatggtgaatataatgtgaaaaatggatacaaggtagccaagggaataaataaaggttgaatatttcgatatgatgagaactgagttttggtggaatagcattatgaaattgagagtaccaccaaaaattaaacactttttatgaagagtgacccacaagtgactcacaactaatagtgttttgttttacaggagtgtcaatacctatcaaaattgtggaagatgtggaaagagccaaaaagaagaggacatgtttgtggaaatggattaaaaaaattacaacatccaggactcaatatattttcttctacaaatggttgatcttctttaaacggtggactttgtgttgcttgctattttctcttggctctgttggaatcatgctaatgtaattctaagtgcggctacaagagctgattggtgcattaggcttcttgatgatagtagaaacaaaggaaagaaagaggaggcaagaaccaaaggaagattggaatccacctccaacgaatattgtgaaaattaatgttgatgctgctactgatattatagtgggttggattagtacaagggcagttaccaaagatgataaaagggcccttattgctacat

SEQ ID NO: 64309 - DNA, 650 bp, Cannabis sativa
cagctaaaattaattaataaattattaaatatttatctcaaattaaaaatgctaaaaatagtattaataatcttcccatttggcactttgatcgagaaaatattttataaggaggaaacatacatcaagtgttagaaacaaaaacaatagagtataaaaagtattgcccctacatgaaaacatactgacacataaaacaaatagttttttaaacagaatagttcacaaacaataagcaaaataactccccctaaaacaagggtcaataattgtaaccaacaatctaaaaattagatactactctacctttttgtctatcaaggagccaaagataacaaacaaaaaaaaaaacaaattcataatagttcaacaaaaaacatagatgaaaagcaaaagataaaaaatgaaccacttaatcatcattagagtggaagaatttcatgatgatgtccatcatcctgagaagtaaagcttgactagtctccatccttcccaaacgcaaataaaattcagccatttctgtaggagtagaagtggaggcagatggagcagcaggttcatcaataccaccaagggaagcagaccgagcctttttcttagcagattttccttggggaggtttttctgggactttgaaagtggtaccaaca

SEQ ID NO: 64310 - DNA, 1278 bp, Cannabis sativa
ggaaacttcatgatatggctagccgtgtctcggaagatctcagaccccaaactatggcacatgtgcctctacatcgccattggagccaattcgcacacgtttactaacactggagctcttgtcacatgcgtcaagaactttcctgagagtcgcggcgtcgttttgggcctattgaaagggtataccggtataagcgcggcggtaattgctcaattgtacagagccttatacggtgacgacacgtcgtttttcactctgttcgtggcttggcttcctactgctttgtcgttcgcctttatcaaaaccattcgaatcatcgagaccacgaatcggccactaaacgacgtcaaagttttctacaaattcctctacatatcgatgagtctcgctgggtttctgttcatcataattattttagaaaaatcgttcagttttaacaaaacagagtacggcttaagcgccgcgggtgtgctgttcctcctctttctcccaattattgtcgtttttagagaagaagacaagctccttaagaccaaactagtgtccagacctcagaacaatgcaattgtcgtttcaccatctgtacaaccaaaagaaagcgtttcttggtggaaagacgcctttaagcaaccgaagatcggagaggaccacaccataccacaagcacttttaagcattgaaatgattactctgctattagccactgtttgtggtcttggtggatccatgacgatgatggacaacttaggccaaattggaacttctttcggataccctttaaagagaatcacaaacttcgtgtctctcacaagtatttggaactaccttggccaaataacagttgggattctctctgaaatctttatcacaaagtataaatttcctcgtaccctgttcttaactatgttattgttattatcttccgttggttatcttttaatcgccttcaacgtccctaacggtctctacgtggcctctgttcttattggattttgctttggagctttttggccactgatttacaccatcatatcggagctatttggattaaagtactattcaactctgtacaattttggtggtatgacaagcccaattgggctttatttactgaacgtaaaggtcacagggtattattacgacaaggaagccaggaaacaaatggcttctttggggcttgtgaggaagcctggggaggccttgaattgtttaggaagagagtgttttaaactgtcgtttatcattattactgtcgttacggtttttggtgctgtcgtt

SEQ ID NO: 64311 - DNA, 1526 bp, Cannabis sativa
aatgtttaaaattccgtgaaactgtatttttgttatttttttgttatttttgtgcatttgtgaaattaacccattattttattgactcaatctctcttacgtataagcattctaaaaaaattgtaataccaaatttccattaaaaatgaaaatctcaaattaattgatcaacttataattaatagacttttatttagacttacattaatttttattgatttatttagaagttttcatcacatactggactttttttactttttttcttttatattatgaggcagaatttttttcaaaaatattgtatatttttatacgttgtattgtgtcaagtttttcactgttattctactgttatttttaattaatatgttttgttgttttatggttgttttataaaaaaaaaaacaatatttttgtaaaaatttctgtgtggcagtaaaattataaatttttactcaaatccagtatttttgtaaaaacgatttttgttttctttgttgtgttagcccatattatttgtgattaatagttattgggcttagcatatgtgtgtgtaaaatttagttgaagcaaaagtgtggatttttctattaactgaagtctttgatgagcaggtccagtccaactaaggttatgtagctaagtcccctccctaactctataaatatatattgtctcatcacaattgtatacattttgatataaataaaactgcttttgatttagagacctaggaaaaaaaacttagttgatagttttgcactatcaaattgcggtaattgctatgggtcaattatgtatgtatacctaattcttatatattattattgtattctaaattatatacaaatttgtatttttaaattatttatttaattttccaatacaattaaatactaatattaaatctcacacattttactttaataaataatatataaaaaattactaaccgctcacaatccgctatatgggtcacatatgtatgtatacagaaagaagactaaagaataatgtttttttttgcttggattgaattgaatttaattgaattggactggaccatatatataggggaccaaaattaaagcatgattttttatattggggttttcccacctaagtttaattctatgtctttagattatagtcattgtcaaccccactttgcttctaataattgctagtacctataacaataactatatatattagtttatatgtatggtaataggtacaaattcggatcatcttctagaacattgttccatatgaattaaatgtaaaagtattgaatcatatataaaaatatgggttactccacttataaccaattagttttgagctgagaccccatgattcttatcatggtatcagagtcatattcctagcgggcttttaatccacacctatctaaatggttagccagccgcacgagatctagatggtgcaaagacgcttgagatctgaacaaaaataagcgagcaaatagcatggcctgtaataaggtgattcaagattgg

SEQ ID NO: 64312 - DNA, 763 bp, Cannabis sativa
cttactaaaattaaaaaagaaaaattttaatccaacaacctcaataatttaagagtgattttcaatggccttaaaagtttatgaccataattcagtacaagttaaagtttagaaagccaaatcatatgatttatcaccatagttgtgtagtatataaaagtaaaatccttttttaattgagtaatgttattggccaatgtgtccaacacattttagaggtgatatttatgactagttagcgaaatttttctaaacctattacaccaacaacaatataacaaaaatactaaacatccctaatgtattatcggatttctctttttaatcctttgattaattaattcacatcatctttattagtttattaatttgacgtaaggatgagggtgcagaattcaaactaaacagagaaagtccacaatatatcatcatcaccatcaccatgttatattaataatgtcaaatgatgattaggcctataatttagaaggaatttagtgacattttacttaaactacattagacatatagaccacctcctcacacttaggctttccatatcatctaatccaaccaagtccattaagtttttttcctatattaatggctaagacagagatactagtaacaactgtagcccacagaataaatgtaaaatataaaaggcactcaagataagatggctacaccatcatcagatttcattgtcttgaaaaaaattcttttggagaaaaaaaaaagtcctacacaaaatccaaccccc

SEQ ID NO: 64313 - DNA, 811 bp, Cannabis sativa
atttatttctagttatgtaagattgtataatagtattttgatatataataatgaatttttttgaagtacgctaacatttaacatgagtttgatttggaataataaaaaaaatagaagagtcaaaatcacaatgaatagaaactaaaaataataacgttgaaatacctttttttattattggaatagttattctccaaaaacttatttcgtttcctaaaaaaaattgaatccaagtctgagaaaattatggaaacaatcagagtgaaatgaaaatgagaaaaaaaaaatgagactcattttcatacttagggattttatagaaatcatggtgtcctgtagcgattgtgacacatggcatggtaaaaccaagagacgcctctgtcatgagacacacctgtacagactttgaagggtttcgatgatatggcaccttgggaaagttgttgaatttgtgtgcctttgtattagtctaagtaattacttgtaatacttttaaaattcagttagttaactgtcagttagttacctctaactctcattcattaaaacttaagctcataattttcaaactttacaagttcaatgaagattagacagattcattacagcgttctcttagtttctatgcatgagttctttggtttcgtagaaataatgaagaggaccaactagcattgatctcaaacaaaggtaaaaataataattagagactaaatgtatttttaggtacaatacttgttgtgactaaaattaaattagtagcaacttgtaactaaataatatgttttagtcacaagtaacattttattgt

SEQ ID NO: 64314 - DNA, 1056 bp, Cannabis sativa
tttgtttgaaataaaactgagtagtaaatcaatgaaaggtaagcagaataaaaagcataaaatcaatgagtgatctgaaacaagaaagagagaagagaagagattaccagggaagggagaggagagaaagagaggcggcggagaaagggagaaatgaaggtggagcttcagtctcctctaaatagcagatgaggcaaagagtagagatagtttcgggcatatgcggtattgctcctcttattccctacctcaactagggtttttcctttattgggctttctgggctttctttttgatgactatgggcctatctttacttccatttttgtcggctaaacaaatgggcctaaactagtaagaaatacgaaatgtatttttcatttttacatttgtataaacaaggtaaatattattttagatttgtgttttgtaaaagttagtgattggattttttattttgttaaataataaattagattatgtatttttcgtattttaagctaattttttgttaaagaaaatttaataataactcaatttaaatgtgttatgatacaactatattttttatatatgttggtactattttgtactattttaaaaaaaaaatacagtctattttattatttataaaagagagagttgaattagtaatttttgtaaaataaataatccataatgatattaacccatgtactaattggatctttttgttattgaaaaagagagaaacggatgatattttacataaaatgcctaaaatgacacgctttcttattttttattttcacaaattatgggtaacttttttatgaattcttttaattacatattattgagtagtaaacaagatagagtgtgtttggaagtaactgtgtaattactagttagggtaattactaaggtagtaattatagtttaataattacactatattttaaaatgcatggtgtgtttaaatatgaggtggtaattacatatgaattcgtaatatcttgtttgacaaaatagttagtaattacatgggaaaataatattttttaatagctaatgttt

SEQ ID NO: 64315 - DNA, 3017 bp, Cannabis sativa
  modified_base (2361)..(2364): a, c, t, g, unknown or other
ttaaatgccatatgggaaatatgcaacctaccgatccaacagtcagatttcaccctaacaatgatccatccaaggcaggacatgcaaacaagttggcctataatacccctaaaaaagcacaagagagggggaccttttttcggatggaagactcattcttcatcatcccaagcaaacacattttgtaaccctactatgaactcttgaatattcctacaaatcttcctcttcttcaagaggaacaatgtggaggagagttttagtccattgtatctctacttgtgtaaacagttactggccgatgggcctaataaaatggactcgttgactaaggatagttaacgcttgaaccacgtaaaaatctcatatttgttatcttgctacttattatgttatcactttcttaagctctaaaaaatatttagttgccaaaaaactcagtaaatattttggtgctttcattgagagctgaagaaagagatatgcacggcagttaccgacgcaagtctgtcagaaagagaactcgtgcaaaagaggaaggaaggcctcctaattgcttgccaaagtctggccaaaggtcagtagggtcttggccagaggtattgttaagaccgagggtctacgccctcaactgcctaaagaaagtgcagaagatgaacgcacgcggcctagaaacactcaccgtactcacactcgcccctaaaaacagatctggccagccaactccctggcaggacgagcgaccactggtatcctcaagctcgtgttcctcaccgtccgctaaagcataacaatgtagacacgacgaggtacaagaggtgctgggaccaggcgaagaaggtaagacccaatacggttacgacgactaactcagaaagggtcgttaggtataacgactctatccagctcaagactacagcgctggtgctgaagcaagggccagatttatttccaacgactacttcccctacctttttgctgagccatgaagttgatcagaatctgatcatgtaatggcgatagctaagaggagaccatcagtactgctggcatttgttgggcctccaattaggcctagttatggtactgttggttgaggcaggccattttttggcaaagttcgctcaaggagccttctatcataacggtgtaactacaaccctggagttacattagaaaaagcaactcgagacattataaaccagttatgaaatctctaccggagtgttatttatcctactgggggtctgagtctttacctcagaagctagtgaatgccctacaatcaattggaggaaaaagattgccctagaaatcttagggtgcatgcacgcaactcttggagtttctcgaacctcgagagacgcgtgcggatcacctttggagtacaacacgtctgtaaccttccttcttggagtgggaggactgcttgaagtttgttttactcccaatgactctttcactctttgatcatttcaagcgaactcaaagcttgaatttttatgcaacttcagccttcctttgcacaagacgaagcttgctacatgaaaatttaacatgactctcgcatgcgcgatgttttttgcgcaagaaagatcactgggggtacgatacatctctaaccctccttctcggaatggaacgactgcttgaagtatgtcttactccccacaatgctttcttcctttgatcttttcaagcaaagtcaaagctagtattttttatgcaacttcagccttccttcgtggaagccgaagcttgccacataaacattcaacataaccctcgcatgcgcgatatttttgtgaaagaaaggtcactaggggtacgctacatcttcaaccctccttcccggaatggaaagactacttgaagtctgtcttactccacgtgatgctttctcccttcgatcttttcaagcgaattcaaagcttgaatttttatgcaacttcagccttctttcgtagaagttgaagcttgctacataaaaatttgacatgaccctcgcatgcacgatgttttttcgtgcaagaaagatcattagaggtacaatacgtctccaactttccttcctgaaatggaaggactgcttgaagtctatcttactccctgtggtgctttccccttttgatcttttcaagcaaagtcaaagcttgaatttttatgcaacttcagccttctttcgcagaagtcgaagcttgctacataaaaattcaacatgaccctcgcatgcgtgatgtttttgcgtaagaaagatcactgtgggtacgatacgtctccaaccctccttcccagaatggaaggatttcttgaagtctgtcttactcccaacaatgctttcttcctttgatcttttcaagnnnngtcaaagcttaaatttttatgcaatttcagccttccttcacagaagccgaagcttgccccataaaaatttaacatgactctcgcgcgccctgtaatgtttcaccctctggcttttgaaggaaaagtcaatgtttgaattttttgtgcactttaagcctttccaagtgaaagccaaagtttgccattacagaattcggcatgactcttgcttattcaaacgaacaacatcgtaaggaaaattgcctgtgcaaagacgaaggccccactttcccttcgggaaaccagaagcctgtagcgtgaaggcttatactttcccttacaggtccatgccatggaggtatgatttatggccagccatacaacagagtttttacctacaatcccacaacattttctcatgaaggccgggagattactgctacatttttaagaattcctctccaagtggtcacgaagaggaaagtcatggcttggacgaatagtatgcttcccagagtaaaagcagaaccgcacttatacctcctcctcaaaggacacgaactagattccaagccaatgatcgagaatttgagaccaaagttcctagctcatttggggggtatggtacactcaattgctgataattgcagcttcttacgtctgtttgctagaat

SEQ ID NO: 64316 - DNA, 1231 bp, Cannabis sativa
tgggggtgggggcggtgaaatggtgggggcggtcaagtgggcggtcactcacggtgagagagaggaagagagaggggcattttcgtggggttcggggttgccggttctggttggtcgggattgagcgtcgacggcgtgggtggtctgccgtgggtgtgtgggtgcggcaccgagcgagagagaaagagagaaagagagaaagaaaggcgaaagagagaaagggctgatggtttcaaatggggggtattgtgggaattaagaaaatgttatcccattttactaatatttcttattttaagtttagggaataaattattccctagtgtaagcatagaaattcaaatttcccaacaaatatggtataattacaaaattagtgcaataagcatgaatattatcatcactaaaaagatgaaaagtataatgttgctcaagaaatagctacaaatgtaactcgactgaattccaattacaaaataactatcatataatcacataatattacaataagcatggacattatcatcgctaaagagatgaacagtgtgatcatcgacagtctcgtagacttggtcgggaaaataaccccgaacatagctctcattgtagccatgtcggtagtaattgtacgacgttgcgtatgtggagtcatccaagtactgagaggcaaaaggataatactcactgtcgtatgggaatggccaaaactcagctcttcttcctgttcttctaaccctttttaacacctttctttggtcaacatatccacttactgtcactttttgcttatccatgtctatttccaaactatcaaactccttataaaaaaaataataataaaatttgttttaagttacaacattaattatgactaaaattaaaagtttatgattaaaaaatatattattatcacaaacaaaaaaattcgttactgattaattatatttagttatgaatatataatattacaaaataactattatatagttataaattttttttaatctaacaattttaataatttcgtgaaattttttaatgatcatacaaagttgaaatgaaatttttaacaatttcacgtttattactattgagaggagctttattagccaatcaacttgacttaattaataataaatatattatatacataaaattaaaacaaaacaatattattatattgataatcttgtactgcactttacttaatgattagaaagaaagaaaaaaa

SEQ ID NO: 64317 - DNA, 598 bp, Cannabis sativa
aaggagacaggagagcatctcttttttagttgtcctttctctcaagatttcttattgtaggtcaaagcatggttcaagtggaataccactgctggtactctacagggtctactaaagtggataaggagaaccaagcagtccaagtttaggaaatgtgtaaaatcagctggaatagcaaccttagtatacctgatttgggctgctagaaatgacctgatgtggaattcaaataggatgcaaccttctgagctgatgcatcagctgaaatagatagtcaaaatagagtaattcttgtaatgccaaagaaagtaagtcatgaggatatagattagcttcatcttttgtaaatatcaatttgtatagataaaattaaggcttctatttgaaggtgcttataggatgtacaaaaattgttaatggggtaatgaatatacaacatggttcatcaaaaaaatattattaaatgattaatcggaagaataaacctgaaggaaataataaaaaaaataaactaaataaacaagaattaaattatgtatatttgtccaatgatgatgtggtggtcttcgggatctgtagctacattatgtggagggtc

SEQ ID NO: 64318 - DNA, 1520 bp, Cannabis sativa
ccaagacttcagttattacataataactaaagacatatggattccccctgaatcgtgtgattaccttgtgttatagaattttttacgtaagtatatatacgtatcgccttcaagtaatataatattaactagagtatcatcattccctcgaggattgtagttaagtaataataaattcaattcttgatttgatttggcactaaaaatttaaagaaaaatattaaaatctaagtaaatagaagcaattaatctataatgaaaactaagaatgattagagtttaatgttattaacttcagttgtatctattatataagacttattataagttaatcctaatatcaatttctatacaatagtaagttcactaaagtaacttatattcgaactaggagatataaatctcatttttatgtaaattttttactttcatgataaatttaaacatatgagagacattaaataaagaaactctacatgttatccaaaccacgtggatactctcgtcctatgtcgaaatttgtccctattttactatagcagaatcgacactcacttctcaaaatttttatcgaaatcataaataactaattggtgatcatgcaattaaaaaaattttgaacgaatgaaacagatgcacataaaaaattaagggaagacttaaattatattaaaactataataagatatcaaataatctttattaataccctaaataaaagtctagctactcctattcattgtaaatgattgacgcaaattaaataagaacataagaagaaagtagaagaaaagaaatcgtcgagaaaacgttgttggaaagtcttctaggtcccttttgctctctaatttcgtcctctctaattggtcacgtaaaagtgttgaatgatgcccatttatataactaagaaaagatacacaatatctatttttgaatttttgataggcgagccacgacactataatgtagtgcgcggcccgtgtctttcagcaagccttccccttgatatgaactctgaaaagcttcttaaagatcttaatgctactactttaactctcatccccaaaattaagtgtcctaataatgttagtaattttaggtgtaaagaccgcctaagattaatattttagattattggaaaaaaaaaaatagggtttatgcatgagatttaattaatatttatgaaatgcatattttgggaaatatatttactatcatatatgtttattatgctattttatgtaaattattcaatttctgtgtttgtgctcggaagctgtggaaagcgacgttggggcctttagagagtcgtattttatatgtttagaatattttatcgggatgttattgttggatattggaggtgttgaaatttttgggatttgaaaatgacatatttacccttgttagtcatggtagttttcttttaatcaagggggcatttaggtcttttgctaaaggctttttgtcctttatgacctttattttgagggttagtatttattaatttaggttttttt

SEQ ID NO: 64319 - DNA, 769 bp, Cannabis sativa
tactactgcaaagtagcattttataagctggtcattggttagtatttgcgaaggtattctctataatagtatgttggtaggagaatgagctccatattatcgttgtatcttcttagtttgtaggctcccttaatagttatctttgtaacttaataggggccttcccatttgggttcaaacactccttctgctagatcttttgtatttaggaacactcttcagagcaccaagtctcctataagtaatttcctatccttgaattatttgttaaagttccttacgacctttttccggtaggcctacaactttaggttggcttgatctcttcgttcttctatttggtcaagggattctatcatctggattttatttgtatcttggtcaaaggttgtccttctatgagatggtggcaacagctgtacacacaacattgcctcatagacataagctagagcgaatggagtttgtccagttgccgtcttctcggtagtcttatgcgaccataggacctctaggagcaatttaggtaagttttcttgtacttcctcaaggtgcttctacagggtctatttgagggacttgttgatagcttctacttgcccattttcttgaggatgggccacgacagagaagattttgatgatgccatgtctatgtagaaatccatgaacatgttagtgtcaaactgctttccattgtctcacgcaatcttttgtggaattctgaatcgacatatgatgttctagatgttgggttctgtgccctaaat

SEQ ID NO: 64320 - DNA, 1568 bp, Cannabis sativa
atataaatgaaatcatttctaaaggctagttagcttttgctagtcttgaattgcaatctcatagattgaattctgttagattctcagcatagataagctccttcatataccactaagttaattttaataggtgtatatatatatggtgtatttttaatgagtattatctatttatgggtaatattatgaaaatttgagtttttatgcttaatgttttatctaattaaaataatttcttatttttatattaagaaaaaatgcttttcggaaaaaaaataagttaagtttgacttaattattttgtatataaatatatttttgatataatataaaaagtaatattttttaattaagcatatagatttaattttttttattatttgtcaataaattaaaattgaatagtttaatatttttaaaattaatatttataattaaattatttaataattatacgagtaatacattaaaaagtgttctatatatattaatttgtgtagttttcaaaacctgtgtcgatttagtctacacagaatgctaactacatgtaacaatatagcttccagctagttgacattttggtgggttctagttgagtattaattggtccaatttaatattcatgtcctctttaattatataatattatatctatacttttatatataaatttaatgaattgattaaatatgcttactctcattggtgccatgtggaagcaaatttggtctcatgaagtcatttataatatatttttttttgacaaattatttataatattattgtttgtagacattattatgtatagaagtttcccttgctggtatttggtttttattttaattttacaatacatggcacgattttcttttttttcacacaccaaaattgaaaaactttactatcttcatggtgacatatcagtctgagtaggtaagttccaataattcaattattataataatgttatattatatataataatttacccaaaaaaaaaacactactttaatttttatgaagagaaaaattaaaaattattgagaaagggaagcatgttaaatgaaggggtttgggatttaggaatctattgcaactcttgaaaaataaagatgggcagtagctactaaacaagatacattatgaattaaataggcacaatgtgtacatcaaaggtgggaatttggtgggactagtacaaggctatccccacatagtagttggtattggcatcaaacagtacaagtgaaggagaaattcaaacaaatttttagcctccaacaattcgtgatgtgtagatatgcaattaaaaaagaatgtaatgctttggttcctgaacaataggttaagacatggtatggtgaagtttggggttgttttattattccaaacattgtttggttggctgtaataaacaggctttaaattatagtttgtttatttcaattcaatattattgattatgaagaatgcttgatatgtgcgctgttggattgaaatgctattgtggatggacccagaatttttactttgtgaggcttatttatcattaaaaaatatttatacat

SEQ ID NO: 64321 - DNA, 1886 bp, Cannabis sativa
aaagtgtaaagaagaaaacagaatagtaattcagtagatttacggtcaaaaatttggtttatattgctaagtattaaaaaaataaagttttttttggcactaatatccctttatattatggtaaaccaaatttactttgatattacacatatttcattttcctaatttccgatccttaaaatagctctcaaacacgataaaaggatatttccaaaagagaaaataagaaagaataaaagaagtttgttccgctgaggatgcctacaagagagggaccacgagtggtccacttctgttttcgtttttttttttcttttacttttcttaaaacacaatttttctttttctttttcaattaaggtttaggtattaaattttgaattgtgtgaagttggtggctgagagagaataaataataaataaactaaataaaagtacatataaaaattaataaacaataggaaaaagaaaatgtgacaatctgtagaagagaggataagaacaacaaaggaaaaaaagaaaacaggaccctctctgtcagtgtgtcaacttcctttctggccattccagaacaatccccaaaatcctactaccctccttaatagtttaatattcttctaataatgacacttgtttaaaccactattaacacaattattatgtggaactttaatttttatttttaaaaaaggtaatatttttattagaaaaagaggtggcatattataccgttggctaaattacaagcttatctgctataaagtcccattctttcttcagtacacagacacctttgcttgagagtctgagaaagagagtaaaagagatattttttatttttgagttctttcaaaaatggagggtaaggaagaggatgttaggctgggagctaacaagtactcagagagacaacccattggaacatcagctcagacagacaaagactacaaggaaccaccaccagctcctttgtttgagccaggagagctctcatcatggtctttttacagagctggaattgcagagttcattgctactttcttgttcctttacatcactgtcttgactgttatgggtgtgaacaagtctggtagtaagtgctctactgtgggaatccaaggaattgcttgggcctttggtggtatgatttttgcccttgtctactgcactgctggtatctcaggtaacaaacctttcttataacccaacttcccttttatttcttaagaaagaaaaaacatgttttgctgaattttgtggaataaaggagccacctttatctttatattttcatgttttttgtttttaagaactagctttttcgggtttgttctggtagttatttttgtgaagaagagctttagctaaaccagatctgcatgttgttgttgttgttgttgtgtgtgtttatacaggtggacacatcaatccagctgtgacttttggactcttcttggcaagaaagctctccctcacaagagctgttttctacataatcatgcagtgccttggtgccatctgtggtgctggtgttgtaaagggctttgagaatgcctcaacttttgaaaggttgggaggtggagctaatgttgttaacgctggctacaccaagggtgatggtcttggtgctgagattattggcacctttgtccttgtctacactgtgttctcagccactgatgccaagagaaacgccagagactctcatgtccctgtaagtcttcttatatatttttttttttttgagtttctcatgttctaattttaaaatcaaccctggaagaaacttttgtggaaaacagtgtcacaataaatgtttgagcacaggaaacaaagccttgttgttgagatagtttaaagttctgattttgtgccttttttctctt

SEQ ID NO: 64322 - DNA, 1235 bp, Cannabis sativa
tttacgaaatataatattagtaatgtaaattaatactgtattattgatcatattgaggtaataaagtatttttaattagggggactttccatctcatcgcatttaatagaaagggttaaatattttttttaggaattcatatagatatagggttatatataatgaaacaaataaataatactaatataatatatataattcccaatgctaaaaaataattaattcatcacaatcttcaaaatgattgcaaaaatatgtttttatagtagtattattatatatttaagtagtcacacaagtcaaataggtccacacaagtggaaatggaaatattgatattaactattaaccaaactaaaagacaagagtatttgagagtatatttataaatgtatattgatcttcgtttgatgtactttaattaggtttttaataattattaagtatatatatgatcatatccccgaatggaacaaaatactataaatcgtcatacagtacatttcattcactataaaaaaaaataaagaagttgattaatgatgtccaccctaattttgactttaggtaattaagaataaacattgagacaatgaaaaatcgaggttgttaggatttatttatattctgattctcaaagttaatactctaatgaagttatcacttgagcagtaaagtggctgtctccttcgtttcaccttaaggtcgaacccaactatagtaataattatcgctgtatatataaatatttttttttcataaatttttaaacaatttataataatttaagatgtcaaaattataatttaaataatttactgtacaaatattaaaatagattgtttaaattttaatttcatcattttaaatcatttaacaatttttaaaattttatgaattatatataccactgcatgtcctatcatttctctaaaatatatctatgtacgtaccccaaatacttatagatatatatagtaattgaaaacactatttaatgattttctaagataattagacgattacttaacatgctttgtaaaaatggtcaaaattattaagtgatggaaggaaatgaataggcacatgttcctattaatattactattggtataattaaatatcgagttgtatctaataatttttaaagaatatcattaaagcacccatttagaaagtactagatatacaataacaaaacttattattgtagttatgtatttgagttgtttcga

SEQ ID NO: 64323 - DNA, 975 bp, Cannabis sativa
  modified_base (732)..(743): a, c, t, g, unknown or other
  modified_base (913)..(918): a, c, t, g, unknown or other
ccaattcaaaccaaaccttccagatatgttctatacatcccaaagaacatattcaaggaaataaaacacaactacatgcacggaatccaaaaccaccatgtgagagcaaagtttgggctcttaagctcaaaccttgaataaaccacatattacagccaccaaaacactacaatctaacttagttaaccttaaattcaattcaaaaaacaaaccaaaatgccaacagcaaccaatgaaccctaaactccatttcatgcaaaatctccattcttgaagcttaagaaaacaaaggtgattaggtctaagaacttaccttggattgaatccctaagaatcaactacaatccacaaaaacaagctaaggagattccaattcttgctagttctccaaggactgagagagagagagagagagaaaggaaagctatttctctttaattttctaattttttgttaaatgacataaaacctaatgtttatttacttaatctaacataatattcagattataatataaataaaattccactagaagacaaaactacattagggtaaaaagaccattttgccctccactaagccaaaagtcataaaaatacttaggggtattttagtcaattctaaaatctcaactattcctgacatttccaatgtctaattaatcttgttacgaaaattgtaaacaatacgcaagtgcacgcaatcaagtagtaaactcacgcaagtgaggtnnnnnnnnnnnnaattggattaattaccactaaattatacttatgattctatttggaaaatcgataattttcaagattaaaactgaataaaagtagttcaagaaacttaaagaaacaagtgaatattaatcaagatgaacaaatagggaggagaatcttgttgtttgtttacccaattgttnnnnnntaattgctatccttttcttgatgtgaatgacagattatatattaacctaactctttt

SEQ ID NO: 64324 - DNA, 973 bp, Cannabis sativa
ttttcaaaagcaccatttatctaatattttgatatacatattaattttatctatttaataattatcgaagaaaattattttttaaaatttatttattaattagacctacaaagtgtcttaattaacaaataaattctatctctcttttcttttcaaaattgctcaaacttagtgaaaattctcaaataagacatagatttattttaaaattttaatttacttattaaatcaattaattgagtctacaagataatattatctcatatactgtgggcaccatgagcctatgttgttaagattcattcccatgggcaattaattaagtcaattagaaatttaatagcccatgtttatgaccatgggcacttaattcttcttaaaattgtccgaacttagtgaaaattctcaaataagacataatctcattttagaattctaattaacttattaaatcaattaattgagtctacaatgtagtattatttcagataatgtggggaccatgaacctatgttattagagtttatgccttgaaaagtatgtaaagatattttttttatataaataagagttgaatattttttatatatgcatgaatgttaaggttataacttgtagttgtacagagaattaaaatcacgtaaccatgaataaaacagttagcaacatattaaagtttatgaatttttaattaatggttgctagtatggttcactgatgcatgttattcggtgcaagtaatctcgatttggattagtgttgtagcatgatatctaagtgaagatgttgtatataatagagattatatatgacaataactgatatgaataaagttgtctctattaaacttaccatttactataaggacctaattcatatcataaagatgatcaatagtagattggtcaaaatcctgagtaattgtgaactcttgttcatgttcttaggtttttttttgattcactcgttaaag

SEQ ID NO: 64325 - DNA, 714 bp, Cannabis sativa
ttttttcggttttcgattttgtcgatttcagttccaacagtgttcggtaggtcggtttgaatgattttttcggttttctggattttatgctcacccctactatcaatgccaaaaacttatttcaggagccttcaaaattcatcacacaggctcgtaacatatcctctaatatctaggttgtccttttaaactggccatctatatgggggtggaaagctatactaaacttcagtttcatacccatggcccgttggaaactttcccaaaactaagaagtgaacttcagatctctattcgaaataacgaacttcgtagccccatgaaattgtactatttcttttacatacaactcgacatactgatctacttaatacattattttcaccagtagaaaatgtgctggcttggtaaaccaatgaaaaactacccatatggaatcaaacatacccgtggtcctaggtaatccaaccacaaaatctatggtgacatcctcccgtaggtctttgatgttttcatccttaatctgttgacaagtctagcatctagacacatattctaccacatccttcttcatactgcacaactagtaatcgggtttaaaatcttagtacatcttggtggtaccaggatttaatgaataaggagtgttatgggcttcaccaagaatatcttttctaagttcaacatcactttgaatgcaaactcaggttttat

SEQ ID NO: 64326 - DNA, 526 bp, Cannabis sativa
atataaaattttaaaaaatttaacatctcaaaaataagattcaaaatagtacctatttttagtttaatatcaacaagtggaattaacgaatctattaaaaagaggaccaacagatttataagaatatcgagcttgtggagtattgccgctatttttcgagatttgagacttatatctacatcaaagtgaactttttaaagacttttgccgcaattttcccttaaaaaattatttgaagtggctcaattaatgttgtacttcatatgaagatatgatatttttgtgtgccccacacttcttataattttaggaaaatttgaaaaaatatgcataaaataccttaatattatatgcctaaactaatacttttcaacattgaaaatatacgaccacttttccaaaatcccaataatacccctctcaaaaactcaaaccctatctctctccttccctcaaactctctctgcctcttccccttcgcccgaacccacattgcacaacgccccacacaacccactccgactga

SEQ ID NO: 64327 - DNA, 1186 bp, Cannabis sativa
agacaatatacgaccctcccaaccttgaatcctcttatgaagcttgtccttaagaaacccaaggatagtattcttgctcctcccaaccgaacatggaagacccagatagtacccattttcatgagcttcatagatttccaatgaaacacaaataacatcttgaagatcacaatttgtattgttgctcaagaacacggaggacttagtaaaattaattctttcacccaaaaccacctcataagtgtgcaaaagctccttaacattatgcgattcatccttagtagctttacaataaatataactaccgtccgcaaaaagtatatgagaaatgattggcgcacctcgagcaatcttacaacccgtgagcgaacaactttgctcataacttcgcagcaaactagagaagccttcagcacataaaataaataggtaaggcgataatagatcaccttgacgcaaaccccgttgagcagcaataggtcgcaactccttcccaccatgcaagatagtatacgagactgaacaaacacattgcataaccaagtttatccatcgcccatcaaagcccatcctttccatcttagcacggagataaccccactcaagtttatcataagctttactaacatcaagtttgagagccatatagcaatccctccctcttcgttttcttttcaaatgatgcataatctcataagcaatcataatattatccgaaattaaacgaccttgtaagaacacactttgagtgtcagatatgacagttggcataacattcttaagtatattagccaccactttggacacaatcttatgtaacacgttgcataaaccaatgggtctcaagtcccccatatccataggatgcttctttttaggcataaaaatcagaatagttttattcagatctggaggaaataaaccatggtgaaaaaactgccttaccattttaataatgtgacctttaacaatcggccaactcttttgaaaaaaaaaactacggtaattccatcaggacctaaagacttgtctggatgcatttgaaacaacgctttgcgaacttcctcctctgaaaccggcagcagtagctcgacattttgctcaaaagaaacacgattttgcacactgctagtaacctttctctaatcggtttgagaagaagaaaaaaggtcattgaaataattaa

SEQ ID NO: 64328 - DNA, 1598 bp, Cannabis sativa
tcatatctaacttgagtgctgaatagcttcgtcccccccttgttttatgtttcaaatgatggatcaactcaaatgccacaaggatattatcagtgataagacggtttgagagaaaagcactttgagtttcggaaattaccgctggaaggatgtccttgaatcttatagctaaagttttggagatgatcttgtatatgacattacacaggctaatgggtctgaagtctcccataccactaggattctttgtcttaggaatgagagtgattagtgaatgatttattgattccatatcacacccatcattcaaaacacccaagacaacttttgttaccacatcaccaacaatagaccaatacttgtgatagaacatagccgacataccatcactacccgggcttttgtctgggctaatagtcttgagagcattgtatatttcttcacaagtgaaaggttgaattaatgaatcgttcatggcagcggtcactgttgttggtattgctgcaattgtgtgggttaaagcatctaaattcacgtctgtagccttgaataaatcaccaaaataagctgtgataatatcagtcattccctgcttggagtggacagcaatgccacggtcatcacttaaaaatttgatggtgttgtgtttccttcttgatgaagcataagcatggaaaaaattcgtattttgatcgccattttgcaaccaatctacacgagatcgctgctgccagtaggtttcttcctgagccaacaattcatctaacacgttttcatgatgcttcagttcttggataacagtgggggagcgatcagtatcattgttgaggtctttcaccttcttttgggctcgcgaaatattctttttgaagctgccgaatttctgttggtgccattgttgaagagattcagcacacctttgaagattattgacaaaaacatcagccacattttcagttgtaacttggtgccaattttgttgaatcaagtttgtggcctcctccttttgtaaccaaagcttttcgaaacgaaaccgagagcgtcttgatcgctgttgctgctgctgctgtgttgaatttaaaggaagaatatgaactgctatagcacgatgatccgaacggtaatagtcaaggtggtgagtaataattggttgaaaaataccctcccacatagtatttgcaaaacaccaatctaagcgttccttaatagtgtcaattgtgtgccttcctttaatccatgtaaactgatcaccatcaaaagcttgttcatgtagttgacagaggtcaagaacttttctaaacatatccatttgagcctcattacgtaaagctcctcccgatttattgcgatttgataggatttcattgaagtcaccaatcactatccaaggtaacaatggggcaacatcttttaatctctctaacaaagtccatgtatggagacgattatgaacagtcggggcaccataaaaggccgtgaagtgccaagttgggccatttccacaagacatgtaacaatcaaacatatttatattatagtttaaaagggttacatctacatcatctttcaatagtaacattaaacctccactaagacca

SEQ ID NO: 64329 - DNA, 3996 bp, Cannabis sativa
atcaaaaagaaattaaaaataatcaacttcagttagaacactcaaccagagaagctattaccctccatttaaggaatccccattatcagacttctcttgttggattggcccattatcaatcttctctgtaaccaggcctgagtaattttgggatggtgtctgaagaacttggctttcctgcatcgtctcatctgcaatggcatgtctttataagaatttatgtcagaaaatttaaatacaacttttcataccataaaaactttcctcggagaatattattgtatatattaagtgcaaggacacatcatcttgatgaaaagatttaattatttttatttaaatagttggtgccaaatagttcactcagaaaaaaagcaaggatccatcttcttgatgaaactacaatataaatctaattcagtaattggagccaaagagttcgcgcagccaaaaaggacagaaaatttcaatacaaagaacacccgtcacaagaagattggtcttatttatagttcttaaaataagccacaagtatagcttcaccattctacattattggcacaaaatgacaatcgcagcatattctcaagactacatactatagtcatcagagccaccactgagaatatcatcaagtgaaacatttcctatctcatttcgtataagtgatggaccagcagtctttaaagtctcttctgctaaggtagttttgacagctatgcatctgcaagaagcagaaaaagatttatcatacattaatagccataattctaatttataaaacaaagaactcaggccaacaagtggcatgaaaataattaataagcttaacgaaaggtctagcacaaatgagactacaaggtatgcaaaagggaaaaacaaacatatatgcatactgaatccacaacttgagaaaacattaagtagctattgcaattgattttacctcattccagcagctttggcagcttgcactccagcaagtgcatcttcaataacaatgcactgcagaaaaagtaataagaataagactcagtaaggcattgcatatatgtattaataattccccagaaacatttgactttacctgctcaccaaaagtaaccacattatttggttgaggaggcttattgcaaagcaaattcgaaggcataaacaatatttattttcacaatatagagaaatggtgtggcatttaataataccatatacactactatgccttgtagttatttttatgctactatacctcgctagtgggtacactcaagatctttgatgctgctaagaaaatatcaggcgcaggtttcagattttcaaaagcatctgctgacacaatggcatcaaacctgatagtaaaacatacagaataaaattgtatgctccaaaatatacagtcagaattcaaaactcatatattacagtgaagtacacagtccaagtcaaatgggtaacttcttagttctagacaaacttagcaggtcgaccaaaataaagtcttttgcagttttcatattatacacaaaactttaagatatattttttaatcatttaacattgttagaattagtctcacattgctaatgtgtgaaaataaaataccacatataagatgaatggactactcctctcattgtcaattgattttgagatggaacccctttccaaattctaataagcatcaactactactgttctgtcaactttcttaaaagagctccatatgttatttgtaagttcttatactattgtgtatctcattccacccttatagaactaatattaaaagcattgagaacccattagccatgtttcagtttacaagcttcacaatctgatgcagttggagattgtagtggttgagggtaaaagccccttctatatcatctagacatttccatgaccacaatagcaactcatgaacaagaataagcataaaaataaagcaagaatttttttatgctcttgcaaaggaaaaagcacacagctagattggttacagtgacaatggcaaggcagctgcttctagatttgcatcaaccttgattcgatcagcactagatgctacagcaactttaaggcctttgcttttacactgtttaacattagtgtataaaaccaatataagccaaatgtcacgaatgagggacatgattttacaatgagtcaacatttcccatacctgagtaatgagttcaagagctcctggaaatccaattccggaatttggctttgcatactacaagagggagaaattttggtggttattggaaattttaaattgcaaattataagtcatatagcaccattgaatggtttctctcatatatataaacataattactgctaaccttttccaaatatatctcaaagaatctcttcttggcggcctcaggatcaaatcctttcactcccttaacagacgcaacacctcccaagaagttggcttcacctgccatattgaagaggtagaaaagaacatgcaatctccgactcattattaccattattagttctaattaaccaaattgaattgacagattcaaacgccaaacgttaacacagtttttttaagctgttccttcacattgccacgaatcatttataaaatttcagttcaacatttctcatagtttcatccacacaatatgatcagaaacaaataaatccatatacattaataaacaactgtgcaataattccaattccagttacaaattagctctcaccagtccccatgaaaggcacaaagtcctccactgtgacttcaacacccatctcggcgaaaacgtcgactccagtcctcctcgaaaggtcttcactattgcatagcactccatccatgtcgaaaagcaccgcagagactttcccccactcacttcgggcggagttttgggaactcttctcctccactttgagacaagatttcgcagccattctccgggagcaggagcttcgtttggacctccaacaggtcgggaaggaaacgagtttaggtcctttggaggtggaagagaaggagaagagcttggtggagcgggagagagaagaaggaggagctacgagcttcgaagccattgttaattttgtatgagtggcggggaagtgaactctgttatactttatgccatctggaccaatatgccctttaaatttccaatatttagtattagtagtattgggtttttagtcatcttcggatttctttgattttattagtggtggaggaatggtttcttttctttcaattaacgggtgatgcaatttattagcatgtttcaaattatcctcttctttttgttattgatttttcttttcttttccaattattcagttttatatttttaagaataaatttaagtttaaattttggatacaaataaatatttaattttaatttttgacgattataatacataagttatatttcgaaatttctataggtacttgagttttaaatcattttagtgttatttttttattagtatatttaaaataatttttaaataaaaataaaaatttaatgattaggatcaatcagagattatcacgtgataatttacttgacacttaataactagatacttacaaaaatttcagaattattatttaaatattattaccgagagttaaacttaaatatttatatcgtaaattattttattttaaaatacatagtatgtttatgtataatatggtagtaattagatatgaattttttttttttttttgagaaaaataatttcaaaaaataccacctaatagtagtcatgtgctcaaaggagcccaaagttagaaatatcattgataaatggacttagtcaaagtaaggttcctgatacaatcaaaataaacagactactatactgtgtttgtagtagaagttaaagcaaatataatgggaaatttacacccattactgtctttatcattttttttttcatttgtactgtcgcacggtcattttaacttttatactgttttttatttttaaat

SEQ ID NO: 64330 - DNA, 526 bp, Cannabis sativa
cttcagcgcggcttagactgactaagctcttccaagaatacaaggattaaaagggagatacactaaaaaaactacacaaatagatttgaaaaaagggcatgccagaggttcacagttggacgccgcccgacaaagaggacagacttgcgccagacatccgctccacagcctccgtataaaggtcgtgaacgaccttcaaaattgattaatgtgggcttggcatgaaatttcctcctccatgtgctggttggcctgcagtaagcccccaatttgaaacttgcgtaagtgagctcaacccaaagggtctcattggtggcgcacaagtcaaggtttgtcgccctgacctgttccaactctgtcaccagcatgtgccacagtagccctttctgccaacaaggtcgccaggcaaaaaataggccaagttagaaggctgaagtgccagagcaggggacatgtaatatccagtacaagtatattatttttggtatattattgtgtgttttgatatgttattgttgcattaaat

SEQ ID NO: 64331 - DNA, 565 bp, Cannabis sativa
acttatactgttgtgaccttattactcattgctagaggaagattgttctactctctgttgacccgtattatagttttttattctacaaattagtatctcatataagttagaaatcacattaggaccattagaagaaaaaagaattgtataacacgagaaaagctaatacaaccttatttaggaacaggagtgagtgtaactaaagagttcatgtcttgtgtggtgatatggatgtgatctttaggttccattggtttcctctttgtggcgttaatttcttaaacaaagagattttgttaactcatccccactcaagacagcaatggatgaatccaagagaatagaacaatgagaattgctcagttggatttacttagccatctttactcacctgcatagtttgactacagaatttctcatgatgtttcttggagtattcggtctacctagtactcacattttttctcattgttcttacaagaaaagatcctatcagcaaacaactttagtatgattgtgattggttcttaggactctatcatgtcagaaagtaaatagattgaat

SEQ ID NO: 64332 - DNA, 1745 bp, Cannabis sativa
tatcaacaaagtatgatcaatggaaattcaacttaccatagtagaaagactaacaccagtctcagtctaggtcaatcaaatacccaaataagaacgaaagtgccatcacccctctattttggtcgctgcaacagtacgcatcttctttctaaatgacctaccacgccacattaaaagcaagctcaggtttagtatttaccctaatggcatcttttgcatctcagtccttacccccttagcaaaaagacattaggtcaaccacctgagcttagaactgggcaacccccaagtttgctaaacaactatatccacattccaagcgatatattctttccatcttcaactagatttagcctccctagcggccttaacagccacttcctcaaaacaaaactttgccaattggtcctatttatgtcattctccatcaccacgctgtccgggatcaatcgtgtaagttttgctaccttgccacttagatatttccttactttatagcatacatttgctcccagtcttgtggtaataaaaaattcatacccagactaccaacttcgagcctaacaagctcgtaattattcttactagatcgcttcaggtacacctttttctacattcgcgaccattccttttttttttcataataatctttccaagaattaatgctaataagcattaccatacatgtaatacatgcttaacaatttttatgccaaacttatcatacttctcgaataaattacacatttcagataggcaacaattcaaacaatcaataaataatctactaatcaacaagaaactagcactcactaaaccatgagtcgaacgagtcttcccagccaatgtacatatcaagccagtcttcaggatctataaactttggttggtgtgataccatgttgtaacgcccggactctcagggacgtcacgtgtgtgcttttataaacttattattactaatctataaattttggaaaagtgtggtttaatttaaacctttaactaaattcaaaataaagactttcattttaaatactgtcataatatcgggatcccctgctaataaaattcttttacaaccaattataaaaccgttaatacaagaataggttacacatccaatcatagaaaaggattgatcccgcttcttgaaagccaagacaacacagttaatatgtacactgctgggagacctctgactcatggccaaatagaaccgctaatcttcttacctgcaccatgaagcacccgtgagtcatattgactcaacaagaaaagctaatagacaaaagtatagcaagtgctagtgtacaacaaaatatacatatcagagattcattacatatatagcatgtatatacatatcagtacgtctatgcgaacatattcacaacacatgataagaataatcataggaactcataattaacaatttcactgaataaacattcattcaatccatagctatataatcttagtgctttataaagcactctagtcatacatcattgtaatcacataatttcagtgctttattaagcactctacttacacaataccataataacctgaactcagtacttcataaagcacccttaccactcgttatcaacgagctgtatatgtcactatcgttgtcctatagcgcaaacgataagtaagaaacctatctgcagtttcaacgagtaattactcataacggtaatgaccgtatcttatactcgatcataatcgagttacaa

SEQ ID NO: 64333 - DNA, 1695 bp, Cannabis sativa
ggtcccatccaatggccttgtagttaccaggtggtggatggccttgcttcaataagtagagcaatgggaagatattcaatatctaggccagacagaatgttaccaacaagaagcttttcgaggtaaggatctcctgcaagagcaagagcatctgctattgtcttttttgtcaaagataatctggcattgtaagagatcctttccttgttgtttgaatcttggttctatattcatccattttgaattttgagtgtgctccatgcaaggcttctaatgcagaccacaagggggccgctgaatcacatctcataacttctgaggcgattccttctatcatagagccatacaaccatccgaggagcaactaatcgttcacaagccactgctcaaaagtagggttgatttcacttgtggacacaacattagtatagagaaattcttgtggcctaaggagagtacctttaatatagccatttagtttgtgtacacgcactattgcagacaccatggttttccatagtgtgaagttgttgcaatccagttttaatgcaaagagatggttcaatatgcttccaaaattgggcacaaccatgtttgagtgctaagtctgagcttagctacctcctgcagcaatattcgaagccatttgctgcactgcagatgctgtcacttttggggtaccattgtcaccttcaacagaggcctctggtgtcttgtctcttagagccgccatagttgacaagcgtcaaagaaaggctttgataccaacttaaaaaaagaaaaaaaaaagagagagagaatattttgcgcagctcaatttggctgaggtgaggccttttcgttgtataggtagttgctaatttacacgaatattctagatacaatggcaacaaaacaatacatcagcaaaagaaatcttttcctaacaaaaaattgtaatgcaatcattacccaaatcatgagttgtctaaatggttgggactactaggaaatgtatagaaatgtgctgcactctatttgtgccatttccttgacagtatacacagttttcctcaagtcctgctaattcttcaatgatagcatacctaaacagttaaagaaaactaaacaagttttacaaaacattcaaataaaccaaaaaagaacttttgacaaattaggcctaagattatcagattgaaacattaatgaagtaataagaagaagaaaaggcttgtaccctattctttaggttctgccagttacaagagaagtcattccatggagacaccatctttgttcattgctatattaagtacctgcataagtagccactctttccaacaagtttttggctactaaattcctaattcctgttctaggatattttaaacaaaaataacgatcaagttgtagtaaagcttaagaggttgaatacgaaatctcaggtgttgatacttctatgtttgtcttaagagaaatggtgggtcaagaaaagtctatccaaaaatgttgatatttattttgctaaagttaggttgattttattactctaaaaaatagattaaaatgaaaattctaaagttcccacttttaaattcatccaggaaatttgcatgcatacaaccaatgaaaataatacgtgtgttcattgccactcctcaaacctaattctaatgtgcatactcttcaaccttagtttgagatttgaaaaca

SEQ ID NO: 64334 - DNA, 923 bp, Cannabis sativa
tttgtgacattagacatgtggactccatatcaatattcaagacccatcgtggggccctctttaaagacaaaatgggccaagcccatctagatgttaccttctagaaacatgtcatggttctgcactagcaaagtcttgcgccttcaacaaactaagcccagaagaaatatccagcctcacaagatcgtagagataagacaccacattcccagaagacccttctgggttccctttatattcctattcacaaataaggaaactccaattggcagataacaacagtgcatcgaatcaagattaaaggagaaacttcccacaacaaatattaagcaattaattcagattcatttcccacaatcagtgtacgcagtgttaagcaaatcattcccaatctaatctacctagtcagcagattatcttttccacaggctggagttcaagcccacgagtattctttattataagctccgcagtagagggaaatggaaaacctaatataattctaaaactactataaatatcccactaatctcttgaattaagggttgaaatctcttgtatactttgctcagggaaacttgagatgatacattctgtgtatttcataaggcatttgcaagtaaaagcttactgaataatactaactcgtggactaaggcttgttaacgccccgaccacattaaaaactatttgtcttattttatactttcttgatcgattatttacttttcagtttttattacttttattctgtttccaaaaatcttagtaaatattttggtggtttggttaagagctgaagaaagtagtgagaccacttgtagattacgtccgaataaccatggccctcaccagaataaaatttgggctttgtttcactggtcctggcgccatagtaggagatactagtggtctccaagagg

SEQ ID NO: 64335 - DNA, 981 bp, Cannabis sativa
  modified_base (57)..(62): a, c, t, g, unknown or other
  modified_base (215)..(215): a, c, t, g, unknown or other
cattaaatgcgagatgactgctcagaggaggcctgacacctcccggagatactttgnnnnnncttaggcctccgagagcatagaggacttaatagaccttctctgggaggcagatcccggatgacacctttcttactaaagacttagccattaatttgaatattaaggtcttcgtgtctacgtgtccctgtgtggttggtccacgtatattgggnaaaatcaggggcaacagttagaaatctgagtacaactataatccatgagtgtaattgtgaagaggaagatcttggttatctcataactctcaacatctatataatcattccctagatgacactatagttgagttacaatcatctatggtgacaaattaggagatgataaaaggcttacttgttgagctaaaacaaattaagcaggatttgagcaagttatctggtcacctgataagttcccatgctaacggctttcctctataatcggtgaatgaagcactcatctctaataccacctttcacaattttaacgaggtaagtttcacctctacctccagtggtgaaaattttgaagaacccactcagctaagtccatatgagggttatcatactgatgtgatacctacattattcatagagtagaacaataccaccactattcataaagaaactctttctcattctacaattgttcccctcattttgaatgaaaataaatgatatcatactaatgtgatatacaaagtcattgaagaaattcgaagaatatttttatttagtcatttacaatattttctctacgacttagataatgaccattttttttttgaaaatgtaactaatgcttttatttttgagacagatgataaaagaaaattcatttttgatagtcagaaatattgagttggtaagcccacctgaggagacttgtctctggtttgccaagactaatcaggttctatctttccttgctttcttttatttt

SEQ ID NO: 64336 - DNA, 2246 bp, Cannabis sativa
aataacaagaatgcaacataaaaagaccgtattatctgtaaataaaataaaaaaaaacgtaaaaatatttaaaattccgtgaacttttatttttgtaagttttttgttcttttatatttttgtgaaataattccagaaaaaaaataaaaaaatattgtgtaatagtatttttataataaatgaaactagtgattatattgtgttattttcccttaaaatattacaatcaatttttgtacaataataacaataataacatacttcaagccaaggacagatgttgtcgataggataaattttggatatcgataacaaacttgtctttaatattaatatataaattttattttttttaacttcatatatccgttaatgataggtttgcctactatataaatgtttcattgttgatttctgatataactagctttaacttttacgatgtttaattattttaatttaatcaattcaaaattgcaatatttaatggttaaaaaaaataaataaataacatcaagtattggatatattgatatgtgatatataatcagacacaaaaattttaataataaaataaattatgtcccacaaagtgtgtactacttaggttagtatttttcacaaaattaatttgttacgttaattaagagataaatccatgcatgcacattataatgtcatgattggctgaactttatatggtaattgattaattttttataacttaactataacaacattcttataatttgataaagaaaaagaaaaaaaaaattataagaatatcgcttattttgatcatcaatatatctaactgaccagaaaaataattaagagtgacaaaataagaaaacaagaaggaagcagttatatgttagtgaatacatacatgatgttgagagactataatagcgatcttgcatattgcaccaatatatatttataaatcattattttatattgatagagagatttgaacttgagatctctcataatatatcatcttcttttattacatatatctatatgtatgtgctctactttctcgccgacacatgcaactttcttcacttggccgacacctatatcatcattatcaatattgtgtagaaagataaaatatcgaaatgacatggtcagtacttggcttgtaccatgtccttttatttatttaattatacaatctacttttttttttttttcttgaaagaacaattatacaatctacttgtaaaaataaacaaatatcaagagaaaagaaaacctacccagtcggcctgctttgacaaaatatatgatgccatgtcctccactaatttattcacaataattgacaacacatagaacatttactgtgtggaataaaaaaaattatatcttcgtctaatcatccccccagatacacaactgtaaaaactactgatataaatataaatatataaaggaggattatactgtgaggcatttaaaatagaatgtatttgtgcagatttaaaataaattggaatctagtgccttgtatggatattaaaaggtgcacatattgcaaatgatatggtgttttatagtagatcactagaattggtatgtgtgggtcctatttttctgtgtagcactaaatgcattttatgcataaaatgatattctgttagagagtctcacattgttaatgtgtagaaagataataaaatatataataagaataggctacactcctattgctaattagttttaagataaaacctcattttcattatctaaaattctaacacattcttatatttatttttttattattttatttttactgaataatcattttttgactaaaattataatgtggtcgatttggtcaatggtccattaacgtttaaattaaaaatcagaaactgatactcaatccaaaaaatctcttgttagggtttataaaacactgaagaaatataaatatcacagatctaaagatatgtctaaaagtgctttaatatagaaaatcctaaatcattaatctatagaacctttgctaaattaaagaagaagatgatgataaaagatgagcggaagcactaacctaaagccattgttggagattgcagagaaggttttgatcttccaggaatacactattttcttaggtattttctttgatagggaaggagagaatacagaaacccttttgtttcttggggaccactacttatttataaactcattttagaattaattttgggtatttataatttggc

SEQ ID NO: 64337 - DNA, 717 bp, Cannabis sativa
aaaagatttccgtgtgtgacagtatttttgtaaaaactaacccaaatttcaatatttttgtaagtttctttttagttattgtaactttagagttgtgatttgtcttatttttattatttttgtttattgtattttaatatcctagaactctttgcagtcgctcttctgagttaatcgctagtcgccatctgctgaaatgaccactaccaccaccacttattcatctcttttctatagtgacagacccagaattaaagttgagagaggcatatttcttttttggtaagagggtaaaaagtaaattaaatattaaaagtaaaaatacttttattaggatttgaactcttaacctctatgacatatatgagatagcctaaccaacatgctaaagttattattatctttatatttattacatttaattatatatatatgtatactgttaagtggtattattcatgaatgggtaaatttattttttaagcataatttttctatctaattagtttaatctctcattttcatattatatgagttaggattgtttcatcggctggaaaaaaaaatcggcaaaaaaaagataaaaataattgagtttgacttaaatattttgtatctaaacatatttttaatatagtgtaaaaagaaatattttttgatattttttaataaattcgctaaactaagaatagatattaaaatttcttttttattatt

SEQ ID NO: 64338 - DNA, 1130 bp, Cannabis sativa
taattagccaattaaaaatatacaatctttacttataaatgttctaatcacaacacaccaaataatctaaattgtaacccaaataaaattacaattagcttgttcattagaatttcttgtctaatttttcgatataactttgtcttatataagtcactttatttgtagtgagtcatattctgactttgtatatctttaactagacaattaggttgttgattggaattttttctttgaagattgtcatagtgtgattcttatcagtcttttaaaaaaaaattacaatccagattgtaactaagttgtaatccaatagcaactaactcaatttaacccgcacaacaatttaagttcaacaaaaaaaaaaatataacttaccggtaattcctcgtatcttttgcaactctttctcttttttttttttttctttttctcttaaaatggaagtagtagcaactgcaactcttatataataatttaattgagcaactatttgtggagcattgtttattggacaattttcaaaaatattcttctattttttatttataaaaatatatttgtaaagttttaaaattacaaaaatatattttggtgagcaaaaaataaaaaaataactaaaaacaacttgaaatcaacctcatgataattataatataactataaaccgaaaaatagtttattatttttcactgaggaattatttttataaataaaaaagttttgttggtatatttttataatttttttttcaaacttttaatttattatgtaaattttcttatttgtaagtaacagtgtaaggtatggtgcacaacattaaaagaaaaggtatattatttttcttaacggattttacattatttaaatatatatctccaaagatgtcaaacatttttatttttatcatttttcttggagtaatagtgtactatttcaccaaattgatatgaaattttcataccgtttactattaatatgtgtattggcaaattatatccaaatattacacactaatgtgacagttttagaacacaaagattccaatttaaataattgtgattaatttttaaaaatattattacattactacgtgtaaaatattcaagtgtaattaatttcaaaaaaaa

SEQ ID NO: 64339 - DNA, 2237 bp, Cannabis sativa
  modified_base (392)..(393): a, c, t, g, unknown or other
  modified_base (2060)..(2063): a, c, t, g, unknown or other
ggtgacacgtggctcttatttcctacatttggttgaagagatattccgaacagagcttagcatacatctgcacggaaagagtctgcctgaccgagcagggtaagggtagatgatccgaacaacatatcaagacttagcagttcaaagacttgcatcgtggagcacaaaagcaatccctacaatccagggatcgtatcaaacggatatggaaagctgtctgaatccctcaatttatgtattctaaatatgtaatgtatgttcttaccaattatagatgttgtaagtaaaagggaaaccttccctcatgcatttagtcctatatatagtaatccatcctcattggaataggggttgacagaattactttagagagatctaagagtaaacactcnnagatttcattgtgagagcttcaagagaggaaacactgtattctttgttcttcagttaatacaattcaaggggagtaggctattaccgaactaaaggggtcgaacctctttaaaatcttgtgttctttactgtttattggttcttaccttatcttaattacattttttatcgcttattaattgactcattgtcattggctaaaagcaaggtcaacattaggtgatcaaaaatcgtatttttgttataacttttcactcggtgtttgttttggatgttctatataccgtttcaaagcttgcaacgagcgctaccatatggtatatattttagagccaaaatataagttttattttagtgtatttctactatggggtttggtaggaaaccctaggttatcctttgtaactattaagcaatatattaaactgttgttgtgacatagggtcgagatcatcggaagtatttctccacttggattggtcgacatgcatgaatctagattataggtaagaaaagtataatgtaccacatggcatgacaggttttgtaatcattgacttgcctgattaggcaatgtgatatgtaagtaaacctgattaggtaatatggtgccaagttatggcatatgcttagctagcctgataaggcaatgcggtatacgaatgttagattatgacatgagcttacttgattaggcaatacaatatacgtatatatatgatgaatgtcaggccatggcataatcttgcttgagtaggtaatgtgatatatgaatattgacatttaggttgtacctgtggggcaaccgttataaagtcacgactatgaatcaaaatcgctgtttgcaaggtcctaaaattatcgattgtttgattagacaatgataatgtgatgatctatgaacataatgtacaagttcacctgattaggtgatgcaatattcttggcaacatattgggtataggtacgggagtaagtgacatatgagtaccaaacataggtacgggatcctctgattaggagatgcgatatattggtgccaggttgtagcatgggcctacctaattaggtggtgcagtcatattatatataatattacattatgacacgggcttgcctgattaagcaatacaaatatatatatgagcatatctaattctgtgatgattatattacctactgttaaattttatggtgtaattattttatgataatgaaatgtatgattacttattgaatttatcctttctaatcacttttcttgctgagtttatgttactcacgggtgctctgtggtacaggcaaggacaaggaaaagttagagcacgatgagatgacagtcttctccaacaatgtaaatattgacctcatcagcctgtgtgccgggacgccatgagttgttttgggctggctgtatttgatgtgtattttgattttgtgtttttcattattattgtacatagtcttttgtaaactttttataataatagggatccccagaataccttttttaccaccgttatgatgtccgtttttagtgttttattttagtcaagttttaatattatcacgatttttaacaattaattaatctattagtattaaactagtttataaaatcacacacgcagcgttcctatgtgttgactttgcttttagccaacgannnngagtcttttttataagcgataaacgatatgtcgtaatgagaatatataataaagcaataatatgacacaaaaattttatataggttcagccccgagaagttcggtaatagcctaatcctcgtatttgtattgacttaagaacaaggaaggagtttccttttcttatagctctta

SEQ ID NO: 64340 - DNA, 875 bp, Cannabis sativa
tgcattacttctagttatatgttgtatttctatttctttacagttttttcatagttgattggccataattgatatttgaaaatgtcaagaaggggacccaattccgtttctcatattttacaatggacaggttgatacaagattgaattatgtaaattacaaagctagtggcgaattcatctcaaggaataacaaatatgaacaactagtacaaaagttgaaacaagtgctggaatgcaaccaagaaaatactcaattgcatctgaaatatctaaatacatggttcatacataattatcaatacgttgttatgcattgtccaatagttgtcttattaatatcttagttgttatacaagtttgttatcattgtttttcggttttatttacatttaatactcaagcatataggtaaactttataaatgaaaatatgtttgaagtggtacaataaaaaaggtcatgaatggtgaacctgaatgataaaatatgcacgttcaacataaaccaaaaaaaggaaatgtcatgtgcccatgctcttgttgtgattaattacacatgaatagatgcaataaatgtggccaaaaaggtcacccccggaagacatgtcataactaagcaattagtaagaaattgttcttttaatagtaatgcatgtgagacattatatgtgacacattaatgcaaagttccaaatagtttactattacattgtattttttttttcaatagttgcacaacaattgatttaaagttgtatcacatatgataaatataaacaaagtcataaagtattatcaacatcttatttgatatgttaatgcaaagtgccaaatagtttgctattacattgtcttttttgttttgagaatatgtt

SEQ ID NO: 64341 - DNA, 1370 bp, Cannabis sativa
  modified_base (74)..(79): a, c, t, g, unknown or other
atgtgtttatttaatatctttttagaagttcatatttaggatgttaaacagcatacttgttagtaaatctaagnnnnnngtaaaatatttccaacactttcaacttcagtcctgctcccttcagactaataccctcattgcaaggaatcaactcgcgttgaaaagaagcagtagaaaaacaattttcaggtgcgtcgtccaccttcaatcacggcccctacatatgcaccgtcaggccttgcgcagggtttacccataccgtcagagccacacactccttgtttgtatgagccagctttccacaattaaaacacaaataagggagttttttatacttaaattgtatccaagactccgacttcgatcccgatttgaggaaaaaacttgctggtatcggatggctaatccagacatcaacccagcacctgagaaaactatggcgaacactctcctctttactttatttgccatcagttttaactagctgcccgaccttttttgcgagaattggaatgttagattctgaaagactccgagtaggaagcccatgaaactccacccagaactgagtagtgtcaaacttcgacatacgaacttccccttcgattggccaaagtttcagatttaacataaccccgttaacctgccacgacctcttgttcataacagtggtgcagtctgcttgagagtcaaaagagaacccaagcactccttcctcaaactttttcatgcgccaattttgctccaggttccaaacacccaaattaatttttttgaccacagaggcaaccatgttcttgcaacccataactctgcctatttaccacaatatcctcaagagaggtcctaaaaaaaaactcaccatttctatttccatctcactatcttgttccatgatcttctctgcattcaaatcaactgagtccacttccaccgtaacgacatcacagtccatctcctttattgtgaccatgtctactccaacttcaccaggccaggacatacacggcgaaaaccaaacaaggggacgaagggaaagagaaagaccaagattttaagaagagagctaaatcagccaggccaagcaccaaagacttaggacaaaacctagaacgtctactaagagactagacccatcaaggagccaacatttcgatgataagtaaatgacttgagagagccaaagaatgtggtgtagctttaagaaaatttaaggtgtcgaatttaaattgacgtaacatgtatgaacggtctcgtattatgggcgcgtcccataaaggtatttcaagataccttatctcccgcggcctatagaagacgttgaataccaattggtttaatagcaatgctatattattattacgggtttt

SEQ ID NO: 64342 - DNA, 2014 bp, Cannabis sativa
ggctgacgatggagaaaggctgcaacttgcctaagaagaagtagaaaggaagagagagagagtgtgtgaggaagaaagggtgtggaagaagtgtatgtgttgggaagatagaaagagattagggttctttcttttttctttttcaattacattatattttaacacattattttttattgttttttaaataatttttaagtaaattttagattttaatgattttttaaataataaagaaaaattaaaagacatggacctctatcagtggctaacgcgtagatactgatttgtcaattaacggtgaggtacctacggaaatttcacactagtaacgaaaggtatttatactaccaataatatgacttaggtacttatctgctactcgacataaaacttaggtagttatgccgcaatttactcatttttttacactaataattaagtataacaaatttgattacttaagtactttcagcactaatttattttcatacatagcctatcataattatcttttaaattaatttactttaatatttttataaaatttgtatcaatattattatttgaaatattttattaattttttttattaaaaaaaataatttttatcaatcaagccgagtcaattacatccctatggggattctccttcaaaagagaaacttatagctcttttacattttgagaaaaaaaaaattctatgctagacaattttattgggttgagatacaaaatgaccttaaatttaaaaactaagttagtaaatgtccattttttaaattaattaggaaaatgaccaaatataataaattaactgatacaattgtatataccatattaactaaattatatacagctatacaataattatatcatactcaaaaaattatatatcaccattatataaaataaaataaaaattgaacatgcatgatctaaaataaaataatatactatacaataaaacttatatactacataacaacaaatatatgcctcacaatcgaaatatatataataaaaataaataaaaatcaaaatatataaaatgttaataaaattatatatcatatatatcaacaaaagtacaatagaacttaaattttatttaaaaatagtataacgtataataaaaaatacatataccgttcactaaaatatatatactaacaaaaataataataccaattatttataagatttattaacaattggactatgattaaaatcagattattggagctgtcaacaagttaatcatagcaatttagatcaaatgaataaaaggtttgtttaaatttttttaaaataaataaataaataaacgaacaaacatgtaactaatatctggagactaggtgaagattttttattttaaaataaaatatttaaaaaatatcttaactagaatttaaatttaagttgttagaaatattcaaaaatatttaaaatccaacaaacctcctaagtatctaaaattcaaaatgaaattcaaatatccaactaattttaattttttttgtttatttaaataatttaaattaattaaatatctaataagaagataatatgatataatatcttaatttgaaaattgagatatttctgatattatgtttctaatgttataatttagtaaaataaattgacaaaataaacaaatttgacaataagatattttgaaggttaataggatattattaattttatttaataaaaaaatatcctaagtttgaaaattttatggttacaaaaccctaaaatttttattcaaatcaaaattaacaatttttcaaaattttcatttaatgttgacaaaaatataaaatttagataaatatgtaataagacaaaatgtcaaaaattaacatttttctaattttataatttaaattaataaaatatatttcaaaaacgaataattttgaaaatttgatatggttagcaaatttgaaattctaactagattatttctaagttttattagtattttaatatcaaaataagatca

SEQ ID NO: 64343 - DNA, 1003 bp, Cannabis sativa
cccttgtaatagtagtacgtgaagggacaacaaatttaggctcaatcttccaaagaagttctctaaaaccttcattttctacaaatgaaaatggttgctcatctttgacaatcatcctagcaatatattctcttattccttcagggtcaaatttatgactcaccaaagtgtttccctcccctttcatcaattcaaaacatagtgttttttgcttcttatcacctctcccaggaaaactcttacattgagttctaatatgattcaacaaattactagttccatttttcttgctaccacatgcatatacactactacagtaattgcatttagctttttcattatttttagtatcacttaccttagtaaagtgattccaaaccattgattgaggcttgattgcctttctcttcagatcattttcctttgtcccatcagtaggtaaagtggatgaagttggggctgcacttgattctatattttgtccatcttcttcattatgtatatgctcaattcctggatcttcttcctcatcaagagatataggtaacgcttttttcgcagtggaagccatctattaacaatagccaaacatcaaatgagagaacatagtagagttagcaaaatattcactgtataatcttcttataacgagaacaattactagccaaatatatagttaaactaaccgagctagaggtagaattcgtgctgctttttgatacgaacacgaacttcttccctcgaaagagataaagacctgcataaatatgatattggcctccattgtcatatttccatatgatttcaaaaatctaaacaaactaacaagtttaaaataaactttggtgtaattgcaataatttcaagctatatatcaaatcattttataaaattaacatagcttcttgatacaaaaccattatatatatatgtatataaatgaaatatgatatatgtttaaaagaaaaacagagaggatatatgaaatatgaaatatgatata

SEQ ID NO: 64344 - DNA, 2589 bp, Cannabis sativa
  modified_base (2077)..(2086): a, c, t, g, unknown or other
  modified_base (2264)..(2266): a, c, t, g, unknown or other
  modified_base (2550)..(2552): a, c, t, g, unknown or other
ctttctcgacatgtcgcgttacgactagctaacgatactctccaaaaattattatattaaactatatatatgagacccgatatttaattgaaccaataataatattgacacggtgttttaacatttctctcttttctatcatcttgtgaattctctctccaataggatagtattattactaacgaagtcattttcttgtttatttaattttttattgtaaccgaactaatactgatattgctctttctttaactaaatttccttgttctttacaatctctcaagtttgatgattgaatcttttgtccaacttacaatgattatctttgatatcaaaattctttgattttgtgccttcatttatttttttttttaaaaaaataatgatatgtacacacataattgatactcaagcttaatatacacttagttgacaagtaatatcaactaatcatatatttttatttaaaatgaattctacaaatcaaaaataacttgctatatataagtgtgttatgtttgtatgtaatttatgtgtatatattatagttattaactactcaataatttgtatttaaaagtaattatataatcactagatagtctaatatagttattacataacataattattctttatttttaaattcaagatatattatttaaatatgagacgataattataaaaaataatatattttttaatagttaataacttaatatttgacaaaaaaaaaaatagtaattacataatgtaattacacttaattctaataattaagatagaattaaaaaatatgattaaaatttttcaattactctaatatgtaattcttaattaattcttatatttatttaattgttcaaaaaaaattaagtgatacatggaaaagaaatcactaattaactttaaatttcaatttttggaagtttttttttttttatgaaactatttttggaaaagttttgagttgatggaaggtccacgtaacaccaatgaagaatgaggaagccactactttctcaccacagaatgctattagatatttttcttttttcttcggattaaatcactgtcgaattataaaatcactatcaatccgatatttttatattgattttagctgagaaaaaaataaaatataatttatacaaaatataggatggtgttcaaagcgatgtcaccatctttttcaaaaattatttagaactcatgaatatatgtgtccttcccataagtttaggaaaaataaaattttcatttgacttttgtcagtgtttttatttttttccctccctatgagggttgagaatttgtgttcatggattatatttatgctctattatgttgaaacttgcttattaaaagtaaataccaaactcactctatttatttattattagttgtgttaaaaactaaaacaagatgtagtttgcttgtaaacaagttgatgtagcacggcctaacacgacttatagaccctaattaataaattaatgtgacagataataattaacaaaaaataaatatcttataaatgctctttcttaccaaaatttactaaacaagttcctaccgaaccgaaaaaaatgacatctcagaaattttaagcaaccaccatatgctcaaagcgatgtgcatcatacccctaccgaactatatataagcatttgaaaataaaaatcaaaagaaatcttcgattattcgaacttctgagtttcagctaacttaactctatcttgttcaacaacaacatgtatattggagaaacccaactggttaatctctttcaacacttgcttcaaagccttgagcttactaacaacttgatacattggaattcctgatttcttttgattccaacaactctttactcggtccacaaactcaagataataactccacattatgaagtacttaaacagcttcttaccattaaaatcatcttcatacacagtgttatttcaatttttgctcatatgacgtggctgttgggatattacgtcctaaataaaactcatttcaatataatctgatttgttatcaatagaaaattagaagtcatttatgtttacannnnnnnnnnatgtttatggtttaatgtatacaaattctgttaagtccagaacatatagttattcacaattgcagtgatgtcaacacggtggaaggtaattgtgattatatgcttcaaaagttaatgtcccatgattcatcagtgcactagattgtgatagtcagcaataaagcttacttacaccttnnntaagtgttatgttctttttagaacattggcaaagtatatgctagtattggatgtatggagtatacattagactgggaccgatattgatcttagtaaaagtattataatcttaccattgtatctttttaagtcaatatgattggttgatcttagatcaaaatatcttaatcctgacatggttagattcgatctcaagagtgttatttgtgttctttaagttattagtcagagactaccatttagttcgggtcacacgtacagcttgggaacatgatagtacaatnnngtgggagcgctagtcatagatatgaaatttatagctt

SEQ ID NO: 64345 - DNA, 1031 bp, Cannabis sativa
aaatttaaaaaatagtggagttaaacatatattaaatatcaccttatatataatagtgagatactgtagattatgataattctttttaataatttaatagtctctttatataaaaaaaaaattaaataatttatttataatcaaaatttatttttatattaataaaaaatagaaaaattactttatatactattttttaattttttttttcaaatttatagtttggattgctctaataatttctatcatgtgggttgctatgtagatttggattgcgatttaggttgttccattagttgctataaggttttctatgtagaattttgtaaaaatataaataaaaaactattttaaagtgtaaaaataaaaaattacaaaataagtatactttttaatgtgatttttattgatgtgattagaatgtataaataaatgggtaataaaatagtatagttttgtggttaatttagcattaaatataaattttactattagagttatgttctttgtatatttatgtcaaatattctcatttgatgattatgaacaaaattaatcagtgttaatttaaattaattaaacgaaaagctttctacagcaatagaatctccaataagatatgaagtacttctcaagatttaattatatatacataagtacacaacatatctttatagcttggtaggtctaagctaaagaaatgtccacaccaaattgaaagatctcttgaagaataaatatcttgaattttattttattttaacgataaaattttttatattttaatttttatacatttaattttttaattttttttataataaaactttcttaaatttatttttctttataactttaaataccaattaagtatacttgacaataaaacttccaaattaatacaatagtaatcccgttgatatataagagtgatatctaacacacttttattttttattttttactctttgttttagaataagtttaggaatgtctttttttgtatttattaatcaaaaatattctcatat

SEQ ID NO: 64346 - DNA, 1041 bp, Cannabis sativa
tatatagttaattaccgatatttgccatttggtattaattctgattttttaatataaatatttcgttgatatataaatacaatatatataaggaaaaagtactacaaaattttgaacctatatatataggccggccaaaaaccatgaggtgaaccagaccaaattcacaagtgtatataagatctgctcattacacttttcaacttgccattgggaaccaattttataactttatagatatataatttcctatatatttaggtatcgtattatacattggtcgagattttccaatattatcatgacctatatatagtcaaatcattcttgtactaatataaggattactaattataatttataatgtccgtaaatagaataacaagaaaaatgaccactatatctaatcaaccgaaaatgtttcgatatataaactcatcatctacattttttatgagaaaatacaatgctacaattaaagttatatataattttttttctatatttccatttaaatacatgaagaatattggatgaatataaattgggtacgaaaaattatttcaatgtttgtaaagatattatgttatccatacatacgagagggaatagttgatcagtagttggaataatataattcaatattattctctccaaatcttatccatataatgctacttttcaaggatatattttatgtatataatttgttataagtcatataaaaatatgttaatatggaacgtaacttatctttaattgtaaatataaatttatgtacatggctatatatatttaattattaatattgttgagctagttaagaaaaagctaccaaaatatatataggttggctaattaatttggacggtaataggttaaactgatcctcaatagcaatatttaattaagtaatattaattggtctatatattaatagaaataaattatccgaaacataaataagatgaatacataagaagttggttcaaaaggggaacatttgaaaagtgaaaggtataagattcattttaaaggtat

SEQ ID NO: 64347 - DNA, 972 bp, Cannabis sativa
acatccatcctgtcattcaggtatgacttgagcttcatatcaatcttcatgggctactaagattataactatcagcctaggttatgaaatattatacacgtgttaccagtcaagtgccacatcatagtgataaaattagggtaatatttgtctcccaagtctgcgtgggaccttcatggtcgcacgtggacttcatttggctagaaaattgtccgaatgggtgatgcgcgtctagctgtcaatgttgatctgatgtgacttgatcgagggtctcttcggtgtttggggcattaaatgcctcttgaaagttgtacctcgagttacgcattaacggttgagtgatactgcaggcgtcatgtctatacttttataatgagtgctaacattcacttttgggggaaatccatattttgaattttaaatgaattaatttccccttttagatacctatacagggggattaataccttcaaggaaccttgttatcataaattttgtccacctgatgtggcatgtccacttaagccaagattgaggatgcgtggaatacaaccttgtcaatagcatgacaaagtctccttaccaggtatggttaaactgtcaagcaatgagcaaaaagagttaagcaaaccatcaagaagctgcacaaccatgtttggccgaccaagggagtacataagccagctaggagaagcttgtatggtcggctaaggtttgagcacaagctagctggccaaaggtaactgtcagaccaaaaaaaggacatgtttgatcaaggtagcctgacctttgcgaggaaagttgtacaaaggcttgccaacacccagtaaggtttccaacacatacaaaggctaaccaactcctactaaggctagctaacacttgccaaaaccctcgcatgcacttgaactaccaaaccttggcaggaacttgaatgcctgaccctggcaggcacttggccagccagcttac

SEQ ID NO: 64348 - DNA, 955 bp, Cannabis sativa
atggacacacaagtgccacttgccatcatgaagagattcaacaagaaagaaaggtgttaagagagcagcaggaaaaaaagaaggggcggcaagaaaaaaagaaaactcaaggcaatcaaggggataaagaggagaatgaagacaaaggtgttcaacaacctaattcttaggtgatacccaaaaataaggctgcactaagaccaattagacaacaagaggaaggggaggctgctattaataaaatcagcaacaccttcaatgttctcaaggaacaagaggctgaactgatagaagagaaggaggcttgtgagaagactgaacatggtaattttctttataatcatggatagctctaatattgcttgttggaatgttaggggtatcaataaagtagagaaacaagatgctgtgtttgaatttcttaatatgaataaaataggtttgtgtagtttgcttgagacaaagttgaaggaagatagaataaaatatatggttagaagaaaattctctaattgggattattttactagtcctactattgagaatcgtattctaatcatatggaggaaacattatactcgggccattgtagtgaaggaaactccgcaatttgttcattgctatgttgagatggctggtcaggttgatgctttgagtgttacttttgtctatgggctgaatacaggaaaagagaggaaagagatgtgggatgggctttcgggtttacaaccccttgctaaaccatggctcataacaggggattttattgctaaaccatggctcataacaagggattttaatgcgtcgtttgagttggaggacagagaagggagaaagaaagttaccttcacagatatagaagattcaaccaaatggttggcccaaaagacatatggaagctcttctaaagactggttctaggtttacttggactaataaccaagagtggaataag

SEQ ID NO: 64349 - DNA, 638 bp, Cannabis sativa
tgttaaattttgatttatatcaaagaattgtatgtatatatcatacaaatcaatagtactataaaaaaatctgatctataatacaattcaataatactatacatgaacacaaatccatgtttggatatacatatctgtaataaacaccaacctccagttaatatccattgatttatattcaaaaaatgtactaattttaattagtaaaatcagactaaaagagtaaaacactgcaatacttacatggtcaccgtatcacaatgtattgtattatatgaattgtgtgttataacatatttttatatagtactgaattatttcaaaatattgtatgtatatatatatgcccatacaaattaataccagcatgtagtactgtataaaaatctgatatataatactatacaatacaatactaataacacagttcacgaatctatgtttaagtacatattatcagtaataaacaccaacctccaatggaaaatattccagcattattgataagaacatgcaaaggcccagaacgagaattccaagcttcagcaaacctcgccacagagtccaaacacaaaagatcaagctccatcacctaaccaaacaataaaatcaaatcaaaaaaccaacagattattttg

SEQ ID NO: 64350 - DNA, 1336 bp, Cannabis sativa
aaaaaaattaaaacaaaaatcataatatttttttcttctattcttttttttttctttttcttttttctttctttttcattttctcgataccttcttcttcttctctctctctctctggtatggatgcaaatactaggtgcgacgccattgtcgaggaccaccaagccagcgtcgttactgaggaccaccgacccaggtgtagtcaccgataaccaccgcgtagaaccgatcgatcttaaccactgcgtagaaccaccgaggaccactacgtagaatcgtcgatctcttagccggttagccccgattctctctctcagccccgatcgatctcagccacgatcgatctcctctctctcccaatatcgatcacctttctctctctcccgatctagagtttttcagattttttttgcaatctttgttgttgatatttctgtgtatacatatccctctttggatatttttgtgtttttagatttagatgagaaaagataatagttttgggaaaataaatttagagtttttaagtatgagttttggggctgagattttgtgtatatatatgtatatgtgtgtgtttgtttttttgttggatttgaatttgtttaaattaatttgagttttattttgttgatttttttttttttttgtgatttggatttgaaaaatagattctgtggtgatttcgatagtggtgggtggtgttttattttgattttttttgtgatttggatttgaaaataggcagtggtggtttcggcaccagtaggtggtggtgattttagaagtggtgggtggtggtttcggtggctgtggatggtggtggtggtgataatttgtgactgaaagaagaagaagaaagaagaagaaaatgaaaactgaaaaaaaaaatgtatgaaaaatatgatatttagggaaaaaatatttttatttttgtaatgatttttttttttaaaaaaatatatatttatgtggaccaataaaattattccacgtgtacactgtgtccacatggataatctaatatgacacttaacaactaaatttggacagaaagtgtaaattgttaacgatatcatggttttgagggttttaccgccaaaaaatgagttttggaggttaagtgcaagcaaaatgaaagtattgggggttttgccgcaattaacccaatcgatttattggtggaaaaactacctaaactcccattccgtttttaacacttttcattttccttttcttcttcttcttaactgatattgcttgccatattacttgtatttatttgattaagtgttcaattgcttaattttgtgttaaaagttttaatttatcgaaa

SEQ ID NO: 64351 - DNA, 1515 bp, Cannabis sativa
  modified_base (613)..(620): a, c, t, g, unknown or other
cttgagagagcaggtgactcaactgaaagaataagctactactgatgtcgccttctatgatggcttctactttgatgcctaaaattcctggtcatctgacagaggagcaaaatccttgaattagttggctttccctaatacagaagtcccaaattttataaagtgatgtgagcaacattttagtgaagatgctctctagagaatagattttaacttgaatggtggttagccagtggtcgaagaagatacaggagttgaaagctgcaacttcgagcatcccgactttccttctattgttgttgatgacccaattatagagagtgaggataagaaagaagctactattgacataataaaattctaggacattatgtgagtccattcttcttttgtctttagcttttagctttagtgccttagtaaaatgttatcaaaattgtttgaattaaattagaaagtaatccaacgtaataaaagatttattctgatttttgcttttttattttactttatttgttaccttttgactgtttaacacttgaatagtacaccatgtctaaagaaaatcaatcactgggagtaatgtcactgcttcttaaagttatctttaccnnnnnnnnacttacatagatgtgcaaaaaaaatttaaatgctgatgtaacatatggctctcgtataccataacaaaacctatgtgtctcccaagtgatcaaagaagtgccttcattggacacttgtcataccaaatccccctgggccttcttgatcattgctcttgggtggtgtgacacgtgtgagcactctccacttatccaaggatttgtggggtggtagggttgacctcactaaagaaacaaccggagttatctcaagaccaactcacaagctttactcagcacttgagagcatcgtcaggtctgtgagctgtaattgattagtattaatgaagtaccaaaaaaactttgttcaatatttttactcatcaaattaaatataattacattactgtgagctaagttggaagaaaaaagaatagttaaagcagtaattacagatgccatttttcattcaagcttggctgaagtgatcctcaccacactaatgccatattcaatttatagcataggagtcataccttagagatggacctcttaacatagagacaacttcattgtatctacttagtttaagaggtaatcgattaaggtaaagggaatctcattgtgaagcgagctattttgaagatagttacttttattggtagtaccgtcgtagaggcacccttgttccagtaccttggtactcgtattagattcaagttgtatgcatagcgtgccaacttgtatgtcttgggttctaatgctttagtgatgacatattttccttcccaattatgcctaagtactcatgttgacgtgtctttcatgctcaggaatactcgttgttacaccatatctccaggcttaaatttcctatctttaacgtttgagctgtagtgttttgtgaccttatgct

SEQ ID NO: 64352 - DNA, 867 bp, Cannabis sativa
ggaaacatgagtagagttccatgacagccatgttttaaggctcaatatacagcttcggttgacagggcactcaaagaagagatgctctacattttcctgttgtgttgcacataaaagacatgattggttgtcagtgatccccatcctgcataacatgtctcgtgtttttcagtctctaatgcattgctagccataacacaaagctgtgttttggtgtgttcaatcggctccatacctgcttgcaccagtgtaaatttacttttgctggtttcagaatattatacccctgtgatactgtatttttttgttgcagcagtgctcctcccattgcctctttgaattgatccttgagcctaaccaaacacttccaataccaactactttaggtaggaagtttgtagcccccccattcttcatcatgcaaatagacactattgatccatttaaaccataatgaatcctctttgtttgtaatggcccaaacatatttgcccatagcagctctattcccatatgtccacactcttaaaacctattcccccaacagatttgggttggtaaatagtttcccatgatattgcacctggagtctaattttttttttgaatggcacctggagtctaataaattgccttcccattccacaaatagttcctgcgaatagcctcaatttctctcacaactttctttggaagaatcaatacttggcaccaatatgaattaatagccatcaacacataattaattagaaccatccttcctgcaaaagagaggtttcttgagctccatgtcttgattcggcctgtcattttctctactaatacttcacactctttcccaaagatcttctttgcaccaatgggaact

SEQ ID NO: 64353 - DNA, 1026 bp, Cannabis sativa
aaaaaaaaaaaaaaactacttttagtcatcataacataaaaaaatttatacgtaaattttaatcacaagaaaaagttattgtgattaaaatataatatttacatataagttgtcactaatttagtttagtcacaacaagtattgtgactaaaaacgcatttaatcacaacaaattatgatttttgtaattactattttagctatttttagtcacaacataagaattaatgataattttcaattttacactttaaagcagttttgtttaacatttttataaaaattcacgtagtaactaacgaagcaacctaaattattgcaactaaaattcacatagtaacctacatagaaactagcgaagcagctcgaccgtaaattaaaaaaaataaaaaatagtatattttttaattataattagtcaaaaaaattacttttaatcacgagatttattgtaaatataagtaaaatttttgtgtagtgtctaaataatgacataaacactataccatgttacctgccaaagcatgaaaaagtaaagtgatgaacaagaagatttccatctgagctagaataatagaaaggttctatagaccaacacctttttagagaaagggaaaaataatagaaatttttatttatatactcaaaatacatactaataacataaataacggtgagtattaaataagattctaataacgtaacatctcagcaactatattgtaatatcaaaaaaattacttatcaaaatcgaaaaaagaaactggccatttcgttccattaacgtgttatttttttctattaattacgagattagattcttgaatcagagcgtgtaactcaaactagaagaaaacctttacttatatgcaattatagaaaatcaaatcacaaattgaatctattcttaccaaaaaaacaaaattaacaaaaaaaaaaaaaatcattcataaacaacacaagataaaacaagaattcaatatcggaatcatttttcaaaccactgacaatatctacaaattagag

SEQ ID NO: 64354 - DNA, 517 bp, Cannabis sativa
cgccaatttttgaggttgaggactaatcggcatcaacctcaagtttttggggacttttgccgcaattatccctattatttaatatataatggcagtaggagggaggtgtacattgtttgattttgagattttttttcttcttcttttttaatccacaccacatgtatttccatttgaggaaagctcaagctgaagttgacagtgatacttttataacccgtatgtggtgttgtatgatataaaaccaaaactaccattatgaaacaaagcaaaattaaatggtagcaacaagaggtggtacctccctagcgaaaaagaaacttcaagtaatagacatagcagcacaaaccgctaatctatgagcactaacattaacattagcaattttaagaatctaagacacaacaaagtaagggaaaagatctatcaaccaaaaagataaagaaaaacagcagtacaagtctagcttgaagtctttgattgaagtatctgaaaattagtgaaaagattactctaa

SEQ ID NO: 64355 - DNA, 781 bp, Cannabis sativa
ttaatatgcagttatttttgattagtttatgaaaaatagaggtattcatcaatttatcgcttattctttccagcctttttgttaagtatttgtgttcccggttccagtactcgccattctaggttgaatatactcgcacttgttcatcagttttttttttattattattattataatttttttgttgtaaaatttcttcaacaacaatcacatacatttattagaaagtaaaattaaactaggtttcaagcccttaatgatctttaatcgcatatccaaattagtaaacatgttattgcatctaactgaaacggtaatattgagctttgaaataaaacatatgactaacaaagcataaacttgaaaacataatttaaaattctaaatgaaccaaggattctttttacatctaattataatatcaatagttatcatcacatgcacacacacattcagtcggggcctctcttcgactcatcgccttcaatagaaaaagactctaacttctgttttttatttattacctgaaacacaaaatactaattattgagctaacacaaagtaaaggataacaaacaagcatcattcttatgttttagccaagtaatacattcaaactcattaattaaatgttttaatatattaggaaaattagtggaggataattaactgacttaattaccccttaaaacacactacctttgttcatgaattatgtcactatttaagctctctctatacatacatatacactatctattcagactataatatatttgat

SEQ ID NO: 64356 - DNA, 776 bp, Cannabis sativa
tcgtacgaagtctctcttccccattcaatcattttccctctcacatttctcccaaacctaataaattaatatctccaacgttgaatctcttgacctggggcgacatgaacaactccagctccaactccgaccacaacattattccgatgtttggtcccgatcaccacaatgatgagttctatgatcaagaatctcaagaacctccacagtcaacaactactcatcatcttcatcatcttcttcttgtactgcttctacagcaataattgacccgtttagccgtgggatcttctatgctgcattccgccatttctggtccagacaaagacaagaaatacgtaacaaccccttcgagtttctccggtcgtatctccagcgctatgcatttgtctatgcattcaaactatattctataactattgaatttgagaaatacactcctgctgaagatcaaatattatctcttgttataggcaaattaacatcattcatacaacaatcaatgaggaaccccttattcgaatcggtcgtggacaacctgacgagtaaggctgtggaggaaaagacctcaaatatttgcagtgtgtgtttggaaaatttcaaaataggcgaggatatgaccaggttaatatgtggtcatgtgtaccataagagttgtgtactcgagtggtctcggcgctccggtcaatgccccatgtgtcggaaggagttgttgcagccagtgataaatgtcgcagttgaagttcacgtccgttgtgactgtgataatgatggta

SEQ ID NO: 64357 - DNA, 1088 bp, Cannabis sativa
agttcacaataaattaaaaacaaaactagatccataacaaaatacctcaaaacacataacacctcataaaaccgattataatttttttttaagaaaatggggatcaatttaaaaaatattgaggcataaatatgaaaagaaccagttccataacaaaataaataaacacaaataataacacacaataactcgcatataatataaagaaactggttatatttatcaactagttaaaaatttgagacaaaaaaattggtttcgtaaagcaactaagataaaaactcacacacaaaaactagttaagtaaaataactcaaataaaaacatccattcaacatgctcaaactcaccaaataattacacccataccatatctatccccaaaacactcattcattatgttatataaccagttctattttagttataaccggtttgagttatttcgtattatttgtttttatttattataacactgttatagaatcgattttttttaattataacttgtttgagttattttgtgttatttgtttttattcattatgttacaaaattgtttatatttcaattataatcggtttaagttatttcgtacgatttgttttgattcattatgttatagaactagttccatttttgtttatatctgagacatctacttctggtgatttttccagtgatttttccgacgacttttttcgacgatggtaacttttccgatgacaatgactttttcagtaacttttctagtgaatttttcggtaacactgacttttccagtatttttcgatcgaaacttattattgttttaaaaatataggatttctatttttttttacaaaaatatgacataaaaaatatcatatagatataaaaaaaataaataaataaataaacaaacctataacctgattgtattatttatttatgccataaaaataaacttttataattttcatatatattgtgtaatttctactaaaaagtattgtgactaaactttttaaatcaatgcacgtgggactactattgtgacatgtgtaagtgtttatcggttcaaataaatttaattatttaaatattat

SEQ ID NO: 64358 - DNA, 808 bp, Cannabis sativa
agaaaaccaacccaaaaaccagagcttctacaacgaatcactactaatttaaccaagatattctaactagaattagtgctaaattggaaggagtattaaggaaacctatctccttagtctctttaaattttttaaagtaaagcttttgttttaagtttggattgatgggttaggttttttagagtttgtttgagttcagaattgttgttagtttgatttaaggttgaattttgtgttggtttgtaaggttttagcttctgtagtttgtgttggaagaatttgagtttttgaactcaaagctcactcaaaaattggtaaaattagtttcagatggttttaggtgcttttgtagtgtaggttatgtttagattatcctatattgttattttggtgagtttatagcctttggttaaggtgggagctagttttgagggtctaaaagttcggtagtttcaaactctgttttgcctagaatggtttcgaatgagttatactcattagaggggattagggtcgtaaggtctggtagggtagttttgaacgatgttttggtggttaggttctgagtagttgaatatggatggatgcttctggagtgtaggttgcccatataggtgcaacctggatggtagtatctggattaggggatctcaaatgaatgtgagtaaggcttggacagaggtatctagttggtatgttccagagagtggttctaagcaggggttatgattggtatgttctagccgagtaggtttgtaacaccctaactagcataggcgtattatgtgatttttaaacatactgtgca

SEQ ID NO: 64359 - DNA, 813 bp, Cannabis sativa
tctaccacacaatataaagaaaaaaaggtaatgtgaaggaacgatggtaaataaatccctcttaatttataaggagttcaaaagatttgaaatacttatctgttataagtgaaagttcgttgaagtagaaatcatgatgagcacaaaatgtatcacttctcttgcccattaaaaataacacaaaactaccctaaacaaataagtacaaggcataataaatgacacaaaacgccataaaaggaccataaactgaaaaggcatcaaaactattaaaaaatagtgcaaaaacctgtgaggtttcacaaatactttaaacatataataatataaatactatcataaatacttcaaaaacaatcaatataacatatgagggagaaaaattaaatttactttgtgagattcaaaattgatgctatcagcgaaacaaaatataagaaaagatttcacagtaagactaaataaattataaaaatgtctttaataatatatataataaaatagaagttataaaatttaatataagacataaaattaaacaaaatagatataaaataagtagttggagagcatgatttagtatataaacaatcactaaattagtaaaattgaatgaaattgggcaaaaatccttaaatttaataatttcaataatccaggaaaaatttttaacaaccaaaaaagttcagagaacataatttggtacatacaaactttaaaggataaaaatcttaattagcgaaaaataaatgtatctaatatacttaataattgaagttaagaatacatatttgttcttactttatcattttc

SEQ ID NO: 64360 - DNA, 731 bp, Cannabis sativa
attgatatttttattttgtcttaggttaggcatatttgtttcttcttattttttggctgctttgaaagacacaaagggggaaaatagatactcaaaaagttagttcattttcttttgtttaactctggaccttcttattttgaggggagttaagttttagtttcttttatatgtttgatataatgcatgcttccaggggaagtacttcatctctatacttatttctaacatgtgtgttgcaggtttttattttatttttgtctatcaaattggcaaaggaggaaattgtaaaatcttttattcacatatttattaaaatagacaaaaataatttttgtggtacttttaaaattggttttgtttgtgcatttattattttcaaaaatatgttttcttttcttactatgaaaagtcttttaaatcagtttttgactttatttgtgaataagtatgagttttctttatttagattatttgatattatctttgtatatttaaggaaaatcttaatcatatttatttctttgtttatctggtttttcaatcaagaaaccgtgtacaaggtgttagagataaaggttaataagtttccttattaatttgtttatgaaaactttactgaaaaattgtccaagtttaatgtacctgtctgaacggaccgattgtctgtttaaacagattctggcttgggaagattttctatttatctatttgtttcttgattccttttc

SEQ ID NO: 64361 - DNA, 1275 bp, Cannabis sativa
ggtggaagatcttgaagatcaaggtgtgagtttgacgtcaccgttctaaggatgcaacatacaaaaagacttgtgcatactctaataggcttcgagaggtaaactatcttttcatctattttacttttggatttaatatatacacgtatggtgatcttggggatatggtacgatgataatcataaatatttattctgttgcgtacctgatttagtatcataaaatcaacaaatagtaccagaactccattatgtatatattaaatattgtgtgggttttatgcatttatatatatgtgatatatattatgaatgtaatatctatgagtcaacagactcagtaagaaaaacatgtaacatacaatatattaccgtcttgtatctaggcgcccatacacctatccacaaggcttatcagatgagtaagaacgttctttactaaggtacgaccaatgtaccacatgcactacgtaccgctactgtactagtgtttgtagggtttgtaccgtatcttgagtaccactaagtgttgtaccacacacactacgtacctatccacactagtgttggtaacaccgtatcgtactcattgaacatcatacactataccaatacactcaatactgcactagtgttggtagcatacaaatcacaaatagtatgcatatatttcacatacacatattcatatataaatacgttctatgatagtcttaccttatttatgaatttaagtgtgttgatcgactagaatagaaaatcacgcgctagatggatgccctatgtcacattcacgtaaatgggtaaataacttgctaaaaatcttttcagggacctaaactcaaaactaaaagttttcctatcgataaatagtatgggaataacctaaatatcaaggaaacaccgaaactaaggctctgaaaactgcctgaaccggtaaactggatttttagggttctgcctagtgaaacggtcaaccgattctacagtacctacagagccaattaaccagttcataccaaaaatccccaaacatatcacagctctctcaaatcattcccaaacttcacaaaaccttccagaccacctgataaaaatcccaacaacaaaaaataagaaagaacaaaaacaaaatcccaccaaaactaaaaacaccattgttgttcaaactcaaacttgctcaacctcttctcaaaccaacaaaaccagcaacaaacaacttagttctactcagaaatcaaactaaaactaaacctaattctaacagcacctaaaa

SEQ ID NO: 64362 - DNA, 941 bp, Cannabis sativa
acttaggtgtatgtagcattgaggccactcccacatcttttttctcttccttgtttatctttttgtttatctttattagtaacttttgttttgagttgcaatattatttaaaattttgtttcatctttgtattatcaatatatatcaatatatatatatataaaggagaagtataagacggtgacatggcgctataaaattactctaaatacatacatacatctatctattttttctttaattctcacattttttaattttttaataagtttataaatattaattttctaaaatataatcaatatatctaagttatgaatattaactaattaaaaagacttccgtggcattgaagggaaaatctaaaacaacatagtgaatttatacttttttttattattcttttaatataaaataaataataacctaaacacctaaacctaacgcatatctctattagatactatttaaatctttcaatttcagtcaaaacttttatgaggttaaatctcacaattccattcaaaaaatttatgaggtttatttatattataagtggctaccacattcaattttcatggaaccattctataataatggagtaagagcaaacttgacttaccccaatccaaaagaattccaaaatttgatggagtacaataacaatatcaaagataggtaaagctagcattatttttttatttttttttttctaaatttaatatttaggtagtatataagcatatcaatctcagatatatatagattttaaatttttatctaagactttaatcatattttaaatttatggtaaaaatttgtttcccatcattttcaattcttctaaaaaatgtgagtaatattcgttatttttttactaaataaatactattcgttattatttataaattgcatagcaactttttgtttttttttttttt

SEQ ID NO: 64363 - DNA, 723 bp, Cannabis sativa
gagatagagagagagagagatgatccgttgggatcggtggcgtctggaacttcggcgccttcttccaactacggcgctgcaccaatggaaggagacagaaatatatcgggatagatatggaaagaagaaaagttcagtgttttagggtttcaaaattaaggtttctatttatacccttttttctttttctttttattctaaaactttttattttctacagaaaaaagtacctacaagtgtcggtttataatcgagaccaaaggatattttagtgtcggttcttatactcaatctgtgtgtatttatttaacttttttgggtctcggttattgttgtagtattagtccactaaccgacacttaaagtcattataggtgtcagttaagaaatgacaccttagaagtctattttgtcgtagtgctacttcggaaaaacaacataatttttttttacaactacacggagtgtttttttccgttgtttcagttaaactttgttttgacattgttgtcacgaaaaagcaatgtaaaaacaatatttttctgtgaaaaaaaaaagacaagcaaaaactcatatataaaaatccgtaaaatatatataaaaaaataataataattcatttttaagtgtattatataattaaaaaaaaaaaacaagttataacctcaataatattttttacttaaaattgtagaatttaaaactacttgcaatttttgtttg

SEQ ID NO: 64364 - DNA, 722 bp, Cannabis sativa
tatatttaatggagtaggtgaagattatattaagcttatatcgtcttgtgaatctgctaaggatgcttggcagatccttcaaactcagtttgaagacatatatgatgttaagcgttctagatttattatgcttcaaaccaaatttgatgagcttaggatgtctgaaaatgaaacattgactgatttttatgaaaggttatatgatatagctaatgaatttttcgctcttggtgaaaagcttgatgattctattcttgtcagaaaaattgttagagttcttccagacaggttttgatactaaacttttggctatggaggaagctaaagattttagcacaatgaaggtggaagaagtaatttgttctttgcgtacttttgaattgaatcaacaaatcaaacaaaaggacaaacctaaatctattactgataaaggtaaaagtatcactttaaatgttgctgaaaaggaatttctgataatgaatgtgatgatgaaatttctttgttaactaagaattttcaaaaatatatgaaaaagatgggtaataaaaaagaataagtcgaagttttcaaaaggaaatacatcttttaaactttctgtgactaataaagagggaattcactgcagagaatgtgaaggatttgagcatattcaatctgagtgtccaaacactttgaaaaaaaaaaaaaaaaagaaaagtttaaatgtcacttggagtgatgat

SEQ ID NO: 64365 - DNA, 740 bp, Cannabis sativa
attgtacctaaattatccttacacactcacataactacgacataatttcaaacataataaatttgtagtctttgtagatgaatatgtgggtttgtgagaaagtttggacaaaattttaatgagagaagaatgaaaattagaggtaaaattaatagaatgattaaaaaagaggtaaacataatagattttgaaaaaaatagtaaaaattaaaaacataagttaaaagaggtgtgtagtgtaatttcctctttaataattcagtttggcccattctactaataatggccagctattatttgggcctactaccctattgaacaactcagcaagtaatattttttctactgaaatttttaatttttttatttttttttactgtggagcgaatttttttttaaaaaaatactgtgtaatgtattaagtttttacagttgctccacggttgctttttagttgttttactattattttaattgttctgttttgttgttttacgtttgttttataaaaagactgtatttttgtaaaaaaaattcattgtgataataaaattataaattttttcccaaaatctaatatttttgtaaaaatctatttttcttttctttttaggagtacgtcgttaaataatcattacatatataaattaaaattgtgtttggtaatattttttttaagggtaaatactattttggactctataatttacaaaagttaccaattggaccctgtgttttgtt

SEQ ID NO: 64366 - DNA, 2169 bp, Cannabis sativa
aatattttataaacacctctaatcaaaattgtttcacccaaaaaaaaaaaaaagaaagaattaaagcattggtcataaagttctaaataaaatgatgtcccaatctggtctgacattgagtaaaaacatggagttaatggatgtaatgtaaatgcctacaaaataaaccacgaataaggttcaaattcaaagctagttcaattaaagacaaatactaattaaagtagagtaactcaaagatgaggttgagaaggtggatgaaaatggcgtagaatgagacataggtaggtagagtgcaatttgatacttattaagagcccattcattcatcagtatcatcagcatcactaatactaaggtaacgactcacacaagcatatagagtgtgagttatataaacatgatgtaatctaaaagcaagcatcagaagactcattaaagccaatgtaattaatggaatgggctaagacaatgatgtgtcccacccaaaattcatttctttatcaatacccccaaccattcattccacgcaccatcaaatggagaacaacaacctcgtacacactgtccttaaaccgtgattgtgctgccactgaggctttctttattttcaaacacaagtttttcaccatttccatctgcaaatgcaaatgaaatggtgttttaagtaataagattatatatatgtacatatgtgtgtgtgcgcgcgcgcgcgaaagaggtaaaacaggtacctcagcagcagatagaggctgacgtgaaggcagtttaggtctttgtggtgtggggagctccatcaagcaacaaacttatataaacacacatccgcacgaagatttcaggttcagatatatatatttatactgtgaattatgtaacgattgtaagctagaaaacattgcaagtaagttcctataacacaatgtgaaaacaataacacagcacagaacaaacagtgaaagaactagccaagttagtaacctagctcacttcaaaacatgaagacttttatattatatgtatcagtataggtttttctcactcactatgtacaatacatatattactttgaaagtagcatcatgtgggaaatgacaaagtttgaatgatggaggtagatcagaagaaagaaactaaaagagatgtggaaatgaaagaagaagaaagtctcattccaagtccatgattgaaaataccataaagagggaaggaagaaaaattcatgatgaaagactaatcatgatttccgtagaaacaaaatttaataaaactacaaaaacccaaaatccaaaatgtaataacattatatatgtgcagaaatgaaactgaatccatgatgaaaagtaaaagaaaaagaataaaaactttgaaaataaaaagtaaattaaaggatttagtagcaaaagtgagataaagaaaccaacccgggagagcagagcagaggtaggatcaagaagggagaaaaggagagaagagaggtgtgtgtgactgagtattgggtatgggcctatttgagtgagtagacagtattaatagagataaatgtagtaagccactgcctctgtcaagtgtcactcactcactctttttctcttttcgttttataaaccagtccactctgtctagcctcttcgcacgccaatcctcagtccatgaaattacacagcagagctgtgcggtgcctactgcctagtacggtactgagaccaatatggttgcattgcattgcatggtcttcaggttgaccccaccactaaaaaaacaaaaaaaatacaactcgcaaataaagaagtgattaaacaatgccaagagtaattctcgattttccatcgagactccactcccttaaaagagctaatcaccacctgagagtcactctcaacaataacaaattcgcagctcttctccgccgccttctctaaagctaagcaacaagcaatagcctcgccacaaagaggatctgaaaaattaagtctggtagtggccgccccacaaaacgtcccctagtgatctctagcaacaacagcaatacacttaaactccaaccctaatctagcatcacaattcaatttgatgcagtccaacgaaggggagtgccaaacatctgtctgagtcggagtgagagtgggaatgatagtaactttgtaatctgtgtaacaagaaaaaata

SEQ ID NO: 64367 - DNA, 958 bp, Cannabis sativa
ccataataagttgggatgcttcacatccaaagtgtttctcaacttcttcagccgtaccagcaggtttcttcactcctagaagttaaacattaaaataaccacataaaaagctaagaaaagtcagcactttagggtccaggccaaatgtatcaatatagagtctaaaagctagaaaatctaataaatgtaaaagcttgcagcagattaaagccttcaattgagaaaagaaatactcactatgccttataactttaattccaatagccttttcaagtgccttagcttttgaaccatcatggtcatactcatacaaccctaacaaaaaaataaaaattataactttatattgaagaaaaacagcagcatgaacatgaaaccttttaacaaatttagaaaggaaattaccagcagagttgctgaacactgcaatattgggtccgaagactgctttacactcatccaacgaagaagcaagaggagcccaaagattcaattgataaggggcagtgattgtattatctttatcaaacacaacacccttgaaaccccttttacgaagttcaaaccaatcaatgtaccttatatcgggtacagaaacatgagggagagccaaatgccggtctttaagtaccactcttgccgaacaaacaatggcaccaaagttaaacctctgtcccaatgcccctttgaaatccacccaccacatgtttgtgataatgacctttgtgttcttgttttcgccgtcaccttgttcttcctcttcttcccggttttgagcttctgggttttgtttattggttgagttagagtcagtggaagagaaaaattgcaaaagaattgaatggttgtgatatgggtcggatctgttgttgattttgtcttggtctttggtgctgcaactttgtgtttgaggaaggtcgatgagggcacagaggtttgtgaagtgggtttggttcct

SEQ ID NO: 64368 - DNA, 559 bp, Cannabis sativa
caccataaggtgttaagcggggccgaacttaaaatttagtgagttataaaaaaaattggacccttatttaaaaaaaaaatatagtatttttaaaaattaataaaaaaaattattattttaaaaggaaaaaaaatgacctctaacctaagtgagccctaagtacatgcctatagcccgcctatattcatgatcaggcctgatgttaagcaccggtgacatatatatattgccttttcaaattagtattaggttccatatatttttatttaatacataatataaaaaactactaaaaacatatcacatgagtgtagtattagacacatgctcttttattattgagcattattattggacatcatgtggcgtgcccagcacctttcataggtggcgctacacaattgattaacaatattctctaaaaccgatacttaataataccaataacaatataacacttgttagacaccaataatacttttgggtgattctacaatgcaccctcttaaaaaggatgtactgatgcaccctctagtacttgtttcggcatctagaaatt

SEQ ID NO: 64369 - DNA, 823 bp, Cannabis sativa
  modified_base (27)..(28): a, c, t, g, unknown or other
aaacgtgattaactgctaatttccaanntaaactaagtggtctttacagttaccccccaagttatcgagcaaacttatgcctcttggtcacttatatttcacatgttcgatttttgtctattcggcttttgggttcgaacagaccctttgtacacatttgaatggtaaattcataaattgctaaaataattgacacaattagaatgataattaatatctttattcatttattggtcggaataattttgttaccattgtaacctatatttattgaattatgaaagctattacatcatctaattgatctttagctaatttaaacataaaacaattgcacttcttaaaactatactttaaagatggtcattcgacctgagtactagttattttatccaaacttttgagcgggatctgcccaaaaggtcatctacttaagagtaaatgttctagcattgtgtacttaaagtagtcatcagaccttgtacacttacttgtagtatttccttaaatgttccccattccaataccttggtactacaacgagctccatatttttgtcataccgtcctagattatatgctctagagtctatgactttgaccacctgatataatccttctagttaggtccaagcatgtcagtcgtgttgtcttttgtgttcaggaatactcttctaaggaccatatctcccacaaaaaaatttattgccctcacttgcttgttgaagtaccgagctacctttttttgataagccactagctttagctttgttgaggttcgtctagtgattctaccaggaggcatgattagctccttaatcgta

SEQ ID NO: 64370 - DNA, 671 bp, Cannabis sativa
atagtagtgtttgaaaacagaggggctatatgccaatgtaagaacatgaaagccttgaggccgaatatgagattggtttgcatgcatgaggctaaggccctactagaaccgtataaccagaaaagacctagacagagttcctataggggccacgtaccgggctaaggttaagacagagttccttacaggaaccaagcgatgttgagtcttaagttgaaaatttgattataatagactcaccattaagcttcatacagagtttctaaggaaaccacgtgtgaggctaaggttgtatatgcatacagagccaaactcttgtcgaagtcacaagagaatggaaaaatggctacccacttggaaccaaggcccatgccggccaaggttatcaagccttgaaagggtcagtcagggtcccatgactcagccaagaactggccagggtcaccaaatccaggcatgaacatgcaagctttatagggcaaaaccctaaagctggccaactcccatgatcaagccttaggggcggccatgtctcaagcaagactaactaggacgaccaaggtaagttttgaatcccaatgtgtgtttttcttttaaaactcgattatgtgcctcgtattccttatgactcaaagagtcaagaatcgcagtgaaggccaaaattgaatctt

SEQ ID NO: 64371 - DNA, 815 bp, Cannabis sativa
  modified_base (790)..(790): a, c, t, g, unknown or other
aagatcactggtgatgtgcggtgttgcatatgcccagcaactttatcacaaatagctcaacaatggtacttcaagcttgccccaagaagattcaattcttgaaacgacttttctcaagaattctacacacagttctcgtcctaaaggcttatagcatcgtagctagaagacctggtcgaagtcttttatccaattttttgcacaatgacatggcagaagaatcatgtgacacgtgtcttgtatttcttatttctgggtggaggtgaatgtctcgaacagactctatattgtactttagcatgtataacctttgattacccgagcaggatgaaagatagatcatccgagcaagtataagtctggcttgccgaactacttccaatgagttaatcacttcagtgtaatcctatgatgccaacacacgaaggcaattcctacaatcgcgggattgaatcaaaaaaaatatggtaacctattctagtttcttatttcgtatatcacaattatgtaataaatgtaatttcctattttatacattgtaagcaaaagggaaaccttccctcatgcgtgaaggccctataaatagtgacgtagcctcactatgaaagggatcgaaagaaatgcttcagagagagagagatctaagagaattactcaaagattcattgtaagagcttttagagaggaaaacactttgttctttctcttgagttaatacaattcaaggggagtaggctaataccacactcaggggactgaaccacactcagttatttgtttgtattgtttnattatattattatgtattcaaattt

SEQ ID NO: 64372 - DNA, 616 bp, Cannabis sativa
  modified_base (550)..(553): a, c, t, g, unknown or other
ataaatttatatttgaaaaaaataaaaatatataaaaaataaaatattatataaaataagttttgacatatttgttattatagtatattagattgtaacattatcattattattataataaatcttagcaactcacagttctttgaaatttataatttaccaaatactcagctcagtttttttccacagttttgctacagctattttttctcatgacacaactacagctgctttttcccacaacacaaatgtgctaaactgtcccatagtctatcttgttaaaatttattctaatggtgtgtaaaaagttaatccaaatttatcatatagcaaaaattaatcaaaattttaattacaatataacatgatataaaattttcatcccaataaatgtactattttaatattttattattaaatttaattattacattaaattataaactatgtatatttatttttattattttatataataaaattattattttttatattcttaatataaatatttagttgccatttagtaacacttttttaatcagttttnnnnttttaaaattgaaaaagtgaaaatattttttaaaaacatattctataaaattatttttacttt

SEQ ID NO: 64373 - DNA, 1069 bp, Cannabis sativa
cctgcatggttagcttggtaaaaataaaatatctcatcaccagtatcaaaatgtataaacaaaatagagagaccacaaagaatcaaaaagtcaagaatcaaatgcatatcacaccgtccactagacccctagctctgagtaccaatcatagaaaatgacatccaaaactgggtaatcgcatctgaaatccaccataatactggggctcaaatttaatttactccctgtacatattctaggtctttcacctacaggtgagtgcacacctgatctaccaataatgacacagagactaggtcctgaaacaacaatattaaccgaacatgatcaacatggctctcatcagtataaccaatgtaggaaaataataagcataacaaaagaacatattcattttttattttatagaaaatccgacagtataacggctgtattttgattaaacccaaaaatcataacctgcataaatatttgtacacaaaaatatatttggcactcaattccccagaacagtccagaaaaaatatgcaattaagttttcaatttttcaaacaatttgtaaattgtaaaaatttagaatatgtctaatgttatgcaacacatataaaaatcaagtccaataatcaagttgagtccctacctctcccaagttattaaactttggtccaaaagtcgatcttagctctcaagtcccgagctccaattgttgagtctaatcttagatattattctcacctataccataaaatgcctaaataattatcatcattgcattctacattcaaaatcgagtccaacaacatataaaatgactatatttaaaaattggggttccgaagcctcatctaaacggtgcacattaacaatcgatggcggtaaaaattggtgtaccaaaaatgtcaccgaaaataggggtagcgtatatcaaaacaaccacctcgacgagtagatcacacccacgccaactgtttgtcaaaatagtacgcgatgtcaccgaaaaggggcagagctataaaaatgtcacctaaaaaagtagtgagttgggaaaaatagcttagtgtaggttgtt

SEQ ID NO: 64374 - DNA, 1261 bp, Cannabis sativa
acaaatttttaaaaactatttttagattttttcttaggaaaaaaaattagtattttaacaccataccatgacattaatccatccgggtccaagttcgggtatagtttcgggtctaggatttgagtatgtgagcaaaatataaaatataatatgttagataaaaaaaaattgtttttgaaaattgaaaacagcattttaatgttttctgttttctaatttttaaaagccgtttctaaaaatttttgccaaacgacccctattagtttttaaaaactgtttttagttttaaaaatcagaaaacagtttttaaactgtaaagccaaacagcctcttaattctcggttatagataaatagttaagtttaattttttactacaataatattaagttatattttcgaaagttatttaaaaagtcaagtcactatctacgtaatattttcttattggtatatttaaattacttattttttaagaaaataaaaatttaatgactaagatcaattaggagatatcatgtggtcattgatttaacggtcagatagctatgaaaatataatttatgtattatcaccgtaaatttaagtatgtcgtaaattattcataattaaaataacatttttaaggtaacttgttttaataatgtagtagaataatttgttaaaaaaaaaataatgtagtagaataattaaaaaatagtcatttcacaaaacaatgaagaaaaaaactattgaattaactgaacatgtaggagcaaaaggtattcaaatacaaattgtaaaatttcatttgtcgagtatattggaggtggaaatggaaatctacacaaaagaacttaaaattataaaattaaagaacttgtctttacttttctgaaattgaaggtcttctgaaagctctctttttatacacaatctttattttcataagcagcaactggcctaacactaggtttttggatggaggtagagggacaaaagtagtgatgaattccctccaaacacaaatttcaatccctctaaaaaaatgtaggattccatgaaaaagacaaaaacattacataaaatgttttttctcccctttaaaaaataatatataattgtattcaaaataataaaatagtaattttataatttattttaccctctattatttcaactttacccctaacaccaaacatcaggagagtaattatgctatctccatccctcctaccacacaaagccaagaaagcatgagactagcctagaaaggcacatga

SEQ ID NO: 64375 - DNA, 1278 bp, Cannabis sativa
cgtaaaaatataaatattttataaaaaatggtgccttatgtaattattcctttttgatattgtgctttagtacacaattataaaatggctatttaaaaaactataatttttttttacataaatatgacattaaacttaatgcccctaaatatgacatttcttaacaaaataaactaaatatatggatatacaaatagaaaagaataattattaattttttttcttgaactttcagtaatactgattccgccccttaaaatatacgacttgttaaaaatttttcttgaatttttatatttccagaaatttagtctttctgttaggttccgtccattattccgtttaaatgctgagatgtctttgtaaatttgtaacttttctctataaactttgacaactatcaaatcgtaccctccttataaaaatgaaaaaacattttttcaataaatcttaacaaattaatttagatgttaaaaaaagtcattttgaatgattaagaaaattaaaaaagaaattaaaattttaaaccttatttagcgatttaaaaaattatttattttttattacaaaatctatttagatataaaaaaatatattaaaatctaatatttataaaaactaaattttaccagaacaagttttagtaattttttttctctaaaattctagatatgtttaaataaacacaacattttttagtttaatttctaacttttttttttaattttttttttatatttttattgaatttttaatgattttatttattttttatttataaatataaataaacttgagtttttcttcaaaaaatcttagtttgtttaaattatttattggattttcaataattttgatttaattttttaagatacgtgtttattaataaaataaagtttgaaaatatttttttaagaataatttagattttttaagtaaacttaatatttttattaggttttttttaataattctattaattttgaaaaaattaatagaacattataatttttaaaattaattttttttaataaaaaagggtaaaattttatatttctcaaagttaaggtggtaaaaatgctaataattaacggtaaaagaaatagaacctaacataaggggcataattatgtaactattatattttagaggatatttttaacaaaccgtatattatagagagcaagattaggtagtgtcaaaaattcagggggcaaaaatactaattatttaatagaaaataccataaaaattattaaaaacaaaatcaatttcctt

SEQ ID NO: 64376 - DNA, 1613 bp, Cannabis sativa
aaattgtttacataacttcttagatgtttcatgaaattacaatgtgtaatctgataacaatttaattcggtaaaagatagatttagatttttctattataattactcattttttgtttataaaatgaaacatagtatcataatatacaagaatgaaggatgaaactagaaaaagatcaaaaccaaaatgtaaaactttgttcaaagccaaactctttctttacatggtaaaggtttacgaaacattttaatttcaggggagaggagaaaggggtaaggtgataaaagtggaatcaatccataaatattaactaaactcttcttacagatcttacatagtcagctcttattgcccataattgctccccaactaatttcatgtcaggccgatcagttcgaataggcgccgcacactgaatggccaaaccaaaaattttattgaggatatctacatgtacaagctcctccattaaaggatcaaccaattccgcttcacgcctttcgttgtatctatggaaggcctggacatgtagaaaagaataacagatgaaattagacagatcccttcaaagtaaactacaaaaaggaataagacaataaataaattaaatagaaagggtttagttcccaagtggttgaataatttgaaatgaactgtcatagtagaaaatagaagatttggttcaacttattgtgtacttttggttaaacaagtttagtggaagctgacttttgcactttatgaaaattagtcaagaagattgggagcaaagctgaatctatgactttggctaacagctttcatgaaacatacttagattttgagccagctctaaccagcttatcctagtcaaagttgcatccagagtgggaataattagatgggtaactaatatgaatgcctaacacaaaaaatttaaacttcttagtagttgtagtatttagttaatcttaaacttgtttataagctccaatggttctaaaactgccacctaatcaaaatcttgcaaactttgacagaagatagacttacccatctcagtgttattcgctcttctacaggtttcttcaattccactggtcgacgacctgtcataatctctataagtaaaattccaaatgagtatacatcactcttggcagtgagttgataggtcttcatgtactcggggtctaggtaaccaactgttcctttcactttggttgaaatgtgtgtttcgtctgactccattggaccaagctttgcaaatccaaaatcagcaaccttggctctcatactttctgtcaaaagaatgttggatgatttcacatctcggtggatgatttgcttctctgtttagggggagagcataagattagccaataataatttccacgggcaaaccaacttgtaactgtaagatgtaaaacattaacatgatatacatagtaaaatgagtactactgcaattggaacaaaagaattccctatgaatgggttgtaaaacataagctaatgccgacattgttagtttctctgaagcacaaaatctacatttatggtccaaacaatatttcgatcagctgatatcattccaacaatgccttcaggcttaagctagtatggagttttag

SEQ ID NO: 64377 - DNA, 820 bp, Cannabis sativa
attagagacccaaaccccactcctattgctcctactatgggagtcaaaagaccctttgtcaggcaaaacaaccaagttagaggctccatgaggaacatgctgaagcgtgcttgtgttgttccaaatgaagacattgtggttcccgttctttcaccacctattgatcaggcgagtgttgctcaaaaaccctgctaggaaaaatgagtcttataagcttgaatgcccgagggttggggagtcctcgtgtattcagaaatctctcctttttggtgaagcagcacaaaccaccgttcctttttgtgatggagccgaagcttcagtttaatcctggtagtagccttaggaataggcttttttttgataatatttttgaggtcccttgcataggtttaggagggggcttgcttctcttttggatgaatgtaattaatgttagtatcatttctttttctaagaaccatatcgactattatatctcttttagtgataatataagttagcatgtttcttgatactatggctctcccttttgtgtctaaatcctattcttggaaacttcttaatttcctttatgatgtggcaccttttgcaccttggatgattataggaaattttaacgactatccctctgtgcatgataggaatagccccactaacccccctcatatgccatgaccaacttccaaacttttttgcttaagtataatctgtccaccatgcaacatgttggcaattgcttcacttggaagcatagaaaatcccttgaacaccttaactggtgtgtttagaaatggcatgattatttcctctggcctctttg

SEQ ID NO: 64378 - DNA, 815 bp, Cannabis sativa
tgttaaatttataatacttggttgtttttgtgtatttattttcatgttgttttgttttattttatttcttagctgttattattttagttattttaaatttttagttgtattaaacttgtaatgataatatttttatagagtatttaatttaattaaatagtaatatttagtttttaggtattttttttttatatatttaagttaatattaaaaattaagtatgtaattagaaatctaattaaaaaaaaccgattaaatctacctagtaatctaatttaattgaatttttaagtctaattgtatttgatagatgatgatgttttaaatttaattactagttgaattagaatgaattaaaaaaaatatattatattaaatagaatgtccaatctcaactgtaagtacaaaacacttagatcaatttattatattaaataattacattgagtttttaaaatttaataataagaataataaagaaaaacaataaaagcttaaaacatgtgatggatagtgcacgtgtcagcacgtggttttgaaactgcccatgcaaaaattaaaatttcacctcttatattattattattattatttattttgctatgccaagtcttaattagttttgatttatgtttttaatgatcaattaactaatgacggtcaaaatgttgaccaacctaaaaaattgagcatcttaattttttggcacatgatcaattaagccacgttatggtaaattttattacttccatcatcattgttggttttttcttttgaatatataattaaggtttaatcaagaatcaaaacaccac

SEQ ID NO: 64379 - DNA, 1155 bp, Cannabis sativa
ttttttggaacaacttttactttttaggaacaatttatttttgtttcgaatattttagcatcaggcacgtcgcgatatattttgttcctaatatcgattttcaagcacgagttattagtaataaaatatcaggaatgactagtcgcaccaaataattttctggaacaaactatgaggttttttagaatgaaaaaagttcttcctgatgatactttttgttctctctctctaaatatatatatatgtggtggatattggacagtcggaccacaccccaataatttctcaagaatcattcaccatattataatgagtaagttgtgttttaacttttttttttaaatattaggaatagtatgtagttcgtttaatatgtgtgtggtctttgtttaaactggtgttattttgttatgttttagcttgaattgctagacttagttttctctcaaaatctgaattttttgtagtttatcgattgattatcgataggatatcgataaaatatcaatgataattgatatgaaaaaaaggatcatggatgacgtttatcgataggatgtcgattacttgttgacatattgtcgacaatccagcaagaattaaatcaattaagcattgtttgttgacagtatatcaacattatgttgataatattcaaaaaaaatatttttctaaataaattgacgataatttgttgattgtttgtcgatactttattaatgacttgacgatggtttgtaaaatttcaatttgtaatcatatttgttatttgtcaagatattgttgataggatgtcgatagaatatcaacaagattataaaaattggctaaaacaagtaaattcttttaaacataaataaagatgaagtaatcaggataacaatcataaactttaaaagtaacccctaaatgttaaatttaaaagtctcgatagtttggatgattcatgcaacacatgtacaaccacccaggagtggccagttcacctttaaccagatatattttgcaacgacgacactctttggggaaccctgtggataaaagagaataccatccatttaaatgtgttcgaaccattccaggagtggccaattcccttgccctcatgcatgtgtcactgttaggctatttttagcctaagtttcgggtcacatt

SEQ ID NO: 64380 - DNA, 1135 bp, Cannabis sativa
ttcatcctatgacaatttcatatttggctctataggtgtgttcactgatttgcatcctaaataacaaagatcctcaagtactgaagagcatattgtctttgagacacaaaaatacctttgctagaccttgcttgtaacaccctactagtttaggcgtgttatcataattttatattaattgtgcagctcgttgctaatcaacgagtttattaaaaatcgtgagtaattaaaattttgtttaaatacttataaataccaaaataaataacatatataaataactgggatctcgtgtataaaatatttacaactgattcaaaatatttaatacaaaagttatcgcctagtgactatacaaaatacaatcagctgtcctaaagatcgtacacttcaggtctaaccacccccgacatgatcaatcttcacccgctcgctctcacggttgctcaaccttagcttttcccttgcctacacatgcaaataataaatgtgagtcgacagactcagtaaaaaaagtataataataatcatacatgtaactgaatcacaattagacgcccatacccccaactttaatcaaatctctgcaccctaggcgctactccccgcaccctcggcaatactgagtcaagaacgttcaaacaacagcactattgatcacaatatcagcctatactcgatccgctagtcatactcttgctgtacaaatgtgatagtgtcaaatagtacttaagccaacatacattcattgatatctaatataattctaaatataataataccgctattttaatgtaatctaacaggcttaaaaaacatgtacgccaaccatgtaaacacatatgcatatcattatgctaatcttaccttatttctaaatttaggtgtgctggtcaacacaacctcaaaaaaacaaaatcaagcatcattaacaactacagaatcctaattctaaaaatcaagcacaaaacctaacttacaatttagaataaaccaagaaaattgagcttgggtgattaccttggattgaaacctacaagttcattgtggacattatcccacatagaataaatggtagagaattgagccatatataagaacatgggctactccactcattaccaattggttttga

SEQ ID NO: 64381 - DNA, 859 bp, Cannabis sativa
attttacctaataacaatagaaggtgagaagacaccaaaaacttttagcatttaaaaaattattaatagtacgtaacatataaaataaattacaattataagtatatgataaatgataattataaagcatatattatatatgaatattcaggagaactttaatattccaccctcagctatttaaatgtcctttatactaatttaaattgcggagttctatttgtacctcaaagaatgataaatgataaatatacccctattattaaagaaatataaattcaaataatttttaaaaattacttttagtatttttttttttaaaaaaaaattctcacattattttatatgttgatttcaatacttattttgatttcattttcataattttttctaactcatgtatatattttttataaaatttttattttttattttgtcataatatttaaaatataatttatttttgtttaataggtatattttttacaagaatatgaattagaagaaacaattcaaaaaaaaaactttgtacaattaaagatataaattttatataaagtaaaaattattaaaatggagtgagtgtctttagaaatttttacggtgtaaataaaatttttctttaaattatatatttatatagatcactgaacgaaaaaacattactatttttaacaacctatttttcttcttttctctaatcaatttaatattaattattaatttattaggaattatacatagaaaatataaattgataatgtatatacaaaaataccttcataaggtgtggacaatatttataccttttatgtgattttaattactaaaataactcttacactatcacttacacaat

SEQ ID NO: 64382 - DNA, 744 bp, Cannabis sativa
atggtattcatatttaaatttacatacaataaattaaagggtacttcggtgcacccttatctgtttcagcatttagaattttttttgtgtacagtttcttttcatagttgtatacgttatagttgtttaagacatcttgtaaaattttgaaaaattcgaaataatttacaatatagaatgtaatgttcaaacaatctatttcacacgtgtatataaaataaaagaatcacacacgtaacaggcagtttgaactttattttcagcgtgttaaatttttttgaatatttaaaaattttgtaagatgtcttaaataactataatgtacacgactatgaaaaaaaaaaattaaactaaaaaagtctctcggattccaaaatagatagaggtacatcaatatacaaaatagagtgtattatagtattttactaagttcttaattttataaaattaaataataatataaatagacaaaataaaaaaaaaaataatgtgtgcgcacgatatatatatatattgtgtactgcaatatatacggcaaaataataaagaatttagggaaagaattaacaatattgatgttattgtgtctagtaggatatactcaaaaaatacataaaaattataaaatgatatagtaaaagaatacatttgtttttataataaagattattgttattattattttttttaattttctgaaaacgacgttaaatgttaaagttaaaatataattacattaatgtt

SEQ ID NO: 64383 - DNA, 909 bp, Cannabis sativa
gagtccttttatgttataaaagtttatttttgtgcatagtcaatagtcaaaaagtgaatgagttaactcatgttgggtagagcatccaattctagacatgatttttggcataggacacatcacatctttcatgcgtaaggctttaaaggtttaagccttattattctctctcctcaaaaaaaaaaaaaaaagccttattattcttaacctatgtagcaattgttccatataaaagaatatatattctaaatattcatcaattaataaactatttcactcattatattccatttaatatacaaaccaaaatataaatataattaaaagtgattgacacaatgatccaatctttcatcagtggattaaccttatgtttatcttcaattgttttttttttagtgaagcaactttataaaacaaaccaaaattatatggtagcaacaagaggtgctatcatcttatcagaaaagaagcaataagtattagacacaacagtccaagccgctaaaatatctatgagcacaaacattagtaagtctaggaagccaatacacaacaaaatcaggaaaaaaatccaacaactgaaaaatataaagaaaaacaacagttcaaatctagtttggaatccttgtagagtacactgcaaattgaaaaaattgactgacaaagcttcatcgcatggaggagatcaaaagtcttgcctctaaaggggaggagacataaacttcgacaatgagaccttccaccacattttcatcaatatccctcataatcacagccccaaacaccatcatagatccataaatagagagggattatccaagattgcctcacacaataataagaaggaaccaaaacataattgcaatatatcatttctatttttatttcaaaaccaatttttatgtg

SEQ ID NO: 64384 - DNA, 789 bp, Cannabis sativa
actaattttaaatcctatttaattgttagattcaagtaacaaaaattttaagcctaactccacatctgaatctaatttttattttatttacttatttagttttatgattgagatattttacttataggtaagtataacaatttgtaattattaatctaattaaatggtttaaattaaattttgaaatctataacctaaaacaaaccgcgttttgcgtacggttgtaatttatttagtggtaattaaatcttaaaattatttgaattttaaaatttttatatattttatgtatttttgatgataatatgagtaactattaactaatttttcttcgcatttaataaaaataattttgatattgtaaaacgtaattttattaattgttttaaacttagtaaatatttttcattatattatttattatacatacatatattattagttttcaaaatatacacataaattaaaggattttttttcaattttaaccaaaaaaaaagtaaaaatattacaaaaatactttcaactgaccaaataaataaatatacaactcaaataaataaaattacacaacgcacaccttcaacccatgatccatgctttctaggcaattatcgcgcaactaagcagcaacccaacgcaaccgaaacaaaaattcaaccagaaagagaaccgccattaatttcgacaacttcacctgggaaaacaaccagaatcaatcaaaacaggggctgttttgaattcataaaaaaaaaagtgtagaaaaactactgcgaaactaaaattcaa

SEQ ID NO: 64385 - DNA, 1007 bp, Cannabis sativa
  modified_base (952)..(953): a, c, t, g, unknown or other
atcaaccacttttagccatttttgttctcgaagaataagagcaagaaatctttttttctcaatcctttgaagaatccccaggaaacaccgaacagcgtcatccaaacaaatctcaagcttcgaacagtttgtaagttctttgtttctttcctcttatttgtttgaatattttattttcattcttgaacttgttctaggaaaaccatagaaaacttagctttaggactgtaaaatctttacgtcccttgattatagtcacgtcttactttcaattccacgatatttaatttcgcttacccattcggggcttagtgaaaattaacccctaattcgtaattttgaaattctggattgcaaacctcattatcatgtgaaaattctattttttgatcctttgatcagacctagtcggtataaccaacatgtttccgtttgttatgccgaccaaatgctcatcttgtgtcctaccttttatagatgaaccttggtgagttttggggaagcgaacatcatatcgaccaggatctgcttcaatatttgtacgaggatcatcctcgtctccgtgctagtctgtcctcatctagtcacagtctctccaattcaagcttcgtagattgggagataagtatcgaatatacatcattcccagaacccgaagtgcagcaccatttttaccccggccagatcaaaggtcaaggctactggcgtttcatttgggagcttaggaaatggtggaggtgctatctttcgttcaaatggacatatattgtttgaccatatatagttgatactttgcctgtaggccgtccaaatcctgcagctgcaggtacacccattgctacttttactgtcaccatcaccaaacataccaaccagactccatccaggaataggataatgggacgaaccaaacagactatgcggaggacttcttgttgggttttatgccctnnataaaactcatttcaatataatagatcggaagagcgtcgtgtagggaaagagtg

SEQ ID NO: 64386 - DNA, 750 bp, Cannabis sativa
  modified_base (591)..(592): a, c, t, g, unknown or other
aaagatatctatatcagatgatcaaaatgacatcataacattaatatctgaggaccatgtgcacactcaaatgatcagtattgctaataacaataatttttctgatggaaatatcacagatgatactataattgatggagaaataatagcaccaactaatcgttttagtactcttactatctcagaacatgactatcaaaaccaggcatcaatgatcggtagtactgatgatgagcatgttgtcgtttctcctgttggtgatcatctattgatgatattaatgatcatctccatgaaattaagaatatcacagatcatgtcgttgaagaggtgagtatggtgaaagggttaaccattcttcagagaatgtataatgggcgttttgaccatatttgtttactaagatttttcttattttccgatttggcttgatatatactttgggtgacaaaggcaattataaatatttccatgtattgtttttcatttcttcctaaaatttatatattaaggtggggtttggtaacacttttttaattcgttttctgtttttaatagtgaaaaagtgaaaatatttttcaaaaatatgtnntataaaactgtttttactttttaattttataattagaaatcaaaattttaaaaagaaaaaaaaattactttcaatattttttatacagttttttttaatcaatcttttggattacaaccagacccggacccaaatcccctcctcacggccttggcgct

SEQ ID NO: 64387 - DNA, 1140 bp, Cannabis sativa
atatactatgatgtaaacaaagttataattataattatttaagatattttataaaatttagaataatgtacgaataaaaatcagtgtttaaataatccatttcacatacgtataaaataaaagagtcaagcgtacaaaaaaatgtttaaatcttatttttagtgtgttaaatttctccaaaggtatcaaaattttacacgatatcttaactataacgtacacacaatacgactatgaaaaaaaattaaactaaatttttttcttaaatactaaaataaataaagagtgcatcagtgagaatgcattgtaaaaaaattgaaaaagaaaaataggcccacagataagtgcttgtttgatttttatttttgtcattataattatttaaaattaattatttgaaaacaagtaaaatatagattataattattataacgtacaatataaaatcgagacatataccgaaaataaaaagtatttctacttaagaacatattaatttttatatgtaactgtgagagcaataatatctataaagatctcaaaaggaatttatcgtatctaattagtggtcaagtcatcacattcacaagtactcgtgtataatctaatttgaattgtatgggttcttattcagcaacaaataaaaaataaacataaaaaacatatgggactttgtacgtataacgcgtagcataatttacagttaattactctacatatataatatgtataaatatattcacactcagatggctattcacaatattatggataaattaatattgtttataaaaatatggcatataaataatgtcataaaatgtgacatatttttttaaaaacaattaaaatatgggaattttataaaatacaaaataagaaaattataacaaatgaccttaaatcatagcattatataagtaaatactttttaccatataaaaaaaatcaataatttttttttgtatttttttttaaaattaggagtgaattacttaaagaacatggtatatttatatattttgaatattaattaacttagtattattataaattctttatggtatataattttattattacgatatattaattctcagtaatacaatatattaaagtaatacaatatatcaaattgta

SEQ ID NO: 64388 - DNA, 1464 bp, Cannabis sativa
caagacacagaaattacagagcattgtaccgaatgaatttgtaaataaaggttggcccctataataaagaaatgaatgaaataaatcatgtcctattcctgtataagattagaataatatataaatgaagaaaataaatatttaacaaactgaggatgttgtaggctagccatatgtacacgaaaccagtaaagcaaggctcaagaacatcattatgatgatgagctattgctgatttgtcatggcatatggtagcatacgggctgagccttattcattcaactgatcaggtgcttttctttggggttgcttttctcttgtccggagcaagggaagactgagcagttggttggctgtttgaacctccctgctgatatcctttgtttgcaatcgttctttgcttttcaggtgcaaaaactttttgaggtgatggttgggaagacatggtttgcattgcagatatattaattcctctcactgtgatttcatttgtgcttatacgtatataaatatgtatgtatatttcattagtttctcttactaacaatgcttcattacatggaaagttacgcaccaaaaatcaatggaagtaatatgcttggcaaattcttatgaacaatattggtacgatctagatgttattcaactgattataaattataaaaataataactataatataatataggttgcttgtgctggataagagattcatttaattcaaacattttcatctcgtccattgtagaatggaagttttgaatttcttacaaattcagaagaaccatttcacacttacattaacttataatttattaatgttatgagaaatttacgtggcagaccaagtcatcccaccgcgtatacacataaacgggaaggcacatattaattcacatcaaacacaaatatataaatattaaaactccaattaatcaacagtatagtttcctattataatccaagcggtctcatggctggacaaacataataaattagaatgacatgtattaaggagttaagtatagcacatttttttgttatagcaaataaaaaaaaaaacaataatattacataaatactgtgagccaactaaataaatatttatacagctcaataaaaaaaattactgaaatatttcttacgtacaccttcaagaccgcatcatcaatgcttaagagaaacgaatttttcgtacgacacaagggggtcaacaacgataaatcaacttcggcggatgaggaaacaccatcaattctagtgatgtcagttgagaaggagaacaaaatcaaaccgaaaatgaaccattaacgactgatgaaaaatctgtaggaaaactggtttgaaaaataaattgaaccttgaattatgattcaaattccattaaactaatactcctaaatttaatttatagattcatataaaatttagatctgtaggaaatagatcttgagttctcgatca

SEQ ID NO: 64389 - DNA, 1481 bp, Cannabis sativa
ctagttagggtgttacagaaaccctaaattgctaccctcctctctcatgtctcttttcctctcctatctcaaatcgcacgcacaaacttagagactctctctctattgtcaacccatctctctccctctagtggtctaagtttctctagcgcaacgacattctcgtcaccctaatatcaggtgaaacatctagccaagggcaggaggccattttcttggcgtgatttcttttatgacaataaaactggatattgtgaccaaatgggttttgtttgttccaaaagtagtcttgatgacgtggaaatcaatgtttgacacgtggaaagaaaggaaacatcttggagttgagtagtcccaagtcatagtaagtcgacctaggaggggtccctagccgtacgcccaagttgactacgacaactttagaatgggtgtttggattttttcaagttgtttccaactcactatcttttattattctgacatgaagcatccatgtccaacgcccgagagctgaaatacatgaaacaacataagggaaatcaacccggatgcttagggtctcacacaacggccaagttgacaacccaactagggtttaagtttttaggactgtcttattgcaaataggtcaaattttatacttagacattaactagacatgtcacaaacatatttgaggcactaaaatctaatttggaaaatttttcgtttttgatcactcggagaaccaggtgccccaggcacccaacgcccaggttgacttattatcaacgtgggccacttccaagcatcaaattaaaattctgtctcgggaattttctttgtcttcataaaataccgagaaacatgtgcttctgaggatgaaatagaccaacatagaggccaaaataagagaccagcgcccaggttaacacctagtggtggcccaatgcccaggttgacatttcgtcaaagattatgattcaaatattttcagggagcaaacaaaactttttaaaggtctgaaattggacccattacccaacacccaagttgattgtcaacttgagcaattttcagtcagttttctaaaactggtgttttggaaattttttctgtcatcatatataacgaagatacaagtaaactcaaggagaaaaaaaaaatttaggggcatcaaaactgagcccagtgccatgttgaaattcaacctgatgcgctggtttcgatcactcaactgaaattctactctaagcattctctctgaaatacttaaacatggtaggagaccttgaccacgatttcaagaaccttagaagtattaaaacgacaacttggaagctccgaaaagagcacccaatgcctaggttaacatatggcctggtgcactggcttctacttattcgattctaattttgtctcaaccattcatctagtttttcatagtatctgggagctatgaagtcagaagagtcgaattcataacttcatattttcacttt

SEQ ID NO: 64390 - DNA, 1217 bp, Cannabis sativa
tggcaaatgactagcaatgtccgacgatgagagcttaactccatcgccggcttttgctagtatttcgaaaacaccgagctcgatagtggtaaacaaggacatgggcaatgcaactgagcttcttagttcaactgcatagaagaaactttcatcttcttccacattgtttctttcaatcattgacattgtaattggattaatatggcaacccttttggcttttttacttgtagaaaataaatttgtataagagtctttatttgagtatgaataaaaatacattctatatttataggcagtgctgtgtattaattttttaaatatgaaaattaatattttatttcattaggaaaaaaaagatccctcaattaatattctgattctcttacacatgacaagtcacatgaataacattggtaggtaatatataaggtaattttttataaattattagaggttttttataatattagccatacatgatacatgtgtggccaattaatattatatttaattgaatagttgagattatttatatattatggtttgtttgtttatagactaattattaattgagtaaatattattttgaatcatgtgttttgtaatagttactgattgaatcttctattatgttaaattataaagtagaccctgtattttttataatggtaaaaatatgactttgagtttaaattttgacaattttttttttattattaatataaccaacttgaagacaaatcctaacataaactgatacagaaaatataaacagttttatcaaaacaccttcagatcgaattagtattaaattttattttgataaaaaaatcagttcaagatcctatatatataccattttaaaaaatacagagttcattttatcatttaagaaaataaagagtctaattaataacttttataaaacacaagattcaaaataatatttacccttattcattagcttcctatatcaaatacaaataattcaattattatatatatattattatttattatgtttgacaagaaaccttaaaaaaacattttgaattataatatatatttataaaacttaatcgatattctggtcccttacactcgaagggttattaggattcgaatccaccctaatctctattatgaatttaaaaatggaaagatcaagggttattaggattggaatctaccctaatctctattatgaattaaaaa

SEQ ID NO: 64391 - DNA, 1181 bp, Cannabis sativa
gcaacataaaatggatcaaataaataagttgcaagaaagaaaaaaagaaaaagaaagcacggaaattttaggtcatttccttttcattcttattgtttctcggttagtggcaatgttttgaataataaacctcttcgaccctacgaaaattacagacaaagtaatcaattcaaactgaccaatgtcagttatggcttttcagtggcctattgtttagatagtgcagatcaagagacaagaagtgcatgaaaataacaattctgttgtaaattatttcccctagactctaaaatctgcagccaagaaccagaaactagatataatcaaagtagtaaactaggaatagcatgaacaataaataccacaaagaaaatgaaacaatacaatgaacaccaaagatttatactggttcggccataaagcctacattcagattttgttttgagcaccatcatcataaaagtccactatgttcagtctgagattacaccctcaacatttgagtatagctctgcaacactcactcacagtcacagtacaaactctcatcaagtaccccaatacacctgagctttcaatacagtcttgaaacctttcaaactcacaaacacagcttcttctcgtgtatactcacttacaaaaacatactaaagcacataaggactaagcctatttataactttcataaaaaaaaagcctatttataactaactaagcaagactgcaagaactttcctaataatagtaagcaagactgcaagaactgttaagatggttcttgcagtctttaaaaggaaagttaggatttggagaaacaacatattctctatcatttttctactgccaagggttcttttctattcttgcttccccttattaatgacttttgtccaaagactatacattgtttcattttactacgatatgtgtgttgctcaaagttaggatttgtggtattgtggtcttttcacttaaattaaaactgtcttgagtgcaggactaatgtattcgatgttgctcagaatgtattgacattgaaaaagaacgaaatccagcacttggagaacatgctacaaaaggttatatttgaatttatgttgttttactcaaaatataaaaaaacaaagaaaaagtaagattatttggagagggtatcatcctattttatgatattacttaga

SEQ ID NO: 64392 - DNA, 2570 bp, Cannabis sativa
ctaggcagcccaaatccaatacctagactccaacccaagacacgaaccctgaaccctagcgccaaattcgaacccttgacctggtccccaaccaaaacagcaaaccacatcacactatataatttgacaaaaatacaaactatacaaaccacaaccacaccgtaaatactttaaaactacaatatttatgcaatgtgggcaatttaatgcaatttgagaacacccctatcataaataaagttgcaaacccaaaatttaaagtaaggaagaggcaattttttttttttttgtaaaagaggggcaaaactaaactcaaaaagaaaaaaaaatgttggtggtggtattgtaacccttaacatgtaatctagcttaactattacactaaatataatttatgtctgtgaatattattttttataatatatatcataactaattaaaatatatataatttcttttttcaattttttttttaagaagatgactgtcctctcgcttccatggggtccacctctgcataaatgtgtcaaacacaacacaactccttcttcctcaaataaaagtcaaaacaaatttcaacaccaccccaccaatataaaaaagaagggacctcaatccacaaaacattttcttcaaaaaaaagatttgttgttcgattccaaaaaatcaagtttgatctttttttacctaatagtattatcatccaccccaaaaagaaattgaaaagagaagactaaaaaagactaccatgctccgccgcaactattacaccttttctcttattcttctttattatgtcatcatccaaacccttcaaatctttattctccacttcaccacgcatgtgtaaaaccaaaatggccactcaagcggcccagcccatctccgccactacggcccaacgggcccaccaccaccaccaccgagcccaacccgactcttctcctcctccttcgtcctcttcttctcttccaccgtcacgaactcaacgatccaacccgcccgagtcgactcggtctcaaaagcaaccacacagaccaaccacctccgaggcttccagctccacctctagcgccgccggctactcatctggctccagctacaagttctcctccggaacctcgatttcgagccgtacatcgcttacgagtctgcgcgaaaccctacctgaaaaccctaacatctacgatttcaaagagatctgtgtagctacgaataattttctagctaagcgttacagttcgtcgtcttcgactccttcttggcggtgcgatcttcgaggtaaggatgtgattgtgtttcagagaaagttttggagaaagattgagatgcctgagctacaagaaagattctctgttatttgtaggagtcatcatagtagtattattaagctactcggtgcttcaatctctggtgatcatatttatttggtttatgagtttattaatggagctaatctcgctgattgtttaagaaaccctagaaatcctgatttcactgttctttcgacatggttatcgagaatacagatcgcgacggatctagctcacggactcgattacattcataaccagactggattaagcataaatttcgttcataatcacattaagagtagtagtattatagtaaccgaaccttatttcaattcgaggatctgtcatttcggcactgctcaattatgcggcgagatcgacgagaacgataaccggaaacaatctaagtcgagaaatgaaatcagtgagatcacggaaccggatttgagtagatcgaacagtcggaaaacgcaattccagggagttatgggttacatggcgccggaatatcaaatctccggtgtggccacacaagagaccgacgtgtacgcgttcggcgtggtgatgttagagctcttgtccggagatgagccattgaagtacagattcgataagagcgaacgcgttttcgtgaagagttcggtgattgaatcggcaacggccgccgtggacggcggaagagtgaggacttggattgataaaaggcttaaggactcgttccctgaagacgtagctgataagctaatccgtttgggtttggattgcgtacacgtggatccaatcgaacggcccaacatgggacgcgtggcagggaagatttcgaagctttatttagcttcaaagaaatggtccgataatttaagagttccaactgagatttccgtttcgcttgcccctcgaaattaatttaatttaattgttattaattttaaaataattaattatttctggcggcggaagaaagtagttttttatatttatgggttcaaatatggaatgttttgaattttgtttgtttgatgaaattatttattctttggataattgtttttattttattttatttttgattaagacataactgtatataattattgtattgtattagatttactttgaatagaagattaacatacgtcatgataaagaatttatttggttttatattaagtcaattttcattggtacgttaccaaattaaagatattcaatattttaaaaaattgatatatattttaggtacacggacacaaa

SEQ ID NO: 64393 - DNA, 1405 bp, Cannabis sativa
  modified_base (57)..(61): a, c, t, g, unknown or other
cattattttagtattcatattagggtgttaatcaaatatacttggtagtaaatctannnnntggtaaaatatttccaacagtgttcacaagagcgagacagctcaatgtcttacaatgttcaagtagcattcttgtcgaaaggatattttagaaggcccgaacacctaccgaacatagttgaaggatggaacaacatgatgaagaaggcgagaaaggtatggaggaaaatctgggaagagaacatggagatctctgaaaaagggaggcaagaaagtaatagaaatgttgaagaggagtcaaatcccttttttttatcgataggaaccaataaaagaccacctagaggcctatgaaagtcacgttttttcttaagaaagatggcgcctctaaaaggatgtcttcaatttaatcagcagccaaggcgaagagagagtcctaccatcatgagggattcaagatagaaagagatagaaagccgaaagatgttcacaagggccagaaaggctatgtcataggaacttagaccacctatgcactggtaaaaaaaaaccacctcgatcggatcaaagtaaaataaatgtcaaatcaagccacccttgccttgaaagaattcacacgcgaccaccagcttttccaaaattaggggagatctgctgcttactactcacgaaaatattcgacctatactatagtcacgtcgtccgcgtatctttctaatctcctttccttctatttctcagatttttagctttgactaatccaaggtgaaaaatggggttggctaaaaaagggggagagaggagtggggtacgctcacttctgcatttttgtttaggttattgattatcaatcgctctttctagtggggaggaatagtgcatggatggcggttctcagacaaggcaatccttgctctctaactaaataatatgctagaatgcttccgtatcatgggcagttggatcgaaattcgtgtgatggttcgagagtggtttcaaatattctttgcatacatcttcgacctttcctattgttggagaataggcctactagttcctgattccatgttaatgtatctatatgaatctaatctctctcttcattcatcttgagctgtccccgcttagtggagcgcgacccccaaagttgacatatgcaatgaacctgcaaaaaaaaacttagagtccccttttgggcttaggttcttcgatttgttcaaacaaaatgagagacaagaaaacatctttgacttctatgtctagatagaagctatagattccatatctatggttagcgctcccactcaattgtactatcatgctcccaagttgtacctgtgacccgaaccaaattaaaggctttgactaacaacttaaagaacacaaataatactcttgagatcga

SEQ ID NO: 64394 - DNA, 522 bp, Cannabis sativa
acaccgaccaaatacccaaaatcacaggcgctgtgaaaaataatcatgtaacattgctgttgaaagcgagcctatagtgatacatcaagttaacaaaatgagccaagttgattccgtgggggaggtttatctcgaaatctatctcctatttcttcaacaaatctatagaatcatgtagacaccgatcatagtttatatcaaaattactgaaattaaattttcaaaccaccgatgtttcgccgccgagatcaggaaagttaccgtcacaaccagtgaggatgagacccaattggatgagattcagaatatccacattcttcccaatggggtctcaccctcactaattcggacggtaactttcccgatctcagcggcgaaacatcagtggtttggcaatttaatttcagtaatttcaacataaaccttgatcagtgcgtaccatgattctatagatttgttgaagaaacacaagatagatttagagagaaacctctcacaatgaactcgactcattttactaac

SEQ ID NO: 64395 - DNA, 835 bp, Cannabis sativa
acaatttgttacattgtaaggttaacattgtgatgattctgaaactgaaactcagtgaaagtgaaccgaaaaggttcatgactagtatttggataaacaggaataaaatcgtatacgcggttaatggtagataacaaggaaattgtctagaagatggagattgtcactacattgtaattgttttattgtttgctgtttaattgatgagaattgttttttttttattgaaaaaagaaaagaaaagaaagaaggaatgacattacactatagagataaattgaacactaatagccactacaaatgagcatataacatatttatttaattattttttttggtcagatcaacaagaataatttgaatcactttaattagtagtttttaattgttcaaaaaagaaaaaataaattggtagtttttaattcgtcaagaaaaaaaacaaaacaaaacagagtttcctataaaaatgaaggcaaattagttaccgatattaatgtgaaatttgtttagaaaaaaaaaaagatttgaatataaatatttattactatcacattttcatggttttaatttcttcttaattttagttctcactggattactatacattaattcgaagcaaatggatggtacattcctaaatcaatttctgaaactgaaagaaaagaaaatggattcaggtaattcatatataaatatatatatatatatattttttttgtatattatgtattattctacattaaattaggatcaaatctgtaatatcctcttttttgaaagggtaattttgtattttttttccttttgtcgatactttgttaatttgcatattaag

SEQ ID NO: 64396 - DNA, 807 bp, Cannabis sativa
cagaaaaacttccttctcattaatgcctttgttctttatgtcccataaaaatttaacccagtcccacattcttataccagtgtcacagatagaaaatatcccccaaggagaggatcgccataggtggaaggcgagattacaagaaaggaacagatgctccatagattcagctcccgaaccacacaggggacagctctcatcctctaaaggaaatctccttcgaaggaccgagcggactgggatggccttggacagaatacaccaccaaagaaccttgagccgctcagggattttgctattccaaagtttgttccacatggaaggggccacctctgacccgcttgatctattctcagccaggaccctatacgcagatttgcacgagaatcgcccattactttccaacgtccagaaccaactatccttgccaataccagaaggagcaccccctttcaaaatagcggcgatactttcgtggtcgaacaaactgttaagcttttggatgtcccacctgccattgtctagcaggagctcagctacctttaaccctcttctcaaacccctcccatttggtgtaggaatgaaaccttttaggtgcgcaatccaagggtcaaaccaaatgaaagtctcctgaccattagctactcgcttacaggcaccctgacgaatgatggatctggatttagtcacattcttccaaaaccaagagtccgaatcctttggttcacattctaggaagggcttacccttcaggtacttagcttcaaggatccgacaacaaagagattggttgccagttagaaggtt

SEQ ID NO: 64397 - DNA, 1301 bp, Cannabis sativa
tttccttcgggattcaaaaacccaatgtctcgtcctataacggaaccgcaaatctagtctcgcatttgaataactttaacaagataatgcgagcgagtaacgtgacgaaaaatttacgctgtcttatatttcccacctcgcttgttggagcagcaagtagttggtttaacaagttcactcgtcattcaataatttcctgagaacaactgtctagggatttcaagaagcaatttcaagccgttagggataggcgaccaaagtagcctcgctaaccaatattaagcaacaacctgacgaaacaattaaggcgtacttaagtcattttagcacggtgccactaggtttagaaacttggatgacagcacgcaacttacagcccttcaggcagggatctccacggatctgttaactgctggaggcgagttgtgggatgatctacaaggacgcccgataaggagcattactgagttcgacgagagagttcaagtgtttatttagaagaaagaagcctgaaaggaaatgaacttgttgaaaacaagctcgggaggcaaacccagcaatgtttcaacaggagctgtttccacgagaattgataactcgggggtttctggtctgaaaagaaaagacggaattagggaactgttgaaggatagaaagaaacaaaagaagcaacaaaaatgtgtgctagtgtatactatttataccgagcttaatgaaactcaggaaaatatttaccttacacatgagcagaaggtagcctttggtaaaccctagcctatgaggaattcgaggagcaaaagagatcctaataaatactgtaaatttcacaaagatattggacaaatgtcgccagttgaaagaggagatagagagtctcatcgcttgagggcattttaagcagtatgtgagaagacagggccgggatacaactagcctcgtcagcctaataacccaaacgatcaggggttgcaatcttttcctctggaaggagagaacatcctggttattttgggagggctacatattgcaggagaaacaagtaacgctcaaaagagatatgtgaaggaaataaagaacgagcaaccggtctttgccccagaaccttccacaaaggtgaaaatcgaggaacctcccattacattcacagagaaagacgagaagaatgtaagataccctgacatcgatccattagtcataaccattcagctagccaataagaggatcaagaaagtgttaatagataatgggagctcgttaaatatcatttataaggagactctaaagaaaatggggctcgaaaa

SEQ ID NO: 64398 - DNA, 879 bp, Cannabis sativa
tgaggttagagagagtctaaactaaagcaaaagttcatcttgtaacctttgtaatagtttgaaagaattcttgtaaccttaaaaatactgatatcaataaagatgtgactactgctatttcgtccgagacgtaaagcattgtacaaggctcaaactcgttaaaccgagtgttgttttccctgttttattactttaatatgttacctaattctttgtgattcttctgagtattattttttattatgtattagttggtccagtataattacatcgtatgtcattgattgttatttcacaataaactggtatcagagcttggtttgtaatcataactgcaacaaagtacgatgttaaaaagtttactagtacggatgactttggattatggagaatgaagataaagggtctatttgttcaccaaggattgtatgaggctcttcttggagaaaaatctcttcctgattctatgtttgagaagcacaagaaaaaggttcttccaaaggcttattgtgacatcatattgaatcttggtgataaggttctgaagaaggtcacaaaagaagccacagttgcaggtattttgctaaagcttgaaagtttgtatatgattaaatctttggtgaaaaagttatatctgaaatacgccctatattcattcaagatgatggatgaaaaatctattgagaacatgatgagtttaacaagttgattctgaatcttgaaaatattggtgttaccattaaagacgaggatcaagcctattgttactcagttatttactgaagttatttggacattttaaagatacaatgctatatggaagatattcaattacagtcgatgattgtcaatgatctttgaatttgaaagagctaaatc

SEQ ID NO: 64399 - DNA, 1487 bp, Cannabis sativa
ggactagaacccagacctgggacaataataggaccaaacctaaacccaaacttagaccagaacccatatcgggacttggacctagaccgggacctgtgacttaggacgtaaaccaagaccgaggcctttacccagactgggtgccgaacctagaccaagacccaaacccaaaaactagggccggacccagaggacctaagaaccagactcagaccagggacccgaacctcagactcgcactaggactgggacccaaactgggaccataacccagagtgggactcggactcaaatcaggactcgagaccggaacctgaaccggaacacgaacatggactcggaccaggacctaggacttgaacaaagattggggacccagacctgggaattgggcccacaaactacgaccagaactgtggccttagaacttggatcgagatccatgacctgaccccaaactgagacccacactggggaaccaaaatcaaaacttgaactggaggcggactgggatcttggagtaggactgggacctagactcggacctaaacctggcaccggacccaaccgcgaaccctaaccgagaccgaaacccagacctgaacctcgccctagacaaaaatcaggacccaaacctagactcgaacccaaactcgacctgaacccataacctgtgacttgaaactagaaccaaaccagaagcgactcaggacttaggaacaggaccaggacctggacccataccttaaactataaccgaacaaggacccacactcagacacaaatccactgtgggattgggtcccaaacccgaatccaaacccgaaccgggatgcaggtccaaaaccaagacctaaacttagacccgaacatggaacaggactcgggacctaaatttggcatcgagaccaagaattgcatgcaagtctcggtctcggacctagaatgagacccagatcgagacctgggacatgaaccgaaaccagactgtgacccgtgattgggattcagatcttgttctaggatccgggaactagggcttggacaagacccatagtcggtgtcttgatttgggactcagagaaggacctgaagctggaccaggacatggacccaaacccagacctgggacccaaaactaaaacttgatccaaatcgtgactagtaccctagaataggactggggccgtgactaggacctggacctagactgggacccgaaactaaaccagaacccagcctcagaactcaggcttggacccagtcccagacccaaactaggactgacactcgaacttgaacccaaacccgaactcaggagtcgatcccagacccagaccaagcccctgacataaactgggattcagacctggacatggatacgaactagacccagactcaaataccgacccatacccagactggcatcgtaacacgggacctggacccagacgtagacacagacccaaacctgggacccagatcca

SEQ ID NO: 64400 - DNA, 1732 bp, Cannabis sativa
  modified_base (35)..(36): a, c, t, g, unknown or other
taaaaataatagattttaaaaaagaaggtaaaaannaaagaggacaatataaaaaagggtatagagtgtaatttcctcatggaattttatcagaagcccaaggtcaatatcagaagcccaagcccaagcccaatatcagaagcccaaccaaagagcacaacttctcacccaccctctctctctctccgttaatcgatctctatctttcttctgtgactaactcatcacaggtaccctaacctcgttcactgctgatcggagagggggaattccgtttgccttcattaccacctgcgcttcctcattgctcggataaacaattactttactcacaggtacgtgctttcatctattttttacagagatttcttttttctctttccataattttttgatttgtttctgtttgcttctatggttgtgtactgtagttttatttatgttttctgatcagtggtaaagtaattaaatcaacccttgttttgctctgaaaaatagtctagaagaagagcatactatactgagttgattctgttatgctctaaattgatttctctacttgaacatgtctttttatcgtgcagccataaatgcagggaaacgattgaaactttatctggttgttttatttttctcaagtgattctctctgtccggatatgatttagctactatccatttttttcgttttttttaatggtgtcaggtttgtcataattagtttatcatgtttagttttaagatttagaaattgtgtatatgtgtacaccttatccaaatcttttaaacattaacagtataaatatgttgtaatgatcatacgagattttgttcaatgggtcaatctttttccatttgaaatgaaagaaattttatgtttttgtgattttggttcaatgggattactgcttctttcatgcgaataacatggtattgattccttgtgacatgactaatagttcgtaaatggatattattgtgggatttttttttttgttttcttttagtactgtatttaagtaggataattccatatacgaggttctgagaaataacggtattggttttgactaagtgttgggtgacattgacaaacttctctccaaataaaatttaatttatggtgtttctaagcaacttaaagtggaaataatcttatagtgacaaataagttactttgcattcaatgtggagcaatgctgtgttgttgttgattggatagatactttatagttgtttcaaatttgatttggcattgtaatagaagcaaaaaaggcaatgcttcgttgaaagtaatgagctgtttagagaagttttgaaccaaaatggaaaatacttcattgaataactaccaactaataacctatttagagaagatgtgaacagttatgctttattcttttgcatctgcattgttgttagtatttgacagcatctttaaaactaagtttttaatagtattttgttaaaccacaagaaattctgttagataggtatttattatataggtaagataagatgtgtgtgtgcgacgactaaaattagtgattagccaacagagattgttaggttatgaattatgattatgttttgagatttaatttatctttattgcaatagttgatattagttttaattaatatattttttttttttgtattttgaatctattgtagaattttaaaaaggatattagattttttttttcgaatggaaaagatattagatttaag

SEQ ID NO: 64401 - DNA, 752 bp, Cannabis sativa
gctggaaaaagtcatttttgccagcacttttcattttatgctggcaaaaattctaataccaacattgatttgtcaaccccttttgccagcacatcacaagtaaattctattttaccagcgcaataccaactttttccagcacaaaaatgtgctggcaaaaatgatatttcttgtagtgggtttatggttgttatttgattttgtttctgagattgtaggattggttttgatgcttttgtgataattttgctattgttatgaagtataaatcaagtttgagttctgttacgtgataattattgtatggatgttatataagtattctgtgaaattttgaattaattagttaggttatagtggaattttgagaacttaaaattcatgtttcttcgtccttgcgatgaaacggttaattgtttctgttgttgtcgacaagatcaaaaattatattttggtcataatttttcactcggatatctgttttagatgttctatatatactctttcaaagcttgcgacgagctcaaagggccacttcgttgaactaggttgaaagagaattccacttctctgatcgtcaatctgcgatcagtgaaagagaatttcaaagtatattattttcttttgatatcaatagttacttttattttagggtacattgaggcataaatacctaatgtttcagattttgtacacttaaatacctaatgtttatttttggagacaaaaatacctaatgttacaattctctt

SEQ ID NO: 64402 - DNA, 2280 bp, Cannabis sativa
  modified_base (139)..(140): a, c, t, g, unknown or other
  modified_base (2220)..(2226): a, c, t, g, unknown or other
aactgtcactaacttgaattctgtagaaatgtgtatgggattcagaggtggatcaaaagctaaagatataatgttgtcaagtaatcctaactcattttcgtcatttccttgtttaatggattgcaaatgtagattgttnngtcttgagtagggaagcaactcctgcaatagacacataataccacaacatcctcagggtgaaaatttaagattttctgtttgaattgaaagccttcttcatcaacaggaatgtgtttgacatttttgatatctttgttgagccatgagaacttgtctttggaagatgaattttgagatagagatttttgtcttttgtaattgagattggataaaagaacgatcagatgtcaagttgttccaagatttagatacatatttcaattgaaacaatgtctttgttgctaataggaatagcagttcgaggaatacataattatttaaacaccttatctttctcatttcctgaaaaagaaaatcagatttcatcgttaattatatatataacatgtgccactactaaacaagtaaaagatcttaattcaaaatctttaacaacaaaaactgctatgcaccatacaatcatgtattgcccttacacaaaaactgctatgcaccattctcaaaaatattaattacattgcaatataacttcctatgcagtacaattaagacaaaaataaaaattaatttatattgaactcttaagattcatcttccaagaaaagttcccatggctcaacaaagttatcaaaactgtcacatacattctttttgttgaagaaggctttcaattcaaatagacaatctttgattttctccttgaggatgttgtggtattgtcatcgtgtcagggtctcatttgttgcaggaaaagcttctctactcaagactaactaatctatatttgctatccattaaataaggaaatgaccaaacagagttaagattcactaggaaatgacaacattatatttttagcttttgcttcatctcagaatcccatacacatttctaaaaaattcaagttagtgacagttgaggcatttgatattggagaagaagaagaaaaatacttcacaatcaaaatatactcttcaagaacaaaagaatggtataaatcaagaaagatttgtcaatgcaacaacaaatacttttgttcttttgatttcaagtctctattgatttcaaccattcttttgttcttgtatagtttatttcaaatgtgaagcacttttcttcttctattccaatctcaaatgcctcaactgtcactaaattgaattctgtagaaatgtgtatgagattttgggatggatcaaaagctaaagatataatgctgtcatttcaaagtgaatcccaactcagtttggtcattttcttgtttaatggattgcaaatgtagattcttaggtcttgagtagggaagcaactcttgcaacaaatgagaccctgacacgatgacaataccacaacatcctcagggagaaaatcaaagattgtctgtttgaattgaaagccttcttcatcaacagaaatatttgtttcagttttttttatctttgttgagccatgggaacttgtcttggaatatgaattctgagatagagagttttgtcctttgtaattgagattggataaaagaacaatcagttatcaagttgttccatgttttagatacacatttcaattgaaacaatgtcattgtaggtaataggtatagctcttcgaagaatacatcattattcaagcaccatatctttctcatgtcctgaaacacaaaatcagatttcatcatttaattatatgtataacatgtgtcactatactaaacaagtaaaagactataattgaaactctttaacaacaaaaactactatgcaccatacaatcaactattgccctacaataaaaactactatgcaccattctcaataacattaactacattgcaatataacttgctatgcaatacaattaagaccaaaaggaaaattactttatcttgaactctcaagatttatcttccaagacaagtttccattgctcaacaaagatatcaaaactgtcacatacaatcctgttgattaagaagactttcaattcaaatagacaatttttgattttatctttaaggatgttgtgatattgtcattgtgtcagggtctcattgtaggaagtgcttccctactcaagactaannnnnnnacattttcaatccattaaataaggaattgaccaaacagagttgggattcacttg

SEQ ID NO: 64403 - DNA, 921 bp, Cannabis sativa
atatgtcatatatggaattttataatttttcatgttttgtgctcggcaacattggaacgtggtgtttggctattagaatgacatcctagtcttttttagtatagcaaggcaatatagttagacattgggaaggtcaagaatagtcgaaattttagagttgacaaaaatacccctaagtgatgtttatgacttttagtgtgggcaagggcaaaatggtctttttgccttatatttattttgtcctttagtgggaattgagttcttttattaaatctcattttatgtgttttaagttgatattagatggtaaaataaagtttatttcatttaattttacaaaatatcaaaagataagcaaaactcaacttttctctcaagttctctctctccttcgaacccacctagaaccagctagggtttgggttgttcttcagcatttcaagcttgttcctccaagtgttaggtgatcttaagctctaggtaagtttctagtatccttctctttagtttctttagttttaaggaaatggattaatgcatgatttgtgaaattagttgttgttgttgctattgttgtttgaagtatgcttctgatgtttatttatgtttagatatgttgaattaagcatgttttgatggctgttttgttgtttgagcaagctttgagttttaggactcaagcttggctctttaatggtgttttttcaattcttgagcttgggtagttgttttattgcttagaatatgtctattggggtatattatgcaggtcaggaaggtttggtaaggtttggaattgatttggttagggtttggatgtttttgggttttctagttgaaactggctaactggttttacaggacctgtaggacctgtaaaaccggttacccgaattcgctgctaggttccccgaaaaattc

SEQ ID NO: 64404 - DNA, 852 bp, Cannabis sativa
  modified_base (392)..(402): a, c, t, g, unknown or other
cgaggatgatggagactgggcaaaaatttggggggccttggttgattctcggagatgttaattttgttttgaattgttcggaaaggaggggttcgaaggggagagaccaattcttaccttttatttcgaatttaatcaatagtgctggtttaattgatctgtctgtcaaaggtgactgccttacttgggataaccatcgcaatggcaatgctcatgttaaattggcacttgacaaggctttggtgaatggggattggcttggtcttttcccgaaggtggtggtcaaatcgtaccatacgtgaaactcggaccacaggcccctttgtattagtactgtgaaccaggatgttaaacattttaggcctttccggtttgaggcctggtggacaagnnnnnnnnnnngtgatttgattgtggagaatgcctagggctcggtgtaacatagatgggccccggctaggatttttaagaaagtgggggccacttgtattgcccttagtaagtggagtagaagccaatttggcaaattggataactgtattgcccagctggaagacaacctgaacttcatctagggtctccaaattggggaaagggcttagaccgaagaagtcgaagccagatcggaccataacaaggctctaagacgaaaggctctctactggtgccaaaggtcccgaatttcctggattaaggagggggttaagtgctcgaagttctttttcaccactgccactatcaaaagtagaagaaatgagattgaggcgatcatgaacagtgatagggtgtggctgagtatcagaagtaaaattggtaggggattctcagagttcctgggaaacatttttagaa

SEQ ID NO: 64405 - DNA, 1153 bp, Cannabis sativa
cgttttagtaagcccgtacttctttagtattatatgtgattattaaagcatgttaggaagcatattagtttatagttgtttactttaatgcgttgccttaaaatccataagagcagtattaagtgtccatgatcgttgtctaacttgaatggcttatgggttcgcaggttaagtcctattaaatggacacccaacaaaatacgagaatttagggtaatagtgttcagaccggaggcggtcaggaaaatcaaattccccagaatccctgaggttgcggctgaggtcgtggtagaattcagggtggtcatcctgtgaatccaccaaaagctcctccagattggtaacagaggtttgcggagatgcaagatcaaatttgccaacaagaagaagaaattctgagattaaggccatagggtcatcctgcctccacccaagctcaggctgttgtagttccatcggtgccagcagaacaagttgttgctggtaaccgtatagagtcgttatacaagaggtttcgtaagcaagcacctcaagtgtttctcggaggtcctgatgtgatgaaggttgtgcaatggctcactgtcatattgcaaattttgaactttataggggtatttggtaatgatcgggtgacctacgccacttttcctttctaggaagatgccttagtgtggtgggaattggtgtccctcacccaggacgtcactgtaatgatctgtgaagacttctgatagttattcaacgccaagtattataatgaagcagtccgcagtgctaatcccaaagaattcactaagttggtggagacagagggtatgtcagttactcagtatacaataaagtttaaccatttggccaagctcacctcgggtatcgtgcctatagaattcataaagaaagaaaaatatctggacggtttcaatgtaaaaattagacatgatttggtgatcactaataatgaggcaacatcagatgcggagatggttgagaaagctctgcaagctgagggtgcagttaagtttcttcaagagccccgtgtgactccaagtgttggtgggacccccacatttactactcctacttatggtggggatggtggtgattccaccactaaccagaagagaaaagttaccccgacatctggttgctcagg

SEQ ID NO: 64406 - DNA, 691 bp, Cannabis sativa
tctaggtccactaaatggatccacatcattttggtcgatttcttttgggacttatatttgcatccacatagaattaggacatcctaatattttttaaaaaaattaattttaatgtatttttttaaaggaattttaatatttttctaaaattttctttttcacagtatcaaattcaataactgttttaattttatttttacaatttttacaaatgatttataaatatttttatcttttattaataaaattttatataattttttatattaattttcttgacttaatatttaaaatatattttattttttattttataagtatattttttaatgatattaatagcaaaattacctatactttatattttttcacaattaatcataaaaattgatttttttagtggcaaaattacttaaactgcacttctgttttggtcattacccttccattcaaaaatctcaataaacttgcacttttgttttggtcattacctttctatccaaaaatctcaataatatgttataatggactgtccacatgtacacttgtgtacacatgtcacgtttttaatggtccacgtggtaattcaaattttaaatataaaaaataatttaaaatataaaaaaattcttttttttttcttttttctttttctttctctttcactttctctttctttttctttaggaac

SEQ ID NO: 64407 - DNA, 1828 bp, Cannabis sativa
  modified_base (1055)..(1056): a, c, t, g, unknown or other
cgggactactgactgtcacaacagcccttacatcaatcttaatgggtccgtccctgaatcagatctcaaccttccgattgctattaggaaaggaactcgaacctgtactaaataccccattgctaaatatattttcgataacaaattgtctaaaagtcaaagaaattttgtgtgttgaagttgtttttggttatcctgagatgaatgtggttatgacaaatgatgaatacatatcatatggatcttatcttgatgaaaacttgatggacagaatgagttctttgaatttaaagatgaatgagttgatagtgcaagcattttcggtgtctcttggatatcaagaaaacaaaatgaaatgtataattcttgaagaaacaatagaagaagggatttaaaacatatggaacaaacttgatcttaactcaacatcatcatcatactaagaatttgttttgtattcaagtttcaagcatttgagttcttgatgaagatgaagataagtttctttcaaatgtctagtactgttttttgttttagtactagaaaatatgagacatgaatttgatttaatattaagtttgagattcattttttttagcgattttcatccattatgaatagttaactaattagactttattttggtacattgatagttatgaaataatttacagggaaagtttgaagtttcataaagggtccttaacttcattggagacctcttaattggaaagtgcttatgaaatttatgaatatgaggagaatgttaagaatactgtaaaacttaatttagtcttaattaattcatgagaatcaaacaataagattaagaaatagcgaaagcgtaccagagtccattgaatcgcttgaagaagggtatgatcttctaattttgcatcaaaacctttgaaaccttattttcctgatgatggggattcaagaactctgtaaaatgacgatacgatgcaaaaatagggaccaatacctattatattaccaactgttacaacagttggtaatatttattaattatttctaatttggcccctcatcanntcagaaactatctaattggtatccacatattaaagtcatgacaattatgcatttaagtcataaactttattccaaaatagaccacataaatttgacttatttatttgatgaccccaatacatatttttatatatacaattgtgatcccaattatttctaacaaagaaatgaaaacaataatttttatgagtttcttcccatgcacatgcgtcactggaggcctattagtatcttcactactcattttttttaatctctatattagaatagatgagagttgcttttgtcaatttctccttgaaagttgcttttacttatcaagctaagctttatgagagttttcttaagctcactgttcggttggagaaattgctactgaaatttttattttcatgattgacttattttttgccctgtcatcaaaagagttcttatctattaaccaattagtagaaagaataatcatatccaaacttgactacttacatcactactcattttttgccctctattaaaatagattagtgtccttcgattatgattattggttagagattaatatctcaaacttgagttttagtgcctaacttcaaaattaactaaaaggaaatagtattatcagaatgtatgtatgtttagtgcatcaccaaattcttccttttcaaaagtaacaacattaaattccataacacatgaacttcttctacttgtacttcatgttagatttgtttttgttataaagtttgtgttattatttttctcaattttggat

SEQ ID NO: 64408 - DNA, 857 bp, Cannabis sativa
catgttgatggaagttgcactgactaatttttcagtgcaagcattgcccttataacacttgaggggcagtagctgcatggagcaattaaattcaacttcaaagtcttgaacaacaaggctatatatgaagccataataaccgacctcaagctggcacgtgaagtatgggctgaccacttagacatattcaacgactctcaattagtcatgaatcaagtcctagggaaatacacagcttgaggtgaaaaaactgtggcctacttgagaaagatcaaagacttactaagtcagctcaaaggctacacaatcaaggagatccccatagaacaaatgctacagcagatgcactttcccctctgacaagtaccaccattgccgacaaggcaaacctagtgccaatatagttccttgaggaacccagcattaccatccctaaagaagtcgacatgttggatgacagtccaacatggataacacttattgtagcttaccttcaaaccggagccttgccagaaggcaaaaataaagcagtaaagataagaagaaaggttgctaggtatctaatcctagatggagtaatgtatagatggagcttctcaatgtttatcttaaagtgtgtcactaaggttgaggctgagcgactaaggatagaagtgcatgaaggcttttgcggcaaccatgtcgagggacaaagcctatccaaaaagatactctaacaggggtacttttggccaacaatgatcgaggactcaaaggaatatgtctaaagatgtgacaagtgccaaagattctcaaaatttctaagagctcaacccaatgagctcacgatgatgcagtctccttggcccttcgcaata

SEQ ID NO: 64409 - DNA, 1290 bp, Cannabis sativa
aaaaaaattataaatattttagagtgccgaaaattatatttaacagttactatgttaataaaaaaaataatcacatgtgcaataaaaatatgtaaattttattttcaacattgtaaattacttaaaatttatcgaatttacaagtggttataaattagtattgaaacaattaagagttctaccgaaatagctcatgtaaacttatcctataatatattgatcactatgaggtcttcatatttttaaaataaaaataacaataaaaaccaaacataacttaaatacaacgatgaacaaaacataacaaaaatataacatatatttttcttgaatggaggtaaagaaaaaaaaaattaaaatatattagtatgaaacaatttcataaagaactaacactatatataatcaagtgccacttatacaagaaaccaataacattacttgaaattgagtacattgatttcgattcaaaccctaattttagatacaagatcatctcataattttatggtttattattttctcatttaaaaaaaaaaaatgaagaattaaggcatagattaaaagtagtaatcatctaaaaataacaatcaacagttcacacgtttttattcttctaaacactcttatatctcctttgaataaaatgaatggttcaaaaatacaaagaaatttccacttttcttcttaattttgactataaatatatatatttttaattaatgtcacattaattcttcaaattatagtgccgacgaaactgacctattaattagagaaaattgaaaaaaaaaaataaaataaaaagacatatgaaaacctaaactttacttttttttttgtgtgttatatataattattagtcctaattacactttaattatataattaaatattattccttaacgtaatttaaacgtacgtatcaaatttatgtataccacacaattgtaagatactcaatcaacactcactagtcaaaaaaacataaaatattttaatttataatatttcaaatggtttaactaaaatttctcatttacaataaaaaataaatttttacattatcaaaataattataataacaataatttgtcatgtaaggctgacataacggatatgcatggcgtgtttgttggttaaaatagaataatattagaaagttagtaaactaaatatagaattttattttattttattttttactagaaaaattaaaaataaaataaaaaataaaaaaactaatcattgtttgtttgtcagctcaggaatttattattattattatta

SEQ ID NO: 64410 - DNA, 2617 bp, Cannabis sativa
ttgcttgctattttctttatgcttatttgtgaaaaagaagcagcagtttcaattaattgctaatctactttgatattattttttacaatctttagattgatgaagagaatttcaacgaggagcaaaaatagttaacaattattaactttatagttgttattacattttaaactattttttttacgtaattttttattttttaaaagaaaaaaaaactaattaaataacttgaaccaatcttagactaacacactaatttggcatttaaaggtgttaaaaaataagattgagcgtaaaattacttctaattaggggtcattcatactattttttattaattaaggttatgtgtgtaataattttaaattataaggagttttgttacaattatttcaattaattaagttaaaaaaaattgctaaaagatctttacttattaacaaattgcaaaaattaattaataattcttagcaatttaatttttaattaattttaattaagtttttataagaaaataaagtatcaagttacaagtttttcctgaatttttttcaatttttaaattaatcacaatcattcaacaattatctaatggttaaaaataaatgtaaccatgatgattacgtatttgatgtaatcattaaaatatccaccatatatatatatatagggacacgattttgtcccatgatgtacttttacggaatgtattccatgatacattaaatgggtctcagggtacattaaatgagtgttagggtacgttactattttttaaccctaattacctctagatcaatcttagccctcaaatcaaataactctctcatttaacgactatcgtacatcacagaatacattccgtgaaagtacaatcacgggacaaaatcatgtccatatatatatatatatataaaggaaagcatcaaaaggttgatgtgacaatctatatgaattttctcttctattctttattttttttttcatttatataaatttttaattattgtttcagctacatatttacatatcttactattataaaagtatggtaaatggtgtctatattagtataccaattttactcttaacaactttgtaaaattacaataataaaaataaaaataaaaaatcaacaaaaactcttagacttttgtaattactatattaaaaatatcttattagtatttatattaaatttggactattttacccttatcatttaattttatgacaaacttaattattttaccattatcatctaattttattacaaataatttattttgtctttattattataatttttatctaatcttattattataaaaatctcttaataggatgatgtttacaaatgcaaatatagcctttaatttaagtgtgttattttttaagacaaatatatccccacttacacttaaatccttacatattatttcttacgtcatcaatcatttattacttgtttaaaaaatcaacatattaaagatttttagacaattttacaattatcttatagtgttaatatttatagacatttatattcttacataataatccacacactgttattattacttatatttacctttttgtttacaattttttttttaattattttactccttttggactactttgccctttttatttctttgagttttcaagtttttatccactttttttttatctcagtcataaaaatacactaaagagaaatgagtggttcatcctactacgtattaatatcactattagtataattaagtattgagttccatataatttaatgtaataagttttagaaagtatcgctaactaattgtaaaatgagacgtctagaaggtgatgggtactactggtgaccaatgacaatactctacattaaaaaaaaaagatcatttttattgagaaccggtggtgctcaacaccttttagagatcacatcctatgattggttaacaatattctctaaaagctattacattaaattatattagacacaatacttaattacactaatagcgatatgacacctaagagagtgctaggcaccaacaatatcttttagcatttctctaatgaaaatatgatgtggtcatcattatctgttgctcatgtgatattttatgtgcgtaattaattaaatatattttttttaaatgaattaattaaatagttaagttctttttaaataaataaataaatttatgaatagagttaacactagccattacatgttgacatgagcactcccatcaatttctctactctattcttcaaaatacctcactgaaacttcactttttttattttacatcacacttttacaatacgacatacatcaacttctttacttttttctttacatcatttaaatattaatttttaatatatttcatttatttttataaaagaaaaatacaataatattataacacacacatatataaaaatgttaaataataataaaatatttttagctcaatgaatagtaatctttacatttagctaaacacttgatggaagctcaaaattgaaattttttctttataatttgaagattgagctattttagctcatctataatgagtgctcactattattggactaa

SEQ ID NO: 64411 - DNA, 3117 bp, Cannabis sativa
aaccctaactagttaaatatatatatatggattatattattatataatttattatatgtgaattaatttgataaatgacatgttaagaccctgttggtgagccaggggcattttcgtaattttgacccgagaagggtaaaaactgtaattttaatattatgatgtgcttatggactatattattatatggtatacttgttttgtccttctgtaggtgttttctgacacgtcgacgcggtatagttacaatcggtatttcaggccgaatcgggttcggggccaaaatacattttcaggattttatactggcattttattgacattcttacccttgtttcttgcatatgcgtcattaaggccctaggggcaatttggtcattttgaccacttaagttgctttaaacaaaaaggaattttagagaaattcaaatgcatttctggttttactcaaccctaatgaccctcattcccctctttctttctcaaaattttcttcacttggatattcacttccaattggatttttactatgtgcttggagcttatgattttggtgcttgtgtggggaagatcttgaggtagtttccatcttttgttactgaatttttgtttatgtaattctgaaatgaaaatatgtgtgaagtcatgaaatgtgttcttgagttgcatgcttgtgataattgagttatttttgttgttgtcgtcgggattgtgtttatagctattgattattgctttgggtaggttttggagtgaataattaggtggtatttagtgttagtattattttgtagctctgaaattatttgcttgaaacatgagttaatggcttggttgtgcaaggttttgaagatggaattgtgttgttttttagctcaatgtctggagctttcatggactattgctaattttatttatggtgcttgtgcggatgagaataagcttgtattatgtaatttaatgcccaactatggtacctattaatccatggattatgattttgagttttatgcatgttttgggtggtttaggtgtgttttgtgcttatgttcgagctggaaaattagggtttcctgggtttgaaacccaggcgtcgcggcctgcccttactgaaagcttaggtttccaaccctggtgccgcggcccattgtggggagagcagcagcccgccccttaatttttgggcacattcgaacgcgatatttgaatgctcgtatctttgtgatccggactctgttttgggagtttcgcataatgttggaaagctcgttccgagctctatattattatctagaatttgaatgcaacttttataattttgtgaaaatggatttagggtttaaccctatttgtgaatcttagaaattgtgactaggattaccggcacttggtcagaagcacctaggaatttagaatctccatatttgtgaggcatcaagtaagatagtagttagcacgtagagttaggcgcagtggcacttatattgaatatgatatttgtgattaagaaccaggattagggttattaccctaaagtgagcggttttatggtctaaggttattaccctagtaattgttaaagtttaaatgctatgccatgctatacgtaattaagaataagaattatgcattcaaagcataatttggttggactcgataattagaactgagatgaactattctaaggccttattgtaattagacgtgtgagcataacacgtaggtctatgccacatagacatatataggcgtgtgagcgtaacacgcaagtctatgctaaatagataataaatgtaatggcatgattatgatgtatgtgaaatgtataattgtgatcattgatattaatactgtcttgctggacttggttcacgggtgctctactgtgcaggaaagggtaaatctgtcactcatcagccataagtgagagggcttggcgatgcttgtacatgttcaggccacactagaccaagcgggttggcgtctaccagcgatgtattttgtaatcctaattttgtcacttaggtcgacacgtaaaatacacttatgatattttgtgacaatatttacgggatcccgaaacatttatcttttggttgcttgtaaagtaaaaattattacaagtttaattttcttcctattgtaaataaagtttcaatttcccgcgcttacctttctagtaatccaagtttaggagattagggtttcataacctatttcgatagcgtgcttcatcgttagggcattataatttggtatcagagcaccaaggtttttaaacttcctgtagatcggccaaacatgtacaatcatcgacagagacaagctcagcttgtggtgcagtaagtgttgagagtaaatgcttaactacttatgtgattatttatttaccgctttccattttaggcagtttgtgagcatcctgagtatttatgtgatatgatgccatgcttagaatattaattcataaatgtttatctaattgaaatgaaatagttgagttagggtttaaaggcaataagtgcataagtgtggtattggtgcttaactcgccggggttgttgatttaagagttatttataaaaatgcaccctccccaatcatctagaccatagagcaagcaagtagagcctggtgtagaccaaaccaatccactggcactgcctgcacctctgtagaattcgggggataatgcgagggttggcaatactaatccgcctgctgactggcagtagatgtttcaggaaatgcgaggtataatacttcatcaagaggaacaattgcatcggttaaggcgatgggcaccgtctgcccatgtagagcaagtgttaccaccagctcctgtgccaactgtgggtaactaggggtttatgtttccacacagacattcagtgtttgagcagttcgtgaagctgcaacctccaacttttctaggaggcactgatataatcaaacctgagcagtggatgagtacaaccacccgcatccttgataacatgggggtgatgggaactgaaagagtaaactgtgctacctttatgttataagatcatgcccgtgcttggtgggatatagtgggggcagactcaagatgttagtgtgatgacttgggaagag

SEQ ID NO: 64412 - DNA, 1177 bp, Cannabis sativa
  modified_base (581)..(592): a, c, t, g, unknown or other
atcaatctgtcaggcagcaacccctaaatgtcatccccctgggtgaaacagacgaagatccagcgatgaatacctctcagactataaatggtcagctgccaaatctttggtcataggttctgcctgtgggccatgtcgtaggtgggtagaccttgtctagtaattcatcgggagaagtcatacccgacaattggaaccaagttaatggtgccggtcagcacatcaaccaaaccaaccgatcactgagacaactaggcgcttccgtattcgataggttggggacgactcatgacctcagaaacaatttgagtaggaggagaggagtagatgatcaacttgacacgatgatcgtgcagcctagaacccgcgctcaaattccagctcaaaaagatactgacgtgactcagatcagccaaaatgccgaacaggttagtccagctgtgcaggcacagctggacgaattaaagtatatgttccaaggcatggccggtcagaggaacaatgatctcgagttggaccgagcatgtggaacccctttctcccccgagatcctctttcccacctcaagtatttcgagatgnnnnnnnnnnnnagggggtacgaggagacgtatgttgtagaatttttcctgccaccctctcggaagctgcctagcaatggtacttcaagctggcacctggaaagttcatctcatggaaacctttctcctcggaattccatgcaaaattctcctcctctcaccaacttctgttgcgcctaggagacctggtcgaagtcaaacaaagaccaggtgagcctctccgagcatacattagcagattcatgacggaagcgactaaggtttcacaggtaactaaacacggaaagttatccgcgatactggggggcattgaagtccttggtaagctttggaaggacataaggaagaatggtccggtagactcaatgagcgattttctcgaccgtgctgaaggcttcatcaaacttgaagaggctactcagcgagcagaaggtgagcaaaaacctagtaagttaaaggctccttccactggaacgtccccccaactcccctattacccaagtaattcaagctcaaatggtaaacgttccagcaacaacaatagacaagggaatgggaagaagggaaagttcaccgacaaaaccgaacaagctcccc

SEQ ID NO: 64413 - DNA, 2102 bp, Cannabis sativa
tccctacgaatgcctattgctcactgagtagtggcatggttaccaagagtagtattgtttctttgtgtgtttgtagacaatagtaacagttcttgagctcttgaatgatttcttaattgaacttataaattcctttcgaaacaaagttcctagtagagaactccaatgggaactaagaatcgagttgtggctcttaatgaaagcacaaaaatattgatgttaaaaagtggtcaacactcgctcgctagattgtcaagatgaaataagagatgagtagagtaaatagagagacacataatttatagtagttaatttcccatgtagcaatggtaatagaactacgtatactttttatttctcacgagaattacaagagaattgactaatcctgaaagctctaaatttatagagagataaaatagagagagatgctctgaccttatgggtacttttctgaatgtgaaaaatgagttagaggaactctccttttataggcaaggaggttctattaaaataataataaaatattcaaaaaatgtgaaaaagtacattcgagctatgttcaacagttgatgatgatctgacactgaaattgactctagaggttggtcgtcatttttcagagcttgaattgcgtccctagcaccttttttttgggtaagttgttgttgaaattcttaactctcttgaggacgaaactttaacctaatatcttcagaattacaacatggatgtgagacacaaactgatagagcattgcgatagcttcaaaatgcaagttgaatcgtatcaatcagataaatattgaggaagttatggctgtttgactgaagcctgcttgatacaagtgcccaggttgacaacccagcccctaggttgacatatgacatcaatatggatgctgggtgagtaggaaaacgtgttggggatgtatttttcgatgcttaagtgatattttgacatcatttaatcaatttttttattctagtgaagtggttcatcagttctcagagatgttgctattttatggaattgagagattcaaaactatccacgatatgcgactaagtcactttgccaaaaaagtgaaattatgaagttatgagtttgacttgtctgagttcacatatctcctttactatgaaaaactagatgtgtgcttgagaaagaattaaaatcagatgagcagaatcgaacacattaggtcatacgtcaacttgcacgttgggtgcatcttttagagcttccgggttgtcattttgatactgccaaggccttcgaaattgaggtgaggtctcttaccccatttttgaccatgccagagagaattctcgaagcagtatttgtatttgagtaacagaaaccaacacaccaagttaattgtcaacctgggcattgggctaagtcttcagcccttccgaattctagtattctccccaattttacttgtatctttgttatttctgatgatggaaaaaatgctcgaaacacctttttaggaaaatgattgcaaacagtccaagttgacaaaatttcaacgtgagcgtggtccaatttctggccaccaaatggcatcgtttaattcctagaaacacttgtatcttaatttttgatgcaaacaaagaatatgatctaggcttcatctgaactgctgatggaagtgacttaggttggcaaaagtgtcaacttgggtgcttgccccaatagctaggtcaaccagcacattgggtccgtattttggcctccaagttgatctgtttctggcccgaaagcacttatttccttgttttggatgaaaacaaaaaaaatgctcgagatagtttctcaaaactaaaagtactccaaatatgattcttatgcctcaaatatgtttgtggcatgtctaattcatgtataagtataaagtttgacccatttgtactaataagaaggaccacccaaaaattgaaactctagttgtaatgccaacctgggtgctgggtgaaaaccctagacgcttgggatgacattcggggtgttgtttcgtgtatatgagcttccaagccttgtacttggattcttcatggtatagaagattgaaagataatgagttggaaacatat

SEQ ID NO: 64414 - DNA, 692 bp, Cannabis sativa
  modified_base (37)..(39): a, c, t, g, unknown or other
ttttagaattcatattagtatgttaatgaaacatacnnngtagtaaatcatgatcctggtaaaatatttccaacatcatggggctcatcgcaatttgaggacatttgggattgcaccctgaaaatttcattgaggcgatcatgaagatcgcccctatgaacatggtatctccctcctcacagtgtcttcacaaacccagacatggtataaacactaggagtgtgactatgagaagaagaacaggattcaacatcatttacctcattttacggctaagcttagcttcgaggatggcgccgcttggtatcctcctcttgttgcacctcgtggttagcttttcgtgcgacttgttccctatgtgtgggctggttcaaatcaagtcccttttgttcatttcgttgtcctctacgagtatgattgttagttcatcacttgttagttgttacctgagggttatctgaacgcgtgtttggtgcttgaggaggacatcgagtcctgacccttccgttgacttcggcctgcaaagcttgcatttgctcctgcagtgtcgtatattgggctgtgttcggttgaataattccttcagacaccacaactgatgtgataggcgggaagcatcccacagtggctgctagtgttgaagtttctcccacatgaccgatggttttaggaaacaagttgaggggggtcac

SEQ ID NO: 64415 - DNA, 733 bp, Cannabis sativa
tgtaagtagccatgtttaccaaagaaatcttcatctcacaaagaccttatgccttacaattacttgaagatcttggtcatctaggatgcaaacctgtcaccactcccacgaaaggcaatttgaagttgaatcaagctgaaaaggataaactgatagattccaagttgtatagaagaattgtcggtaagcttcagtatcttatcattactaggccagatattttctttactgtcaacaacctaagtcagtatttagctcttcctaagtcctatcatatgaaggctgaggtctttaatatattaagaaatgtcttggacagtaaagaaaatatctgtatttagctaagtcagtatttagctcttcctaaaccctaaacccttatcaaaacaaaatctaaggcacaaattgccattccaaatttcattcaactcattaaaactcagtaccaaaagagcattaaggtcataaggtttgataatgccaaagaatttcagtttgagaaatcgtttagttctctttggattgtgcaacaacgttcttgcattcatagacctgaacgaaattctgttgttgagaggaaacatcaacacttgctgaatattgctcgagcacttttgtttcaatcctatattcatttatcctattgggatgaatgtgtggctactgtttcatatttaatcaatataactcccacaccaaactaacaaaatgtttccccttttgagattctcaa

SEQ ID NO: 64416 - DNA, 669 bp, Cannabis sativa
ccaaatgttggataagcctcatgagtcggtttgtaaatccaggactccccatcaataccctgaacccgtgcctgttgcttgaaacattgggttgggctttgaaaagaatgtggcccaagttttggaggttgaagtgggccgggttgggaacaaggagaaaggagagtttttgtatgatggaaaggagttgaaagcccaagccatttctgggtcgagccataaaaaaagaaaagctcatgttcactttgttcctgttgatgatgtgggccaacccatccttgatggattagtgattacagtgaatggtggagaatcggtgccccctttaggatctccgactttcgttatcggcaaaggtgatgatgaagattgctcagggaagaagaaaaagaagaatagctcatcttcttcaaaaaagagaggaagacctagaaaatcatctcaggagaactatggcagtaagactaatggtagtgtccgaggggaacggggcaatgataatgtcgaatggaaaggtggcgaggtggttgtcgagcttgagttgcagaaggattttcagatgggcgaggaggcggcccttaccaagcccccccttccacaatgattttcctatcttggaattgccgaggtctagcacgggccgaggcggctcaagccataaaggcttgg

SEQ ID NO: 64417 - DNA, 1155 bp, Cannabis sativa
catttggaaagttggtgatggttcaactatttgcactattgaagttcattggcttccaaactgtcgagttaagtcatattcatctccccctccctctgattctactctttcttttttcctctccccatctggtgcttgggatcttattaagcttcatcagtttttttatgaccaacttgttgatcatattctcactgttcccatatctggtcatggttgtagtgatgatcttatttggggtaggaatccttctggtcttttcacggttaagtctgcgtatcatttagcagtcacctctagggatattccttcttcttcatcttttgatcagagtaagcgtttttggtcgaaaatttggtcttccttggtttcaaaagtttaacatctggtgtggcgtgtgttatctaattctgttccagttgcttcccttttattccttagacatattataccttctcctatttgtcccctttgtaacttgaaatgggaaactgtggagcatgctttcctggagtgtgtgaatgttaagaaagcttggaaacattctccatattttgacttttatcttactaataaaagattaagtatttatgattttattgctctagctgttgatctcttagacaaatatgattgtgctatatttttttgtttcatctggttactttggaattacagaaataatctttttcataataagaagttgctgccaccctggcatctttatgatcaggctgtgagttatttgttggagtatgagcatgctaatctacctggttttaaaccagataatatcaatctcagatgtaatgagcaggtttaattatcgcagcatgaaggatggaaagttaatacggatgcgggtgttagcagttctgataggaagcatagtttgggtgtggtggttacagatgaaaatgatgatgttaaggctggcctaattgtacctatggttggttcagttccaccggaggttgcggaggctaaagctattttggctgctatttcttgggtacaagccaccaagcttcctgttaatgtcttgcaaactgattgtaaacgcatagtagataaagtttataatgctaaatgtcataattctgttgttaatgatattgtcctttgtattaagaactcattgttgttcagtcctaa

SEQ ID NO: 64418 - DNA, 1488 bp, Cannabis sativa
tacgactgcaagaagattttttgttgtatcaccaccctgggaaagccaatattgtggcatatgctttaagtaggagaggtcccgggcaggttttcagcaccgtgatgatagctcctcaactagcttcaaaagttgttaatgctaaaattgagtttgtagttagaaagttacacaatctgacactccaaccagatttgttagaaagaatcagaaaaacagaattggaagatcctgagctagtaaaaattcgggatgaggttttggcctgtcgacctatctacgtgcaaatagttttaattcctaataacaaattttctaaattaatcttacaataaaaccttcaagaaaatggtcattttatttagaaattaatgaactccacgtggactcctaacaacatatatagttcaaagttcaacaactagtatttatctatactatgaaaaaaaaaataaccaataggtgactatacagcactcagttaggtctcttccgttttgaatttgaaatgtgatcttactctaaactaatttccactaaaatctccaattgtaccctttatccatttcagtaatcatttgagtaaactaacccccattcacttctacactacacatgcaagtccaactagacttttaaattttgaattttgatagccatctactctacacgccctttcttagttggaatagcccaactattctccatccattgctcaaaataaaaggccacatatatactatttcctacatgtgcaaaacgttactcaaatagctcattaatcaccacatgtataagaccatttctaacttgccccaaagtctatatggtactatacgaccactaccactactattacaattaatccaataataacataataattaaacctaatcatatttattcacttgttataaatactataatataaaatctttaatatatgcttatattcatctttgagctaaataattgctaatactcaaatctcttttatttgagaaaaataacacaagcatgtacttacttataaaaatactatttttctaacaacatattctatgaaattattatttttacattgagatatctagactaacgtaataaaaaataataactaaatattttaattattacatatctagatagttattttctaagttacttttggtatttttctagatatagttaattaaatagaaaattaatatttaagttgatttgttcaagacacataaatatttgatatttttattaagagatttaattaaatagaaaaattatatttatgttgaaaattaatttatttaattttagatcaacataaattaaagtaatttttttccaatttattttattttattttgataaattttaaaatgtattttagttggtaaatacattgaatttcaaattaattagagatatatatacggaacacttctcaatgggtattacccattgatgggtactaaataaatttaacta

SEQ ID NO: 64419 - DNA, 1497 bp, Cannabis sativa
ttaatgtatatatttgagtgagggctttagcctacatatgggctaaagtccctccgtccctaaatataatgttgtaatacttagaattggaaatgtatttttttatgaggaagaagtttatactaaaattgtaatttgaattcaataatactctttttctttttctgttttcatgacagtagttaaatatcaaataatagtaggaacggttatcagtactaaaaaaaaacattttatagttattaataaagattatctctttcttgataaaaaaaagtatgtattacaggttctcttaaaaaaaaatatatattacagactcaatattaattagggaagatgaaaaaaagaaaaaaataattgaaaaaagtaaaatacatatagaaaataaaaaaaaaatattgaaaaaaactactttttcctaccatgttctgctttgtccctctactgtcccactccgaatgtggccttccacactccaccctcactccgcgccaagctttttaaattggggttggtgagtcatcgacccaaaaactcttcttcctcttctttcttgctttttggttttgttttgttacaaaaatgatcatttatctcattaatgcattacaaactaatgtgtgaatcatttaaaaaaaaaaaaaacatgtgagaatattattgaacttcttcatgatgttcaatgccaacaataacatgtacatatacacaaattaaaatattactacacactccaacaaataaaacaatatacactcattagttttataacttaaaactaaaaataataataaattataattaatgtacaacttttttttttgttagaaaccctaaataaataagaaaaatacaaaaaatagaaaaaatgaaacaaagctcatagaagatgccatgtcacataccttaacaacacaattatataaatactagtaaacataaccgcgctttgcgcggttttgtaataaaataaatataatttcaaaatttttattgtgtaaaagttatcggtgatatcatttttattttgttaaatattaattttattaggttctttgttttacaaaataaatcatgatgacactttgagattgattttggtcaaatatttttaattacggtcctaaaactttctttcttagcctctctagctaactattgtgatccaaatttttatgtgaatatatttatactgtataccattttataaaatatattgaattaagttgtcattcaatagtggtcataggcatagaggaattcaagtttgaattcttctctctcaatgtgagaaaaattaaatttatcatttcacactataaaagggcatccacttttattagaatttaaaaagtgcatattaatcatatgacatcaaaagaaaatctatagggtccaaaagttaaaaagaaaataataaaagcatcacattatttttagccaagtaaaacaaatataatgtaaaagaattaataaattttttagtctaatctt

SEQ ID NO: 64420 - DNA, 534 bp, Cannabis sativa
gcattatcgaacacagaatttatgttattatagaatttatacatacggtttgaccaaaagggctttccttcaccctataagtcaaacgacatgtatcaaactgtgtttttatctaattaaatacattgttgcctctctatatcacacgacctataaaatactctgcggatggaactataagctttggggacatttgcaaattaaaaaatcacaattagcacataaactgtcgtaaaaatatcgacaaaccgtcgataaaccatcggtaattaaacaaattatcaaatacaaaaagccaaaataaaaaatcgttgataagcaatcgacgagctattgataccgaaatgataaaataattgtgacaaattagaaaccatcaatatgatacaatctggtgataacctatcaataaagaccaaaatgacaaaaaaaaaaaaaaaagatacaaagcatgaaccattgatattatattgacaaagtatcgagaacttatcaataactcccaaattaacagaacaatcttacagaaacata

SEQ ID NO: 64421 - DNA, 1642 bp, Cannabis sativa
gggggtttacccgcagaaatttgggttgtgggggtttaatgaaactaaaacgaaagtattgggagttttgccgtcatttaccctttatatattaactaacttttgacaacttattttgattagttacttttaaaattatatttttagtctaatattgtattatatgttatcagttacttcttcttttttattaagaaaaaaaatataaaagaaactataagattacttttaattccaaaacttttatttggtcaaaacatctataattccaacatgtcaaaataatataaataaaatgtaacattttagtttcttctatactttattaattgataagtaactaaattgtaaatttcacaaaaatttatatgaaacaagttgctaactttaaaatttataaaaacaaaaatacttttaagtgacccatgaaattgattgctaatttaagctatatttatgtttttttagcaattttttcatgttaattaatatttaagaaattaataaattataatcaaatgtaaaaagttaccaataatatgtatatatatatatgaaattttaccttttaactttattatcaaaactaaataatagttatttattattttaaaatataatttattttatgatgtttaagatacatttacatttcatttatttagtttttgtattacctttaaattataataaaaaatataatgagttaaataaaattcaagaaattacaaaataatttcttaacaaaattagtttaaacatttttttttaatataaatcattttatgatattatttaagataacatcttattttttttacttttttaaaaaacctataaaaattgttctataaaattatttagttagaattctataaaatttatcttttaagaaaaatgagaagccattaaaattgttttcaaataattaagtgaatgccatttcactaaaaggaacgaaaaagaaaagattgtcaaaaaaaaaaaaaaacagagagagtcaaacacatgataggttggcatcctctattttttatcttttttctttttttaaaaaacaaaaacaaatatctcggtatacgcgcctactaaattaaacagaattttagtacatgctcgctcgtattaaaatattgaagagtatttcagtaaatatttataaaatttagtgtctcaaaggtaattttctctagattttttagggtctatttacaaaagtagaaattacaggaaaaaaagtaggaaaatttacatatgaacactttaaaatataaatatttacaaatatataagataaattttattatacccatattttaatattaaatagtctaactaaccaattttataataactatctaccattaattacttttattagttgttacactatgaaatagtgtaggggcttattagtaatttgtaaagagtgtgaatcactataaatatgtaattgtgtagctattatgagatatggaatgagtaaatagaattttagttcaattggagtttggcactgacgcgaagagtgcatttcaggagatttgtcttgtctcgaagaggactattatctaacaattggtgctttcattgagagaaattacagtgaaagattcacttcactgcaagaactctcaaccat

SEQ ID NO: 64422 - DNA, 1845 bp, Cannabis sativa
aaagaaaaaacaacactaatgtataaaaataaatttacaagcaactaaaacacttgtataccaactcaataatacccataaaataactaaacacgtactcatttttctatttgttgaacaacttaataacaactaacaaacaactaaatgtggtgtcaggaatcaactgtaaaacaacaagaaaaaaactaaaagaaaacactcggataagctgaatattgaagaatctataattatttgtttatcaattgtttttatatttttatatcgttgttaaatagttgttaacagtttaaaaacatattaacaattattgtcttttttctaaaaaaaataaatataaatataccaacactttatgtagaaattaaaaatataataagagctgtttcccactgtaataaaagatataaacaaatcaaaaagaaattatgatgttcaatatcccatgaaagatacatgtgaaattaattagaaaaaattcacaaaaatataaaaagcaacgtttcttaaaaatatattgctcttgagtacaaccaaaaccaaacatatttctaaatcattataaatccatgcataatagcttcaaccttcacgaaagacttttaaatattttcttttacactttcaatgtatgtaactcacttcattataccaaaaaaatagaaataaacaacaagtctattctcatcaggttttttttttaagaactctataataaaaatcatataataactaaattaaaattaaaaaaaaaacaactaattataaacagaaaaagtgagagacataaaccatttaaaattgaactattcctcttactaaatacataaaaaaaaatatatatacacacaacaaaataagtctttgaaactaaacaaaaagagtaaaaactatacattaatcttttgagttgcaatctcaacatcattatctcgccttttgctcttaaaagcttttcaatggaagacttggtgaaacaacaacaacaaaataaattaaaagataaaacaactataaaataattcgggattaaaattaagctagatatgatttgtattacgttgtgaaaaaaatacttgaataaatattattaaaagaaatatacttttaaataatataatttctttcattattattatttgaataaaaataataataaaaaaaagactttttagattatttttttttggcaactaaataacaacaataacaacaacaaattacaaaaaaagaaaagttacttttatttttgaaagaaataatcaattggtcacattatctttatttatttttatttcatattgctatgaaaaataagtagttatttagttaatatcacatttgtttttttaatttgaaaagagagagatgaagagaagaaagagaaaatggaaaaaataaagagagaaagagagagagagagagagagttaacatgtaagagagactaagaaaaaaatagaaaaagatgccataaataataaaaatatttttgtaattaatttttttttataaaaataaaattgaaaaagagattttataaaaaagtttaaaaaactaaacataattaaaaatgtaaaaaaaaatatcaaatttgatatgtagggtaaaaatccctattttatatcgtcttgattagtgttgtttgatcatatttttttgtgagatttgtgcaactctttaaaagaggtcaaagacattaacggcttggctctaataccatgtaagaatttggggataagatgaatgcggtttgatctcaaaatcaattggcaatggaaggagtagctcattcattttatatattacaatttattttcatacattaacaatgtgggactaa

SEQ ID NO: 64423 - DNA, 1464 bp, Cannabis sativa
ccaccctccgccgctaatacccctattattagcggcggagagggcccgccgctaataactccgccgctattgggtttatttgttgtagtgtttgaaagcgttcaattttaaggcatggaaacaagatgtggaatttacttgaggcataatagatttagacttttgccttcgagaagaaaaatctgttgatcttactgataccaataatgttgctcaaaaactcttcaagcacaatgaagaaaatcaaattgtcttagtcgcaatgccatgaaaagttctattcttgaacatttatttagtggtttgccaaaccccacaaattctaatgagtttttcaaaactgtggaaaaattatataacattggtgaaaatgtcgaacttggatatcgtgtggatgaaaatgatgactgttaagaatgatgaatcaaaatgagtgcaagattatattttgaaaattgtgaatgttcagtccaagttgaatgatcataatatttctcttcttgagtcttccattatcatcatgctcttcatgcacttcctacctattttcaccttatcaagataacctacaacacttataattaaacatggagcatcaatgacctaatttcttagtctgtaaatgacgaaagcaagctgtaaatggagaagaataaatcttctcactatgtttctcaactaaacccaacaaatgataggaaacattataaaagaagcaagaacagccggaggttaagggatctaatgagtgtaggttgttctccttaatgagttgagtctagtggtgaagacgactcgccaaacagacaccagaggtggccgaaaaatccattcaaattttgaacctctaaactttgaattgcgattacgggctagcggcggcaaaagaggcggcgccgcttgggggttgaggtcgtcggtacctgggggttcagtccgacgcgtggagtcagatggtttagtttaggcttttctcctcgacgagctgagtctagtggtgaagacgactcgccaaacggacactggaggtggccaaaaaatccattcaaactttgaacctccaagctttgaattgcgattacgggctaacgacggcgaaagggacggcaccggttgggggttgaggtcatcggcacctgagggttcggtttggcacgtggagtcggatggtggccggagagtggtcgctatagaaagtggtagtgatggtggttatggcttctttgaagctttgaagagaaagaaagagaaagggaaagagaaagaaagaaagagagagagtgctgatgggaaaaaaagttatatattataaatatttatttatttatttattttattatattatatatttttttcttttttaactcgatcaaaaccgagttcttacaattattatcatcattatttatattaataattagataatagtaattttaagcaaatatgcattatatgttacaaata

SEQ ID NO: 64424 - DNA, 1002 bp, Cannabis sativa
aagctaagttggaggagcagtactgagttggagcttggcaaggattatacatatcgcggcagtgcaacctggagggttttggtctttcagcattttgagttacattttattgttgcctagttgtttgtaaaaaaacattatgtaaataattttaaactcaggttaagattagccatattggaaagttaatttgatcgctttataattatatataagctgtgatatttttggttgtaaaattagaacagtaattatttatgttcaaaagaatatataattggaggtttggttttgttagtttgtgtgtggtctttgttttattagtttgtatgattccctacgacgaaaattccaattcattttccaccacttactcttcataaaacgacaatccaacttcctccacaaaaaaaagtttgattatttcatccatattcttctttccatcttcaaatttatctcttttctttcattttgattactgcacttgacttgagtttcaactattcttctttctgttaaaaccaaaaaaaaaaaaaatgcagtgaagttgtgtagtagcattgtttgtttcagcaatatctaatctctatctataattaccaaagccaaaggtacgtactttacatatatgctcttatttctttttaacaagagaatattaattgtttaatattttccaattttgttacctcttgcttgcagatccatcattttccaaaaaaaataaaaaaataaaaaaaaaaaagaattcttagttttggatttggagtaagtggttgcttcctcgagattaattttatttaattaatttgttagtgttatttttatcaatgctggattattacttattagttgtcattactagctaattactaacttgtttccctttcaattatttgcatttcagcttttattcactcgtatatatatatactagtaaaaatctacgtagacacgtatattaaattttatgctagtttttttctatgttatttgaaa

SEQ ID NO: 64425 - DNA, 865 bp, Cannabis sativa
aagtgtgctacccctttggcaactaattttaaggaagatttgatagcataacacaaggatggtaggttcagaagcgtccagcataatggtgcatatttgtttaacgttggtagaggttctgagggtgaaagagctgatgatgtcaacttagttgagaaaacatgcacatgcgacatgttccaattgttaaaaatttcttgtgcccatgcatagtagcggaaattactcaaaatgtcagcgtgtatgctcttacctccccctattacacaaaagagacgtagaagaatacttacaatgcaacaattaatcttgtcggtgaggaagatgattgggtacttccagaacacatgcagaatatgaaagtcggggtaccagtggagaagaaacccgtaggtcgtcaaaggaagagcgatgcaggaagaatacggagtaaccgatatctatttaacaggcaaaaagttgtggaacatcaccgttgttcaatttgtggtggcttgggcgacaacgaagcttcatgcaaggcccgagtttgagcattattgtagtattttaatttcatgcattagtagtatggtttatgaactctattttgtaattttttactttctggacatgttttaacaatatttttgcgacatctatcgatgacattatcgatatagtaacaataagaattccgaattttgcaagttttgtttttaatcatcagaaaaatattgcacaatattttggcaacatatagcaacatgtagtgatgttattcacagcatataaacataactattttttgtgttctcaaagtcttttaagaacttagcgatttaacgtgacatatagcaataacattagcgatatattagcaaat

SEQ ID NO: 64426 - DNA, 1576 bp, Cannabis sativa
  modified_base (323)..(329): a, c, t, g, unknown or other
aaccgaataagagaggtaagatttcgaaaatgaatgcatagcaatcttaccataaaaaggaaaaattattttgtcacctaacttgccaaaaaaggactttacaggaagctccataatacacgtcatttcatgattaaaattcttttgttatttgtataattatatatttgttcggtaagtaatatattcgtctttcgtatataggcatcttattattttgttacactacaaaaaaactgctacttttagtgaaaacttttaagtcacaacataaattttttgtggctaaatgtgacttttagtcacaacaaaaaattacttgnnnnnnnaacatagtatttagttacaagttatcactaatttacttttagtcacaacaaatattgtgactaaaaacacatttagttacaacaaattgtaatttttgtgactaatatttttagtcacggaccttttagtcacaacacaataataatttttaattagtcacaacttttttatctttattcacaaattttgttgtgagtaaaagtgaaattttttgtagtgttattagtttaatagttatcatgtgttttgtttaagttgctaaggtagtatttgttggtataagaggttctttttttagtttccattagagttgggggaggagcttttgagattctttgcaactttcaatgatcggtaagatcttggtgcttgctttacgatattcggcagccatgggttgttcgttttctattatcaaggctgagttcaccggtgataacattacatgggacgtgattgatgtcgttaataactatgtttttgtcttttttattattttaatttattttaaatattttttgacttttttgtttcttctaattgctttaactttggtagtaaaattaggttttattatccttttgttttggtacttttattagcatttatattatggttacaactttatattaggtttttgcaatattttatttcttaattaatatttatttttgcaagttttttgtattgatttaggttctctaagcgagtttatatctttatattactttattttaatgtaaattttaattttgggctcttttcatttattgcattattttagtcaactttattttgtctattaatatttatttgttttaagatgtttataatcttttatttttatttattacggtttgatataacttaataattttttagtcaattatcttttaatagtattactttatttatattaatttaattcgtaattattataaatagttttttattataataaatatagtctgtgcgtatattttaggtgtgaagtttatgatgtaaaggtcaacttttacttttaattttaatttctaagggtgttaatattttctaagggtgtcaaatttagtttcaatatcgtatttggtatatttaagattttgagtattgataccgacatttcgaatttttatatattttcctattgaatcttattgagttttatccatagttttgttatataaatctgataaagtttatttaatattttttattatttgtatttatttatatatgtatatat

SEQ ID NO: 64427 - DNA, 554 bp, Cannabis sativa
aaaaaaaaaaaaaaaatttacactgtatattaaaattatcaatttatatatttttatattgttacaccgtataattaacttttatactgtttatgttttacatttttatagtatatatttattacaaattttttcaaaattttactatcatgagttgtcatttcgagtcttttttctttctatgttaaattcatattatctcataccagactcatttttcttttccatcacaattttatattttttttttataaaaattaatgataaaaatgataaattgtcttatctctaattacaattttttattaaaactaatgatatgaaagtgatgggttgtcttgtcacttgcgatgataattttttattaaaactaatgataaaagtgataagttatcttgtcacgtgtgacaatttattttttattaaaacaaatgatgaaattcttacaaaaatttcttgtacacgttttttttaaataaatgattcttttctcttctctctcaatacttctatttgtacgtagtaggtatcaaaaaaaaaagtgagtatgtgaa

SEQ ID NO: 64428 - DNA, 1357 bp, Cannabis sativa
  modified_base (1237)..(1239): a, c, t, g, unknown or other
caagtcaaatataattattatcctgtgctaaaacatgtttcgctaaactatgagcagcatgattagcatctcatctaacataacgaacacaagctaaagagaaattagataaattgaatcatatattttttaaaataataaaaaatagtattttaaacattttatgtatttttttgtgctaaatttttttttcaatatttaattatattaataatttcaatactattttatactaatttaaaaaaaatacaaaatctaattttttatttaacaaaacaaaaagttcattcgataacttttataaaatacaagatctaaaataatattatatattgggtaaatactattttagatcatgtgttttgtaaaagtttccaatttgactttctgttttgtcaaatgataaaatagaacctatattttccaaaataaaaaaaatgggacactgagttcaattttcgactattttattttttaatataaccaacttaatttaagacaatttctaacccgaacagatacagaaaatgtaacaaattttgtcatagcatctctataacaaattatttttattttgacaaaaaatcagttcatgatcaaatttgtacaattttaaaaaatatagagtctattttatcatttaacaaaataaaaagtctaattagtaacttttacaaaatacatggtataaaatagtatttacccttatatattatattattaattataagaataaattaaataaaagtttgttgggttgaatgaattaatatggagagtgtctactaccacaatatataccaaatctcttgagatggatatggtgcttggcgcaccggcggtggtctatcatttatggtcctgccgtaacgaagttgtatggaataattaaagaataacaaaaaagaaaattattcatatatagtttctataaaaatttaataaatacctgttgcgccctacaatgaagtaatgaacataagtgaaagttaattttaattagtacgttctatctggtatgaacaacattataattattatttttaatttatatatattaaaaaaaaatagtaatattttaagtgcctgcgtagtcccctatgtacataaatataatactatataatagagtcttgcatacaaaaattaattatttataagcaaaacattgataaatcatctctaattatatattgacgaaaaaaatattaaacattatcttatatatatatatatnnntatatatatatatgtgtgtgtaagaattaaaacaaatcaattttaatagcagttttcattatatggcacgataacaactatatataccaagttttagagagataatgatattttatta

SEQ ID NO: 64429 - DNA, 1106 bp, Cannabis sativa
atagttgaggggaaaagttgaggggaaatttttaagggaaatttttaacggaatttttaacggcgatttttaacggcgaaaaaaattcaggaaaaaattcaggaggcacgttcaggaggcacgatttaatacatgtcaaagttcaaaaggaaataattactaattagccattatagaatatcatctcataataatactaaacatcttggtgtctcataataattacattcgatcaaaaaataacattaaataagcactaaaactatgcattgcccaaataaacaaattaattaataataaactaaatacattactgcaaaaaaaaaaaatatatatatatatacattacatttaaagtttggtaagtataaaaatgagggaatatttcacaaatacacacaaatgataaaaaaattattaaaatacagttgtactgaattttaaatatttttataatttgtaaggtttatttacagaaaatataaaaaataatgttttatgtaattattccaatttttttttttttttgagttggaaaaattatctaattaattatgtgtaatattcggctgtgtggaaaaattatcaaattatgtgtaatattcggctgtgtgtggtacgtgtttatggtatatgtgaaaaaatgtttattttttttttaatattgagtaaaaataaaaatgtgaaaccaattaataattttttttcctaaaatttgtatttttttgaaagaatacctaaaattagttactgccaactttctagtagttaatcaaggagaccccaaaatagacgaaagagaattttaattttaattttaattaattttaaacacatccacttttttttttttttgctgaaaattaaacacatccacttgttttactataccaaagtaccattctttctctttctccaagccaattatttcactctcaatacccaaattggcgtgaagttatacaagcactaggcatgcagcgcttgtatatatttgtcagtttcttattaaaaagcttaaaattatagcatattcccttgctcaacttgtcaagtagaaaaactaaaaacaccattttttatgttttttgtgttttcaaatcatt

SEQ ID NO: 64430 - DNA, 1447 bp, Cannabis sativa
aggcccatcttttgtctaggctggccttattctcatggaaaggctttagtctagaccattttaggctaatcctactttggaaaagccgcgtggcccccccttctggaaacatgaacaatatttacccccaggtttttgggacttgagagtgacagaggcttgcaatcttctttctggattgccatggacacgtggacaatcttgaaaatgaagagacattttcaccttttatgtttccgaatgcggaaggttggaaacttttggattacatctaatgtcatgcacatgtcattagcctcttggtctgtgaacctcatgcgcattgggaaagaccgtgatgcttgggataccgtgatgatggctaattcatgttagcacaggtattgatgtgaatatcattatgaaaaatgcctcgattctaagaatcaaatgcaaactttcagctccccaattgttggatcatttctttacattcttagatgatatatgagtcgttgatcgcttaagccctcatattgccttccttcacttataaataggaggaagaaacacacttcactgttttgttcactttgtacgttgagtttaaatcgagagaaagcataaacctccagttcgtccctggtgaatgtccaatcccttcgacgatatcttaaatcttcttctttggattcgagcgagggagaatccagaagcagcaccgccaaatctgtctacaatttgttgaagttcattgaagctattgaacgttcaagcagggatcaacgaaatacttgcttgggcataccacttttaggccagacgttgtcgggccttaccacccctacacccttctccttcaagtaagtagcctctttcttttgaactgttgatttctctagttttaaaatgcatcttcatattttgagtaggagtgattgtttgcatgtggcgtatgaggcatactatttagtctttttaggagttgtcaagccaactttatgcgaatatagcttattatttggattaacatttggagattttacttgtaattttttttcttcattggtcgagttcaaattgcttttgaatagaatcagccttaaattcctttgtctggtgctcttagggctttgaataaaatttggactcggaccccgaaccggacccgaagtccgtctgggtccgagctaggatctggggtctgagtctggggtttgggtccaggtttgggtcagggtctaagtctggggttgggtttgaggtgggattgattcatgtcttagtatggtgtagaatattgatttttttagtgagaaaatcgaaaaataattttaaaaaatatgagtcgaacacaattaaatttttaagatgacaaaaaatattttctattatcacttctttcccatatatatatatatgtatatatatatatatatgatgagatcatcaatgctttgctcctaaa

SEQ ID NO: 64431 - DNA, 765 bp, Cannabis sativa
gtcgtttgcaacaaacgacacgtcgtttttcacaacgacgggtcgtttgggtcgtcttcttcagccaaactaggtcgttttgacctgtttttctgcaactcgggtctaaaggactcgacccaaactcgatctgaaatttcgtttccgacgaccaaaagactccaaatcaattctaaatgaaaaaaattaaggcatccatatagatttcatgcatcgaaaacccataaaataaagactttaaattcacacaaaattttcgggtctgaacggtgttttcaaatttttttttctttgttttcgaaaaaaggttttcatgcttagaacgattttcaatactatatgaatgtagtgatgcatataggaattgaaataaataccgaaaacgaaaaaaataaaatcagaacagacacggaccgaaaaactaaaaattttacgtgtttatatatatacgtatataatgtatatattgcataaaacattctaaatatatgaaatagagtattataatcattattatccaataaaacaataaaacgtatatataatgtataatatatatatcaacatatatacacatatatatatcgaaaaatatatatagtaacgtatataatatatatataaatgtataaacaaaatatatatataagaattctggaaacatatcaagtatatatataatatatatgatagaatgaatagttaaatgaaaatatatatatatataaaaatatatataaaccaaccgaatataaatatatatat

SEQ ID NO: 64432 - DNA, 988 bp, Cannabis sativa
tttgacactcttaagttggatgacttttagtatttttctcactattatttggttaatctgtctaggaggaatgacattatttttttttaaaaagaaaactttgtttctaactaacattgaagatgcagctagcaacctattgcaggaggattacaagactgctcaatcaacacccgcaagcacaagattggcaaccaataacaatgtagactcaacctcgagaaacacctttgcaacactcattacaagcagccttcctacactcccaggggaatataattaaacgtggatgctgccttagacaaccacgcgaaggaggtgcacaagtttaggggcgatagttacttattggaaaggaaacacaatagtagggcttctcctctcccatggcgggccatgcatcacctctttatgtcgaagtccatgccttgttctatgctctcagatggtgctccgcaatcaagataccaattgcactcatagagacagactgcctccaacttaccttgaagattaaacacagatggaaagatcgctcaacgacctcttgatttatttctaagatcatagactctttctcatcctttcctaatgtatcttttttatcatgttccaagaatctaaaatactttagttcacaatatagcaagagatgcattaagacaagatagagagttagtttggatagcttaactcccctttcactgttgtaattgtaatcttgttctcgtactctttgcctctaattacaattacttctaaaaaacagctaaaataacttataattattgcttatgaacagtgcttcaccacatttgggagctaaaaatattttaatagatatatacatacatctcattgttaacttttgcaattatataccagtatttataatattttattatttatttattgcaaatatattatttaaataatataaatgtgtgagttaaatagtaaaaatgagataatgtgaatgtgaatgtga

SEQ ID NO: 64433 - DNA, 1374 bp, Cannabis sativa
aattttttctttcttttcctatttaattaatttgaaaattatttattacaaaaaataagtaaatactatttttccaattcaaaaaagattttttccaacaacattatacaactctttatccctaggctcgacgatgtttcaaggtggctattcgggaaccatggacctataattctaagctccaataaactagattatttattgagtctcatcaactaaataatcatgtttattaatttcatgattactccactatataaatatggtactgaattcttagtaattagaaaattatatttagtaaattttactacagtgaccattgatataatcaattcttatgattagccctccttatatcggttcgtaattagttttggtcaagttattgttttacccttctaattacttagttatgctttagtaccattaattcactagtggaagtataatttatattccatctaaatttgcgcacaacttgttaattccaaaattaacatataaaaggaaccaacatttaatccgttaggaaagtaagaattccattattatagatcatgttcccgaccatccacattattagattcctaataaaatagaagtttaaagaatcatcttctttgagaaacttaaatgagtgaatcagagaaacttgtaacatgaacatgagttcatgattactcaagatttaggccgatctactattgatcactgttatgatatgaattaggtctttatcgtaaaggttaagtttgatgaagaaaattttattcatatcgatccctatcatatataataacttcacttagatgtcatgctacatcagtaatctgaatcaagattacttgcaccgaataacagacatcagtgaactttactagcaactattcattaaagattctcaaactttaatattttgttgaccgctttattcatggctaagtaattttaattctccgtacaactacaagtcacaacctcatatatgaataaagaattttctgatatttatataaaaattattgaatattaaatattaataacttaacatccaagcatgtatcaaaatgttcaactcttattaataatccaaaatatttttacatgcttttcaaggcataaaccctaacactaactagcccaatacactttacctcgtatcgctatattaagggagacgcatattgattatccctcttatcaaccacaaaacatgtagacaagggtagaataataaaacctagtgaagaccccctataggtaagtccccaacacttagctacatatcaagcataagcttcacttgccttgagcagtgagtccataatgggttcaataaaaatcaatatgtggcaaggtacaagcttgttc

SEQ ID NO: 64434 - DNA, 913 bp, Cannabis sativa
cataatataaatataaaccctaactatttactattagacttatcgggatattacaattttaatttccctatcaattttgtttttaacattatgaaatgcttgtctactgctactatctttttctctgttaatggacaagttgttggtaaggttatacataccatgggtttaagatagggagacgccctttccccttatttatttatcctttgctctgaagggctttctgccattcttcaaaatttccaaaatagggagctccttaaaggcattgccatcttaaggaatgcacctcacatttcccatcttctttttgtggatgatagtatatttttttgttcggctaactgaaactcttgtaatgccttaaacagtgttcttaatatttattcgaaagcttctggtcaagttgttaattttgatagatcatctattctcttttcccctaatacgcatgatagagtgcgtgccctgttttcccaaacttttcatttggataataagccttttattactaaatatctcggtctcccccaatgtctctctcgatctaaataacaatcttttgcttttcttaaggataaagtgttatatgttgtccactcatggcatcataaatagttctctaaggctggcaaagaaaccttaatcaaggttgtccttcaacatattccctcttatgcaatggcctgtttttgtctccctactaaaatttataaagaaattgagtttagattttggtgggggtcctctgctgatgacagatctgttcattggaaaaatcgttgggttatttgtcaatccaagttcatgggagggtgttgttgggaatattttacctaaatctagatttactaacaagtatgtaacatcctaaatatgatttctcttaaacaatgaaaataaacacata

SEQ ID NO: 64435 - DNA, 2777 bp, Cannabis sativa
ccaaaatagtatttacccttattaaaataataattttagtattttattgtagtggtaaatatttttaaaactcttaagagctccaaagtccaatcctttataactacataataaatatttctatagcaaatgtaaaagtaaaggttgtgaattgatctcttcacctctttacttaaaatcacactctttaccactacactaaatactattttagtgtatttcttattattttgtattttatttatttactaataatatatatttttcacaatttcaggcccctgagtgtgcgaggagttgaggtacatgcctaattcgtcttacctcagggctggccctgcccaatacctctcaaaatatagcttataatccttctatcatattctattcaattttattgtgaagcaagggaaacagaagatgataatttataaatgaatgtaaattatatatcttttactatttttactgtaataattaaaaaattaaaacaaaaaatataaagtattatagaaaaaataaaccttttattctattatttattaacgtaaaaagtaaatataaatgttcttgctaacagaatgagacatatcattgacaagatcatctccgaaacacaaagcgctttcattctcggaagattaatttctgataatgtcatggtcacctttgaagtgatgcgctatttgaaacggaagacaaaaagaaaaaaaaggatatatggcaatcaaacttgatatgagtatggccggttgaatgggattatcttcgtgccgttatgtcaagaatggggtttggtgatagatgggtcaatcttattttgcagtgtttatcttcggttaaatactctattgctcacggtggtcgaatcattgggccaatcactcctactagagggatttgtcaaggagaccaacattctacttatctcttcatcatttgtgatgagggattctcctctttaattcaacagtttgaatctaatggtattttacgtggtatccgtgttgctaatcttgctccctctattactcatatgctcttcgttgatgacagttacttgtcaagctactcatgaggttgcttcttatttgctccttctgctccactcttttgagaatgcttcaggtcagaaagtgaatgtttccaagtctaatatctttttcagtcctaatatggacactgttgtttgaggtaacatttgcaacacgcttggcatgatggaagcttctgaaggcagccactatctaggcctccctaacattatcggtcgtaacaagaatgctattcttggttttctcaagaataaagtcattaatcgcctgaatagttggcatgataagtttctctccagagccggcaaggaaattcttcttaagatagtaattcaatcgcttcctacttatgccatgagtgtttttctcattcctattggcatttgttaagagattgaaaagcttatggcccgattttggtggaaaactagttcaagtaaaggtaacagggtcatttggatgtcttgggatcgaatggccactcataaacatcttggaggtatgggatttcgacatttaagtgatttcaatcttgctatgcttgctaagcaaggttggcgcttgttatgtaatcccaatactctatctagccaggtttacaaagcaaggtatttttctcactctaattttctcaatgctgaacttggctccaatcctagttttgtttggcaaagtatttggagtgctcaaaagctaatcaagttaggagctcgtcgcacaattcggtctggtatgaatacccttcatcatccatggcttcctgataagaatcaaccttatgtcacaactcagacccccgacctcttaaaccagcaagtttcttctttgtttactactggtgcgactagctgggattatgatttggttcacgatatgttcaatcctagagatgccaacctcattctaggacttccactcagctctacaaatgaagatgactgctgctattggattggtgaatccaattgcagttttagtgttagcagtgcctatttgctgctgcagaaagaaaaagctcctcaacctgcaacaaataattttgggttctggaaagagctttggcaactaaagataccgcctgttgtggcgagccttgacaaattgtttacctacttgtctaaaccttgtcactaaacatgtaaacatatataatctctgcccgacgtgtctttcccaatcaaaaaacacttcccatgctcttactaattgcctcagctaggtgtactctgtcaaactccctttgccacctttgcttcatggctcgaataggttttttcttctgctgccaccgaagacatgtgcaaaatagcaatggtttgctaggcgttatggaaagctcgtaacaaaaaagttcggaaaaatcaaacttcctctttgaacgagattatggtatcagcatttacttctcttgatcattggagaaaagttcaagatattacttcactttcatctatattctttgataatataggtgatcaaaatgagctttgggttaaaacgagagatacaaaccattaagattaatgttgatgccgctgtatttgagcaagaaaattcctatgggtttgattttattgcctgtgatcatcatgcttccccactccacattcaagccatgtatcatggaggttattttccagttgaaacaatagaagcaatgggcatcaaggaagcactcagttggatcaaaacaaacaactggaaaggcgtcatgattgagag

SEQ ID NO: 64436 - DNA, 1417 bp, Cannabis sativa
aaaccaaacattgtaattaattacaattacgattcctattccattacattactattaccattaccattacatttctattacaccaaatcaaacatcacctaatgttgtatatttttcagttttatttttgttaacaggttgttttttaccggttcaaacagagtgtgtggctcttatgatggattcagatcaaattctttcattgatctttcgatgatcttagattattattatatgatttgataagtttgtatgttatctaaattttgtgttaaaatttcggataaggtgaatgacgttttattttaaaatcaattaccaagggaagaagtagctcattcctcttatatattttattaggaaaatttacacccattactgcctttttcatattttttttcatttgtactgtcgcacggagtttaacttttatactgttttttattgttaattatttttggcagtatactggctttggtaagttttatttatattggttttatggctttacaggtgtcatgctggggttgtgccacattttttttttttaaaaaaggaaatcatttaaaaagttttgatttgaccgttttctctacttttggcagcagttgtacttttccatttttttaatttttttttatttttttcgaatataaattttttttttataccccactcgccctcacactgttcatcttctccttcttttcgtttttcttttcagtttcgagtagtgggtggtttcatccatttcaaaaaatttcagttgtcatctcactttctcaaacttccctctcattttcccccccatttttcttatttttgtctataaataccttcatcctacattctaatggcagttactcgttcatctccttcttcggctaaagctagaaaacccacaaaacaatcacagaaaaccaaactcaaataaaaaatgggtaaaaaaaatctaaaagataacccacctagccccacttctcctattgctcataaaagaaaacctcctgttggaactttgaagaaccctcgagggaaaaggcctcgaactgttgtggaaaattcagacttagattttgagttggaatctgaatttgtgaggtcgcctgtctcggtgaaggtattttcttatttatcttctattgtttttgagttttttttaaattcgatttttgaagttcatatatctgggtaattgtttgggttttttctctgtttttgttatgttttttcatttcttgttttcttatatatatatatatatgtttttttgttgatattttattgttgttctttgtgtgttgtttcgttcaattttagagcaagggtaaatcccctgtcaaggttttgccatccacaggtgtggctgaggaaattactgccaataggattgttgaggtgtgtgatgttatgcatt

SEQ ID NO: 64437 - DNA, 847 bp, Cannabis sativa
aattgggggttagttgcaaaaacctccctactttacccaaaaaaaaaactattttgaagtgtaaaaataaaaaaatctctattttatttataacgtatggtttgcataataattattcataaaaggaaataatatgtacttacaaaaaaataataattataaaaaattaataaaaccctcaatacatatgattttaaaattcttgtctattatagaatttatgaagtattattattattataaaaaattcaatttatgaagtattgatttttttaaaaaaaattaaaagtcctattttaatattttatccaagacccccaaactgtttaaaccgatcctcacaagtgtatgtagtttgtattaagtcgctgtatatctcggtcactcttaatttctctattattttctaatattttttattttctaactttgaaaaagagatttctttgtgagaagaacttgtgttaagcttagctcttagcattatgttatggtgtgctctatatattatttttcttgtgattatttttgctggttgcttaaacttttggatgtgtctatcaagttttgggaaacgaattgtttgaattgtgagacattttttgaaaggaaaaaagtgcatatttgaagggatttcaagacagtaatgttttagaagattgattagaagattggattacaaagtctttatttatacaattcaatttttggttttataatcattcaatattcttttaataaattttattctcaagcatgaactcgtagtatttgtaaaaatactaataccacataaaaatttatttgttatttgttttatgttcattttatattctctatgataatc

SEQ ID NO: 64438 - DNA, 735 bp, Cannabis sativa
aacacagggtccaatctgtaacttttgcaaaacacagggtccaaaatagtaatttacccttttacgtgcataaaattatttttgatgagagatgtaaaagtggagctatatttaacacaaaaagtaattttgtgatattacattaacttttattattgcactctaatgcataattgtaaatcttgatacaaaatttaatgtatcatttaatgcttatttaataatttattaacaaaacataaaattataataataatgcaagggtaaatataaaatgtaataataaaataataaaaatattacaagtcatttaatgtaaaagagcatgttaattaaaatttaataataaaatgtttaaaatgacgtaatgataaatatataagcataatatttattttgatgcaaattttgcatcatagatcatctcaaattcaagataaaaaatttgtgctacataaaaaataaatttgtattatatttagcccattatttataattatactctaacataaagatgtaaaaaaatataattattattgaccatcatttaatattttattgaaaatatacaaacaacgttattttttttattttttattgcttaaatgatgagttctccaatgatgctctctatttatttatttttttaagggcttttttcataaatgtacaacaaaaacaaaataattacaaaaaatgtgcaaaaaaaaattatttgaaaaacttatacatttt

SEQ ID NO: 64439 - DNA, 1100 bp, Cannabis sativa
  modified_base (289)..(298): a, c, t, g, unknown or other
ataagtgtaagattggatttactattggaatatatagccgctttttcttttccattgtcgaaaactttcaaaaaaaaccattaatgaattaaaataatatgttgcattaggatacatgtacccaatcatgccccttcaaattgtaaggttgttaaaaatgatctttaaactattgagattattggatttaagaatttttctttttaattttagtaaaaaaagtctaacacggatgaaagtttcggtgatataatatagtacatatcaaagttcgagaggcatgatttgnnnnnnnnnnaagtctggggagcatgatttagttaataaacaattactgaaacagtaaaattgaatgaaattaaacaaaagtccttaaatctaaggtgcatttttaacgaccttaaaaattcaaggggcatgatttagtacatgtcaaaattcagaaggcaaaaatcctaattagtcaaataatattattcattggtaatatatatatatatatatatatatttatatatatacatatgatggttactttttgtataacacgagtatataattaattgataaaaattttatttttaaactcaaattaattatatgtttaaaataaattattatttttttatttaaagtgtttagtaattttttttttcaagtttttaaatattttttattttttatttataataaaataaataaaatcaagtaagtatcacgttataagtaatttattaattattttttaattaatcataatggtttgacaatgattcaattaaaagtaaatgtagccatcgtggttatatatttgtggcatgtttactattaagcaacaagaattaataataaaaataataattccctacattttatttatttaattaattaaattttaaaaaatgaagaacttgattaaataatggaaaaaagaaagggagaactttccctaccaatattttaaggaatgtcattaagggtaatgacttttatttatttttattttatttttaataataaatttataatgacaattttatcctttaaaacttgtcttataaaataaatactgtatactatagtttaactcaaaagggtaa

SEQ ID NO: 64440 - DNA, 796 bp, Cannabis sativa
tagcaaatattccataacctataagcaagcttcattttataataatattaacaccagaaatttttgtcattgtagtaattatttactggaatgattattgaacaagttatataattcagcatttataattgaaaaataatcaaactttactaattgattatgtctgcaaaaataatagtagacacacacttaacatgaacatcactttgaccgaaaaaataattttgaaaaaagaacaagagaatctaataagactatatagtaattaattatatatatactaaggtttgatttattaatcttcaattttatgtttttcattagggtaaagactatattaaacaacattcagttcgagttagattgtcaaggattaattgattcgaactctaattcgtccatgattaatctagatatatatttcttttgggtttaattctaaataatattagagctttattatgtgataattttaacgctctaagtttaattttttgcatgtagtaattgattctcttgctaattaattagatttctttgcaagctagctatggtaacttatccagaacattattttggcagatgccatcattacatatatatattatttcctaaaactttgtaataatatatattaatatatcaaaaaaaaaaacaattaagccctgtaactttaaattagaatataaaattaaacgatcacaaatatatgtattgtaatatctatacttaccacaaataataattacaaattaacagaagtgtcatgtactaattcaggtgctgtaaaaataaa

SEQ ID NO: 64441 - DNA, 2277 bp, Cannabis sativa
cataaaatttcatgcatcatttttaaccaacacaaataatagtgccaagtgaaaaacctattcgtgtcagttatataatgatgcatatagatttgtgtcaaactataactagtgcgaatatactttctttcgtcggttacagtttgacgtagatgtgtaagttagtaaaaattataattttctctaatttttttttttttgaaccgatttttctctacaattttctccacctgcatttgtagatttcaaaattatttttgtttactgagatttcggaaactaaaatatttaagcgctaaaaaaataataaatgacagaaattaagagaaaaagattttttacgtggttcaggtgttataaaccttaatccacaagtcaatctattagcctcggtgggcaatattgatgaatttactatattatgcaggaaatcctaactctttttccttaatttctttactaaaaagaagaagaagatcaataatgattttagtagaattttcgctgtgttttaggcctgaccccttcgcataaaaatgaaggggagctatttataggctaaatgatggatgtgggttgcctcaagacccgcctaggatctctacttaagttctactattggggtaaattacatacaatgtagtgctgaatggtcggtccagtgggtaacattatgcccgtgcgtgatgcagctggataatggagactattttgtaccattcagacacatgtcacgcaaaggtgtaatctttagaagctatggacacctgtcactcaaagcttgctcctttatgggcagaagtctacattgttcgcctggtaaaaagatggtggcgatgcacgcgctaccatgcttgatcgtggggggcaagatcagattctgtcaagaaaagtgtaaccgtcaaatggtgacttggcacatggcaaaagtcaatatccacgaccacccatgagagtcgatatccacgtcaggtccttctagggtgtatttgggagcctctcaaaacgagcctccttactaggccctatcgggttcaggtgggacattttttatcttgctctttgagaaacagaggctgccgcaagtaagcttctgcgtatctttttgctccagatggctctaggctcgagtagactctttagcgattgtgcaccctttaaaggactctaactcacgaaggatcaattgaaccttttccatttaatgaacatgccatgttttgcataaaacacgaataacatttacccccaagctttcgagatgcaatgcgatttgagagtttgcagcccttctcaactttttgagataaacccatggcacgtggggctatttgagatcgtctcatgttctaagagtaatcgtcaattaatgagtcactggtcgtagatattattagcgtggcacatgggcaatatcttaaatttgattactggcgtcatgcgcgtgtgggagcatgtttcttaagagaagttatagtgacgctgggtgattgaaatgactctttacttaatgagcgcattactcgaggcatgcaatgatgaacgttaagtgttagggttgtgcattaaatgctaactcttcaactccctagtcgttggattggaggacactctttaattgaaataattggggtcgttctgttcaaaggataaggacttcaaccggtgtataagtgaattttaaaagtttattcatcttcaaccttcgtaagtctttctatcttcttcgaacttaaagctcaaaagtctcaactcactttacattctgtccaacaaaaacttaggttgttgaattcatcatgattgggcattagggcaagccttgcgcacttgggtctagcgtaccgcatccttctttaacttgttttattatttggtaagtaactcaatgctctactaacttttgcacaatttcgtgtctgagatagaaatgctaagttcaagctgggtttgattcttattgcatgtcgaacttatagaacacttgttcaaagaaacacattattaggatcgaactgtgtgtgtatctatgtgctttgatcatgtcggcctcattcagatgggttgagtacggtcgtgctgcatttttgaataggcttgcatggctttagaaatggggctagacaaccactatatcggccaattcccttcatttttcagacaatggtgtgtcaaaagtggatccttccgggagggaaacctgatccttccgtgtgcacttgtttaagagtttgttgttgcatgtcaagtaatcttcccgtgttgattgtgctcaca

SEQ ID NO: 64442 - DNA, 992 bp, Cannabis sativa
ggatggcgctgagttgactttccaaatctttaattaagttatcaactttaccaaactgggatctactccaatgcaagagagcaactctagttgcaccaatcttcttgaaaactctagcgggagcccaaggataacacaccgatttccagacgctatcaaccaccagcttgctcctctcatccagggtccagctatcttcaaacttgaaacttcttttgaatttttcctccatgccatcagtaaaaagacatagcggcctatggtcagaattgtaggtttgagaggagcacaaaacagcctcagggaacaaattataattattattcaattttatattttcttttatattattattattttatattttttaaataaattattaagtaaatattaaataatgtattaaattttatattaaaatttataattatataataaagtacaattataaaaattaatataaactttcactacctaatagcaatgttgttaaatgatttgtggacatgcgtaattaaagcatggctaattctagaaaggcaaaacagatacacatacaaagaaaggaaactgaaagttggcagtgtacaattattgtattgtccattcaagagatatgatgaaaataagtagctattatatgcacccgacacgtcaatgcgttttcagcattattgtaaagttataatagcaaactctagtagaaggggcagggctcacactacacatcttgggaaagcaacggttgccctgtcccatatgataattacctattggtattaatatgattcagaatggtaaaagaggacacagttttgaacatatcataataatcagtcggtagcttatgatgtacatgatcttttctctttcctttcttacattgtgagcattttaaaatatgaggagtgctactctctcccattttaaatgttgtttaaaaaaattttatttatgttttaaaaaataaaattttactactacaaaaaaga

SEQ ID NO: 64443 - DNA, 909 bp, Cannabis sativa
gtgggacctcttgtcactcaaagtgttttactaattctgaatgaaggtcagtcaatggataccataaactcagctctcattactctcatcccaaaaattgatcaaccaaagcttgttagtgactttcggcccattagcttgtgcactgttttatacaagttggtgtctaaggttatagcagccagatttaaagaagttcttccccatgtaatctctcaaaatcaaagcgcctttttgcctaatcgtcttattgcagacaatgttctccttgcctttgaattggttcattgccttaaaaataagaagagaggcagaatggggtatgcagcccttaaacttgatatgagtaaagcttttgacagagtcgaatggcactttttatcggaagtaatgttaaagatgggttttcatagcaactgggtgcatctggtcatgaattgtgttacttctgcaacactctcttttaatcttaatggagcggttaagggatctgtttctcccaaaagaggcttacgccaaggagatcctttgtcaccatacttgtttctgatttgttctgaaggattatcggctctactaaaacatgaggaagctatgggtcatctaaagggtttaacagttgcgagaagtgctccagatcatcttctttttgcggatgatagcttacttttttgtcaagctacagaagattcttgccaagctattaaccgagttcttgactattatcatagagcatctgggcagcttttgaatactgagaaaactgtgatgtccttctccccaaatgcttctcacggaattcaacagcgtttccatagtgttcttcgtatgcctatttgttcccttcatgagaaatatttaggccttccttcttatgcgggtaaggataaaaaggaactttttagtggt

SEQ ID NO: 64444 - DNA, 1001 bp, Cannabis sativa
aaaaataggtttatccatcctcatcaattttaatgtagtattctccatctatatttgatctcactatcttaatatgcaaattgcactatttctctacttaagatttttttttgacgcagacatccacaaacagcataggaacctccttgaatctagatagctcattgtctaactgaaagacatcctttgtcaaaccatgaactgctatagtcagcgagcaacataggacaaaactgcctcggaaatttacacaataaagttataaaatcctcaaatagcacacccaaagagctagagctttagtttgtattactgaatactacatgccaacttaataacatatcaagattggtccccaaaatatctacaaaataaaataaaataaaaaaatgaattaatcccctagcgatgatattaaaaccttaaaagaaattctctatagtttacaactctaaaacaaattatatttaaaataaacttattgacaaaatctctgtaacaattggccctcctcaaaactaacctacagattaacaataaataaaactctattatcacacaattaaatgaaaaataattaatgtgaataaatatggtaaaacaatctatagtgtaatgtaagacttgaaacacttatttgtcggatctgaaaagtcgtttgtagaaggcaagagtacaaaataaaacacttcttgtactcattgaacataccacaaatgtaccttaaaaaattaagggtgatccctaaaaatggcacaaaagccataaaagacatggaaaccataaaaaaaatggtgcaaaaaccaacatagtaatcaaaacctaaagttaattttagtacgctataaaattaaaacttaaagaacgtattcaaaaaacttcttatcatgcattatctctacttaagatttaaatgtctttaaaacattcaaatctttacttttgtagagatataatttatgtgagtaataattaatatatgagatgaatatcttaaaaaa

SEQ ID NO: 64445 - DNA, 910 bp, Cannabis sativa
ccctgataatgcctctgcttccgatattcaaacccctaacccaacccctgctcctgcaactaataccccatcaccagggaaccctttttctaattctctttcggcttccctcaccattaaacttgacagaaccaatttccttgcttggaaatctcaggtggttcccaccgtaataggccatgaacttgacgacattctctttgctggtattccaccaccacagaacttggttacaggagcacccaacccagcttacccgcaatggaaacgccatgatcaactcctcatgtcctggcttcgatcctccatgactgaaggagttcttggatctgttacccaattcaccagctcatattctgtttggagatctttggaagaacgattttccagtcagtctcgagctcgtttgttgcaactcaaaggtcagttttctaacattcgtaaaggttctttgtcaatctctgactatgttgataaagtgcagaccatcactgattctcttggcattgttggttcatctgttgatgaacaagatgtccttttacaacttcttaatggtctcggacttgattatgactcgattgtttctgggattacttcaagaagtgaccaattatgtctcgaggaggttcaagctctacttcttgctcacgaaagtcgacttgaacaccatcattctatttctgatcttaccatcaaaatgcaagctaatcttgcgtataacaattcgagatctggttctggttcttcacgtccttatcaaccacctggtcgtggttctattaatgatccctcaaatcgtatgcaaggcagaggtcgtggttctttccctccctctcgcctcatctgtcaagtttgtctcaaatctgggcatacggcacctgtgtgccactacagattcgacaagaat

SEQ ID NO: 64446 - DNA, 739 bp, Cannabis sativa
tcttattatgtgattgagtgacggcgattacactgcaaattacttgttaagatcaactgatgaagatgacaaagctattctattttcggattgtttagtctgaagtttgaacttttcatatttttcttcgttctctgttttgtaggtacacatggatgttaaaggaatggcacaaaaacgtaaaactacagaagaactgcggaaaaaaaggaaagatgagaagaaacgtaagctctttattttgagtttcgtaatcgtttaatgtttagctatccttgctttctttttcgatattcaacagagaaactgatgcattttatttcgatgtttttttcgcttcaggtttgagagatcaaaggagaaaacagaagaagaagatgaaagggttgtaataaggtgaagtgttttgaaacataaaatagagtgagagagattcatcaaaatggtatttccaagcaaatatataatcacatcaaatcactggaaattttgcaaccattttgtatattattaaaattataaattttgatgctttaatttggtatttattcatttttactttaatttagtggaaaccatagatgtttgttgtataatttattttctcctttttcattgaagttcgataaataatttcaatataaagttctgttttttattggataaatacccgttttagttttgaaaattcagtttctttattttttgccaaatttactaaataaaacattctttcccc

SEQ ID NO: 64447 - DNA, 1230 bp, Cannabis sativa
tggtggtcgtgatttcaggagggatagttcttacaataggggtcaagattactatggtggaggtaatagtggtggtggtggtggtggtggcggatatggagctggcggtggttatggtggtggtggaggttatggaggtccaggagtgagcagtgcttgggattagtctcctgcaacagggtttctctaattttgtctcggagaatatatattttttcttctttaaaattcaatggaaatttctttttcttttttcttttcctagctgtttattgttgtgatcttcttgattctgatgtggggaatgctatatccaatttgtgggaaggaccatagtttttggctgaagggaaggccttgcctgtaaccagagatgtcatagtagggccaggttgatggtgaagaactactaacaattttggttacgggatagtttttgcctgttttgtccttatgaacacaaaaaagtacatgtctgggagagaccgataaatatcttattacttactaacccgggcaacttagtagaaaagctcagttagagttaggtacaatacattctacatatttagtctgtagatgaggctgacgctttttttttttcttataaatttcttatagttttcccaatcccaaaccctcccctcaaagcataaatttaatgtattctgttttgtcctggataatgtaacaactcaagttaaattgaaaacgtccttttctccttttctgtttattatattattattctttcagattcatctgttatggttcaaaatgggcattttatgtttgtacaatttacttcacaaaatcttccaattagtttatgacacgttgtttgatactaataattggaacttgtcttcgtcttttgttttctcaaacatttacatgtcaaacatgatctagtcgaaatagtatttgcaggtaatgttttgtttatgatacttcgtttacctgctagatcattattggggtcgggcttgtattgtgtttatatttgtgtagattcacatgtctaattggtcaaacctaatccaacttgtacgtatcaatatatatatatatatatatatatataaactagcaaaaaaactacgtatactaaattttatcttagttttttttaacgttatttgaaagtgatacaattaaaaattaaaaaaaatattattagttattaggtgagataattattatgtgtatctaaatattataatttataat

SEQ ID NO: 64448 - DNA, 1244 bp, Cannabis sativa
ctcacatcctaaataactacctataaataaaaacatatcatcaaatcattcataaatataattaatataagtagcttttcatttttataactcacaccctaaatagttctctacaaataataataacaatatcttttatgtatttcatataattttcttttaacaatattatttttcttcatattcatcgttctctattatatatacattatagattaacatagcttttaaagaaaaaaatagaatagaataggctctaagattttggatgctttgatcatttacttgatattgtttgtctcatatgctcaaaagtggtaattaaagatcattcaaagacgattgtggaaataaaatagtgagttcatagatgattaatatatatatttataaatacgtattatcaattaaacatactaatgaaaataaaattatttttatttgtattatgtatgtatatatatagtagtgtaatatttaatagtttctcatttttcttttttcataatatttgtataacatcatggtcttatactacatactttttttctcactatatattgacatgattcattaatatttagagaatattatccaactctcaatggtataaatgatgtaaaataatgataataatacctaaagaatggaggaaacatcaaccaaaacatacaaaatattatttttattatttatttaaaatataatttgtggaaataaatactaagagttttatatttatagtaaataaaattttttgacactttttattgattttgtgatcatgatactcatcttaattgtaagaaaattaattaaaacaataataattcttctccaaaaggattattaaaagaaaaaataatcctctcaagagtgaaaaaataatgataatatattaaagaggtatgatggtactttattttccgaacatcttatttttcttaatttatgataatttcaatttttaattttatatatattaatatatatctatatttctattttttatatgactataaatttatataatcctaatgtgaggaactatatgagtctctttctattttcttttgtttttttaaatttttttctattatttaattttttttgttaatttttgttattatttagtaataaggtaacttttaaaataaaactccaactataataatatagcatttaataatttgttacccatttactttagtatatttaataatatgttaactattcactttctt

SEQ ID NO: 64449 - DNA, 2126 bp, Cannabis sativa
  modified_base (2062)..(2091): a, c, t, g, unknown or other
ttagcaataggtgccgattgcaggatcggctccctactgtttgcagcgattggtcattttcctttgtctttgatatttgcgccagacactggtggtcttctctctggcaaaggagtcctgccagcttcttctctgaaatattcaagttgatttttagtattgaaacaactgaacaccactaatttcgccttcatccacggcccataagctggaaccgctgccccacaggtggatatgcaaatgttgttgaacgaaaacaggctcttttatcatgtttgaggtagccactattgtaacacaacttagggagcttgaaatacctaaattgtatccattccttttttcccctcttaatatctagaaagaagcccgaagagagttgatgtatggtatcaatctctacttgaaacttaagaaaacctctttggatattcgtctttgtatcagcttgatcattccgaataaatctcccagcttttgttgccaccgtatgagagttaactccattaagataaggagttggtagtccaaaagtcaggacccacaacatcgcctttctcatatctgcattgtaccaatctccatccttaggccactcccgtatgattaatagttttccattgatgatccaaggtctgttgcggagaacttgagcacagtcttcaggcttatcgaagaaaataccccaaactcctggcttcattgtcttgaacttccagagccccttgagtttccaaatctgactgagaatggcttttagcctagatttagagacccccttgccatcaagaaagctgactagaacccctgtactaacaatctcggcagtatgttcaaaatcaggttctaagtccagagtcatggattcaagaaagttgtttcgtaatacttcgagatcctcttttgggtcaacatccgaatctttatgttgggaatccacttctccctccccatttactgcatcatttgtttccttcctgttgtcaagagggtgaggtggttgagaataattactattcgtattaatttcaggagcccctgtaccagaataagtttccatattcctttgttcacgtgaatcctccactttgtcccccataactaccacaccaaaaactaatgatcagtagcctttagagaaagccaagttgaccaaagaaaattttaaaaaggagaaatttcttaaccagagacaccactaaaaacttgtctagagaaagtttaaagaagagacattccgtcaagttggataaccaacactctcaggtgagagaaaagaaaaggactcaatattctcttatagtcttataattaactactgattgtataaatttgttattattgttatttttattatggtagacaattgcatatgcttctgaagtttatactaacacacacaaaagagtgatggggttgttacggactttactactttaaaatattatctaatataaaaagaaatttataatgtacagtaaatatactgatgtatctttatttattttaatatttaaaataatttttaagttaaatttttttatatagtcatgtatattataattatttaatatatcttataaaattttgaaaaattttgaaaaatttaacttgttgaaaataggggttcaaattgtgtgttgcacgcgtgactattttattttatacacacgtgaaataaattatttgaacactactttctatattgtaaattattctgaatttgtgaaaattttatgagatatatttcttaaataattataacgtatatgaatatgaaaaaaaataaattgaaaaattcttctagatattaaaatagatagagagtgcatcagtacatctattttaaaaaggtgtattgtaaaaatatcctctaatatatattaacatttttatttatggtgttttttttttttttttgattaataatggcaatgaaatttgaaaatagttcagttttcatataacaatcaattaccatatgaatattttcatatatatgtctattaactgatttttctcaatatattaattagcttttaaaaagggaaacttacaaaannnnnnnnnnnnnnnnnnnnnnnnnnnnnnatactgtcacacggaaaagttttcaaaaatactgt

SEQ ID NO: 64450 - DNA, 1146 bp, Cannabis sativa
  modified_base (96)..(96): a, c, t, g, unknown or other
  modified_base (237)..(240): a, c, t, g, unknown or other
tattatttaaagaataaaataataaataaataataattatctaaattatatgtcaaagtatcttaaattaagtctttttcaaatttctacaaaaanatctaggttatttaaatatttaaacattatttgtaaatttttaataagtaaaatgatataaaatatagtttttctaacttataatttataaaaaataaaatatttcacaaaataaccaatttatgaatttgaaaatattannnntagaatatctataaaaatatctaagttaattttaaatttataattatttaatatatcctataagataattttaatataatatttcaaattaaaaaaataatactatcttttaatttgaaatatactaaatattaaaatatctatccttataaataaataatatataaatgttcacaaattaacaaattttttaaaattgaccataattaaaaaaaaaataaattatcaatttttaaatttaaacctcaaaatatgaattttaaaaatttgatatttaagtttaaatgttaaattaatattttatttgatatttatggttttgaagagaaaattcgaattgggtgaaaaaatcacccaaaaatcatttttttgggtcaaaaatcactggctacccaggtaggctgctggcagcgtgatgcgcacctgcacgaggaagattgcaacctccctgaccgagttttctcggcgtgtgcagcatgtccgcacacgggacctgtgtgtgatcgtgtgtgagttcagacaaggtgatgtctgaggcacgtacgcgtgcacgagcaccttgtccaagtgactggtgcgtgcgatgcgagcctttcgacaccaccttgacaaaaaacttcaaatcaacataacatttccaatttttatcggaatcgagctctgtaaaaactaaaattacttaatttttcacaaggaatccaaataaattattttcatggaaaaattttgtaattaacaatcaatcatcaaaacacacataaaccaatatgaacacatccaaatcaacacaattgacaatttcatcattctaaatccatatttcatgaaagtaaatcattaccatggctctgaagcaagttgttgggattattttacaaggatttagatttacttacaagtatgttg

SEQ ID NO: 64451 - DNA, 576 bp, Cannabis sativa
caaggggaagttgtgatggctaagtcgagtagttttgttggtatatgcgctctaaattttgcagaagcaattggtataaaggaagtactaaactgaattaaaactcaactatggtagaaagtggagctagagtcagattacttggtagcagtccacgctattcgaaactcattacctatgctttcttcttttggtgttattagagaaaattgtcataaacttcttgcatctttaaacaatgtttctttattttttattaaactatttgtcaacatggttgcttatagtcttgctagagcatcttgttttttctgagatcgagtgtttagtttaatacgagtgatgttcctgttgagatacaaccttatcttttgattgatttgacaaattaataaaaattttatagtgtatatatttaaaaaaaaaataaaataaggggaccaatattaaattaagattaagattatactaactattttaaattaatatctaaaattgacaaacaaatgagcttgtgatctaaaataaaattgtttatggcgccaaatcagtaagttatgaatgaataacagctaa

SEQ ID NO: 64452 - DNA, 1423 bp, Cannabis sativa
gatgagtaagaacgttccatactagggcacaaccactataccacacacactacgtaactgtacgagtgttggtagggtatgtttcgtaccctgagtgccattgagtgatataccacacacaacctgtactttcctgtaatcgtacaagtattggtagtgtaactaacatataagcatgcatatacatttaatatatagatacactcgcatattcatattacacattatacacaattcttaccttctttctagattcaagtgagtcgaccgacttgaacggaaagtctcgtgctggatggatgccgtaatcacatattaaaactgggtaaatcacatgtccaacaccctaatccgggaacccaaacctacaactcaaggttctattataatcactagggactacactatcccaggaaacagggaaacacccaatcaaggcactgaaatggaccagaatttagaaaatgggttgttcggggaacatgtcaaaaccggttaaccgattttacaggtactggtaaatcccagaaaaactcactgaatcgaaacatgccattaaagacctaaacttgagtttcaaatttcaaacttgtgtgattccaacacaaaatagtaaaaccagctaccagaacctagaataaactcaaattgaacataaaaactgaaccaaaacctaatcaaaccctaatagccactattttctaaaatcactagtagaaacaaattaaaaccttgagaaaaacatagctaaagagtgtctatggtttaccttgattaaaacctcctctaattcctactgaaaacacaaaaatcaacaacaaccttcttggttcctagctggttcaaagagagagaagggaagagagtgttctttgagtattttctattttttgttttttcctttgctttttgctaattgaatgaaggttagtaaaattaatcctttgctgaaattagaataactaagtgtcactcccttggcagccacgacatcttttctcttggtaatttactaaaatgcccctaaacttataacttaggcattttcaagacaaggggtaaaatgatcaaatttcatagccccgctcaacccggtactctatttcctccaacatatataccactaagaaataaggttctatacctacccatgtgaccaaactaaccatccattgcattttccgttgtcgccgatcaaaaattgtaaaaataacataattcacatataacacaactcatacacctagagtttaataaaatctctgaaattgagaaattagaactctaatgcccatctctagcaatgggacccagaaataatttaaattcgcaaataatataaaaatatcagtaattagtgctaattacctttactaatccatattatgaaaagcggtcattacaattaccccccgttaaaagg

SEQ ID NO: 64453 - DNA, 948 bp, Cannabis sativa
aattaatatgtattgtttgttcataaaaatatgaaactctagctcatcatcaaatttaaacttgtcgtccaattgagtttaatttcattttaactttgatgtattatatacaactcccattgttattattagacctatataactatatatagattgattacgtattttaattaatttcttattagatttcttcattttttattaatgagttttaatagcaaattagatttctacttatttgtaattattaattaattaagatagaccgaaattttatattgttgtctgaaaaaaaaaaatctcaccatgcctcccatctattgaacatttaaactttaaatctctctaaaccttaaactctaaacctagatagtaataactttgactcatcacattaaccacatttgacatcattatataatttaggtttttctttttattgtatctttcaaccaatattagtacgtacgtacgcaagttcctactataacaaattgagcagagctctgatcacttgctttggtgtttttgaaaagataaataaaatatccattcaaatatgaaaatatttaataattaattaataagatataaaatttagacaactgacaaaaatcaattcataattaaattatcgctaacgatatttaagaaatatttaatcaatcaaaacataatatttgctgtgaataaaagaacaattgaaattaacataataatatagcaattgatgatagggtagagccttggactagatcaagtaagaatcaaagctaatgtggatattgaaattttttattatggtaatattgtcatatatagttctatagttgtgtggcccaaaagatcatcatgatactttcattgaagctattttcaagtgtagtgggcaattggatctagctaaggtttttagaatcaaagaagcgttaagttagatcgtgagtg

SEQ ID NO: 64454 - DNA, 2347 bp, Cannabis sativa
gatacgagccaagtccataaaagtaatgggccgacccaaggaagtactgaagataaaagcccaatatctagggcttgtataagtacggagattctccaatctcagggctagggttttggaagagcaactaactcgggaacaacaaagcttgaagaaggaactcttctccgccaccagccatgggtcgtatgcacagtcgcgggtatcatatctataccaacccaatttattcatatgattttatctgcgtaattgaattagcatgtaattttttgcgtttttgattctggtttcagtaagggtatttctgcctcggctcttccatacaagagaagttcaccaagttggctcaagatctcctcccaagatgtatgtttttgattgcttattttgttaattgtaaccttaaatgtttttaatttccctcattaatttatttgactgtaatgtatgttgttaggttgaggataacatttgcaagtttgcaaagaagggtcttacaccatctcagatcggtgtgattcttcgtgattctcacggtattgctcaggttaagagtgttactggaagcaagattttgcgtgttcttaaggcccacggtaatcaataaagtagataactttagatacttttagaacctttgctttcagtcattgaataacttcagggtttgcttaactttagataatggatttttttttctgattttctgtttgtttaattttggtaactgggattgtagtgttattaaggttgttgttgttttcttatatgaatatcattatttggttaatgattgattatgggctttgtagcctttgttttctttgttttaatgaatttggttttgttggttaggtcttgcccctgaaattcctgaggatctgtatcatcttattaagaaggcagtttctattaggaagcatcttgagaggaacaggaaggacaaggattctaagttccgtttgattttggttgagagcagaattcacagacttgcacgttactacaagaagaccaagaagcttccacctgtgtggaaatagtaagtacttttgttactcaatgtctacaagttcatatcttgttttttacattctgcaatgctatttctttatgtctattagtttattggatatttgaactgtctctttacatgttgcttattaaccttctgaacaaagggtcgtttgtgtttggatctttagtcttgaaactgttatttagtagggaagtgttatgacttgattgtttactgggtttgtttaagagattggtaatatagtgtgacagtgtttatggttagctaaattaaggtgaggaaagagagcctctgttgcagttggttttttgtagaagccctcatatttcttgtttacttttattgaaagatgatccaattgttaattttggtgctgatggaccatttttttattgatttgcagtgagtcaacaaccgccagcacccttgttgcttaagttcgccacagtagtagtcactgcagttttggtttagaatgaaactaagcaaagattgagttaatttttctttctgaatgtggagcttgactgtattttgtcttggagttgtgtatttggattttggctctacttattattcttagttgctacaattctgtttttttggttcacaatgctcattatcattaatgatatattatcagttctgttttccctttaaaatgatgaaaagaaatatgaatgccacaaattttttaaatgagatttcaaaataaattcagtataaaatatatcatatcatactaagtacaattgcagcaaagttgcacatatattattagttctgttttccctttaataaaacccttgagtttgtcttttaattttctttctttatattataatgtatggtgaacttacactgttgctgtatactttacctgttttggcattcaaagaaacaaaaatgtgttttagtctgattttgtttcttcataattatttatatttgtgcaaaaagttatccaattcaattataactgaccaattgaattgaattggatatcaattttgaaaactcaatcggattggattggttgttggatgagacatttgattaataatcgaattgaattgatttaattatcatttaattatatttatatatttttaaaatatatttataattttgtacatttaatatatatttaaaacatgagattaaaaaaaatatatccacgggttcgggtacccaccgcccctaatggggtgggtacgggagttgactttcgggggcgaggacaggtatgggtttaaagattcatacccgagtcggaaacggggcgggggcgggggaatagatacc

SEQ ID NO: 64455 - DNA, 586 bp, Cannabis sativa
ttttatcttttcaaattatgcatgaaaatagtatttttgtaaaataaggcaaaatatcggggcgttacatattcgtttctttctcaattcataattgtatttccttaagtggcctatctttccacagtggtaacacttactattagttcttggacctcataattgtcattgacctctttctttaacactttgacttcttcctttccttccatgtgagtgatttccatttgagttttttctttgtattgatgtcttcccgagagtagtatgctcataattgttctttcaagccttgcctatttgtttcaaagataactccttggaatatatggcactaataatttcatcaaacaccagtgtaaccttcgagtatataatcgtatctttgaattgcttgtattgagatggtagagaatttagccaaaaattaccttgtctttttcttcaatcttgactattaagctactaagatcagataaacacggcttggtagactcttagtcattcatattatcattaagagatttatcttcatccattctaaagccatagaatttttgtttcagataaacacggcttggtagac

SEQ ID NO: 64456 - DNA, 672 bp, Cannabis sativa
atatatatatatatatactaggttcatgtttttagttatatttttaatttttattttagttatatatatttttaattataattggttttttttcttttttcttttttgggtgtggatattatttaataaataacattattttttattaaaaatatttaatttaagtactattgagaatagaatcaaaattcagagagaaaattagggtttttcgttcacaaatctataactatcaaatgttgcctttttcttggctaggctcactgccttccctaggctcaggtggcttggtcgggtttgtgttttgccactactatttgattcttgctactgtcattagtcttgtctctgtgatatatttttgagtgttttactcttatctctgtgacataagtttgagtatttaagattttttattgtgtgatatagtttttagtatttttttagttttgtctatgtgacatgattttgtttcattgttggttcttctttattcttcaatagttcgccattacatcgttgttagtagttaggaattacaaattttttgcggctaaagggggttgttagtagtgcagttacgtaccttacacaatagttgagtgctcaagctatgaggttgaacttgctgcaaccgtttctactgttgtgtcttctgagcagtagatgaaa

SEQ ID NO: 64457 - DNA, 728 bp, Cannabis sativa
catttaattaatcatttaattaaataatcatactgggaatattaaaatacggaatttcaagttggagcttggtctacttagtccactttaggcaattgtttcatcttcgttcatttgatttcgatcacccctttataagaaaccaaatgtcctttaggattatataatcagtcagattagactattttcacaataactgatagaattaaatcaagataaatatttaaagaataaatggagaatagttttgtccattcttgactttattgcaacaacatatgtgacttgataagtcatagcttgtccattcatattccaaatacatgagctcgtgggctctgcagtgttgtacttgcaggatgggcctttggacctattttgttaaatgtctatgtcacccttgatcgcatatagttggacattctatgcgttgataacttggaacatgcaaggccctaaggagtcgtcgaacacattagtcattcggaccaaacctatgagagaaacgatcttcactcgtcgcaggagagacatacttagtcattgcatataatcagtatatatacaactaatattaacttctgttagtcttgtttatcctttgactatctggagcatagtatgcgactagactctatcttggtcccatcttcttgtaagttcacatcatgcgaggtgaatcgatcattcgttctctgatcacattggttgttgtgtccacacttctt

SEQ ID NO: 64458 - DNA, 1196 bp, Cannabis sativa
  modified_base (94)..(112): a, c, t, g, unknown or other
gtgatcgattaattagtttgttttttttttgtcactatttttgttattttttagttcaaactagctacccaatcaaataataataataataatnnnnnnnnnnnnnnnnnnnataataataataataatatcaaaacctcgggcttagctatcaattttcagaagtctcagatttactttggcgatgttacttgcccaagatctattgctcaaagaattaatctgactgttggtgagttccctctcaaatatctagggattcctcttagaccgaccaagaggcttgaagattgtgggccaatcttgaagaagatgaaacagaggcttcattcttggaccaacaagcatatatcctatgctggtagaattcaactaattcaaactaccttgattggcctaaggaactactggatgagagtttttttgttgcctcaaagtgtgattaaggaaatcgagaagctttgtcgtggcttcttatggggattaaaggagaatcagacaagaattcacgtgtccagttgggataaggtttgccttccaaaagcttatggtggccttggttttaacgatggcacaaaatggaacaaagtttctcttgctagacttgtatgggatcttatgaacaaaaaagatctgttatgggtgaaatggatcaatgcggtctatttaaaggggaaggacttttggtcctataaccttcaagtggattcaagttggtattggagaaagttatgtagattaagaagtgatttcagcccaacagatattgtgagtgctagccgaggaggagtgttcagagcaactaaactgtacaactcctctttaagccagacttgtgatcctactgctagagcagtttggtgcagccttaatgttccaaagcaggattttattttgttgcaagtggttcacacaagtttgttgactagagacatgcttggcaagtttaatattcaggtgagcaatctaaattgtgtggtttgcgaggctgaagttgaaacacaccagcatctgttcttccattgcaggctgtcttccttggtgttagaggatattttcaggtgactgggtttcaaggttatttggtctaggaagttcaacagctgattttcttggttgtgctctgtcaaaccgagcatgattgagagaattggagtgttgtgcttggctgtcacaatatatcacatttggaggaa

SEQ ID NO: 64459 - DNA, 746 bp, Cannabis sativa
attattaattgcaacactttagattaattatatttaggtttaactaacacatggatgttgaccctttacgtgacaacatctaatcatttgttatttattttttatttaaaaaaaaaccacccaataatttctcataaactaaaaattctttatctagcacattttatatagaatagatattaaatatattttatgatgactcaaataaatgtttggatttaagattatcttcttgtagagtaattttactttcacactaataatatttctaaatttgaagaaaaaaaaatcatagaacgtaaaaagctattattcgataccctaacataagatagtcacataaggagtatattgaagtgacaatgacaaaattagtaaagtgttttaaaaaagataaaaataatagactttaaaaaagatagtaaaataaaagaggacaatattaaaagggtatagagtctaatttcttatacccaaatgcaatatattttggggcttttatggtgtatcccacaaaaatgagtgagcaccgataatgctgagtaccttgttagcgatattttttaattttttttaaaaaattatatgagacccaatacttaattataccaatataatatcgaacatagtggtacacactaataatattttttttagtaattttgtacaacacagttctttaaaatattttgtaaattttcaaaaaattagagaagaagatgagatgttttttctttggaaaagaa

SEQ ID NO: 64460 - DNA, 729 bp, Cannabis sativa
tgtacggtacctatctctctctctgatatcactcttttcttttttatcaacctaacaatttcttcatcaaccaaattaagagagagtatatatgtacgtattgattcagtatatattttggtttataattaattaattgttaatcaaaatttttttatgtacctctataatttctgtttcttttattaatgtgaaactttaggcttaattagtttccttttggcccaataaaattaagccagatctacttctcacttccctttcattatattttaattgatttttcttttacgtattctttacatattcttcttcttttttttttttttgtctctctatagatacgtggtaatcgcagtgattactgttattaatactacaaagttcgggtatttgttaaatttttacttctgtcttctttagtattatcgttattgaaaacttctatatatattttttcaggtggatctcttgatcacagtgacctctaaaatataattagtttgtcattagttaccaattttgagaacagtcctggatttcattttgtttttttttttaaagaaagaactaggtttgatttttttaaaaaaaaaatggtacttttcaacatcgagcaaagagtttctaatagacatcaatgagtgattgattggtataattatacttggaataaattttgatgttgttatttggtggtttcctaatttattattgttgggttttatg

SEQ ID NO: 64461 - DNA, 1302 bp, Cannabis sativa
acctgaaccatctccaacatacatttgatcatgtccttcatagtcatagcaatttgcaagattttgagcttgtggagtacaatggtttgtagctcccgaatcaggataccaacttgagtcattggaggtactgtttgtggtgagattaacctgtgtttgctgaggtttcaatggtccagctccctgtgaggactgagaacttgaacctgtctgtaggcctgagaaagacttatcaaaacgataaaaacaatccattgcagtgtggccaaaacgcaaacacagttggcactgaactttattgttcatattcataccagatctaacaccttgattgggaaattgattagcatagaaattacctcttccaccagagttatctccacgagtaaagttcctgctaccagattgattattctgacctgaagtgttgctatattgtgagtttccctttccaaattgttgcctgaaccttctccatgccaggtttgcctccatcaaagaatcaggatcattcgacaccaaattcgcactgagatcaatctcttttctcgacttttctattctggattctgaagctaacagcaaagcttcaatctctcccaccgtgtactgctcagttcgagtatttgtggatatgaaaaaagtgtcatattcactcggaagtcccttaaagatagctgccacatgatctcgattgctcaagacctcccctacagatgcaagaaggtccactgtttgctttactttcaaaagatagtcattcagacttaaagtgcccttccttaggttctgtaacttattgtgaaattccagaatctttgaagacacttgcagaataaagtgcttctccaacgtagaccagatctgttgagctgagttgcaaccaaccatccgagtgagaaggctttcagtcatagacgagagtaaccaagaaaccaagagctgatcctgcacttcccaatcggcaaaggcttgattaactctgttcatggctcgatcttcagcagtgagaaattcagcagggggagtctctttgatgaactttaacaagcgatttcctttgattgcaacaagaacctgctgcttccatagcaggaagttatgatcattaagacgaatggaaatactgtgattaaaatagacaggatcttgatgaatctgaccacgcggctgagcagcttgagaagcattttgactattagagttgttcgagtttccagcaccaccaagagtagccatgttagcattgagcggagggaactgctctaataccatgtcaaaccttcgagccataccaccatc

SEQ ID NO: 64462 - DNA, 1738 bp, Cannabis sativa
cataggtcttctcttctcaaagcagaaggatcgctcctttttgatagctcagctacagcaccaaaatgagacattttcacactatgtacttcagtacttcgtgatgggttactgtacttcaagaacaaaatttgtctcaggcaacgttccaaccttaagcatattctcattcgacaattccatgactcacccattgacggttatgatggattgattgcacatttcttcgtctaagtgcaatttttgttgggaaggaatgtgccaggatgtgcgcaagtatgtacaaactttttaaagtgtcaaacggttaagtgctcacctcaggcactttagagcatctccaatggtgatgctatgaaaaatacttgatgacataaatatatttttaacattttttaatgatgtttaccattagaataaaaaagaatgattcaaaagaatatcatactataacatcttttatatcttctctttcttatttttttattattattttatctaaagtaagaaaatttgtttatttaataaatattatgtagtaaatgaatcactctcaagaacacaatctagcaaccaaaatcaatcaaaataaccaacacagttgatcacaacttgtgttaataaaatcagcaatttaaagaacaattcaaggagaaaattgacaccaaggctatgtttggtgggagggagggagagtaggatggatcgatgtagaggttagagaggatggggagtaagagggacagagaggattgttaatctattttgtattgtttggtattaggtgtaaggtgggaaggatggagaaaaaattgattagtaaaattacgaaattgttctttttaaaataaaatttattatttttttaagggtagttattgtattttgcaaagtatattttgtctttttctaacatctttctaaatttggagggattaaattttgaaggtttggagggagaatgtctcccttcatctgtcctctcccttcttctttccttcccaaacaagtgatttagtctctccttccatcactctccctccaaccctctccatctatcaatctccccctcctaccaaacatagtgcaagaattgataaacatagacctttattgatgttaaaaccagtataagagtgtgttgaatacaataaaaaaaggatgagcagaaattactatgaacctcaccaatgggaaccaagataagttactcttagttcccttgtacatccctccttttcactctatttattactacaatctgaatttacaacataactaaaaagtgtattacattgtctatttatagtatgtgaagttggctgtttgttgagacaactaactcggataccaattatcaaaacagttagtgacacatcaacaaaggataaaacataaaaatggctgaactaaacaccacaaatccaccttaatttagtcatgcgaaggttactgatccttatgtccaacaatattgtcgtgcgtttatgatagacagctcgaagcaatggagcaagttctttttttgggatgagtaccattacaataccaaccatcattctgctattgggatgaccctgtttcgaacagtttatggtagattacccccatcgattccagcttacactcgtggtacttctttgatagaggcagttgaagaagatctcttgtgccctgatgctatccttcaaaagctacaaaacagtttgcaccgaagccagaatcgaatgaggcagca

SEQ ID NO: 64463 - DNA, 645 bp, Cannabis sativa
aacttgctcactatgcttactacatgacagagatctggccttgtgcacaccattaagtacatgatgcttcccactacacttgtgtgtgggactttctccatgtagctttcttcttcctctgtgcagggagcttggtcactagacaatctaaactgttgattgattgggggcatttacttgatttgagtcagtaacattgaacttggacaaaatctttgaggtgtatccttgttgagtcagtttgattgttctcttagttctgcttctagttatttcaactctaaggattttctttgctgcacccaaatatttcatagcgaattctttgcttaacagtttcttgattttgtcaatttttgttttgctcttacttgctattagcatatcatcaacatataacaatagaaacactagtccttttgtgtttctcacatgaacacaacaatcataagcacttcttttgaaaccaattttggtaataaattcatcaaatcgtttataccattgtcaaggtgactgttttaaaccatataaggacttctttagcaggcaaacatggtcatcctttccctattcctcaaagccttttggttgcttcatcaatatctcttcctctagatctccatgtaagaatgttgtctttac

SEQ ID NO: 64464 - DNA, 902 bp, Cannabis sativa
ctctctctctctcgattttcctagaaccaactagggtttgggagtttttcttctcaattcagggatttccaagaagattctagtgtgttaatccaaggtaaaacccttaagcctctctttgtatgatttattaagttctaagttaaagttttatacaagattttggacttagggttgttatagttatgttttgattttgtttgagtgttctaaagttaaaataatgttaattgagctgatttgaggctaggttatagcttgattgggttgttacataaagtttgagttttagaactcaaactttggtctttagtggcaatttttgattctgagcatgttaggttgttttggtgcttgaaatatcttctttggggtatattaagcaggtctggaaggtttggtttggtttggatacaaattggtcaaggttttgaattattttgagttacctggtgcaaaccggttaaccagtttcataggtcctgtaaaaccggttaaccggatcagaaaccagtttcccgaatttttcatgttagtttcagagctttagttggttgattccttgatttttagggtattgtcatgttttttatcgatagcaatagggaaacttttagttttaagtttaagtccccaaaaagtgatttagcgtgtcagtcaccaattttacgaataatgtaatttgggcgcctgtaatttgtcgagaaactattccactcaggttggtcggcacacctgaattcgtaaacaaggtaagattagtataatggttgcatatatgtatacatgtttagcgtacatgttagttaccgtcagaataggaaaatttatagccatcagattagcatatcagggcatcgatgaggtgtacatagagttacaccgagatgccaacagatata

SEQ ID NO: 64465 - DNA, 1018 bp, Cannabis sativa
aaaaatgaaatttatcgtagttttttggcagatgaatggacaattggattttcaaaccaaaagaaaaaagatttgattcaagatacttaattatttatttctattttaataaatttaattaaatagaaaattatatttaaattggaaatttatcaatttcatatcaacttaaattaaaataatttttagaatatattttattttattttaataattatttcgcacataaatttcaaattacattgattttagtgtacatattttgaaatttttcaattttaaaaattagattaaagtttaaaattaatttgttaattaattttagatcaacttgaaagcaagtgatttttattaatgattttcgaagtatttaatacaccaaaatacttccaataatcatgcacaaattaagatttactcatcactaaactaatctaacaatggtaagaatttgagctctacaaatagctcaaaacaataaaaccccaaactctatttttgctgcataggtcggcgagtactaatgacttgtagtattttaaaaatgtatacgggatcttgaaataaaatgtactcttttgggatgtattttatagtgtaataattacaagttattattttattagtatatgtttagtctcgatggcgttctttatttttagggcgttataattttgtattagagcgccaagtttttttaacttcctgtagaccggctgaacatgtacaatcattgtcaaagataagctcgacttgtgatgcagtaagtattgagagtaaatgtttaattgcttctgtgattaaatgtttactgctttttgttataggcagcatatgagcatctagaagatagaatgttataagtgcgagtgaggacaaagcaggctagaaacattgcaatcatttttttaggaataattacataagacaccattttttgtaaaatattttcatttttacgttcaaagaatttttttttttttacatttttacggctttccaaaaaataacacgaaaa

SEQ ID NO: 64466 - DNA, 885 bp, Cannabis sativa
tttaatacaatacgacctatcaaacgaaccctgtgtgtattagcttatcttcgcaggccgatcttgccttgtgcaccgagaacttgcctgctgctgagattgaataggctatttcgtagtcctatagctttgtatgtgactccttatgcaatctttttttgtgtttttttggtaagttagcagttttcatttctatcaaacaaataatacaaccatcaattgtgttctaaataggaacctgtaaagacaaaagcacaagccaaaacccaactatacatgcaactccaaaacccaatatgtctatccacaatgttgattttatcagtcaaaaagtgagtaactcgatctataacatattccttaatccacaaaattgtacaatggatgaaggacccaataaaaaaaactaaatcaatagctaaagtgcttagcatagaggtcattaatgttgtatgaattcgattctggattgttatattgcctctaaaaattagcaatagcttgaacctgagcagggacattcaaagtattatcaataaatgtgcagttatcaaaagtatgagattctcaataaatttcacaactaagctgttgtttttaaggcattggcagcaacactagtactctattgtaactacttagttaatatagctacctgagcagttaaagcgtttatatggcatctaattcataaacaccagttgtcttctttttccatcagaccactgatgattattcatagccatattttccagaagtttataagcggctccggttgcactcttactcatgaaagtaccatccgctgcaacattgataatagttctagtggtaggatgttgagaatcatcgggttccatctcaaaaccaattggcaatgagtgg

SEQ ID NO: 64467 - DNA, 1342 bp, Cannabis sativa
  modified_base (226)..(234): a, c, t, g, unknown or other
  modified_base (876)..(882): a, c, t, g, unknown or other
cctcgcatttcttggaacatctgctgccagtcagtaggaggattagcattgccaacccccacattatcccctgaattttacggaagtggaggcggtgttggtggattagtttggtcaatcccaggctctacttgctcgccctgtggtctagatgattgcagagggtccattactagtaccttgtaatcaacaaccccagcaagttaagcgccaataccacacttannnnnnnnntgccttaaaccctaactcaactatttactccatataaataaacacttaatcttataacatttaaggcatggcatcatttcacatataaatattctagacgctcgcatactgcataaaaatggaaagcggtaaataaatgatcacataagcagtaaagtatttactctcaacacttactgcaccatgagtcaagcttgtcactgatgttgaatgtacagattcagccagtctaaaggatgtttaaaaaccttggcgctctgatactaaattgtaacgccctaactattaggcacgctacccaagatacttaagaaactttaatcccctaaatgggattactaataaaattagcatgaaaattaaactttaattataattggaatgaaaataaaattgtaataatttaaactttacaaactaaaagttacatgtttcgggatcccaaaaatactttacaaaacactattacaagtccgttttcactagccgacctaagcggcaaaacagagttcaaaatgcatcactggtagaccttaacccccttggtctagtgtggcccgagcatgtacatgcaccgtccaactccgatactcatggctgatcagaaacagctttaccctttcctgcacagtatagcacccnnnnnnnaagcccagcaagacagtataatatatcaataacatatttatcacactatataaacattaatcccattctcatattcctgtatgacaccgacctgcatgttatgctcacatgcctatttatgtctatgtaacatagacctacctgttgcgctcacacgtctttatataataaggccttagaacggttcctctcggttcaagttaccaagtacaacctggttatgccttgaacacataaccctagatctcaacatatgagctttccaacggtatatagaactcccaaaatggagtttgcatcacaaagttatgcatttctaaagtttgtacttgaaactgcccagaaacttgagggcgggccgcggcatgcaaaatccatgtcgcggcacctgggaccaactcccagattccatcaagaggggtgggccacggcatgcaaaatccatgcagaggcttctggg

SEQ ID NO: 64468 - DNA, 1430 bp, Cannabis sativa
aagtgatgaaggcataaaaaaaagaggctgacattattaatacataaatatgtaataaaaagatatgcatgataagaaaaaaataaggtagagtccatacccctttcgcgatcatgattcttactttgacagactgaccatatgttattttggtgcatccataagtcagcaaactttgaggataccccaccctgcctctccttacatgggacttggaacaagtcatgtgagtgttttgaaacttgaagagaacctaacaaacatgattttgatgccttctctagactccctgccttacgatcatgaggaacatgctgatcaaacccaaattgtctagccacacgatcaggacgatatgaaataaaagaccgagaaagagattttgagttatcttgaaggcacaacaaccaccgaggaagacaaatagaaaaccaaaatcctataccaccacgagaaatattcagattcgatcgaaccttgctcattaatggtaccacacttccatcatacatgtccagggtgaaataagcatctatgtttgtaagatatgggcagaagttgaattctgaaatatagtcaacaatatcagtcaactgtactgagccctttcaacgagaacaaaactgtgaccaggcacgaggacttccatccttcaaccatttgtagggtggggcaagcttatgaaattgctcccaaataaacagttggaggaaagaagcatccacgacactaattgtcttcatacttctagaatttatatcacaaactatggagtctaagttatgatacaaagttcctaggtaaaaagatcctattgggagttgcttcccgtgggcaagtttacatgctaaggagtataaagcatgacgtaccgacctggattgttttgagggaaaaatatacctacttaaccataaagtgatacaagcagtcaattctacaagactatagccgttacctttatggaaatgggttatccattcgtgcatatcacacgtggcatcattttttttaactaattggatgcttccgtcaaggctgacaacaggtctttctcttcttttgccatgggttcaattgcggaagtaataccacatataggcagtaaaaggagagcatagacatcttctaatgttacaactaactcaccccaattcaccaaaaatgtgtgagtcgtaggacaccagcaactcactaattggttcaaaacatcacgaaatatctcaatactagagcatacccacatggaagataatatactcactgatttcaaaagtgtctaaaaacttgttgacacagaagtactcaattccttccaactattgattgtgccagaaagtgatcgatagtcaatttcaaaatcattgccttcataatgacaacgcaatggaagatcttggccacaaattattgttgggttttgtgtccta

SEQ ID NO: 64469 - DNA, 997 bp, Cannabis sativa
ttttaaattaatgcattgtaagtgtcagtttataacgtagaccaaaagatcttttagtctcggttataaactgacacttatgcgtaatatgtatgtatattttttttttaaagtttttttagtctcagttataattttagtgttagtctactaaccgacactaaaagtcatgtcagttataaatcgagaccaaagatttggggtggtctttagtgtcaggttttaaaaaaaaaacatcattcgaaccgacactaaaattctattttgtagtagtggaaaaattaaaacacacaagatttttgtatgtggtatcaacaatccttacagattggcactagtccacggggccacgccaagatataagattcattacatagatctcaaaaatacaaagtaattggcttatacataaatagactccctttaattgtatgctgcaagcttgatgtattctactttctaactgaatcttggtgaaacttcaagttctcaaactctcttccatctccttgaagagtgtttgcttcctcccgaggcaagtcttgaaaagttatttcgcgaaagcttgtagaaccatcttccgaaagtagcactgttgttcttcttcttttgtagacttgattacagactccagacgataccaaatacataaataaagaggaagagacgaaatcgaatctatggaagcattggtttatacattccttttagtcttaactctagaaattatttttttcgccatcttttttcgagaaccgcctaaagttccaactaaaaaatgaaatgatttttcattatcttgatgaaaaggtaataatttaattacacttgatggtcacaaatttatcaattaactaagatatatatatatattggaacacattctcaatgggtattacccattgacggttactaaacaatttaactataaatattaattttaaaatattaaactattagattttgatccaattacgaatactaaaagagaaattta

SEQ ID NO: 64470 - DNA, 847 bp, Cannabis sativa
aaataacaatactaattttattaataatctattttttaatctttgatatttattataattcattatataatcaaataagttacaaaaaaaaaaataaaattagttggtgcataaattttgtttaatttaaagtttagatatttactttttaataaaatataaaagaaactaaaaagttattttttattttgaagatggtaaaagaaaaaaaatatattttctacatatccaccttaaaaataagtcataatgatatagttcttaaataaaaataattaatatgatctaaaaagtttttgagagatagaaaaagaaaattaataaaataatatgtatatattgttttgttagtttagtcgatagcattatcaacaaaaagaaaagataaaaatagaatgataagttagcaaagataagaatatactaagacaaataattatttcattactttcggtagaagaatacgtattagtgcatattaaaattttcgttgtcattttcataattaattttaatattacgtatattactgaaaattcccctaatttctactccctttaagtaaacatgtcattatagttatcaaaatatataattattattttgaactctgtattttgcaaaagttatcaattggatcctgtgttttattaaataacaaaataaatcctatattttccaaaatagtaaaaatagtaccctaacctcaatttttaataattttattttttaatatattaactttaagataatttctaacgcgaacagattcataaatgtaaccaattttgtcataatatctctagatcagattattattaaatcttattttgacaaaaaatcagtt

SEQ ID NO: 64471 - DNA, 1167 bp, Cannabis sativa
gaatataattgttgacctcacttttagccaacgacaatgagtctgataataagcgataaagaatacagtttacgtataatgtgaacaaataaataaagaacataaggtttttaaagaggtttgaccccgttcagatcggtaataccctactccccttgatttgtattaactcaagaacaaagaacacagtgtttcctctctcaaagctcttacaatgaaatctctgagtatgctctcttagatctctctaaagtaattcttttgacctctttaccagtgagaatgaatcactatttatagggctacatgcttgagggaaggtttccctttttcttacagtgtctataatcggtaagaatatagattacatatttagaatacacagattgtgggatttggacagcttgccatatcttggtgattcgatcccagatttatagggattgcttctgtgcttcacgatgtaaattctagaattgctaagttttgattcgctgcccggattatccactgctcgactgggaagacatcgtccgtgcagttatgtgttgtatcctgctcggagcatatctcccaagcatatatgtgctgccacatcacagttcaaaaaatgggataatatttgccccccaagtctgtacgggacttccgaagttgcatgtagacttcatccgagctgactttacatttgaatgggtgacacgtgttgaatgcatttgttcacgattcgatgtgagtctaactaggcgtcccttcagttttcagtaaattaatgctcttattaattagtacctcaagacacgtccttcttttgcacacttttgacggttacccttcgttggcacttgattgcttttaatttcccaatatttagttttttttggcgggggggatcgaggcgtctgagttttgaattgattaccccttttcacaaattggctgataaatagtgctgaaaattttcataagttactttaaccactttcttcacgaaacacttcagagcaaaaagagtttttctctcaagtctgtcgtgggatttctagaagaaagattcgagcagcttcatccgaacaacaccaaagcttcaaacagtaagtttcttatctttccctcctttaattttgcatcttcaaattttccgggttcccattgtagaaaatacaa

SEQ ID NO: 64472 - DNA, 675 bp, Cannabis sativa
ctatcactataaaataattggattgtagctcttgttttatctcatcaattgttcaactaatttttttagaagttatacactttattaatattttaaaaaaattatcttaaattaatatttaaaaatcactcataacatttttttaaaaattttcttttacacataattttgtatcaaattcaataattattttaattttattctcatattttcttaaaagttatataattatttttattttttattaatctaatgtcataattttttagtttaattttttaacttaatatttgaaatatattttattttattttatatataattttttaagaatataggaaggaagaaaaaaaattaaaaaaaaaaaaaactagtataaagtaaagattttattttttatatacgataaaaaaaatattaaataggatatttttatatatttttgaggtgcaaataatatttttttagaaaaaaatattaatacacattcaaaaagaagcttataagaacatccccaatagtactttatatttttttagttaaaatagttaaaaagttagaataaataatcatttgttatgaaatattagtattatgtaatattataatttagagaaagaaaatagagaagagatgagaattttctgagtgttttattccaataggtgatctcct

SEQ ID NO: 64473 - DNA, 920 bp, Cannabis sativa
agtgcctaggttgacattttgttccctaaaatgcatcaattttggtccctgaagccatttcctttgtgcaaatcgctcaccctttacactcagacacatgcgagacatgccacaaacaagctactagcccaaaaaacattggaacacttccagtttagagtgcccaggcacccaacgcccaggttgactttctcagtcaacttgggtacatgacaactagggtttaacttttcaggaacttctttacatctcaattcttcaaatccaacaaggaacaaaattgagacttgagttttgtcaaactatgcctaggaggatcaacccgtaagaacaacgcctaggctgacatggtgtctcacccgggcgccaggacaccaactcaagtttctcgagtaacgcctgtgcaaatttgaaaaaactgaattgctatgagaactttccacaagaaagaagatcgagcatcaaaaagacaacatccgagtactttcaacctggacctagcacccaggttgacaagactcagctctcagcgcctaagttgacttattgtcaacctggggcgcttctgacaacttttttgaatatgtttctcaggaattttcttcattttcattaacaacgaaggtacaagtgttgttggaaaacaaaagagacgattcggtagctagaagacctagcaagtacccaggtttacatgagcattagctccaacactcaaatttacattcaacatggcacatgtggtttcgttacttaaatgtgaattttattccagacaatcttcgtattttggtcccaaacaggggaggagccctgttgtgaaaattatatacgcaagtatacgcagtcaaacaagtaataaagtgataagtaagatcgtctccatagggattgccaacaaagtttgaagtaaaaccaac

SEQ ID NO: 64474 - DNA, 1384 bp, Cannabis sativa
ataaatttttaacaatactttacatataatcatataaaaaattaattagaatgattaaattttgaatttattagtaaatacatatgtattattattattaaataataagaatttttaacgtgttgtgctttcaggttagtttattcgtgcttacgtattgtatctttgggcttgtcatattgtgttgtgtttaggcccattttttttctttgtactatgttgtcccaatttgcagtatcgtgtcgtgtcatgtccaagctcatattttttcgtatcagatcgtgctcgtgccttccaaactcattccggtttcgtgctaaattaaaaagctcaacccatatttacgctctagtcgatctacgcctacatacaatgtatatatgtatatatttatatttttttaatatatatatatgttagaaaattttaaagtatattgtggggacattattttttgtttttagaaattaaaattattttttatataataatttattatattatagttatagtaaatatgtggttcgttttttaaaatttttgactaatttacatcatcatattttattttatatgcatgcaattaattattttaaatattatattttacaaataaaattattcataatttttcaaaaataaataaaatatatgtcattttaaaaataattggcagtccaaaagaaaaatatatgtccattaaatgagaatatttaatagtttgttgttttattttttatttttgaaaccatgtaaaagtgtgttagaggttttctgatatttgtatatttatattattacgagttttattttttatattcattaaattaatgagttttcttttcttgtatttacatctcaaaaaggtattttttttaaaacaaatataaaacttttattaatttatcaaatcagtcaaaagataagttgtaccttaacaggaacatcaccattactgaacacttgatctgggaaataacaagatactctagcaagactatgagcaactatattgatagattatttaataaaaaataaaataataaaaaaaacattatttaaaaatgcaaaaagcttatgataattttttataataatcctaaaagaataaagcatatataatgaatttcaaatagcttggactgctacgtaccaaataatctgacttcagctccactttccgctatggttgaattttaatcaagcttagcgctttctttatactgattgcttcagccaaatctagagcgcctataccagcaaaactacctgacttagccatcactactttcccttgaaagtctcgagcgactatgccataaccaaacactgctcgatcacgaaaaatggcgacatcaagagttaccttaattatattctcttg

SEQ ID NO: 64475 - DNA, 1067 bp, Cannabis sativa
ttcatcaactccaggtcgtttcaacacgtagaaattcagagtttctccttcgattctcggccgtacgacgaaatcgaagcgttttggaggcggatctggcttggaatgaaccagggtctcatctagatctaggaatatcgttcgcttcttctcaggggagatcagaggtgggaggaggaggccgccgaatgaggttattaatcgtcgaggattgggaattagggtttcaggggtttttttgaggatcttgtatcctttgttcttgcgacaatttgtaggggttccgatttgggttagttttgagaagagtttgatgaggcgacggtggcagttgaagaaggatttgttaatggtggaaatgactgttgaggctgaagctgttgatgatggtgattttttgactggggaagatttgcggcggtgtcgtcctcggctgtctttgatggacttggtcggagtttttctgatcaatctggacaccatttccgccggtagagagagagagagagaatggagtttgaaaatggtgaaagtaatgttttctgttatgagtttgttgtaaaacactggaaatgtttgaattttaggcttggtataacggtcgaccagcgaagccaaactaattggttcggaaccgaagctagtgttatagccaacttttgttgggccgaaagcccaaaaggatattgggatcttttaagaaaaaatacaaaaaacaacgaaaaaaattaataaaatatacagagtttttcaacattttaaccattttttggattttatttagataaaatatggtgattttttatgttattttaatattattttattgttatttttatgtgattttcttgtatttttataaaataccataaaaatatatatatataaaaaaaaattttaaggtaaaagtatatatatattttttttttacgaaaaaaaaatagtgtttcatgtaattatccaaaagatagaagatatttttctaaagcccatatcaaaagaagattggagattatttcaaaaacacacaaatataagtaaaaaaaaatacaaaattttaaatattt

SEQ ID NO: 64476 - DNA, 2090 bp, Cannabis sativa
  modified_base (870)..(870): a, c, t, g, unknown or other
ccaaccctatgttcggttctttaatatttgatttgctgttgctgaaaatgaaaaaaagtgcctctaaaggcttggtttgtagtagtgttaatttctgtcatgtagagattattgtatggatgttgtatgattgttttgtgaagtctggaaacatttggttaggttttggtagaattttaagaatttgaaacttgaggtttcatgtttcctataaaagacagtaaaccatttttgaaaaaacggtctactgttttccttactaggaaacattgaaaaacagtctattttctaaacgacttaataattaccatttttggtgatgtttagaactccaattttttatgttttctcaatgtttagggtattggtaccctagtgacctacaagaggacttatggtgatgaattaaggacctagaacgggttaggtcaaatgattaatcgttctttttgttgttgtgacataaggcctgagatcgttgatctttctccattcaggtcggccgatacccttaaatcaaaacttgaggtatgaaaagtacattactctttcatggtaaacgacacgttaatgaaagatatttattacatatcggtccagtcatgtataatcaaatcatacacaacacatttactgcatgcctatctacatatgtgattcgaatcaaaatcacacacactagaagtatatagcgttagtaaatcataaatagtagctctatattaaagattctcattactttaatacactacctacttattaaattcatatggtataatcttaattctcttatatgtccttacaagattataccttctccatatgaataagaaatttttagatatttaataattatactattgtaattantgtatcatttatcttataattaattatatttcatatattttttaaaatattatctattaattacttacttttagggcataattcccaataatatcccccttttaaaatccttctttttggattctgataatgagaggatacaaagcatctcattaactttgtttacttagcaggactaactaatttggcatcatgaatctcatggttcatactcagtcaaatctcgatatagactagaaaaccaacttgaagagcagcaacttgttgcaagttcaccctcttccttacaatggtggaagaaacttcagtcgttatctatcccttccaagatccgtatttttctatggcttgttattcatgattgtttttttgctgtggatatccttcatgcaaggcatattagtgacacaagtcaatgctcattgtgtcagtttgagagggaaactgttacgcatgctccatttctttacaaatgtcccaagcgtgtttggagagccttgaattttttccaagattttgtcctctctaactgaatgtctctaaaataattattgctttaggtgtctacagaatagacaaacctccaattggagcaatttttttgcatcctttggagtatttagaacgaaaggaacaaagaacatcatggaacaaagcctaaaactttagatgtgaattgtcttccaaggttgttccaacaactttgcaatggttaaatccacatttagggagggtgaaattaaatatagatgtgattgttaacacaatggctaaaatttctacttttggtgcaatattacataattgtaggggtgatatcatcgctacaatgtctaaacctttcctaagttgtttttgaccagatgtgatggaagcaataaccttgatgtatagtttgcaatggcctaaagatctttgcttaccaattcactacatagagttagaatctcttatggtagttagattacagtctacttaagctaatgtctttgattttattgtttgttagtaaatatctctcttttagtgtcaaattttcctaaagtgtaaatttcgtatatttaaagaatctttaaatattgctgctaacttgttagctaagtatgctcttttagtggacattgattgcttatggttggagaaattaccacctcatctaatatctatatattgtattatgatacattgtttaatataatagcattttatctcaaaaaaaa

SEQ ID NO: 64477 - DNA, 906 bp, Cannabis sativa
aaattatggagtgggagtgtccaactccacttgaaattttgtacatttactctgtgaaagcctgtcccgcaaggaagcgaggatcaggtagtttttattatctcgggtgccacagtaatgatcgaaggattattgtgaggctacctaacacaactaagttcaaggatgatttcttctagacatctgatctctcccccatcaatacaactccatttcgcttaatatgtaagtactacccttaaaacttggttttgagttttcaatttataaattgaaggcatttacttattgtgcttattttattgacagtagtctcgaagaggcctattctaactcccaagatggagaaacaacacaagattgtcctaggtcttccgtttaggttgcattcagctgactttctattgaacgagattaatctaaagacctctaatcttctcagcaccaaacaatccacttttgacttcaaagtccccaaatattctaagtgacaacaggttcctaaccttgctaacgaggaagacaagaactgtgtggctcgcatgcacttcctaaagaaaacatcccctcatgaagctaaagaagaagcaacccgtggtaataactgtggatgtctcctaacgtgcttagggctgaccgtactttgctaattaaatttgaggatagccagtataatttttatacctaggatagtttttgtatagatcgcataactcatagatttgatagttggtaccccaaatttcatgtccaattaagttgcaatagttcttacttcagaattgctgagcagtgtggtacaaattttgatagggcgagccatctagactaggacatgtctccacttaatccctttgatctgtacatgattgctggttctaaggagtttagtagttattatagtcc

SEQ ID NO: 64478 - DNA, 2572 bp, Cannabis sativa
atttagaggtaatatttaaatcaatttataaattattgcattattaatttcattaattaatattaataagcaataatatcttcaattattattaaatattaaattttcttttggacaatttaagatttttccattatgggctgtgagtcctaagaagtatggggggctaagctattcaagtgaacaagttggtgaagttcttgccatttcaggtatactattttctttctcttaaaaggataaaattttacaataaccatagttcaaagggaaaacacatacgatttattttaaaaattatacatgaaggaaagtggtgttgtacgtttaaactatttcaagcacaataacctaagtcaacacgacaacatgttacactacaaaaaattttacttttagtcaaaaattttattgtgactaaagataaaaaagttgtcgctaattataaattatcattattgtgttgtgattaaaaagtccgtagctaaaagtattagttacaaaaattataatttgttgtgactaaatgtgtttttagtcacaacatttaactagattagtgacagcttgtaactaaatactatcttttagtcacaagtaattttttgttgtgactaaaaaattgtcactaaaagtagcaattttttgtagtattagtctatttttttaggttagagaaaacacaatggagtaggtcatatatcatcactttactttaatcttattttaattaagacttatgcattttttcaaaagactaacattaatccttattctatgttttctagggttagctatgcttgtttttcagctatttttgtacacttcaattgagagaagttttggacctgtacacttggctcgaattggagcagtatgtctcgaaatttcttcatctttatacgaaaaacacttttggttttcatgttttgttatcgaatttattctaacttgttcgatttcttctttaattttgttgcaaaggtcatcaccatagttgtgctatcaagttttccttttatagcaaaactatctggactcacactcactctattagttgatcttgcagctatgttaaagaatgtaacatctgtaagtgtctatttaatatattctcataccaacatattgtctatacgtcttgtgtttttggctcaatcgagttctacattgaatcactctaaaaaaaagctcatggtgtaacattttatgatgagctaaagtcaaaaaaagaaattcagagtttcaacatagtgaattttctcatgatttttcttctttaaaagattttcacttaaaaatatttaatacatgattaggtgtgcatttcaacgggattgtttctactacaaaatcgagctgtggtaattaccttgtcttaaatatactttgataaatgtttgaaattaattttgtctatatatttttaacattaattttaatgaatatttgaagggccaaagccaaagaggagtagcaaatggcgtatccatggctgccatgtctctattcaacgcgatcggtccagctggtggtggtgtcatgtaagtttcttcatttaaaaaaaaaaaaactaactttagcccccttatttttttttttgggggggcggggggcggtcaactctttcttaagagttgaacgattcaatctcggtggaacatcattaaactttccaacgagattgaaccctttacactaaataaataaataaaatttgtatacttatatgaaaagattcaagtgttgaagtaatgcttttgtttttgttttttggtcagattttcttgggcacagaatcatcaaaatagatcatttttccctggtaaaaagatctacttttattttataactactaatttcttcttgtacgtaaactcaacatatcataagagaaaacttcttatgattttatattagtcatgatcaaaatgaattatatgccttaagtttttgtttgtggtctttctaattaagattacattattaatatgaatggtgtgttttttgttgcaggtgatcatttggttttcttcattctaaatgttgttgagtttattgctttcacaatgaccttcaaaccttttctagtcttagctagctgatgtaacctatagttaaagcctttacaaaatttattagttgaactaactcatattttttatcataataaagagtatttttagtatttttctagtaacattatgattgatattattgagaatggtattgcaattcaatcttaaactatatgaagaagaaaaagaggaaaaaaacataaggagccatgtatatgttgtatataggtgttgaaaatgttgggtattttgtatccatgaactccttgatcagggtaacctaattaagaagatacatttcctagctctctagctcgagcttaattatcttgcctaatgtgaatatatatgccaagcaactaattaaagatcttcaaatgaccataactagtaatgtgacctcaccagatttccaatagagaactacaaatgaaggacacctattaatgcctaaacattatttttaggcatcccataatgtatatatatatata

SEQ ID NO: 64479 - DNA, 1420 bp, Cannabis sativa
ttgcttaacagattacacagagtagggatggcaacaattttccattccaatatcaaacagatgtaggatggagttatggagttatggagatggcactcatccctccaatggagcccttttaattttttaattattttatatatttttttaggagtgttatcgttaacttttatttacaatattttagttaacttttatgtctgaaaatacatgtcagaatgtttttattatggtagtgttcgttatagttacaacatcaataaatttttaaaaagtttcaaatagtttacagttctaaaaatagatttgaagttttttgaaaacaagaactctattttcgatattgtaaactaatcagaatttttcaaaatttacaaatgatgatattgtaactatgcatcccaaaaagaggtacattgatgcacctcttatttgtttcgacatctaaaaaaaaaaatagtctaattttttacatagttgtatatacgttataattatttaagacatcttacaaaattttaagaaatttagaataatttactatgtagaaaataatgttcaaatagtttatttcacatacatataaaataaaagagttacacgtgcaacaaactctttaaactctatttttggtatgttaaattattccaaatttatcaaaattttgtaaaatatcttaaaaaactagaacatacataatcatgaaaaaaaaaaaattagactacataatttttctgaatgacaaaacagataagagtgcactgatgtgccccttttaaaatgacgcattatagaatttttcaataattatttgggagtttcaattcaatttttaaaaatatatactattctgattatgtaatataatgtaacattttaaattttatgaaatccacttttattatatatttttattttattttgctaagtaaatgggtcttaatggaattctacgaccctcccttgacagggaatatgtgcacagataggagctaggacggatatagattataggggcaaggagcgccccctgctgatttctcgcactattttcgtctgaccgttataattttgagttatttgtagcaaaacctcctcaactctcttaatttacttacaaataattatctaacatcatattttggtaaaaaaaatcctccaaagtactgttatatttgcatttttaaggtgtcatctcctctagggctgagcatctgtcggtttggtcatttttttacaaataaaaattcgaatttcggtttttgatttaaaatggttcaatccaaaaaccgaccgaccaatccgaaaacatccttaaaaccgaccaatgtgaaccgcggtttggtcagttcaaatcgcccaaaccgattttttttttgtgtaaaatataatcaaatttattttataagcacattaatac

SEQ ID NO: 64480 - DNA, 757 bp, Cannabis sativa
ttaaataacatacttgttagtaaatttaagatcctggtaaggtaattccaacacaaatcaattccaatccatcccaaattattcagaacttctaataaggctaaaacaaaaatatttcatcaaacaatttcaatacaaagctgtgaacaaaaatctaccattattgagctaagtttgatctcaaaactcaaacctagctcaaactttgccaacaacacccaacctacccaacaccagctcaaacaaacctaatttaatccccaaaactcaattctaaaaacagcaaaacttagcagaacctaaacaaaaaaaaaaaaccatgaaaacatgcttaaaccttaaaacttcaaagagaacagaggagaattagcttacctttaatcttctaaacaatcaatctccaaaaatcttgctaacttctcttgagttgctctgatttttggcaaagaaggcttgggttccttattttagggtgaggtcgagacagagagagttaggtgaggagagtggtgttgtcttaaattgttaaaaaaacataaacttaaatttgttttatcctcaatattaattagcctaaaactcactagaattatctaagagttttcactaaaaacaaagtactattactataaggtataatgactattttgtcctttacttagtcatgaagtaatctatccacttatggataaaatggtccaaaattatgactccaaaacatcccaacattctaaacattaggggtgttcatcaaacc

SEQ ID NO: 64481 - DNA, 5012 bp, Cannabis sativa
  modified_base (2714)..(2716): a, c, t, g, unknown or other
ccaacggtcaaaccccaccaatagtgcgtgtaaggcaaagccagctttgcctttgcagcctcacttatgaggtctctaagcatcaccccgctctcaaccgtcatcgtcatggcattcatgtcgatgttgagcaccttataaaggcgctcggtgcttataagaagcccatcttctcccccgggacaaactagcttgggaatgctatgagataattgggtggttgccttcattttcaatcctcttcttgtgccatcagcgatggtcgcaatgagttctgcttccgaggtagggtaggccgcgaagcctgccctgcagatggtgcggtcgggaaagatatcaattgagttggtgattgtgcattttgagttgccattggtgcacgtaataggcttttctggaggtgtagaataagctaccgagatcaataataaggatattagtagtcctaataagggagacattttagagctgatcaataaagacatggcttgtttgttttgtgtagatgtcctagattattatttatactaagttggagcatgtgcttataagacttggtcagagatttataaatttaataaataattaattaacaatactgcttggtaggtttttgtatatatttatataaatattgctatttggcacgtgccaaatatattttctcactagaaagaaaaagaagaaaaaagacacgccatttatataagatatttctctttaattaaattatgattcgctctcagtctctcaccttaatgggataagttttcgttggttataattgtttttgattctgtttggacatgagtaataggacagaaaatgtatgagaaatatgagaggctcagaatatattgtgttcctagcaaagattattattgtccagcacatggaaaattgattatgacgatgccacaagggttttgtactaggtacatggtacttgtcgagtcacgtaaatattaatttatttaaagttttattttttttttaaaaaaaatttagtaactaaaatggtatgattatttaaacaatttgttttataaaaataaattgtgactttaatctcaatatatacatactcacatagtagttattctgtgaaaaaataatttattatgataagtcataacaacatatgactttaatatttattttttgtttctagaaaattcaaaagaataatatatgtcttttacaaaatttattaaaaaaattatgtagtgaaaaataaagaaaaaaattgtcatcttaaaatatagaaaaagaattattacataaaagttttaatatagaataccctattaaaaataaaacaaagtgttatacctaattttcgcaaaaaaataaaaatgattactcttgcacaagggcccacatgccaaaagtaccttgaagatactacagttaatcttgcgactttaaccaagactcataaatttcaaataaatcaagacatcgatccttcttgaggaccccatggcacttttagagggctcgaactcacacacctaagtgtgcccaaactaggattcatggccccgcgcaagcgttttcaccctggagaccttaatccgccaaaaaaaccaataagtacttgacttgtttggacatgaaattgacttggatttatgtataaagtcaaaatagcactaaaaccacaagagaagaagaataggtgaccactgccacaagaaaatggcagtgctctccagtttggagaccattgccatagtagaatggcacaggtcactcctcgcaaaccatgggagaaaatttattcgaatgggttccctcaacatcaaagagcatgggacaagtgagaaaagttatttcagacctaggagttgccttaggtgactgtgccataggagaatgtcacatgtcactcctcacaaactatgggaggaaaattgtctaagcgggttccctcgacatcaacaagaaagggacaagtgacgaaagtcattttcggcctaggattcgccttagctgacttgtaccataagagaatgacacaggtcactcctcacaaattatgggaggaaaattgtcaagtgggttcccacgacatcaagagtaaaaaacaagtgagaaaagtcatttcggcctaggatttgccttaggtgacttgcgtcataagagaatggcagtggtctccaatttagtaaagtggcacaagttggttactacacaaggaagaggaatttattgaccaaattatattttcaacatctatgtaccaaatacaagtgagagacaccacccatggcttcccacaagccatgggtgacctgtgccattatccggccccaactagtggcaatggtcactttttagggtgtcaaatgtcgaaatgaggtttttgggtcccaagacctccaaaatatggctcaccattaaaaaaaaaaaagtcaaaacacaccccaagggtccgagaacatgcatagctgacctctgccatttgcccatggcagtgctcgcaacaggtacaagacagtataaactgccttcagtaaaataggcataactctctcaacttttatccaaatgacctggttcaacttgcattggaaagataatttcaagacgaatcaaagtgtgtctcacagacatgactcaattctgaggttatcggatccaaaattagcatacaaggaaagttgatacattttactcaagaatcgggaaatgcggctaagcgagggttnnnggagcacaccgccacagcctatgtggcattgtgccaagtatcagaagtccaaaacgcatgtgttcaacactccatttcaaattggtacatcttcaaccgaaaataattaattgttcaatatttgtgggatatttacctagatataagaagactgttattgatatttatttatttattgtaatattttattcataaaaaagagtggtatacaggattttgttaatgagatatcccaatgtatcactaacaaaccctctagcctatatatacatcaagtaggaggctaagaaggagatcttccttttgacttctttttgagacattttcctctcttttggagtttctactccgaaaacttctcctagaaaattacttaaaggcaaccaaaaataccacattgatgctggcatcttgttcattgagtccaccatactcaagcaacgccagacctcaaaacaccattgatactcatctttttccacaaattattaatttattgtttccaagaacttcacaacctttaatttagatcagatttatgaatatcatgtcttccacgagccttatattcataaatcttgattaagatttcatctagaaatcatttaatgtacttttgtctacacactcttgagaatataactctggtgtgtcggaactaatcaataaaactacaagtagatgtagccccattaccatcacgacatgggggttgaactactataaatctatggtgtccatttaattctttgcggttttattagtcagattaaattcaccgtggtcctcttttattttatgatcttcttagattagttgataaaaaactacgtcaacacaaagcatagtggaattttatactaatcttctatataccgactcaacagtttgaatggtgaattgattgtactttggactcatcgttcgttttggatctgcatgcaactggattctctattttttggttgataatttctcagtaatttttttgagaaacaagcgatgtttctacaaaattaatgtttaatattacttttctggttattaagataagattcattatgcttttaattgcgaatattatatatatatatatttaaatatgaaagtatatcttattcaaattcgattttaattgaactgcagtagatgataatatattttctgcaacatttgcgaacatacaacatctagtatttcggtaccatcgtcaaattgtacatatataattatactaataattcatacagaatatattagtgtcggtgttatgttataatttctaatgctttaatggcataatcttttaaagtttctacacatagaggcaataatttcttttactatatgtgaatacttaaataacaaccagggaataaggaaaaaattattgaaaataaaaatagtaccatgaacaaaattgctcacatctgtgtttggtcatcacttgaataagaaagttcaaaatgctcagcaactgagtataacagtgatctcaaatttttcaaatcctgaaaataacaaaagacgacattaaagaatcaaactttaggataaagggaaggcctaaacttccatgaaaagttgattattagcaatttgagttgagttgaaccataacatatcaaactcaataagaggtgcaagagtacctgaagactatctaaaaatagcaagctttggtgcttagaaacctcatcgaaattcgatgcttctctaggattgggcggagtagattttccatggtgcccatgactactaagagaataatttttcctaagaaagtaaagttggtcaacttaatactcatcaaagaagaagatgagaggaatcaaagcaaaggtgggaaaatggcataaccaagcattaacctcaaactttaaaagtctgttttccctaattgaaactcaaatccaaaaactaatgagagtatatttataaatatgtgaggaacaaaatctgaacataacagacactgtgcttgtctgcgtggtttgggtatccactaaaagctaataaatacaataccaacaactgctattttgggagctttcaatactttcaatacactattttatgaagattatataagaaataagcagcataaaataggtagtgatggccatatttctgcaaccatctcagaaggaaatcaacatatcaattgttaaaagaagaaaaaaaattaaatatataaataaaaatattgttattccatacttctgtaatcactgcataaaaagagtattttgtctgagtttcactaatacaatggaaattgtataaaaattgaatg

SEQ ID NO: 64482 - DNA, 697 bp, Cannabis sativa
aatggggatatcgggtgcccttgcctaagccctttttctcctttaaagctacctttgattctgccattcaacataattgagtaatgggaggatctaacacaaatcatcaccattttaacaaacctttgagaaaaattgaaagcattcaacaaatcttcaaggaaatcccaactaactgtgccataggctttactaatatcaattttgatggcacactgaggagaaatattcttcctattataattcttcaagatatcttaaagaatcatcatattatgggcaatggttcttccttggatgaaggctccttggttttgcttaatcacataaggaagcactatagttagtctagaacacagtagttttgatataaatttataaattgtagagcagtaggcaatcgacctattccacaacccttgctggattatcattcttagggattaatgatataacaatagaatgtagctcaataggcatcctcactattttaaaaaaaaatgttgctagcctatagatttcagtaccgatttcagtccaactagccttgaaaaaacctgatccaaagccactggtccaggagatttgctatctgaaatactgaacattactctcttgatttccttgtgagaaaagggctttagtaacatgagttgctggtttagatctagctgatttccctgattaaaacaatcaa

SEQ ID NO: 64483 - DNA, 838 bp, Cannabis sativa
ttatgtttcttctatatgaatgaagcctttttagatttaacaataataataattgaaaaaactaaataaaactagattaataaacaagatgaaaaaacttcccaacaaataaacctgtcttaacccagctttaataatcttttcttctcttaattaatgattaactcggctaaacttagaaaagtcatgaaacataatataaacaactttatctaattctccgtttctttagatttttattgctataccaaactaaaaacaaataaaatgggctatatatttcttgtttttcctttttgacaaatgaataaaatgatttacattgtttacggtttgaaaaaaaaaagttgatcagttacgttttttttttttaatatgtttttgaaaaaaaattctacttatttcagaggttaaaatcaatcaacttgaattctcaaaaaaaaaaaataaataaaaatcaatcaacttgttttgtcaaaaaaaataaaaaaaatcatttacatgaaaatactaacttattattaaggttgaagtggaacacaaatacaaatgggatgaggactttttaccaactaataaagctcaccatctagtctaaagatatactaagttaattcgtgtgagtggcaatgctaaaattaagactaatatgaaaaagagataataaaatcttaatattgaaataaataactcattaggcaataaatttgagttattagttaaattataatatgtatttttttttaaataactaataattcatattgatatcttaatatgtttgacatctcaaacgactagtttagcgagagtggcagtaaaattgtggaaaaaaatt

SEQ ID NO: 64484 - DNA, 1169 bp, Cannabis sativa
  modified_base (682)..(685): a, c, t, g, unknown or other
atttgactgatatattttttttttattattattattattttaagatccaataatgaaataataataaatttatttattcctcttctggtttttttatcgttcaacaatatctataataatatgttagcaataagaagttaacaaaaaatacataatttatatggatgttttttaaatttaattgtatagttcgagctttgtaagtatatgagttgttcaaatataaaaaagagaaattatagtaaaaaaattagcatttttgtaatatataatgcggtgcggtttaaactgtgattactaaatttaaaactgcaaatgcactgcaccatgcgatttggcaaaaacacaaaaccgcactataaagaattttaaaccgtatttttatgcagtgcgggtcatttgatgaagactcctatatttcaccgcaaaacatacaattttttcttttaaaaaaaaataataattaatgtatagaaattagaaagttataagaaaaatgactcatttctttattgattttgtaaagtgatgtttatatataggcgctcaactaatgatgaacatctgattttaatataaaatgatcttatccagttattatgctttaattattggttcttccattttttttcacatatgtataaaagaaacaacgacaacaacaaataataataataataannnnaataataataataataataggagaaacaactcatcatgtattatggggtgactttttttatgtattttttttttaggaaattacattgtatattaattttattttatctattttatttttatttttattttcatattatttaaaatatattaacttttatagatgatgtccccgttatactctttaattaatataaattatatgctaaatttaagtggaatgtgaaagtatattaagcaactcactcacaaaagtggatgcatatattaataaaatataatatgagagtattttgtattaataaataaaaaaagaagtatttctcaaattatcctatatttcttttggaagatcttcttgctatttgtcttgatttttatgacttcattcgtttttgatcctttgcatatgtggcctgtttagtctttaaagatgattttagttatcatgtagagtcgagaatctggtttaggagaaataaaat

SEQ ID NO: 64485 - DNA, 1283 bp, Cannabis sativa
attttatttattatttgaaaaaattgacatattatagtagtgacacgccaaatgcgattggataaggatatgccgacacacctagcgtgtcactatatcatgatcataattttcttttttaaaaacaacaataaaaaaaatagctgttaatttttttgggaagataaacagctgtaaaataatatacttaataattaaaaaaataaaaaataaaaagttgatattaattagggtttacacattagacaagacaaaacactaaaaaagcatttctctatcttctccctctcgactgctcttcttcttctccagcgaacggcgtggtctgcgtcgtctcctccagcgaacggcgttgtctcctctagctagaatggcgtcgtctcctccaactaatggcgtggtctgcgtcgtctcctccagcgaacagcgttgtctcctccagctaatggcgtcctccagagccggtctcctccaacgaatggcatccatggctccactgatactcggtcatctctctcgctcgtcatctctctcaaatctctgtttattttttgtttctttctctctctctattctgtgcagagatctcgttccaccatttttggagaagtcgcggtgtttggagttgatgatggtcaaccttttttaataatcgttatgttgaagaggctgagaggttctctcaaccagcaggctcagtggctcagaagagagcttttttcaaagctcattacaagaatttagcagctagaaaggcaggaaacactgctgctcttgatatataaacctcctcaaccaacccatgattcaaaagtttccaactttgaagctgttattgatgaactgggacaacgaaatcttgtactggttaatggaaatgggcattgtccaaagatcgaaacttttgacagtagaaaagtagtggttgaagtttcaagcaataactctttcttcttcaaaatcttcaaccaaatcttcaactttcacaataagattatcgaccaaatctgtagcttctactactactgccactccattggactagtaattgagcaggctgataagaagagatcatcatcaactccgaaatcccttcacaaagctataaatttcacacccattaattattagagagcttaatagaataacatcatccatgctttcgattctagttcatccgtcgttagtttcagttcgtgattgacggggtgaatctgaatattttttggtcttttttttcttatgttttgttcataatgtagtattgtttgtgtaatttttgt

SEQ ID NO: 64486 - DNA, 1663 bp, Cannabis sativa
gagttgattttacccctaggcttgaattggccttaaattaagcaccaaatgttataaaaaataacttgtcctaaaataaaagcactttgtgagggtgaaattaatttatccgaaaaaatctttaaacaattagcaagtaccttagaaaaagttcataaagagtgttgtaaaggctaatagtctgaaatcttgaatggcatgagcatgctgctttttagggataagaacaattagggtagaatttatagaagagaactaaaataaaagcactttgttagggtgaaattaatttgtccgaaaaaatctttaaacaattagcaagtaccttagaaaaagtttataaagagtgttgtaaaggctaataggtctgaaatcttgaatggcatgagcatgctgcattttagggataagaacaattagggtagaatttatagaagagaattcagtaccattattaagacaatcaagggcagcattaacaagatccataccaagagtagatcaattttttttttatatatagaaataggcattaaggccatcaaggccagcaaccttatcttcagacaattgaaaaagagctctcctaacctcattagcactaaattagttaaaatttggatagtagaatcagcatcacaaccctaggattggagaagggaagaaaaataagaagaaacaaacaacattgcaaatgcgctcaaaattatgaacaatattacccttatcatccttaagaaaccgaatagtattgatctttttccaagtattgatctttttccaataagacgcaaatcgatgaaaaaatttagtatttttatccccaacattgagccaagtaattctagctctttgatgccaataaacctcttcttcatacaaaagagcatcaagttgagattgtaggcttttaacttgattagcagagttactattaaagggtaatgaactttgaagttcacctatagccttgctaagagcattaatcctagttttgaagagatggcgagtggagacattccaagacttaagataggaaatgcaagaattttgcttctcgagaaaacgaggaaaagcactattattggaaagattagtaatactccaggactccttgacaatataaaaaaattcaagatttttaagctaaatattttcaaaaccaaattttttattaacaaaagtagggcaaatattattctttatgttaagagaaatcttcaaggctcgatgatccaacccatagaagggcaaatggtaaagaatcgcattaggaaagagatcacaccaaggctcagagcttacagtcatgttcataagtagaaccatgtttccaagtatatttattcccaatataaggaagagggaaaagattaaatttttcaagaaaatgagcaaaagactccatgtcagcattagaataattacccccagatttatcactattcaaaagataggaattaaagtctcccattataagccaaggaagattaggagcattataaaaaatcttatgaagaaaattccaagtaataggtctttgctatgtaccggagaaccctagaaaccagtaaaatgaaacatactagtatcattaaaactaatattacaaagagaaagtgaaaatattaacataaatatttggcacccacgaaagcatgag

SEQ ID NO: 64487 - DNA, 790 bp, Cannabis sativa
aaatgaaaagttagccaacccgaataggtaataaaaatgcataatttttgttaactaaatataaaataaactaaaagattgcttttgattatggataacttatctaataacgataaaaaaatatatatgcttccctaatattaaaatatagctaggtcaaaatagtacttttttaaaatttaaataattaacaatgtagctagatttttttttaagaatgatagaaatggattttagaaagaaaaaaaaaatgaagttgtgatgacacaaacaaagaggaaaaacaatgagaaatttgattttttatgcttacatatacttaaaaaatttcccctaaactcataatatttaatatttgtaggatatgacacattttataatattcctaaaatactccatatttacatcaccccctctctcttcttctctcttttatttcatagccatcaggccccatcagacccactatcaggcccatcgagcctaccatcgggcccactatcgggccatattaaattctattaattacacaggcatcgggccacatctggcccaccattgggcccactatcggcaccaccatcgggccatatcaaattctattttttttacataggcatcggaccccatcgggcccatcaagtctttgtcttcctcaattttatgtgataccatcaaaccggtatcggacctgcatcgggcccgaaaaaatcaaagctagatttttcccaaatcacatctgatgaagaaaaagatccaaagagggttcggtcggtggggtggtgggttc

SEQ ID NO: 64488 - DNA, 737 bp, Cannabis sativa
  modified_base (214)..(215): a, c, t, g, unknown or other
ttatagttgcattatcattttatgatagtttatgtattatgcaggaatttaagttgacaggtaccaacaaataatagttatacatggtaaattttatgcaataattgcatattaattttataatgttggaaaaaagatctgattaaaataaaactgatgtaaagcacaaggttcacaattggtaacaactgacctgaaataacgaaaagatcannagctcccaatcaatccaaatcaggtataaccaatatagataagttacattcagttgcatagtcatttttttatgatttcaaaataaaatcaagcaacaactatgttaattgcagttaagttccatgatttttcaagttgaattacagttgcatcaatatttcataatagttttattcaaaattgcaggaatttattttggatagaggaaaaagagaaaacaattggacaaatggttagtttgtgtaataaatttaaaacgtttcataatagctgcatttcagttttttcatagtttcataacaataataaaacaaaaaatgagaaaaacaaggttcagaactggaaatacaagacttgaacagaggaaaggaaatagaagtaagtttctattctatttcataaatataaaagttttttttgttataaaaatcagtttaaaaaatgttcatatacattactaacattagcaataacagaatcaaaacagtttcaaaattgttgccttacactaataataattt

SEQ ID NO: 64489 - DNA, 659 bp, Cannabis sativa
tttatcaaaagtatagagtttaataaatttaatcaccatttatatatatatatatatatatatatatagttattgcaatttaagagcgtattggtttagattgatttaaaggaatacatcatcgatatctaagctagtaagctataaataatatttcagccctggccatataagtttgagattatatttatatgtttatatatatatatatataaattagctaaagattccttgagttgattcatctaactgttattaattaaaaagagatatcaaagctctaatttatattatatatagaatttgatatagtgatcatgttcatgtatacatcaaacgttttgataattaatatgttaaactaaataaatgaaaatattctatattttatacgtatactcttggaaaagccaataaatataaaaatccaatccatatatatcccatctctatggtcaggtcatacaacgtcatccaattcactcatatatcctctttttcttaattagctagattttgctgattgtataagtatgacaggaatatatattgagaatatatatatattgttataaaataatataaagtagatgagaggaaagaagaagaagatgaagagagaaatagaaagtgaatgagaatttatgagttgtttattc

SEQ ID NO: 64490 - DNA, 701 bp, Cannabis sativa
cattgtaccaattgtcaaaagcctggccattacaaagacaaatgctattttttaattgggtttcctcccggttatggctctcgaaaaccatcagattccaacatcaaaaaatctgatgctggcaatacatcaaagaataaccttcaggcctctcaagtttcctcatcaacacctgacatttccaattctcagctcacacaagctcagtgtcaacaactgatttctatgttggcacagcaactgcagcccacagatgcatctacctcaactgacaaagcaggtgtgaacaatttctcaggtatttttcacccttctttatggattatcgacaatggtgcaacgcaccatgtctgctgtcatttagagtgtttttcttctatacaaactgctccaattgatttttctagtccaattacctactggtgccaaagctaaaatcctaaagattggcatagttgctattaatttcaatatatcccttactaatgttctctttgtacctgactttaaattcaatttactgtcagtaaatgcactcacacacacaaacaattacaagtttctatttgatactaaccattgccatatccaggaccctttgacatcgaggattgggacagctaaacgttttggcaaactatactacttgaagcaaatcgactttgaggataattttcctattcaaacttgtaatgttcaat

SEQ ID NO: 64491 - DNA, 568 bp, Cannabis sativa
agtggatgagaaccctaacactataaatttaaaaatttcattcatgcaaaggcttggaatcattccttaagtgctcagacataaattagggttcaaacacttgtgtaaattataaggcttttccagtctaaacacaataatagtgactcgtgtactgagactctttaacgctctaatcacgtaaaaactagctggttttattctttgtctacaatctttttttaagctttataatactggtttctgaaaatctcataaacatgacctgatacttttttgaaagcaaatatagaacctttattaatttaccaaatcagctaaaagacaagactgcacctcaacagaaacatcactcatgttgaacactcaatctggaaaagaacaagatgctctagcaagactataaacaaccatgttagcatatcgtttaataaaaaaataaggaaacattgtttaaacctaaatgaagaaagcataggtgataatttcgaataacttgctaccaaacaatctgactccaactccacttttcgcaatggttaagttttaatccagcttaatgcttctt

SEQ ID NO: 64492 - DNA, 804 bp, Cannabis sativa
acttacaaagcaatttccaacttcgccaatgaatcttagaaccatctttgtttgaaccccaccagaaatttgccatcattgattccaattgattacagaaagttgttggtaaacggaaacaactcatagcataagttggaatggactgaacgacagctttcaaaagcacctccttaccaccaactgagaatagtttttcattccacgcatgtaatttttgccaaatacgctccttgatatcactaaacatttcctttttatccctctctgaaaatgcagggagtccaaggtaacgttcatgacattcactaataggcattcctaatgtttgatggaaaaaatcttgggcagcttgtgtagtgttgggtgagaatgacatgactgactttgctgtgttcaaaagttggcctgaagctttgtgatagatatctaggaccttgttaatggcccttgccgaactatttgtagcttcacaaaagaggaggctgtcatctgcgaagagcaaatgagaaatcgatggagcatgtcgtgttaacctcaaccctttgagattattggatgattcttcactttgtagcaatcgagataagccctcagaacagatcaaaaatagataaggtcacaaaggatcaccttggcgtaacccccgggaaggctgaacatgaccaacttcttctccattaagcatgaaagagaaactagtagagtgcaagcaattcatgatcaatgaaacccatctatcatggaagcccatctgtctcacaacttccttaatataggtccattccactctatcaaacgcct

SEQ ID NO: 64493 - DNA, 994 bp, Cannabis sativa
aggttccatcccaaaactaattggcaatgggaggagtagcccattcatcttatatatcacgatttatttccacacattagtaatgtgaaactaactcttaatacctatttttattcccatttccatcgtattctcattaccattctcatattcttatgttttcttatattttcattctttctaactaaacgttaccttagtgatgaaccttcgttcggactattggaaagtcaaaattacatatggagaccaactgtaattttttttgattaatattataatctctaacacataacatcctaacatagttattattatcaactaccatcagtttctccacatttttacaactcttcatccgtctaattctctaaaaactgcatctattttcctttttcttccaaaggagaaaaaacaaatagatatttattcatatatttcttttttcttcctaaaggtagcgataatatttattcatataggtggcttttgattggaaggaatgaaaatataaaaatagaaatgaaaatatgaataggaatagaataaaatttaaaatgcataaaaaaatcattaaaaatttttctcttgttaaattataatggtttttcctttttttttttaaaaatggaatagtcattccaccaaaatagtgaaaaaaaacattctattaaaatgtcattccaatattttaatatacaaccaaacaaaaaaataaaatgaaaattatttctatttcatttcattacctccaacctaacgcagccatagtattttttccttctaaacataacgatagtatttattcacatagtattttgaaacttattttagtggaaacatagacaaaacacatttactatacaaataataatacaatatggaaaattgttgttggtgaggagaagtaataacataacattacatcactttggacaggtttaatatcactattagtgtatgagtttcgcttattttattaaattttatttta

SEQ ID NO: 64494 - DNA, 901 bp, Cannabis sativa
ggtatgagtttttgaataagaaaattgcatgcatctcaatatatttttaggcagctgattttgtgcccaaaaatgtaaaacacggaatgtattctgttgtacggcaggtaggtcccaaagtaagtaataatgtgtgtgaatttatttatgagtctcagggtacataataatgggtcttagggtatgttactattttttaaccctaattacccctagatcaaccccagtcctcagatcaaataactacctcatctaacggttttcatacatcacggaatacatctcctaaagtacactaacgggacaaaatcgtgtccctatatttttattactaaaagtaaagaagagaatggtcaaatttggtgaaataagataaggatgtgctccaaaatctgtagagttcattataatcattgcttgtaatgttcaaagctgaaataaaagataatattaatagtggtgtccttctcatgaaagggagtgaatagtagttggtgtttggttgctaatttgctacagatatgagcaaccaaattaaaggtgaataatctatggtcattttggggttatgcatttgagtaaccatattctatatttagtgaagtacaattgtagcttttgagtgctcacgccaagtcgccaactaagaatagtcaatcattaaaagtgtggtataataggtcatgacaatgcaaagcaaataatcattctagagtgtttacaaggagttttagagaaatactaaaagactagtaacaccatcatgcagttgcactagataagtatatacatattttagaatatattatgtaatattgtatatatatacttaaaggtgtacatattttaaatacctatgtatatatatttaaaatttaatatattatgtaatattgtatat

SEQ ID NO: 64495 - DNA, 2613 bp, Cannabis sativa
gttcaagtcatggtgatccccacttgttaataacctaattactagtgatatcacttaattgtttttgttattttagttgttaagctgttactgttacttaacaaatttctgttacattttaggttgtatttcttggtctataaataaaggtttgctacaccgttttcgggtatgcttttagctccatttatgtgctcaattattcttcatctgcttttagcttctttcttggtttttaccttccacatgttgtcatcgtccttgacttgcgtccatggaatcttcaacttcagatcctctggcctcaatggcccctgttgctcctcttcctcctcggttcactgggacccatttgtaaattcgctttcttcttccctcaccccaaaactcgatcgccttaactacctgtcatggaaatctcaagtagttcctacagtaatcggccatgacctcgatcagattctgttctccgatgtcactccacccacaactctagtcaccaaagctcccaacctagagtatcttcaatggaaaaagaaagaccaactcctaatttcttggctccggtcgtccatgtctgagccgattcttgcctcagttgccacatttgccacttttttttagtttggcgagcttttgaacaacaattctccaactaaactaaggctcgcttgctgcaactgaagggtgtgttctctcatcttcagaaaggaaacctgtcgattgctgaatatgttgaaaaggcccaagccaccgcagatgctctggccatagcaggatcgccagtcactcctcaagatctggttttgcaacttttgaatgggtttggactagagtttgatctagttgtttctggaattacttcttgcggtaactatctttcctttgaggaagttcaggccctcttgctatcacaagaaacatggttagaacatcacaacaatatgactgatttgtctctcaagatgaaagccaacttgagtgttaacccatcaagaaatggaggacatcatggatctggtggtggacaaaaaaatggcgtgggtcgtggttctggtcgatctttttagcgtggtgctggatcaagattgttgtgtcaagtttgccttcggtttggacacacagccgctatctgtcattatcgatttcataaaaactttgtcacccccaaatatggtagttcttcttcatctcaagcttttttaactaaaattgattgtccttatgatccacaagccttgacaactaccatgctccctgacatcggtgatgatgatctctggtatgtagacaccagagctacgaaccatgtcagttgtggcacaaccaatttggaatctaccacaccctaccacggtactgaaacgttggttgttagtaatggtaagcaattactaatttcgtatattagtcaatctattattccctcctcaatcgatttctctcctttacaattaaacaacattttacatgtgccttccattaagaaaaatcttgttagtgttccccaactcactactgacaatgatgtctatcttgaattccataaatcttgttgttttgtaaaggacaagctaacagggacagtgcttcttaaaggcagagcaaaagatggtttataccagcttggggatgcgtccagtccaactttacaatgtcatctttccaccacttctagggaatataattctcgttgtaactatttttgccattgtcattctagtgtaaatctgaatcttgtaatcttcaagagataaataaaacaacttttgatttgtctgatgtttctccacaagttttttctgtctctaagttcaatgacattaacttttggcactctaaacttgggcaccctgttgaaaatactttggtcaaactgttaccacacattccctacactgactcaataaaggcattacaattttgtaatgcttgtcaccaaggtaaaagtcacaagctcccatttttctatatcagacaatagggacaataaacctttagcactccttcatactgatctatggggtccttcccatattgtgtctaaagatggatttaaatattatgtccatttccttgatgattatagtaggtactgttggattttccccttaacacaaaaaaaccaagcctttgatgtgttcataaagtttaagagtcttgttgaaaaacaattcaatttgccaatcaaaagtgttcaggccgattggggggtgaatatagaccttttgcacgcttcctagcagatcaaggaatacattttcaacatccttgcccaagaacaagtgaacaaaatggtcgtgccaagtgcaaacacaaacatattatagaaacgggtctcactttattagctcatgctggtctaagtatggactatcggtggtatgccatggctaatgctgtcttcactattaacagacttcccactcttgttcttggtaatattagtccatatgaatgtttgtttggaaaaaacctgattatagcatattaaaatctttaggttggaacagttatccacacttgcgaccctataatgctcataaacttgaactaaggtctcatgactgcttgtttttggggtattcttctcatcacaagggttatttgtgt

SEQ ID NO: 64496 - DNA, 718 bp, Cannabis sativa
  modified_base (360)..(361): a, c, t, g, unknown or other
ttgaagtgccaatctcactatcggaatgttgtagtgacaatctcacttttctcgggttgtttacaaaaccggtgtcaacctcacctaaaactgagtttttttatagcggtgacaacctcacctctcaataaaatggatatttgattttgaaatacaaagcaaactctctctctaataagatgaaatacaatgtgaaatcctagagagaattacaagtacactagagaagataagaacaagtttggctcaagtgtgtgtggttggtgtgtttatgaaaagataattctttagctcaaaacactttgaatgatgttatatgatgaatagaagctcaaccaaccttaatttttgagtgaaaannagtttatatagtgtaggaacaaaatctagccgtttatagccgttagcacattttcaaaaagaatcctgggaaaaatgaactacctattttaaaacgaactacctattctctgaaaaatggactacctattgaaaaagggttggtcgaaaatcaggcaggttcaaaacatgcatttttcggcactaaaacgtgcataactctttactcgattatctgttttcaaaaattccacttttgttctcttatttaaacaaaatgtgatttataaattcaatcaaaaaaatatttaaaccatctggtgagaaagcttgttgcacaagttagtgagtgggccaaaatttgtacttataaacccta

SEQ ID NO: 64497 - DNA, 1350 bp, Cannabis sativa
gattcagtagttgacaatgccaccactggttgttgttgtgatttccaacatatgcagcttttgttgaccatgaacacatatgcagtagtagatctttgattgtccttgtttgatgcataatcagcatcaacatagccttctaacctcacattagatgtatccttttgataaatcataccatacttgattgtacctttcaagtatctaatcagccacttcactacattccagtattctaacctaggatttgccataaacctacttagtacactcagagagtgagctatattaggcctagtactgaccatgatatacattaggcaaccaacagccatagcatagggtacacctttcatactttctctctttgtagcagttttagggcaacattcattagacaatttgaaatgcccaacaagtggcacaacagtggccttggatgaatccaagttgaacttcttgatcactttctcaagatagcttctctgagatattattaatcttccttcttgcttactccttatgacttcaatccccaaaattttcttgactgctcccaagtccttcatttcaaattcagagttaagtttgttcttaatggctcgaatttcagccttgtctttgctatgatcatcatatcatcaacatatagtaataggtacacaaccttaggtgtcccaatttccttgtagtaaagacaagagtcaaattttgaccttgaagaactaacactttgaacaaactggttgaacctttgattccactatctgggtgattgtttcaacccatacagtgattttttaagcaagcaaaccagaacagttttgccattttctacctgaaaaccaggtggttgctccatgaaaatctcttcatccagaaaacaatttaggaaggcagttttgacatctaactgctcaacctccaagtcattatgtgtagcaatggctaacatcatccttatagttttgtatttctcaacatgtgagaagatatctgtgtaatctaccccctcaacctgtgtgaaccccttagctaccaatctaactttgttctaggtggctcaccttctgtcattccctctttttctttaaacaaccatttacaggagacaactttcttgtcttgtggcctaggcaccaaaatccaagtcgtgttcttcttcaaggacatcatttcttataccatagcagcaagccactttttctttgatttgcatgcaatagcttcttcataggtagttggttcaggttcattctcaaattgaaccacagccaaggcataggctatcaaatcaacctcagcatacctactgggggcctaatctctcttcttgtcctgtctctagcc

SEQ ID NO: 64498 - DNA, 1752 bp, Cannabis sativa
tatttgtaacttttcttttaggcagtactataaattaaaggtgttaattaagatttttgtcttttgaatttttacatgtattaaattatattgtttttgaattttttaaatcgttaaaaattctttttaaaatattgagattttagatttaaagatttttgtttaattttattcaattttgctaatgtggtgattgtctataagttgcgccctcactttgatatttacaaattcatgttttttaaactttaacatatatcaaattacgccttttaaatttttatcaactacaaactttctttagtaaaattgaaaataagttcttaaattttaacaatctcaataattttaaaagaatttttaataatttgaaaaattcaaaaaatataacttagtttatatcaaaattcaagaatatagcccaaatctaaattagcttaaataaaaacacaaactatctaaattattataattagcctcaataaacgttacaagtgtaatataatctcactgattaaatacatttgtactttcgacatcaagagaaatggtgtaagttaatactggattaattaataatttgaattaaattatatttttgtttagagaagtttttatgatattttgtaagagaaaatattctcaattagagatatcctgaactattctaattattgtataagcctcgtctttcccatcaagggtcacttcttcaattttatatagaattaagggaatttttacattatatattgaaatttttaatattttacttttttatggcggggcaaaatttttttaaaaaatgttgtgtaaattttatattgtgtatatcgttaagtttttacggttgttccacagttgctttttagttgttccactattattttaattgttctgttttgctgttttacggttataattttatatatataaaaaaaaatatttttataaaaagaaaaaattatgtatgacagtcaaattaaattgtaaactttcacttaaaatctaatatttttataaaatcccctaaaattagctcacattttatttgaaataataaattagtggagttgacaaataataatgagaaatttaaatagagtactattactagctagaatggaaagttgtgggagagcctgtttcagataagtcatgatatatatgaaagattttttagtttttaccgtcttttttagtttaaattgtatatgtatctattaactaataaactactattgtttctagcttctagtaatccatcattttggaccttttacaactcaaatgttgtctctatctctttctctcattattttttgaagtaatttatagcgtaaatattaagtgtaattctagttcaaataaatatttaagttataatttttaacggtataataatacttaaattatatttctagaacttatgtaggtatctcgccattaagtgtcaaattattatctatattattttcttattggtatatttaaattttataatacataaaaaaataaaaatttaatgagttatcattttttctctctatttatcttttttatttttttcttttccaattctctctctcccactaattattttttttatctttatattaataaatatatatatagaatatgaatatttctagttccatatatatgtgttggcaaaagttggtattgcgctggcaaaatagaatttacccatgatgtgttggcaaaaaggagttggcaaatcaatgttggtat

SEQ ID NO: 64499 - DNA, 2859 bp, Cannabis sativa
ggaaaagaacaacaaaaactgtgagcctcaggaattgtttaccaaagaacacaagagattattgagatgtggggagttatggatgaaaagcacagccaattcatgtatgcttgtagcaaccttaatagccacagttgtctttgcagctgccttcaccttaccaggtggtaacaatgacaagaatgggacccctaatgaaattcaagctaaggcatttctaatctttgtcttatcagatgcctttgctctattgaactcagttattgcaattacaatgttcttgtccatccttgtctcacgctacacagaacatgactttctgaaacggttgcctttgaagttgatgactggactaacttcactgtttctctcattgataacaatgatattagcttttagtttctcattcgtggttgtttatcatgaacgtcatggcttaaaatgggtaccgcttttaatttccatgcttgcgattgttccgatttctctgttcgctcttcttaaatttcctcttctgcttgatacctttagatcaacatattgttcaagcaaagtatttcaaccaaatcgacttgtgttgtactaggataatgtatcaaccttctgtacactggattacgtacaatttgcaatattatatatattatatgatatttttcttaatttgcaatgttaaactccacacacgtgtgacgtgttttacaatgtgtgtgtatttttcttaattttttaaacaactaaaggataattaatttgattcaaatttattttgaaaaatcaaaaggagcggagacataagttcctcttgccgaaggcctctctttaaatcaaagaaattatgaagagatccattcaacatgaaggaatatttttgaatgcgaacacataaacacatattattatcaaatgaacaaactttattggacaacattgcttcaagaaagtctcaaatcaatagtatcataagtctttccaagatccatattgatcatacaagttgaatgaactttttccttccataatgttatatcaaatcttgagatatcattatattatgagtaatgtaatacccgtgtacgaaaattccttgattttgtgtaaacgggatcaggctgagtaggggaggccctattatttctcatattttctttgctgacgacctcattcttattggaaaagccaatgtggaggaggcaaaggggttcttggattgtcttgagaagttctgctcttggtccggacaaagggttaataaaatgaagacctctattttctttagtaagaacacacccagggagactaagcaaagaatcagggagctgctagggttaagagcgccagagggtaatgttaattatctggggcttcctctgttcagatctagacaaaaggatgcggattttaactttatcttggataacctaactgcgaaattgcatggttggaaggcgaagactctctctaaagcagggcgagctactcttattaagtctgtgggattatctttacctctgtatgctatgcaaactacgaaactttccaacaaacttgctgctaagattgatggtttagtgcgtgacttttggtggggttcggagaaaggaaatcacggaatttatctgaaagcctgggacaaaatgtgcctcccaaagtctctgggaggcttgggcttccggaaatctaaagagatgaaccaggctttcctcgccaagtggggttggaatcttctgacaggacataagtccttatgctgtcgtatacttgaagccaaataccttaaaggtaagtctttccttgactgcgagccgagagcctcagactcctggttctggaagaatgtggctaaatctaaagcattaatttgcaaaggtgcctgcaagagagtggttgatggaagggatactaatatttgggaggatccttgggttgcacacttaaagggttttatccctcaaccaattggtcgggatttgaatagggaggtaaaggtagctgagctccttttggataatggtggatggaacctccaaactcttcacaagttgtttgatcaagatactatttcagccattctgaaagggggtcctcccgctggcctcggaaatgatagctggttctggactttggaaagtaatggtcgattctcttgcaaatcagcttatttggcccaggtcgtggatagagaaaacccgggcgaggtggccccatctctgtggaacaagctctggaatagtaagattccagagagactaaaggttttatggtggtgtattctgtctaaggctctccctgttcgttcggtgttacgaagaaggttccctatagaagacgaaagttgccccttgtgtggtttggaggaggagtctatggagcatcttttcttagcttgtaatgttgcctctcacttatggaggtcgtctccctggggaatttttcctatctgtgataccggtataaaaatgtgggactgggttaaattcttatgggatctcaaaaagagaggcatcaatgatcaagaggtctttctttatgcatcactcattattgacacgatatggcggacccggaatgagaaggtacacaataactgtcctgtggatatttttaaatgcattgactctattcgtttctcttttgcagatcatcatgctttcttgctcccttgccccatccctcagccgacgagttcttggagtccccccccctcaagattggttgaagctcaattgcgatatcagaatggggttggagtgcatgtgcgctgcggtggttgcaagggatcacgctggcaaggtgatctgggtgtctactttgaagttggggttttctaatgtcctctgcggggaagcggcggcctgc

SEQ ID NO: 64500 - DNA, 1190 bp, Cannabis sativa
gaagccacatgttaacaatattttgtgctgttgttaatgttatttcctaaataaggaactctttataagtactaatatatatatatatatatatatatatatatatgctcacgaatcaatcacgcattgagtaataatatatatactattaattgattaaaagagaagactatattcacacactataataataatatatatactattaattgattaaaagagaagactattttcacacattataataataagatatatactattaattgactaaaagagaagattgttttcacactaattattattatcattttgactgataaagttttatcacttcaatttttcatagacaaaaattataggatgtaagtctttcaataattattatgtggacaatttagtaattatatatgtattgaataagatgattatgctatgtggtgaatataaagcctacttaactaatacaggtatattactcagtatatataagccatacatgagtaataaatgtagacttgtaaaaaaaatattactctacacaaaacttaattttatatggtggagtacacttagtaaatattaaattatacttttaaaaaaattaattaattatttttttttctgagagagtaaaaattttcattaatagttaaatcagacaaaatttattacataaaaatataactcatagagtaaaattaataatagtagacatatcaaactgtttgcaataaaaataaagaaaaccttaacaacaaccttaactaaagatccaataagtcgtcggtgatcaaacataaaaagaaaaaaaaaagtatgtagtaaactaagttcccaaaccaaataaatatttgacaaaatcaacctatcaatgactattagccaataattttccaataaaaattaaaacataacaactgcattggaaaataatcaaaccataaatgtttaaataatatttatattataatataaattacactcttaatcataatattgtatttattttcaatattattataaatttgaatgcttaaaatgatgatatttaattaatattatatatattttaattgtacctagttttttttatctttttaaataattaaaagggttgagatcaggcccggccctgggcataggcgggctaggcctgtgcctaaggcccacccagcccaggggcccaa

SEQ ID NO: 64501 - DNA, 568 bp, Cannabis sativa
tttggtaaaaattttatacttttacgtacatatatatatagtggcaaaaaattgtatcatgcacaaatgactcttacaggcaaaatcaaaattacaatccttcaaatcaaattagtaaatgtagtctattcatttaaaatatattgagctttgaccaaattacagagccaaaacgaactcagtagctacaagatcaagttaaatataaagaataggagaacttagtagctacaagatcaagatcacttcccacgttcatctctcaaaatgaaagagtctgatcattagagactctataaaaagagaacctaaaagtcttaaatgatcatctcatcttcattcactgaactcttactcaatcattcacgcataacattactattattattagtccattctgatcattgtatatttttatggtgttctgtaaaaataacataaaaatagtaaaaaaaaattatatgaaagtaatagaaaaataatatctaaataatataaatataatatacaattatcaaaaaatcaacaatacaataacaagatacaataacaagagtacatcagaaaa

SEQ ID NO: 64502 - DNA, 556 bp, Cannabis sativa
gttcttttcaaaccctgttgaaattaggtatgcaatgaagtaaattatgcattatccatctgtgttactgctgctatttctggatggagtgtcacacgatgagcgagtgaaatttattatgaagaaaaagatgtatctgtgtgtgtacaacttgtaacattttgatatgaactgagctaaccgatgaatagatctaataggacagtagcaaaacagagaaatagcaaggactaaatgtagacaatatgtaaatcttgtgtatgctatggcagcaagagagttacagacacaatttccctaggcattcgagaggccttggactctcgatgatgcagagaaataacctcttaattcttgcataaactctctccctccctatactcgcctatttatactattctattcccattctaaaactatcctccaccaccatgacttagctacccttttatttaatcctgaggtgtaagcattttgagctattagttttcattgtttcgcctgtgcggactaatgttatgctgttttgctctcttttctttacaagtttttgatt

SEQ ID NO: 64503 - DNA, 1718 bp, Cannabis sativa
aaacaaggtatcattgaaaatttagactcttgtgccttaccattttgtgaagcttgtgttttagggaaacaacataagttgaagttcactccagcaacgcacagaacttaaatgatacttgaatatgtccacgctgacctttggggaccatacaaggtgcctactcactccggtaaacaatattttctttccataattgatgattacagtcggtgtattttgacctacttgttaaccactaaggatgagtgtctggaatagtttagaaattggaaaactcaagtagaaaaccaatctaatcttaaaattaagaaccttaggactgataatgggttggagtttattaactccaaatttgacaagatgtgtcaagagtttggaatcactaggcatagaaccgtagtgaaaacctcagagcaaaatggtgttgctgaaagaatgaaacgaatcttattgaatacagttagatgtttactgtttagttttggattagaaaaaccattttggggggaagccttagcaaccacaacctaccttgcaaacaggagcccgaatagagttatagaccaaaaataccttatgaaatgtggtacaacggaactcccaacctaatacatttaagaaatttgaatgtataacatatgtacaccaatcaattgttatacctatattttggctagcaataagaaactgacacgtgtaccatggctggaatatgaaccagcccaagccgtgcattattaaatgcacattgaataactcgcctcgagaattacaattaatagaaatattcaaacttgctgccatataggtaataacgagatgtgaattataactattaactgagactggtgagacaacaagtccatctcaggataaacagaatacacaatgaaagttatttagaacgagtaaacaaagagcttgcaactcattgattcacttacgtgtgagtaagagcttgtagcttatttatccacatactcatgagtatgtttaaggagtggaatcaacttcaatatctactcacctcgcttttgacatgtggaagtaaccgtctcgcaaatacatttcgaacgacaaaaaggagaattgtaggacacattgtatcttagcacttaatatttttcctacaaggatgcttaagaaagataatctgcaatcaacgagaactatccaacatagtcaacataatcgtctttagataaagacaaaaagcagttgaacaatcatttaatattttcccatgtgcttaaagttgaaatatgagaaatgtatacgtttcataagcaattttaaatgaatagattccaagaaaataactgtcaccctgagtatctataaatagggacagaacccaaggtaaaaggacggaaaattttagagagaaaaaaagatactattgctaaattacatcattgtattctgtatttaaatatatttatccttaataagatggaatcgtggactataaagatttaaattcaaaccacgttaaaatcttcttgttatttattacttatttagtaattaattactgtacaataaattctatatttgttacaaaaaggctaatatttcagttcacaaaaatctgcgttaacacaggccattaagaaaattttatgataaattcaactacattatttatggctaagaactataagagtattggtcaaagcatgcatatcgatattaagtatttagtcataaaaatg

SEQ ID NO: 64504 - DNA, 638 bp, Cannabis sativa
tgagtttcaaacctaaaacacctctttttgtcattcttctgaatccgaaccacattttccaaagtggccaccaccggtctatgatcagaatgtaagaaatccccattagtgactctaaccgatgggaataaatcatgccaatcctggttacaacaaaatcgatcaagccgttcctgcacatgcgccacaccttgccttttattgagccatgtaaaacattgcccctcaaaccccatgtcaaccaaggaacaattatctagagtttgttggaattcattcatagccgaaaaactacggtcagcaccacctttcttttcactgatggagaggatttcattaaagtcacccccacagatccaaggaagatcaaaaaggtccttaaggcgcctcaataatctccaagaatcagatctatcacttgctttaggattcccataaaaccccgtaaacctccataatcttctacccggacattgtaccagagcatcaatatggccaactgaaaacgactttaccgacacatcccaatcctcattccataatagtaacaaaccaccactcttccccacacaatcaacatgaaaactattctgaaaattaacatgtcgccttataccttccgcccaaccaccataaag

SEQ ID NO: 64505 - DNA, 771 bp, Cannabis sativa
atatgtgtgagtatgtaaatgtatctatatttatgtgtgtgagtatgtataggaatatatgtttatttgtgtgtttatgtatagagtgtatgtatatatgtgttaatgtaattgtatattattataattgttttttataaattaaatatcaatatttgtaatattgtaaaaaaaattatttttttaaatataaaaaccttgaggggcgaccattagggacgacatgtcgcccccaaaagtcaaaaaattgatttctgacacgtttttttaggggcgactttaggagtattttgtcgcccctaactagaggcaattttttgtcgtccctaatagtacttttaggcacgaatttttagaggcaactttttaggggcgaatttgaataattttaaaagtcgaccctaatacttatatttgttgtagtggtatgctcaccaattacatacttaaattctctctaaatctaactctaaaaaaattataaaaatcattaattatatgattgtttttttactataatatacgctatatataacatatacgtactatggtaaataaattaaattatttaatttaggtagaaatttaatattatattctctatctgttaaatatatagttaaagcttggtattatttaaatatagcaaaaaaaataatatctataaacaaaaaataaaattaccaaacataatgtgagtatgataacaatatactataagtgatgtggtcataggtatcatctaacaatttcacattttttcatatgtat

SEQ ID NO: 64506 - DNA, 755 bp, Cannabis sativa
gatgagttactcaagtatgttttttaggaagaagttaaaactgctttgttctaaatgcatcttaataaatcttccagtccgaatggcatgattcttggtttttatcaacattgttgacacattgttggtgatgatgttattaaccaagtttgttctttctttttctttcgcacattaccttccgatttaaatcatccaaatattgtgcattccaaagaagaacacataaattgactaagttgttatcccaaaaatttcacacctgatgtggcacctacacgtggcttaatccatctgacctttaatataataatagactttcgtgtaaaagtgtgcctgacaggtaccatatgaggctgatacccacgaattgcagattgacttccaagaagcatctggtcgggccatcattatgccacccatagaagaaaagatcaatataccttctaggattgctttgtgagtaatctcatcaaaaaagacaagtctcaaaaagcttggtcgggttgtcaacacgccaaccaggataaatgacaccaagaattttagacaaggctacacaagccttgatttcttctttaacaacttctacaaaatatctctagttgtatcctacagatgcggattcgatcgttctgcccgagattataggaccttcaacagattgtaattgcaccttagaatatagggatatttactttctagttactccattgtaacaacagttctcctataaatagtgaattaattcacaa

SEQ ID NO: 64507 - DNA, 569 bp, Cannabis sativa
tttccgattagtaagatattattttattttttttgagaagattatagtaagttattattaaattcatttttttatcatcatttattgtaatagttatcttattaattattttacaaattatttcattaatcatattatatctaattcaaggaataatgtattcatatgattgtgacttatttgcatttatttaggatttttttttatttatgtacaatttttttttatgtacaatttttatttatgtacaattttcttttccttatttgttcaattttaaaattaattaatttaagagtaattgctgtttcttaaccaaaaaaaagagtaattactgtttcttagacaaaaaaaaaaaagagtaattactgtttatatattttataaatgtaaaaatatgcagtattatttattacattaaagaataataagcatttggtttatagacaagtatgtatgcgtgtctgttgttttgttaattttttatatatagtagttgaaattttaggaaatttacgaacaggaatatgcaagttgtttattatttggataatagaatagaatattaa

SEQ ID NO: 64508 - DNA, 1067 bp, Cannabis sativa
taaagatgaaaagattactctattctagaaggaacctaaaaatctcaagaaaaatgttcaaatgcttaaccctagatcttctatttttgaggaagttcagaatgcaggtcaaagagggtttgctagtcttggatcagatggtactagaattactagaaacacaaaatttgtaaaatctagtgttccaacaaattttcttgttactgcaaatttaaagttttctgcaaattcaaagtctgttgttgcaaaggtagtatctgcaaaagcaaagtctccactaattacaaaaagagtaagatctcaagtaaggagatttgtcccaatttgtcatttttgtggtaggaagtgacatagtaggcctaaatatttcaccatactgaatatgtagaaaacaaattattttggtaatttaaaaaattttcaaaagaaatattgtggtttgaaacaaaaatgggttgaaaaagaaaaatatctagctggttttttctactaaaagtatttcctcacaaatagggtattttgacattggttgctctagacatatggcaggggacaagaactttttgataaatatcaggccaatgcagtttggcaaagtcacctttggtaatagcttagcagaaaatgtcattagaatgtgaactctcaattttgaagggttttcgagattgaaaatgcgatgttggttgaaggactaagggctaatttatttagcattagtaacatttattaccaaggatctatagtctcttttgatagtgatcattgttatgttcttaataatgataatcaatgtatctttcagggtttttgatccaatgataattgttataccctaacccctgtgttcacttgtcattcagttttaaacaacactaccaatttgtggcatgtaaaacttgggcatattaattaaaaaatctaaaaaaattgtccaatacagttatagttcgcggtctaccctaactgagtagagaaagtgttggtaagtgtgaaccttgtcaacttggtaagtaattaaaaatcactgacaaaagttctcagatatcaataccacaaaagtattg

SEQ ID NO: 64509 - DNA, 754 bp, Cannabis sativa
gggcataaaacccaacaccttggatcatctttggtgatttcaatgctatgtttaattaccaagatagatttgggggaagacagattcttagcagagacactttagatgcccaatcttagcttgctttgggccaagttgaggagctaaaatgttccggttcctattttacttggactaataaacatgaagttggggatagaatttattccaaacttgatcgtgttttttctaacaacatttggttggatgaattcccaaacactaatgcttgcttcaaatggaaagttgtttcagatcatagcttatgtctaatccggtttcatgaggtaagcaatatgggggtgaaaccttttagatatgggaatcattggtcttcctacttggggtttgaggagactgtcatgggaagttggaggaaacctacggtttatgaggggctggctgggttggtgcagagaatgctcagattgaagcatgagctgaaagtgttttgcaaggaaaacattggggatgtggttatggagtacacgactgctaaagataacttcttcctcagtcaggaggctgctgcaacgaacccctcggatgctcatcagcaggcagctgtcaccattgctcagcaaaattttattttagctaaagacaagtactcgaagtggctgaggcaacaaagtaaaattcagtggatcaaatttaatgatgaaaactttaattactttcatatggccacgaggaaaagaagaatggagaatag

SEQ ID NO: 64510 - DNA, 933 bp, Cannabis sativa
ctatcccaaacgcacccttaacttcttatgtgattatttatttatcgctttccattttagacagtatgtgagcatctaatatatatgtgatatgaaagccatgattagtatagtcgagttagagtttaaggcaacaagtggtaagtgtggtactagtgcctgactcgtcggggttgttgattacatggttatttgtgaaaatggaccctctgcaattatctagaccacagggcgagcaagtagagcctggtgttgaccaaatcaatctactggcaccgcctgtgcctttgcagaatccaagggataatgccggggttgataatgctaatccgcctgctgattggcaacatttgtttcaagaaatgcgaagtattatacttcttcaagaggatgaattgcattagttgaggcaaccagcaccgacagctcctaacagaacaagtgttaccgccaactcctgtgccagtggtgggtaacctggggtttatactaccgcatagagattatgtatttgagcgctttttgaagctgcaacctctaacgtttctgtgaggtactgatataattaaagctgaacagtggatgagcactatccctcgcatcttagataatatgggggtgacgggaatagaatgagtaaattgtactgcatttatgttacaagattatgcccgtgtctggtgggacattgtggggcagacctgagacgttagtactatgacttgggatgagtctgtgtgaggaaattttttataacattgctgtgaggactttgtatatggaagactttgtgaagctgactcaggggaaaatgactatagccgagtatactttggaattcgatcgactattaaagtttggtggtgatctggtaccaacagacttcacccagaaacaaaagtatgtgacaggactgaatgccacaatcagtcg

SEQ ID NO: 64511 - DNA, 567 bp, Cannabis sativa
  modified_base (483)..(484): a, c, t, g, unknown or other
agactcaaaaccccaaactctaaatagcagaaccccaaaacccaaaaatcttaaaccctaaaccacaaccccaaacccccaacccctaacccccaaacaccaaacccgaagccctaaaccccaaatgccaaacccctaaaccgtaaacccccaaatcccaaaaccaacaaaccccaaaccccaaatcccgaaacccataccccaaaaccctaaaaaccccaaatccagaaccacaatccataaacaccaaaccttaaaccccaaaccgcaaatctcaaaccccaaaccctaaacatcaaaccctaaaacctaaacctgaaacccaaacccgaaaaccccaaacctcaaacgccaaatcccaaacctaaaccccaaaaccccatgccccaaaccccagacccaaaaccctaaaccccaaaccctaaacctcaaaaccccaaaaattcaaaccttaaatctcaccattttggtggaatgactatnntattttgaaatggaaggaaacaccattcaaatgtagcatgagaaaaaatttaataattattttatcaatatttaatgcattta

SEQ ID NO: 64512 - DNA, 693 bp, Cannabis sativa
acatgcctttaggccttgcctaaactgttgatgaaccttccttacaaaggatctcttaccagatcctgaactcttcctatggttctctcattgaactgccttatcaggtcattgacctccttattacggcagttcagctccgcctgatgcgcttataggatggcctcttggtcatccctccaccttaggaatttgtatctctattggacacaaaatgaagttggaagagcaaaaatatttgactgctctctaggtcttatttatagaacatataaccctagagacaaccacaaacatgatttctcagctgtacaaaactttcttaaaaaaattcctgatgtgcagcatcaaaattggattctgctgcaacaaattaggaccagaaaggaaactttccgaaatggatcaagatcgcgaattgaccgctaatacctaccagataaaatttatttgatttgctctaatcatgacaaaatcgatatcatcaattagaaaaagcaaaaatcaagtttcctaaaaatagataactttccataagagaattcatttttttgtaagacaagtttcttaaacaaatgaaactaattcagaataaaactttcctttgaagaaaagagcaattagaggcacaaaattaacacaataaaatcaatttaattgcataaaaaaatatacattaattaaaaaatattt

SEQ ID NO: 64513 - DNA, 10638 bp, Cannabis sativa
  modified_base (10569)..(10606): a, c, t, g, unknown or other
tttttttttttttgaaaaaaatgcaaaatttattaaaaaaaaatttgtatacataagaactcaaaaatcgagaacaagtatatatccaaacacaatctcttaaactagtaatagaggttttcagtgtataggtaacaccattcggtgatcgcagaatgacactgcaagaatcaccaccaacagtagctaataaagaataaatatctgataaaatagattgaaaactaaaattaaagtaaagctagcttattaatccaaccaattgccacagtagaatcactgttaataatggagatattgaaaccaaattgatacgcaagaacaaagtccatacaaatgagcatatgtataccaagtaacatgcatttctagcaactatttccaaccaattgccacagtagaatcactgttaataatggagatattgaaaccaaattgatacacaagaacaaagtccatacaaatgagcatatgtataccaagtaacatgcatttctagcaactatttccactgataacacaactcctactactatacatgctgctacaccagaccctgttcaaactatacagccaccatatcatgactcccaaatcaacactcaccctatgcagacaagagccaagtcaagaatttgaaaacccaaagtattgatggcatctctcactccgaaatctattattgctgcattacaacatcaaaaatggttctctggtatgggctgtgaattcacagccttgaaaagaaacaatacttcgattttggtggatttacctcccaataggatttcaaatgttagtcagtacaaagccagattagttgccaaaggatttcattagcaacatggctttgatttcaatgaaacattcagtcatgttgttaagcatattaccattagagttatgttaactcttgtagtgataaaagattggccaataagacaattggatgttaataatgtatttttaaatggagatttacatgaggagatttatatggttcaatcaccaagtttcattgatgaagaacatccaaacaaagtttgcaaacttaacaaagccatgtatgaattgaaacaagaacccaaggcttggtttgaaaaattatcctctactctcatcaatttgggatttcggatttcaatcagccaaatcagatcattcattgtttgttcaagtcactgcctcaagctaccagtatatccttgtctatgttgatgacatcttaatcattggatccaacagtgatcaagtctcatctctcattgcatctctcagcttcacctttgcactaaaagatcttggtatcttatcttttttcttgggcattcaggtttgtcctaccactaaaggtgttgttttgtctcaacaaaaataccttcaagacctcatttgcaaagctgagctacaaggtgtaaagccacaaagcactccaataaacaatggcttcattagtcaaattatgggagtgatccttttgaagatccctctgcttacagatcacttgttggggcccttcaatatgctacaataacaaggccagacatagcatttagtgtcaataagatttgttaattcatgcaaagtcctttacaatctcacttggctgtcaaaagtataatcagatatcttgctggcacacttgactatggcctacacataaagaatgctccacatatgaatctcgaagcctactgtgatgtagattaggatgttgatcctgatgacagatggtccacaactggctactgcatcttctggggtgacaatctcattagttggaaatccaagaagcaaaatacaatatctcgttcatcaatagaagtagagttttcaaacatttcttttgtggtgactgaaataagttggctcaagtcattacttactaagatgtatctcccacttgtctcttcttctctcatggtgtgacattctcagcacatcatgttggctacaaatcttgttcttcatgctcgcacgaaacacgtagagattgatctctatttcgtccgagataaagcgattcaaaaggaaattaatgtgcaacatgttcctaccaatcaccaactagttgattctcttactaagcctatctccaattttcaatttcattttttttgagacaaacttagtgttatgtgctccaccacactaagtttgagggggccagttaaggtaaatgaaccagctgagctggcatagttgttgttaggcttagttttttgttagagtaattaggctggttgttggtcaagatatctttctcttgatttgtaactactttgtttttctgtatataaacctctaaaacacctttggcttaatcaatatatagttttatctctttctctatcgttctttaactctaacagagttctttagtattagtctatacgattattttagagaggtcgagtacagattaatgagatcagctatattgtatttgtaatgaccgtatacttagaatacggattagtaagacaattagcactaattaattatattttatgattatatatgaatatttgactatgagcactactaaaaaattagcttttcctaccagtttataagtgtcttttgtactatttcctaacaattcctaaaactgttaactatgtgggtgtcataaaaatatgaaaccgtaaaagacagtttataactgttgaaaaaatcattttaaatgacaattaataattgttggaaaaagtcattttaagtgacggtttataattgttaagaaaaattaaatgactatttataactattagcaaaaatattatgtagatttaaaaaatcattattttgtgttacaataataatatgatataaataaatttattctttataaagaatatattagattttattattgaagaaacctaaaaaggattaatctaattaaactttttcttcatcactctcagagctcttgcccatgtgttgagaataaccaagaacattatatacaatacatattctaatagttcacactattccttatgtgtggtgaaagatctgaaagattacggtgtgagttcttcattatcatctgaggatataacttacgaaaagaaacaaggatatcttgataggcttcaagaggtaaattttctttttgtctatttattttagatttaatgtatatatggtgatcctgaggatgtggtaagataataatcaaaaaatatattctgatgcgtacctaatttagtacaacaaaaccaacatactaagccatgaaatgagaagtacaaatagtattgctaaagcaattgaagaattcaaacgtaaggaatgtcgtacccttgagagcacttatggcaaccaaacccaaaactgtctgaataaaatcgagaactaattaaatcatcaagactctggtgagaaaaagaatgtaagccaacaaaagggaatggggaaatgctagagttccatgtgcttctcgctgaccaggatttcaccattagacattttgagttcttctaggttattgcttagttcatctttcgttaacatagtaaaagtaactccctctggaatagggtatttggagcagatgttgctgaaattcgactcacatttagacatgaaattcagatcagccaagggagaagctttctatatagccttagatttatttttgaatagttgcagaatacgaaaagaaaaaagggaaaactaagaatatcagggtaaacgtagcaaggagatgaagggaatgaaagaagaaaggaagcaaaagattagagacaagaaaatatcagagaagttacttaaattcttgattcttcctttaaataaatatcacaaatttaaatttgaaataaaaaaaaaatcaagataattagaaaggtcgttgatagtttccctaaaatttaaaatggttacttcattaaatcaatcacgactcattatgacacatgagaattatttttagtaatcggttccacaacacctaagcttgaactgaaaaattcacaagctcaaaaattgtaaaattgaggggaaattgtaagggataaaaataattttgagggtaataaattaattctaccataataaatgtagaggagttaatggaatgatgtgacaggaacgatatgaaacacactatttcattgaaagaaaacaaggaaggagaaaacaaagctttgaatgcgaggtagagctgaagggaactagaagtagagtttacggagcacaaaaagttggagaaagcaggaaagcacgtgaagatttgaatagaatgagtccgcgtggaccaatctgaacgagtaaaatgagaaggtttgacgaccattcccgcttgtaaataggaggccccatcgtttaaaaatggcaaggattcttcatcacaccaaacttttcgaaactctatcggaatacatccttaaattattcttaactcgggaaagaaataagggtttagagaggaattaacgaaggttatagagaatgatgtaaactagtagaatattgtagttcgattggattatatcctagtgtaaagaattcaatatcataatacaaatttattattgagataattttgagcatcaacacttggtaatagaggaaacttttcaaattgaactcaaatttaaaggacaagaatcataagaagttgggagagtggaagaacctatatgagagaatagaagcttcttaccatccccaacatatggtttcaatgccattgtaagctacagattaattgaggtgagcattgtcaaaggtgacataattcgtagcatgtgtcagcataccaagaattgtcatcaccaaagtcctaaatcaatgtggtggagtatgcatgtggatcataaatgaattacaagtatgtgaggtatacacgattaggaggagggcctagtttaggattagtcctcgtgttttcaaatcagtaatgaccatcagtagttgtgtgaccgtcctcatataaacctaaaacacaattcttggttgtttaaaatgagggaaacccctaccacgaccaatcggttgttatgaggatttagctggaccagaacaatgattggcaaaagaccgaacacctctagttcttccagtactgaatgcaagattggctagcattttgacagacaaatttgtcatagtgtgatgatgttctaggtgattctcatgggagagaagtaatgcttgtacttcgtcacttcttgaagaagtgatgttggagactatagagtcgaattctggtccaagaccattaagaagttgtaaaacgatgtcttgatcactcaccagagatccaaccacagtcaaagcatagtctggtccaagaccattaagaagttgtaaaacaatgtcttgatcactcaccggagatccaaccacattcaaagcatcagatatcgattgagctttgtccacgtattcagagattgagagactccctttttcaaagaaaactagcccttcaattgtaggcgacgagccttagtttgagatgaagacttttgtttaaaagcacaccaaacaatgaaggaggggtgtagttggcaactgaagcaagaagaccttcggacattgatgatcgcaaccaaggatcaggagctgatctttgcagcaccattgttggtactcaggattaggtgcacccgtgaccaagttttggggaggaggaacactagtaaacatgatttcatcaaggtcatgactaatgatcgtaggaaccacctaacttccgggcaagaaagttcaggcgatccaatttgattgtaagtaataaagttagcaaatgagagaaggattccatggagcatgagtagggacaataggagtagggggcattcgccattgttgcagtagcagtaacaagatcaaaggtagaagatgatatgggctttagtcaagaatttctgatactatgtagataattaaagaatgcaaagcataatctgagagagaagttaatagacaatcagctgagaaaaaaaaaaagcttactttactattagagagttcttttgatttatatcgaagggagtaagattccaatacacaactaaatcttgaaaataaaagccaatagagaatcagtttagtaaaaagcttaattcactattaaagacagtggcagacccaggatttaaagtgagaaaagcgtaatttttttttttttttggtaaagtagaggcaaaagtaaacttaaaaagaaaaaaaaaatactcttgatagtatttgaactttgatctctattataaatacaatctaacttaattattacaacaaaactaatattatgtctatacatattatcttttattataaatatatctaactaaatacatatatagcaactgtccctctcacttctatgtaagtgcacacctaattaaagagttcttttttatttatatgagaaggaattaagattacaatacacaatcgaatcaagataatgaattaactaccttttaacaactagctaaactaattaacagaacacactagtagtttaggtgctaatataacacaagaaacaagtatttaaagcacaattagaaaacatagtctaaaataaaattttaaaagacaaagatccaaactcactaggcctgctccttcactgcccttcaacacttcaaacacaccttcttcccatgccaatcactccccccaaattgactttactgttgctacttctggtttttccagcatcaatcaatactacctaaatacaaccttgccaccatattgcgatgcctttaccaacctttcaatctccaccaaaaacatctccacaaccacttactctgctgactctaccaatgctactgcagccaccatgaaccacacttctccatccaacccagtaaaagatcacaaccacaacaccgctaccattaatctctcacacattttcacacctgatactggcctccccaacgtcttttctacctaccccccacttgcacctcccaatcaaacattttcccattccaaatcttcctatgtcagcaacccatattcaacccaatacacatacactcaacctattattcaaactgacaaggaaaacctgcccccacattcacatccgaaaaggcctaatgattcagcttcaatgagaaaatttctaaaaagatgttgaggtacaaccccttttactttgtcaaacgaagacggttctgagatgttagtttctgatggccaagattctaccatctccaatgactcaagtgcggtggttgctacgcaatcctgcaattcatcatgaaaatcctcagctggaatgcacagggcttggggagtccgagtgcgttccgagacctacggttgcttgttcaacaacaattgccccatgttttgttcctcatggaaaaaaaactttgtgtaaactaaataacgcgtgttcgtcaatctttaaactacagtaatggaattgaagctcctcgtgttggactaagtggtggtttgatgcttctttggaaaactaatgtggatgttaccttgcttaattttgactcatgcttctttgattgctacataaaatacgaagatgatccaaggttccatttcatagggttctacggtgctccaaatattgctaatcgatcaagttcttggactttgcttaagcgattagcagatgttgctcccctttctccttggttggctattagagacttcaatgaaatcctctctaactccaataagtcaggtggtaatctgagaaatgagactcaaatggttgactttcgacaagtttttgataaatgttgcttccatgttgcaccgtatgaaggagatccattcacttgggttaagaactgctcagctgctgctactattaaggagcgtttagactggtattttgttaacagccattgggaaaacaacttctctactctaattgtacatcatttggactactaccaatcgaatcaccgggctattttggctgtcttcaactcacaatcagcaacagccaccgacacaaaacgaagaagcagattttgttttgaatagttgtggctcttcgatcttgaaagtcaagaagttattcactcaaattggaatattatgccatctgctgatcctatcactgctgtctttggtagtattaattcatgttctgaatctctacaatcatggcatatccaaaaatatggaaagatgaagaagaagatcaatgcttgccaagataaagtcaccaatctcaacaacttaactaaccgcaccagcagcaacttagctgaattgcagcaagtcgaagcaattcttgatgacttacttgaacaagaagaggtatattggcagcagcgttctcgcgtagattggatgacaaatggtgaccgtaacactaaatttttgtaaatcaaataaccgaataaaatatctctttgataatagcggtcaaaaagtgcatttgaaggatgatattgctcaggttgtgcaaaattattttgctgaaatgtttatggccacagacattgatgactctgccctttccaccacacttcaatgcattccaacacttgttacaattgaagataatgacagcctcacaagaatttttactactgccgaggttgaagttgctttgaagaccatggcagcagataaaagccctggagtggatggtatgtcagccatgttttatcagcattattggtctattgtggggggtcttgtttctaaagctatattaagtgttctgaatgatggagctgacccaacaagcttgaaccgaacaatcatcactcttctcccaaaggttaagaaagcacaacgaatgcaagacttcctattaatcagcctatgtaatgttatttccaaacttgttactaaaattcttgtggcaagattcaagcaagttcttccaaaagtgatctccgcaacgcaaagcgccttcttacccaactatttaatcacggacaatatcttgggggcctttgaattgattcatgccatcaaaaacaagacctcgagccgcaactgtattgcatctttgaagctatatatgaacaaggcttttgatcgagtagaatggagattcattgaagaagttatgaagaaaatgggatttttttctcaatggacatcgctgattatgagatgcttaaccactaatagcttctcctttctcatcaatggtgaggttatgggtgctttaactccatctaaaggactaaggcaaggatgtcctttatctccgtacctgtttttgatatgttctgaaggcttgtcacgactcctacagcatgaacaagacaatgacaatctcaatgggttcaaactcactaggcgtgctacccctatttctcatttactgttcgcagatgatagcctcctcttttgtcaggctaatgaaagctcttgtctcaccattaaacgggttcttgatctttatcatcgcatttcaggacaagttctcaactcaaacaaatctgtaatgtctttttcccctaacactactttggctgcccaaatatttttttcatcggcatctcaacatgcccattagcgaatgtcatgaaaaatatcttaatttgtcatcttattcgagaaaggacaaaaaggaacttttcagtcacatcaaggaaaggatttgaaaactaatgcacaattggaatgaaaagattttttcagcgggtggtcgggaagtgcttctcaaagcggttgtccaatctattcctccctatgctatgagttgcttccgtttaccggtgtacttctataaacaacttgaatctatgatggctaacttttggtggggtatgaatgagaatggcactaagatacattggcgcaattggaatttgctttgaaaaaaaaaagtgtgatggtggtatgggtttccgatcttttgtacactttaaccaagctctacttgcaaaacaagcttggcgccttgttgaaaaaccagactctttacttggacagcttctcaaaagcagatactacccacataattcagtattagaagctcatatcggtcactccccttccttaacttggcaagctattcactggggtaaagaccttctcaaatctggtctgcgttggaaggttggcgaagggagatctattctaagcggtactgatccttggctcccaggtcatagctcattcctgccttttcgttacacggggcctctaaatggtactgttgcgaatttatcacaccagaccgccaatggaatatgcctctgcttcagcaatttttttcacctctcgatgtggaacgaattctcacagttccacttagttacttcagctccgatcataggctaatatggcatcaccaacacaccgacatttacacagtccaatcgggatatcatttggctagatcgcttgatgaaactgagaactcctcaagctcaacttcggcatcttctttgtggaattttttatgggctctaccacttcctccgaaagtaaaaattttctcatggagagttataaatgatgctttaccagtggctacttctcttgtcaagagaaaaattatcaccaattcgacatgctcagtatgttgtcaagcttgggaaatcattggccaatgcactctttgttggaaatattttatcaggnnnnnnnnnnnnnnnnnnnnnnnnnnnnnnnnnnnnnnaatatgaatttctaaaacaattaaataaacac

SEQ ID NO: 64514 - DNA, 1027 bp, Cannabis sativa
  modified_base (223)..(236): a, c, t, g, unknown or other
gtcacaagtaattattttgttgtgtgaaaattaagttgttgatattgtgtgttagggtttttcaacctgaattcttcgtcagttaaggttgttttttttcttcgatcaggattgccaattctctttaggcttaggcgtggcttggccagggtttgtaattttcctattgcgattagtcttgtctatatgatatagttgtgttttgttttattttatttttggnnnnnnnnnnnnnncttcaatgtctcgcaatcaaattgctgctagtggatgggaataacaagttatatgtggctgaaggggttgttagtgatgcagttatgtagtttacacaaaagttaaatgctcaaactaagagattgaatgaaccagctgcaattaatctattattgtatcttctaagcggtacagtaaattaagtataaatgttcttaacattaaccgtgatgttgtaattttttcatctgagtctatttaaatttttttttgtaaaacgattcaggaatcatgcaaccgattaatttgctcgttttttttatttcaattttgcttgtgttttcaacgggaaagatatcccaatagtaatttcattgatatttagtattctaaataaaaaaaaaaacttttttcaattttaaccaaaaaaaaaagtaacaacattacaaaaatactgtaactcagccaaataaacaaatatacaacccaaataaaaaaaaattacacaaataccacttatacacacctttaacttaggatacatgcttcctaggcaaccatcgctcaactacgcagtaacccaacacaactgaaatgaaaacttaactagaaagagaaccactattaatttcggcgatttcacttgagaagacgaccagaatcaatcaaaacaagggaatgtttcgaattcatgaaaaaaagggtaaaaaaactactacgaaattaaaattcaaccgaaaatctaatttaatttgcataaaactaatgtcgtgacttcaattttcatatccatgaaatgcggatctcaaaa

SEQ ID NO: 64515 - DNA, 698 bp, Cannabis sativa
atgtaaataaaaaagtagtgcataaaatttattatgtgtcaaatttatattactttttagtacactattagagcacacattttattaaatgagctatattttagttttcaacacttatttacacttttattaaaaatgctctaagaccagttgtaaatttattaaaagaaaacaacttgtaaaatagtttataatgacgaaaaataagatttaaacagttactaactaaaaaataattgtgcgtgtaataaaatatgtaaattttatttttggtattataaattactcatagataatactaaataactgtaacgtacataattataaaaataaaaataaaataaaaagctttcaaatatactaaaatatttttttagagagtgaaaacggtagatttatccaaaattatttactaaaatactgaaaattttatgaaaacgtgcgccaaaaaagttaaaaaaaaagtatgagggcatgtgcaattaatttatattttatggtcttccatctacaaaaatttatttttgaagaattaataaacattaaacataatgctacttgtgtacttcataaaatttaatattttgagagccagtaggaaggtgggagctttttgggagtgtgcctcgaaactggttgtcttcaattatcatgttcccaaaaagaaatggtggtgcacttttaataatggtttttac

SEQ ID NO: 64516 - DNA, 603 bp, Cannabis sativa
cattgtgtgatctagggttttttcttgacaacctttcagtatctctgggtaatcgctctgggttttgctgcaaaaaggaagattttttctcgagtttccttgctctcttgctgttctctttgctgtgtaaggagtttttctgtttatctctggttatctgttttctgtctgtgttttctttgtttgtctggggagatctttctagtgatggagaacaactccgaggagacgcaggtggaacaagtggagctctgtgggttggaggaattcaagatctctttagaagcagaccatgagcttggggtggaggctattgagaaatcagttgttgctaaactgtatacaaacaagactgtctttatgggtctactacgctcgattctgggaaggaaatggaaactggccaaggggtggaagcttcaagaagtggagccaaaaacctttatcttaaggttaacaaagaaacaggaggcgctgcaaatctctaaaaatggtctgtggcctatgtgtgatggttttctggtggttaaacccatgcccgatgatggaatatggtcatctgctgacttaaattcttccccggtctgggtgcgggcgtatgaa

SEQ ID NO: 64517 - DNA, 1289 bp, Cannabis sativa
ctcaatcactaaggctcaaatttgtttgtgaaaaagacaataggatttcgaaaattgattacatctaatccaagaactataaagtgagtcatgaataggaggttaaggtaatgtaccttccaagaatggagttttgtttcttgcacctatagaaatcttgaaatctcttttccatcgttgaaaattgtgataggtgagaattggagtagcaggaaccaatccagggtgatctgcgttactcaggtaatatggcgaacgaatgtgttcatatggaggtcgatcgatggtgttggatcgagagacagggagctggtcttattgttaatcgactgtgtttgatcgatgaacaggatgttgatcttgtgataattaatcagttggactgggttgagtagcaggaatttgattcgtatctggttgtagatcggcagtggattcattcggtggtggtggagcgattgcagcatcaacctctagaggattttgtgcagtggaagtagctaagatggtagctcgggtacgcaccattgttgaaaaagaaaggaagcttcaattgaattcttaaagattgaaaatggaggagtcttctaatactatattagtgaataagaaaacagaataattctttattccacataaatgaatatcaagtgtttgttacaattggtttgagggagaaagaaagtagtatatatagatagagaaatggactaactaacctaactgacctagactaaacataaatttaatatttgtaaaaaaaaatgttgccaattttaatgtgatatgagagacagcaatatttattagacaacacttattttataagtgttttttaataaaagaattaatgaattggtaacatttattttacaaatattactaaataagtgttgtaaaatatatatatatatttttttttaagtagagctcttaggatctgtgggagttataccatctttaactttgaagatccacttaattacatccaataactttctgatttttaggctttggaactagacaccaagtattattctacttcaaagaagttgacacttctatcatagctttctaccatagctagcagtgtctatttacattctatagcctctttgtagcattgtgggttcttcatgtcttgaattgttcaaaacaacaaccatgataataattaatattagcggatggaaatatacaaaatggtattaatatcaactaatgtaaaaagttttataatttaatgccataattaaatttaataataaaatattaaaaataataaatat

SEQ ID NO: 64518 - DNA, 973 bp, Cannabis sativa
aggatgttaatgaaacatacatggtagtaaatttagatcctggtaatatatttccaacagctcgggcctatctccttcggccaagaagtccaggggcagtgggacaaccccgttcagagagaaggttgcaggcgaggaagttattgatctctccaaggagccaaccgtcgtagacccttctgccccaaaaatgactaagtctaaaaactcacgaggagggatctcagacaagcccgagcagtcgaaggacggatctgagctggtcaaagtggatctgagcagatcagggccgcagccccacgtctagtgctgcatctagagactaagtgaggcaaagatatgctcacccactacatgacgcggttggtccctgaggtgaatgagcagctggccggggccgataatgacctttctctggagctggtgatgggaggagtcctgaaggagttcatgagggtgagttcttcctgacagtttcctcttgtcattcttcacatagtttaaattgtaatgttgcttctctgtgcagataagtttgaagatggcttatgcttattcccaagctaagtcggttgcctctaagaacgctaccatttccaacactatgcgggcggaggtggacatggccaggaaggatgctgattaagctagggttcaacttggggcagtctggatggaactgggagaagttaacaagaaacttctcactgccgagaagaaggtggccgagctgaccaaagatctagaggcttctgatcaacttgaaactgccattgcttccttgtccaaagaagtgaccagcctctaggaagaaagggaggtccttcgagctgttttccataggttggaagcagagaagaaggccaaagaggaggaacttgaagctgaggttgagaagtacaaatcagaggccgagcagtaaagaattgaagtggcaaggcttggaggtaaggtgaacgccttagagacagcg

SEQ ID NO: 64519 - DNA, 862 bp, Cannabis sativa
tgaataatagttttgctactagaatatcatagtattataaaaacatggctcagaattgtcaaatacgcgacttgaacagataaaacatgattgttgtaatatttttttgtattaaatatgtgacattattagttgttttgtacttttatgttaattggctcgcaacaaatataattgttgcattacagttttcttacagttttatgttaacaatagctagagatctatcctcatgcgactctatttcacttagagtgctttcgatcttactacaaggccctagatcttgtttttgcatgatcaacttattagacaacaagaaaaagaaacatagacttcatcttgaaaataattaactatgtagtaaaagaaaaccggacatataataatattaaacatgatcaaaatagtttgcagtgctttcttgatagccaattggagtgtttcaaaagattattttagaaagagaatccctcaaatcgagagtgctttagctcacatccagtctaatgttcccatgtctagtgaagatatccaaaaagctaaatcccaacaatctcaactagacaactttctttttaagggctcgtttagtatgccgtataagagtcgtatggtattaaatagacatgtcaaaaaatctatatttttaggttggagcagggttggagctccgacccgacggatcacctctgatccgaaacattcgaatacttaatggatcttggatcatatccgcaccggccccgcgtaattttttttgaatcgaatctgatccgaaccgatttcaatttattttataaaaaacttaattcaagactcacatcccttgggacctggactcggacccggacccagactc

SEQ ID NO: 64520 - DNA, 893 bp, Cannabis sativa
ttttttactgattttaaaaaatactatattttttttctaaataagggtccaaaataaattttttttctatggcccactaaaaatcaggaccggccctaatctaattttataagtaagaaaaatctaacataaataaaatgtaggaggtttgatttcatacattttaaagtttgagggacataattacataaatatcaaattttgagagtgtgatttagtataagtacaatgactaaattattaaaattgaatgaaattggataaaatccttaaatctaacaatatcaatatacagttcaagaaaatttttaacagccacaaattcaaaaaatataatttaatacatgtcaaaattaagtgcgaaaattttactaattaattagtctttttataaatataaatttataagtacacatgggaggccagaggcatgcacatagaaaaaaagtatatttaagttttggaaaatgcttaaagttactgccacattttccttttttctttcttttcataaaatacgcttgtacatttcgtgcagaagaacaaataatgaaaggaaaagagtaatttaaggtgtaaataaaattattttttggttaaaattacattaatttatttaagtttaatttttgacaataataataaatttcagtatatatataattgattggttaaatttcaagttattatccaaatgtcattttgatcttattggtatatttaaattaatttttgaataaaaaatttagtgactggattaatcggagactgtcacgtggttattgacataacatttaacgattaagtaatgagatttttacactagatactaaatttggccctttttttacatttttattccagttagcttttttaaacttttttatatttta

SEQ ID NO: 64521 - DNA, 752 bp, Cannabis sativa
gaagtccctaggattggtcttagtagtggccttttgttgttatggactcatgaagttgatgtaactcttttgtcttataatataagtcattttcattgctaccttaagcctcatcaattttctgctttttacttcactggcttttatgggacaccgaattgtcaaaataaaatccattcctggaaagttctccacagacttggatccactatccataactctccttggttgataatgggagacttcaatgattatttaaattcgaatgacaaaattgggggggacacttctcgtgctccttctacccaatttcgaaacttcattaattcgttcactcttcacgatcttcaatttcatggttacccctttacctggacaaataagcaaggccaacaatcccatacccaagagcacattgattgggtgatatctaatgctgaatgggattctctgtttccaaaacattttcttcttcacgaagactattttggatctgaccatcgtcctttaatcttgaatctccatcaattacaatcaacccaaagacacagcaatcagtttttctttgataaattatggctggccgaaccggactttgaagattgtcttacacaggcttggagctccaatcatcaaagcaatacaaataacaccatagtcaacttagctgagaaacttaagcactgttcaaagcactttactgaatggaaaaagtctcttggaccttccatttcctccaaaattaaagaaat

SEQ ID NO: 64522 - DNA, 865 bp, Cannabis sativa
cacgtactaggtacctgatattttatactctttttttactaaacatcatgcataaactataaatgtacttggtacgtgatataacgtactccactaccactacaaaaatacatagaaaataggaatgactgaaaagataaaaataacctcagtctgacaacatggactcaccctctgcagtactattgtactattaactaccaccaactgtcatttgattaaatatttttgtacttttttgtatttttttatttctaagttaaaaaaattaaattgacaaatggtgaaaaaacttacatgagtcggtggccaaataaataaaaaaaaaaattacaaaaaatattaaaaaatataataaagtacgtaggacccattatatagtacaactgaatacaatccgtgattttctataagataagcacaaaatcggttgcctatatatatgaaaatttatatttatcttgaaaaaacaaaattaactaaaataaatttcattgattgtggatctaaatgaaactacacctaaaaatattacattatatatatagactaacaactaacttatacaagaaaaataaagaagctaactaacagtaaagggctaactgaccaactgccattaactaacaatcaaaatgctccaatcttgatatcctcccctcaaagtagagtgtatatgtcattgacgcacatgttgccaatataagaagtgagaacatgtgttgaaagagatttggtaaaagcatcggctaataggggagtgctagagacaggaaactgatgaaagagcttttgattttatccctgacgaagtggcaatctagctcgatatgttttgtgcgttcatgaaaagttagattgttgg

SEQ ID NO: 64523 - DNA, 582 bp, Cannabis sativa
attcaccaatttaatccattaccattaatcattcatattacaattaccatttcaattacattacacaaagcaaacaccacctacattgtaatatgaattacaaaagttaaaaaaaaagcaaacaatgtaattgacctattcattaccattacgattaccattacaataaaccaaacatcacgggccgaatgcgtttttgtttcagccataagattttcaagtgatttatgtctttacatgattttaaaccttttagaaatattaatacattagggtgacttctttaatatataataaattttgaaaaggatatgacaaatgaaatgttgcatcttatttgaatctagtacaggatttagtaccgacaatttttttttacaggttttaggaaatatcccaaataaacaaatcgatctattaaagtagtcccaaaagaataagaaaatcccaagtgggtgatactttttaactaaactatagacactatcctaggagctaaactcggataaaaaaaaataaaaattcataaccaatcaaaatgaaaaagcctcaaaaaaataattattttaaaaaaaataaaaa

SEQ ID NO: 64524 - DNA, 1331 bp, Cannabis sativa
ttaccgacttatcatggtttagaagttggcctgaggcacggtgatagatgtccaagaatttcttgatagcaagacatgaactttcattgggatgatagaaaaggagactgtcatcagcgaagagcaagtgagaaatcggtgcagcatttctagtgagcttgaacccagtcaaccgtccttcattttcttcaaattgtaacaatctcgagagcccctcagaacagatgaggaacaaatatggagacaaagggcagccttgacgtaaactgcgagttggggtcaaagatccagagacttcaccattgacattaaaagagaaagtgtttgttgagagacaagtcatgataagcttgatccattgttcaacaaagcccattttcctcataacttcttgaataaagctccattctacttggtcaaaggccttactcatgtccaatttaagagagacaatctccttccttctcgcggttctattcttaattgcgtggacaagttcgaaatccactaaaatattatcagtgatgaggcgattaggcaagaaggcactttgagtttctgaaatgacatgtgggagcacaactttaaatcttgcaacaagaactttggtaatgagttttgaaataacattgcaaaggctaatcggtcggtaatctttcatgttcagaggcttcttattttttaaatcagggtgataatggtacggttcaagggagttgggtcagctccatcattaagaactcccagtactgccttggagactaagtcccctactaaatcccaatgttgttggtagaacatggcggacataccgtcaattccagggcttttatccggactcatacttttcagcgctgcatcaacctccgctctagtaaatggttgtgtgagaccgaggttcataatagcagtgaccatgataggattgtgtcaagaacagaggacattgcagcaccatccgttgtagaagcttgaaaaatattctgaaaatattcttcaattacatagaccaaatccaaacgtgaatgcactttgaggccagcatcattaattagaaattgtattctgttattagattgtcgagcagaagcttttgcgtgaaagaattttgtattacggtcacctgaactcatccattccacatgtgattgttgttgccaatatatctcctcttgttttaacaaatcatcaagtatcgatttagaggttttgagttcttccatgatgttattcgatcgatccaaggtattgttgagatcattaacacgggtttgagcttcaacaactcttttcttcatacgaccatacttcccaatgtgccatttttgcaa

SEQ ID NO: 64525 - DNA, 749 bp, Cannabis sativa
tgaaatatttttcctttgaagttaagtttctctataagtttattgcagttttacgagttttcaccgtttacattagggttggacacaattaagtgtttaaatattaattgggctatttattaattcaaagaaagaaaataacctagattatcctactattttcaaatcaaaaaattcaataaatattagtatatgaacatatgtgtacgtagaatttttttcttttcaaaaaccaacaattccatatactacatatgcggtttgaaaattagtgtcaacatgtgacataacctaataatttagttttagtcactaaaaatatatttattaacaacaaattataatatttttgactaatatttttaattaataattacatagaaataataatttatgcttagttacaattttttcacctttaatcataaatttattttcttgtaactaaaagtaaaaatagaacggtagcttatatacgagtggtgttaatcactacaaaaaactgttacatttatagataatcttttagtcacaacataatttttttatgattaaattaatgagactaattttagtcacaacaaaaagttacttatgactaaaacataatattcagttacaagttgtcatcactaatttaattttagtcataataaatattgtgactaaaagcattttgtcacaacaaattattatttttgtgactaatacttttaattaactacggatcttttagtcacaacacaata

SEQ ID NO: 64526 - DNA, 941 bp, Cannabis sativa
ttaaataatcaaactgggaatattaaaatacggaatttcagtgtaaattgaaattatacctattcagaatattcaattatttttgttgcataacaacccaaaacttgttctgcttcatgaccaaacataattacaaatacgcttctagtatcgtcatttatttgagcatatattcttgcactgaaaatatcatacgatttatatatatatgttaaaattctattttaaaatatgtttgcttatatttatatttattagattagatatgtaccatggtgtaactgttgattcatatccacataaataaagaaatctttcactgtagtttttttgagttcctttgttacatccaggacatgacatgtagtagaatgattgtgataaatttgtaatgacaatctttccttgtatccagaatttcgcaatctaaattaaattatataaaatagttagcaatattttttagatataattctattaatttatgaaaagtaaattttacttctgttggttgtaatgctgtcattaaatattggataatcctgatctttacaatttctctaattccaactgaggatgaagaggcagatggatatgtacaagtttttacaatcatatttttttatttttaatttatttttctcctgtcctgagaaatattataataatatattgttataatcaattagtttttgtaattttttattatatttattcgataatattatgaatttaatttattggagaatttaccatttttttcactgttgttgcttattgtagtcaaggattgattgtgacgttagtcatttattatgcaggaagagactatctatagtttttttttttttgaataataagcgtattattataaaacgaaatagttagacctctcggtcattgcaaaataagttctccgataaggaggaaaccgaaataca

SEQ ID NO: 64527 - DNA, 924 bp, Cannabis sativa
atatgtcatatatatgtaaattaagttttgaaagctcatatttaatgtttttatttgtgtttagccagttttatttgtcatgggtgtcgaaaaaattgtcagagttactgtcggcgttagaaaagttgccaaagtagctgccggtgtcagaaaaattcgtcggaattactgctggccccgaaaaaatcgtcgaaattggcattgtcgttggaaaaatcactgaaaaattcatcaagaaattggtttgggtttgggtccgggtcccgggtcccaggtctaggtcccgagtcccaggtttgggatcgagttcgggtctgaatcccgggtccatgtcggaaattggtgttgaccccgaattatttgtaaaaattataatacaatacaaaccatttattatgtaaataatacaacatacattgtattaaaaattttggtcataataattagtacaatacattgttttattcaaacataatattatttattatttaatacaatatgacccttatacggcataccaaacgagccctagatgtgtcattttgtatttggttagtgatactcttaaaaattattacattaaattatatatagagtattgctattggacactaatagtacctaacactttccagacgtgtgatcttgtgattaactaacgatactctctaaaaattatgatattaaattatataaaacccgatatttaattgagctaataataatatcagcacatattaaatactgccttttaaaatttctctaaattatacagacccaaaacttaatttaatcatctcacaaaatactgattagtccaagaaatctacttaacattactacaaaagtcacatgtgtttcgtcaaatagtccacttcaatctccttggtcgtaactagttaggtagaataagataaaatttca

SEQ ID NO: 64528 - DNA, 759 bp, Cannabis sativa
tcactagaaataccatcgcattaaagggaatgataaagttaccaataactttagggactgcccccgtcattgccaaatcaatggtcaattttccagtaattgaccaacattccgcctataatgtgttgataggtcgtcctattttgaaagaaatgaagatagttacgtcaatctatcatctcaccatgaagttccccacccctgcgggtgtgggatcagtgcgaggagtctaggcaaattcgagggaatgctacaatattgcattaaaattgtagaaaagaataagtcggtaaatgtcatctatttgctcgacgctcctccccctcgacatgaattttttaaaattaaggaaataccgcatatagagaaaccaaatctggatcccaggatcctcaactataccaacactgtgcaagccacctaagagacaatcgaggtacctattgattcttctgatcattctaaagtgctaaaaattagttctaaactaactttttagtagcgagaaaggcttgtcacttttctcaaacaaaatctagatgctttcacgtggaaatattcaagcatggtcaaaataccacccgagatcatgtggcatcggttgaacatcgaccctgatacgcgaggagtatgacagaatcgtcgcaaaatggaccccgcgaggtaccaagctcttaaggaggaaatagatcgcttgctggcatgcatctttgacatctttaggaaagaggttcccacctaacccatgagtctcagtag

SEQ ID NO: 64529 - DNA, 1041 bp, Cannabis sativa
ttattattattttaaaatttatattatttattaaaatttaaactaattatatacttaattcctaaatttaccaatttatctttatataaaaaattcataaaaaattaccattttcttatttattcattattcttaatttcttataccaacataaaattacattaacaattatttcttaaaaacttaaataaaagtttaattcatttaattgcaatttatatttaaataaaaaatatacatataaattcttcttattaatctttttaatttttaatattttagttatttatgaagttttttaaaaataacaaattactaaacttactttttaaaattatataaatataaattaattcttttgttaaaacaaatattattatttaaaaatttattttatatattacactataaactaatatattatttatttcttaaaattaaaattttatctttataaaataaatttttaataaattatatttttaaatttttttcattattctcatttttttatgataatattacatcttcaacataaccatcaaacttatttaatttaaataaaatctaatataaaacaaacaaatacacattattaaaaacatacatttcacaaaagaacttttgtgtacactgttttcaaactactaattttttttttttgttcaatttaaaaacaacaagtataacatatgatcaattatagaaattaattaaaaatactacaaaataatacaatacaatatatatcatttaataaactgtatacaatatatatattatatatacacattaatatatactatatactttatatatacatatatataaataaaaaatatacatattatatatatttaaaacatctatacatttataatacacatatatatacaaataaaaaatatatatagacagattaaaatatttatatacacaaatcgaaaaaaaaacttaaatttataaaccctaaaattatctatatacatagatttatacacagatatatatatagacttgtacccaaatctatatatttaa

SEQ ID NO: 64530 - DNA, 2379 bp, Cannabis sativa
tctaagccttcaaaggacgacatgcccttagatgcaaaaagatctttgaagtagtctagaaaaataccaccaatttctttctccttggaaacaattctgccattcgggtctttaatattccaaatatgattcctctttctctgaaccatagtagaggcatgggaaaaagaagaatttctatcaccctttgccaaccaaatttcccgagatcgttgcttccacatagattccttacgtttccatagatctcccaagctattaagaaccatattctcggccaataaatcagcctcatgagcttaaattgcatagatcttaaattgcatgtcaactattgcatctctgcaataatacaatatataaattcgcattaagcaataatctaaaaatcgcataaactatatgtaaatactttcatttcatattacaacttatgttcattattaattaaaagtattccttatattcactttttcaaattttatattaggatcattaatcatgcataagttgatcagttttaaacatgtattaaacacaaagataaacaaatcacaattcacaataacaaggaagaaaaaacaattaaattgcatttgaccatcatataatctcagtcaatattcatcaaattcctaaatagaaaaattaactcataatctcagaatacatataatcaaattaaacatagatattaatacaagaaataaagagaatgagaataatgatgaaaaaaatccaaactttgcacaatgaggacaccacagtgcacggagccttctgtaaaattctgtcatggtgctttgaggcgctattttcgcgatgctagtgttgggcactgcagcgcttggcacgtgatttgacatttcaattttaattttacgtcgtatttctgatatttgatcaatttatacattctaagtgtcgaaacttgaaaaaaaaaaaaaacaagtgtaaatttattccaaaaacaatcatttaaaaagaaaatagctattataaatactcagaaaattagactaaaaatagcctaacagtattacaaaaattttagatttattttctaattatatcaaaataataataataataataaattaaaattaaaattaaaaaaaattatctaatctaattagattagtatgtagagaatctcaatgatataaggctcaatgtaaataacttgtttcttaaaaataataaactacttactagttactaacatatgttaaagatggataacttttacaaaatttatgagagaaaaaaagtgggtcacataatatgatttatatctttaagacaaataatgggaggccaaggacacccatgctccttagcacttaaagaccgacgcaacttttgaatattggaaggccaaagtgcaacaacaaaaaaaaaattaaattaaggggatccaaatataaattttctaaagaaaaaattaataaaattataacagatatactataatctttttattaataaaaaatttggaaggggctaaggctccctccattgttatagattcgtctccattagtactttcatgaggtgtcatattattattgttgtaatttaaaattaagtaaatctaattttattttgattacgattatagaaaattactgcttatttataaagtgtcatctcatagtgtctaatagtaatgttatatttttattgtagtcttgagaaaatgttaagattctaccaaataaaagttgttttttagatgcctcttgaaggtagtcttaaattgttttgtctaaattttcaagataatttaatcttatataagtcgttctgtagtgactcatattctgactttgtatatttttggctacacaattagcttgtgaactgaaagtttctctgcgtcgacgattattatagtgtgattctgatccgtctttgaaaaaaaaaaaaaaaaagttgtttctaggagataagtatgtctgaaaatgcgcatgtctaagtattatttgtgaattagttttggaatatcttactctattcttacaagaatagtgtctgaaatgtaatttgtggtattgattattggttctaattcagttctgctagaatttgacgatacattttatatatttttttggcgtcataactaactatcattttattttatcattatagctcataaggccaaattaaggtttagagtaaattaacgttttaataactcatggttttaaataaattaaggttatatagatgaaaaaatcgattcatgactggccttttagtttgttcttatatgtgtgtatataaatatatatattttttgtcatttgttgtaattagattgggttaagtggagctcttgagactctatgcgggcaaggatttggagcaaagtca

SEQ ID NO: 64531 - DNA, 910 bp, Cannabis sativa
  modified_base (859)..(861): a, c, t, g, unknown or other
ttaaagcgagcgttattgttagagtaccctcccgggatacttactagtgcacttatggacagtgccattagtgctaacgctaatgccccataagttgcaacataattcccgaccggtgagttgaagctatcaacttcaacaacttcttctctgtttcccatttctacaaaatgatgcacaaaatgattttaagaaaaaaaaagtgtagctccattgtttacttttgaatttaacaataaatatggaagaaattcttgagcaataaatgaagaaaataaatgaagttatcaaatcctctttacaattttattatcaatatggaagaaattctatagaatagggaatgcaataaaattaaatgaagaaactaaatacttaagtacctggtccagccattttttttagcagcaatgagttttcagcatcaatgagttttcagcagcaatgaacaccagaacaaggaagaagatgaaaaaggaagaagatggctagggtttttcagtagggttacatttttctattttttactttttcaccgtttatgtgtaggcccatgaggtccagtccaaaattagtttattttagttttttttttatttttttatttttttttttatttatgattgtggacaaataccatttagaataaataaagccaaatatattgtaacattaataataataataataataataattaagagttaaaaatactgaaatgttattatatatatctaacaactattaataataaataaataaacaaagtgaaaatttaaaacaaattaagttaaggtggttatttgtaacgcccttacttacgtaaaataagatactaatgttgcctttataaaaaaannntaacaattttcaaaacatgggtactcagttgaaaataaagtattaccac

SEQ ID NO: 64532 - DNA, 632 bp, Cannabis sativa
ataataataataataattgctcaagtgtattatattcaaagatgatgggttatggttatttcttaattattaagaaaaaaatatttacttttttgaatattattattagacatcagtggtatctaatatattctataggtgatgtctcacaattagttatttagcgatacttcttaaaacctattttcgtaaattatataaaaattgatacttaattacactaataataatatgatactgaatagattaaaagacactaataatatttttttagcaattctcttatttttaattattaatttggatatattattagttggacattctctatgaagtttgtggtgccccaccttaaaccaataataccctttttccattttccaatatagactatagagcactttcatgcttgccatacatgtttgaaagagaggaatgacatattgtactatcaatttcaaaagcttatcaactaattaattacattgctatttacttaattttggatggtagccaaaataacacaaactagcaattcataatattatttatttctatgtggggaatatttatgataagttaacatttttttatttttacaggtacgaaaccatcttacatttaacacgtaa

SEQ ID NO: 64533 - DNA, 906 bp, Cannabis sativa
atccaatggttggaaccgatccaatccaatacctagggctgcacacgggtcgggttttcgggtagtcgggttcgagttttcggattttgggtgttggaaatgcacaaccgaactcgatttttgggtggtcggatatggcgggtttcgaatcgggtatatcaggtttcacgtggtcgggttcgggtattatttgaatgattcacgtttcctcacgataatacaaaaaaatatgtatattatgtaatacatatatatagttatagttaattaaaatatatatataattgatagtatacaatagcagctattgtatctcgagaagcaaaatgtgtaattaatagccattagtattatatatattatatttattataatagtatagagagaagtaaaataattaatagcggctattgaatagccattagtattatacatactatatttattataatagtataaagagaagacaatacaaagaagagaaaagccattcctctccgagccaaagagccttccaccgccgtaaaactcctatgactccggctggtcccttcgccgccatcgaattctccacattagcgatggtttgggttcaacatggtcattttggagggattggaatacgaaattgaaattgatatgatgagtcatgagtgtattaagtcgtttttgtcactgtgattgggttacgggtagaacccaaccaataaataaccaatttttgatacccgaactcgaaacccgtatggggtattttcgggttagacccgacccgaccacacgggtttttaatttttcagtttttttggcagcgggtcggtgcgggtggttgggttttttgggtctgcgggtctaaatgttcagccctaccaatacctccattggatcggatcggatcagatgact

SEQ ID NO: 64534 - DNA, 982 bp, Cannabis sativa
aaagacatgggttttcctgcagtgacagaagttggacaaggttttaagtttgtgaacttcattctcttcaatagatcctctatgtacttggtctgagttaagtacaacccagtttcatctctgaatacttctattcccaagaagtagtgaagaggaccaaggtccttgagagtgaatttcttgttcaattcttcaataaatctttcattttgctgttgttgtttccaatgaccactatgtcatgtacatagatgagagcaaatataatgtcagtgtcgcatttgtagaaaaacagagaggtgtcacacttggagttggtgaagttccagttgtgaagagtagcttttagcttgtcaaaccaagctcttggagcttgtttaagtccatacaaggacttgtttagtttacacacatagtgttctttccctttttcttcaaagccttcgggttgtagcatgtagacatcttcttcaagggtgccattcaagaaggcattgttgatgtctagctatcgaatttcccaaccacgattgacagcaatggttaggataattctaacagtagacgctttaatgacggggctgaatgtttcagaaaagtctatgcctggtcgttggtgaaatcctttggccactaaatgagccttgagcctttgaagtgatccatccgaattgaatttttctctgaaaatccatttgttgccaatgaggtactgacctggtgcaggaggcactaggacccaagtgttattgtttttgagtgatgtattctcctcatccatagctttgttccaacctggatgagtgagagcttcttggacattattgggaacacaggttgaaggctgctagacagattgtcccatgaagactttcggcttaaaaatacccgcctttgcacgagtcaccattggatggccttgaacaccaggaggttcaagttcagatgactgctggtatggagaggttgctgcaatattttc

SEQ ID NO: 64535 - DNA, 1008 bp, Cannabis sativa
aaggggatgtgagaaacctaaaaaagagacaaggtttagacaaggctctagtcaactgtaccagagggtatttgccaaaaaaattcatcgtacaaggctgggtatcagtggaatacaatttaggtgtaacaacttagacaaatgttgagtcttaagttgagcatttgactacaatagactaaccattaagtgtcatacatagtttctaagggaaacatatatgagactaaggttgtatatgccgataaggccatgagaggatttttttttttaggtgaaaagaggacaaaaaactggccacctgcttgggaccaacgcctaagcttgttagggtcccaaagatttgagagagctagccaggctctcatgacccatgcaagaactggccagggtcacaagacccaggcacgaatcggccagcttcctagagtgaaaccctagaaccagccagccccatgaaaaaatcctagggtcagctaggtcttaaataagacccttaaggctgaatatggatagtttttagatcaaaatgtgtgtttttcaaaatttgaacgtgttcttcatgttcttcgtgactcaaagagtcaagtcttaaaatgaaggccaaaattaaatctttttcatcaagaaatcactcgttatgcattctaaaactatcatgtagatcaaaatatcaaatagactacaatctaacatgagaatcaaggaatttttaaagcatggaaagcttgaacacaatactggaaaatctaagaaaacaagtagataacgggattggaaagcttacctactagtaaaaactttttaggaagatggtggaaagcttagatcgttgaaacaaagtgagaatatcaggtgttggaggactaaggtgagtcggcctcaatgggaagtgaagagctttctttttttccttttttgaagagagagaatgagaaatgtggaatgagaatgagttacaccaataagttatatagcttcttgtgtgtccctctctcatttaccatg

SEQ ID NO: 64536 - DNA, 1525 bp, Cannabis sativa
ttagtatgttcttctaggttttagtcattgtgatattgttcttattctgtgcttagaataagttgaagaacttcattgaacaagaaaaaggtgtttgggagaagagacttatttaagccttacttcggaaggaagtaagcaaacacatcaaagacggaaggaatttgctgtttgatgatgttcacaaatttaattagcaaaataaattacaaaagaatgcggtaaaatcttagagggagtttaatcttgtttaagtcaattgtatttgtaattatttgagatttactaattgattttacttctctgtgcgtggccctatggactagttgtgtttgaaagaacactaatatcacatataattttcttgtgtcaagttttaaattctgctcaatttatttttgtttctgttttgctactgcatatctgtgttctgccataacaagatttcaatctattactacaaagtattactgtcgtattttaattacagtttctaaacaaataaattgatgattcaaaaaacatgatttttcaatcagatttattaagaagatatgatgctttattttaaaatttaaaatatgttgtcatattttttgttctatttaaagagcaatgccatgaataatatgtattatgttttcaggttaattaaaatatccttaaacttttgttgaaggactcattctcaacagtttgggtacactatttgttgctgattaataaagattgaagatagtgttccaaattagagtacagacaaagatcttcgaaccggtatgtatctccttgttttgtctccacgttttacagtttgatctttgttttccaattttgtttgattatctgtcattgatttaatcatcttgagttgtgtttgttttgagtttattaatcagtttgtcttaagttttatgtttaaaatcctacagtttgtcatgtttaaaaccattatccaacaaagaaaagttgtctactcaaatgagttgtcaagtttcataagcatagttctttgaacttgtagcatattataaatgaaggacatctaaataatcatgagcaaacagaataaaacatacgcgagtgcaccaaacgttccagtgaaaacaactgcagcagagttcctagctgctaaaagagcctgcagaagacatcacgaaatcaaatttggagttaaatttgttatatggacaacaagagaaaaagccgaactagacattgcttaaaattttgcatattatatatgtttatttttctttcagggagagggcaacatatattcaaactcaagttaaagtacaaagaaaacagattacttctaatgagaattataaatttaaagactttggtgtgcgtattcacatgtatcataagttgggcaaatggtaaacaaattatgtatacaaaaaaatcatttaataaagcatttaacttatacatagatagaactaagtttgtttgtctttttttttcatgaatgtttgtaaactactagattttattcagttagcttctcaccgcaatg

SEQ ID NO: 64537 - DNA, 741 bp, Cannabis sativa
tggaagatggaggctataaaatacatttcttctttcttctctatggttattttgtggttatttttttttttattttggttattctaaaaatacatttgacaagctcagtagaaaaaaaattttgaggtgtgtggttcttttatatttttctaagtggttatatctgcttattgttttatatttatttttgtgttgttttagtagttttttttattttgatttattaagattgagcttgcaaatataactactattgcattaggtattgaggctgtgtagaacattttttagtttttaatcatgtttttctttcttttgtttgatttgttttagtgttgttttgccgtgattttttatttgacgtcgattctacttttttttttctcaatctcaccggaattaatgattgtttttcgattcttatggtgctcatgtggtggttctatccgtgagtgtggaagatggaggcctcattttttttttgtgtgtttacagtataaaagaaaaaaaaaatagtcaagacagtataaaagtaattttcgcgcagtatttttgtaaagattgggcaaaaagtcaatatttttgtaagtttctcaaaaaaatatgaaagaccattggcaggaccgccttaagctaagatgggctagactcgtgcttagggcccagggccggccctgaaatttagtggcccatagaaaaaaaattattttgggcccttatttaaaaaaaaaatgtggtatt

SEQ ID NO: 64538 - DNA, 1214 bp, Cannabis sativa
tgcatgttacactcacatgcctatttatgtctacgtgtcgtagacctatgtgttgtgctcacacatctatttatatccacgtggcgtagacctacgggtttctctcacaagtttaaatacagtaagggcttagaatggttcatcttggttttggttactgagtctaacctaattatgccttaagcccataatccctaaatctcattacatttaacatggcatggcatttacacacatatacaactagggtaatcatcctaggctatcaaccgcttgtattagggtaataaccctaatcccgattactaaacaatcatacatatcattttcaatataagtgccactgcgcatactctacgtgctaatcactgtcttacctaatgtcttgtaaagtcagagattccgaatccccgggtgctcctaatcaggtgccggtaatcctagtcacacaatctgggatttcataaataggatcaactcctaattccatactcataaaattcaatcatggcatttaaaattaagataatcatacagacctcggaaagagctttccaacgatatatagaactcccaaatcagagtttggaatcaaaatatatgaaatttcaaagttcaactcaaaactgcctaaaatcacaagggcgggccgtggcatgcccaagccatgcgcggcacctggggccaactcccaggttcccacaaccgcggcccgcccagagcatgtcgtggcacctgggtttcaaacctagaaaccagcatgcatttccacgaattttcagcaaaaaccccaaccaaactcactcaaattcataaccaaaatttccaaattataaaccaaagttactagcaaacactagggatttaacacacataatcatgcatcaaaatccaataataaccccgaatttcaaattgctcaaaaagctagaaatcatgctcgagatcaacaaaacccaagttcacaactaagaactttaaagccaagcttcgcaaataatttccagcaataaacatcaaatttaaaacctgaatttaagtaagaaaataccctaacattccatctagagctcaagaactaaaactcacaacaagatcaaggaattaacacttaaatctcataaaaacactacaattctttcacacatgctttaccaaaaacatatcaactaattcttgcttttacaaccataaaattcagcaaggattcaaag

SEQ ID NO: 64539 - DNA, 950 bp, Cannabis sativa
aaaatatgtaagattttatattattgaataataatacttcaaatcatgtcatttggatgtctcttagtaataaaaagatcaatcatgacataataacatttaaaaaaaaaagctaaataattataaaccaaacaatataaataaactaagaatatgttatgtagctatagacgcagcaaaaaaaaagcatatggttggcagatatatgcaagaagaatagtaatagatattaacgtcaacatataactgtccaaaagagtagtcgaggaagacgacttatgatgcgaatgatgtccatgattcgaactttctggcaacaatggtattcttggcatcggtgaacggcttctgcttcctccaccacggctgccggaacctcttcctccactactaccaccgctgctgcctgccgcgacgccggagattaacaaagctacaaaaactaccagaactaaaaggaagtgtttcgaccattttgacgaacaacttttggagctcatcactgtgttttgcgcttattcaattgatcgatgatattggatttggatattttggtttgaataaagtttaatataaatatatatatttatagaataaatatcccatcatgtacgcaaaaccgtttgaagcaaacagtactgttattattattattatttaaaaagaatacggaaaacaaatagattaaaaaaaaattaccagtttttataaaatttgttgtttgggcgctttaaaatattataagtcgtggaacatacttcggctaaacaaagtcaattcaaacccttacatgtgaaggtcataaaaaaaatagctaggattaaagaccgcttggttggttacacaattcgtgataaaaagaaaatagggccaaacaatagaagtgttcaaaaatagagggcctataggccaaagatacgaacatgaagactctggggctaaaaataagt

SEQ ID NO: 64540 - DNA, 685 bp, Cannabis sativa
gatttcttgttgctttaaggactcggtgtcgtttactaaaagcgaggacaataattatctttaattttaatatcttatccaataaaatatttaatttaaataattaaaagataatctttattttattttgatttatttaattaataaaataatcaaaacaaaatccattgggccttatatgtcacctacacgtgtgggtcatattttagagcccaaaattaatttctcaattttgtctctttttttttaaataagatttattaattaaaatatataataagtgattaattctcattaatatcttatttaatttggattaaatcattgttgttttttactaaaataataagctttttttctcataatattatttaacaataatattatatataactaattaatatagttttatcaattaaaactaaatagttaaattctattttaattattcaattcataattgacataattatataaaataataatttatacaaaattactattttgccctcaagaattatttcttttagaattcaattctttctcaattcatcttacaaattatatctttccttatacagtgttgtatagaggtaatctgagaagtacatacatatatttcaaagctctaataaacactggattattattgattcttatcaataaaataatctggtttattaat

SEQ ID NO: 64541 - DNA, 584 bp, Cannabis sativa
  modified_base (199)..(201): a, c, t, g, unknown or other
cctttagcatttctctaattttatttgttaattaattataattattaataagtacttttgacattaagggattgaaattgaaaaatgtagcattagtgaaagaaaagataaattgttgaataaaatgacaaaattttaactagtggggcccattatatggctgaccacttgagtatttttagccaatttttatcttttnnnattccatataatttaaatctaaccttaaggaaattcctatataaggtataagatggctttcattctcatccaatctatcataacctagttttctaactctgtcagataataactagaaattgagaggctccttctatagatttcgaactttcctctctttctcttcataaatttcgagccctatatagtgatagagttcatgctcactcatatcaaggcaagtactcaatcatagtgcagaagactgtgaagaatccaacacctgaaaaagatccacgctcagatcttgctaatattaccctgtgacagaaaggaacaagggttcgagatctgagtggaaggagacatattattccgctgccaccaatgtaaggttttcttaa

SEQ ID NO: 64542 - DNA, 1545 bp, Cannabis sativa
  modified_base (122)..(124): a, c, t, g, unknown or other
agttaaagtgttgtgaaagaacaacaaggttaaagaggcaaatcgaattagagtcacagatgcgggagtaacatcccgagttattcaggtaaattttgaggacaaaatttctataaggaggnnntagttgtaatatcccaaaaatctaatgttaataattaaggcatattttaaaaaatataaaataataagtgtgttatgagtataatggataagattatgatcttactaatctaactacgtgataattagggattttaatataaataaatgagtaagtataatttatcaattacggagattcaattaaaatgtgtgggtatgatgtaagttatttgagaaataaaaatatttttcaggtccggcaactgtggagacctgattggtggccaaaaaaatcataacgatattagtttgtggtaatgttggttttattgggttagtttggtttttgttttatcgaggtatttcagggtaactagttatgaccaaattgcccttaagttagagattacttgagatttaagttaagggtgattatgtcttttttggattttgttttattagcaggattctttaggttatcattaaggttaatttatttcataagttgaataatactaggttgatattatcttaagtaacaaaaattataaaacaaaacatcacacttttctctctttcttgcttcagctcaagaaaaaacccaaagggaagctaggttttcttcttagttttcagaccaaattaagtgggtaaatcaagtgtttgttgaagagaattctaaggtaaactctagctactcattctctctgtattttgaggttttaagcttagttttatagtgtgatcttgtgttaaagctgttgttagggttattttttttatgttggttttggaattttaattttaagtgtttaatgctattttaactgatttttgttggttgaaacctaagttgagttaggtttgaacttttaagtcaaacttaactcaagaatggtgtattttgttttatatgcttgttgttgaaattactggctggattatgattattgggcttaaaatataggcatttaagagagatataaagttcgaggtagttttgagttaaaattaaggttttgtgttttctgcagcagaaaacgacagaccattttctagaaacagtctcccatttttcctggtagtgtcccaaaaaatggcctaccgtgtttacagaaacgaactactattttttggggaatttttaccgaaatcccatttttggtatttagggtattcccatgctatttatcgatagagaaacttccaattttgagtttaagtcctggaactggttagatcaagttgttaaatgatttattgttattgtgacatagggcctaggattatcgtctattctccactcaggttggctgatacactcggatagggatttgaggtaagaaagtatattcataccactagcatgtcaagacaagttacgattattatcgtttctgatttgttattattgaatataaagatacgacaattaccatt

SEQ ID NO: 64543 - DNA, 1044 bp, Cannabis sativa
  modified_base (513)..(517): a, c, t, g, unknown or other
tatgatatgtatatggcatgtttttttgaattatttaatgtaattttgcactccttttatgtagagaaataaattctttgtgtattaaaattgcagtaaaagtctcaaaaagttaactttgatgcaaataagtccttaatcttgaaaaatagcgataatagtccttaagcttgagattcttgtaagttcgttagtcttcattttaagagatccattagttgctcaaaaaatatcacgtgttgatattaaattatagtataagtcctcaaaaagtttactttcatgcaaataagtttttaatctttaaaaattgtagtaatagcctcaagatcaagattttcgttagtttgtatgtacccaatttaattgttttgtttgttactcccaaaaatgacacgtgttgatattttattggcccaaattataattttaatttaaaataaataaataaataaatgaataattaattccaaaactaattaattaactttactcttttttttttcttttttnnnnnttttatcttttctattttttttctttcttcttctcgttcactctcagcccaacctacccaaccatgatctgctctactaaaactctctaatttccattagcaagaggggtcactctaaaaaaattattaatgtaaattttgaaccagaaaagtcgaggtcaatgaatcggccaccaaaacccaccacccatatccttttttctctatcgcatactccatccatatctctcagttttctagaaacataaagaaaaaaaaaacaaaaaacctcatctctctcaaagatccgatcccaatcctgatcacatctcttcttttttcttttgcttaattgattttctgagatagtgggatggacgaggaataaggtggaaatgaaggaatgttgctggtcgacactcaacagtaagcctccaccgctgagaacaagaagggtaggtgacaaatcgtaagactttgtaagaaacttttttttttttttttttttttttttataaaaaaagttttttaatttttaaaaaaaaaaa

SEQ ID NO: 64544 - DNA, 840 bp, Cannabis sativa
ataaagattgtacatattaagatggttagacctagagtgttcagaacttcaggacgatagggattttttcgactgttgttaggcaacaacttttgcataaatgtattttggaaaacaagtataactttttaaacgagatcccaaattatgtaattatatctatttatttcaatttaagttaatatatgaaaattttaattattcacatttggtttagaaaaggagtgcttagtaattagaaaacacggtaatatgcctaatctagtagggcattacatttgacatataacaaaagttgatgtttgagactttctatgtgacggtcagtattcccgtgatccgtaagaggaaataccgggtaagctgtacaatttcacatcgcctagggaaggtcaaatgtgatgattctgtgattgtgtaggtattggactaatcagttgaagaaggcttaaatggattgattgtactacctatataaacaaggtgcatcttattttttggtagcccatcacgaaagaactccacggttaagcgcgtttaacctaaaataatttcaggataggtgacctcctagaaagtttcttgcgagtgcacgctgaaaatattcgtgttggtttgtagggtcagtcatcacctatgaagcaaccaaagtgacgtacttgtgtataagagccatcatttcgtgggtgtaagggcccaatagaggcttgaagcggggacattacaaatgacatcagggccttaactcggccggaagtgtggtcgacaaggacattggaccccataagagtgggtgattgtgacagtcggtagtcatgtgattcgtaaggcaaaataccg

SEQ ID NO: 64545 - DNA, 863 bp, Cannabis sativa
agtaaagaaatatttgaggcttttatggtcagtaaaaatttcacatctctctccatagagataatgccgccaaatctttagagcaaacacttacttgaaagaattgtggaagcaacatgaaatgggatctaaaatgtttcaagtagtgactaaattgaagcaatttaaagtgaaactcaaggagattaacaaagaaggtttttctgatttgcaaagtgctgtcattcgaattaagcaggatctagatcttcttcagagtcaaatacacaaacatcctcttgatcctaagcttcatctacaagaaaaagcactcagagaaaagctaacaagggtgcagagagactacatgtccttcttacaacaaaaagctaaacctgattggattcagcaaggagactgtaattcaacactttttcatgcttgcattaaacagagattgaggcaaaatcatatcctatctattgaaagacaagatggaaacagagtacatgaccctaatcagattacagaggcctttcttgaattttataaaggattactgggttccaagttagaaaagagaagcaaagttgaggcaagtgttttggctagaggacctgtactaactccgaaacttgcaagtgtcctaacacagaagtttacatatgaagaattgaagaaagctgcattcaacatccctggaactaaatcccctggtcctgatggcttctcgagtagcttatatcaaggcaattgggatattataggtgaagacattagtggtgtagtgttggcttttctggaaacaggaaacattcttgaagagatcaattctacaataattacgctgattccaaaatgcaaatgccctaattctgttaagg

SEQ ID NO: 64546 - DNA, 557 bp, Cannabis sativa
ctattaattttagattattctatctttattattaatgttgacctttgcatttatatttatatataattcatatttaagtttaaaatatttctagaaattgtgtaaatcgaacaatatacagattacttgtacgtaatgtactataactttattatcaatttctcaaacttcaacgttgatgactttcatgttatttttggaaaaatataaagctatctattagatcatctcatggcttaatacatgtgcgtcgtgtcaatcaagcctctattttgaaaagcttgtaaaattataaataagattaatattattttgtatactgtgttttgcaaaagttataaattgaattttctattttattaaatgataaaattaacatgtatttttctaaaatagtataaataggatattgagttcaatttttgaaaattttttttaatatataatcaacttgaagacaattcctaacacagtaaacgtaactagttttataataatacctctaaatcgagttattattaagttttattttgatagaaaattagttcaaggtacta

SEQ ID NO: 64547 - DNA, 1346 bp, Cannabis sativa
atattacaaaataatattacaaacattaattatattaatctatttatggtaattattttaatcattaattatttatattatttaatgattaaaatgtatggtttcatgtaataaggtttgcaaaatgtataagttttaaaaatatatttttttttttgcacattttttgtaattatattgttttcgttgtacatttatgaaaaaatcccttaaaataattatagaagagatttattaaaaaaaacaaattatttataaatattaattaataaaagaggtgttgttaaatattcaagtaattatcttaagaaaatagttaattataattaattgatagtaaaaaaagaaatttttatttattggtaacctgctattacaggtaaaaaaattgtaaccataatggttacaataatatgattcttttctttttcttgtgaatttggtagttatattgttctttagccttagaatcttctttagaagttcaaccttatattctctttcgtatggacttgttgtatgctaaacaatttttttttttttttgccttgttgaaggtattactttgtttgcaacgctaatgtatggacaagaagaagaaggaaaaaacaaagaaaaaaaaataaggctacaactattaacgaatagaaaaagaaactttcttatcaacacaaaagtaaatcctcactgcctacatgacatcaatagttatatttttctactaaaaccttaaattatcaaaacaaattgaaaaaactctcatatggaccgcaattgaatgcactatctctccacagaacatacaccagcacaacatttactttaaagctagtcgcattttattcaaagatgacaatataatagccaaagaaacaacaactctttccattgtctggtgcccctgtaattagagcatattttcatcaattaaaaataataataatgttggctttaaaaacaaataaaataaataataaaaaaatagaaataattcagaaacatacgtgtacacatatttgaccatttgtgtaagcagctctcataagttgtatcacatatataccacaatcataatctacacattgcttcttatgaaatggcttttgcataataatgaacttctcaaacttgaactcctaccaagatgtatgctaaaagcattaggaaacgctaaatccaatatcacaagctgcaaaacaggttaagtaataaaaaaaatgttaaagaaacaaacaagctgaattataacttctccaattcaatactcacaaaatcactgataatttccaatcctaacgcaggagtcaccacacggaggtcatcataaacatatacactttcatcaa

SEQ ID NO: 64548 - DNA, 1845 bp, Cannabis sativa
aagttgttggtagccgctttgaggtcggagaaggagaactcagtaaaaggcggggcaaccccagttagtggctcgggcccaactgaaggaggagggtgttgttgttgttgttgttgtagatgttgggtcgggctcttctccggctgagattggctcaacaacaatgattgacaacaacccatctctctctcttacctctggtttccttgtttcactgtttaaagctgcttattagccaagccaactcagagaaaccatgaatgaatgaatcaatgaattgagtgggtgggtgagtcagtgtgtttaagaaaaaaaaaatgaaaagtagagagagaaagagagaaagacttcaaatttcttccccagtaaaatacactaagcagtattctctcttattattattcttaattatcttccttattagtttgttctatgttaaagttagttcctacggtaataaatttaggattacaaaaatcattaatcccttcactgtctacagtttttctcgttaaaatgttttttactttttcattccttaattaactctttctctctctttctctaagtctttatatatatatatattatataactatatatatattaattaaagaaataaatgagagaatttattttccaaggcggcatcgtcaaaaggtgattgagtttattttgggtcatcaacgtcattagaaatgtgaaaggtgttttaggattgtatgatcggatcatttctcctttgtttgtcttttttttttcattttcttcatttacatatataatataattattgtgtaacttgacgttgtctaattctcttgtcgaaaattctagattgttggtgttagaagttgaattacttaatcgttatcacttatttgtataaatataaacaaaaaccacttgatcgaaaaaggtttcataagtctcaaaatgtgtagtagtggtccaattttgaaagagcccaattgagcaaactatggaacacagacaacacaacacaacacatctatgccctattttcctttatattggtttttttattcattattaatattatcattaaggtggtgttgggacaaatatagaatcaggtagctgtgtttattcatttgtgttgaattgatggaactacacatactatttccattgcagaatagttttaattgatgttaaaaaagacaaatgatttgtatgtactttgtgtactgtgtctatgctgttttttaacattatttgatacccgaacttgttgggttgttttataaaaaaaaaaattgttgggtgtctgatttagtaatttatagtaatgagtaaactaaagtgtaaatctgattggaaagcatatattctaataccaaattaattagtgttcgttcttctgtgcatcttacaaatcatgatatgccacttttacgtgtacacagtctcacacattcatgattggttggcactatcccaatggtgccaaccatacttaataaaatattgtaaaagtatcattttttttttcatattctacttcgttaagaaaaaataagaataaataagtataaaaccagccaaagtcagtaaagtttattatcattatgtattcaagtaattgaaaatagattagctgctatacagaaatggatcagtgtgaactgacttcaacaattatttaacacaatcaagtgtgatttagttgataatcgttatgaggaagtttactaattgggaagtgaattatttgtagtaatgattttcattaaaattctgaacttggaaagagtgctatcctgctcgcacaatgatatgtttattcatcattctctacttatttttccttttttttttttt

SEQ ID NO: 64549 - DNA, 932 bp, Cannabis sativa
aaaaaatatcattttacattatatcaaaaatatatatacttatatacaaaatacataagtcaaactcaattatttttttgctagaaatttttttttcttaatttttttcagccaatggaacaatcccaactcatataatgtaaaaatgagatattttttttttaattagatagaaaaactaagcatagaaattcaaattttcataatattacccatgaatgggtaatatccacccatacatatttatgttaatgaattaaaatgttaatataatttttaaaatagagcctactagattataagggcataaaatacgtatcttgaggcgtggtaaggaatttcactagtaaattatccaaggcaacctaaatacaaagaatgtggtttttatgtttttgaaatacattgatatcgtcgcacatgcaaactctaaccgttatatacactatcaaaaagctgtaagttttaattattaattatcgtatttattatattaacaaataatatatataaactaatataaatttttacttccttttaccgttgagaaaaaaagacctacaatccaaaaattcaattgttattattatagcgatagtggatagaacaattgctggcagtgattcacgaaggcttagacgattaatgttgaaatatataagaatttttcttccctagcttattttttaggttaacttgtaattagatttatttacttgttaatacttggactaattttataatatttgtgtaatataattgtaatttttttaattacttctataaaattaatttaagtatattggctaatcataaaattaatttaaataatatttaattaaaattaaaaaaatatttattataaattaataaatatttaatttaaataaattaaatttctagatttataataggtttttaaatgaaaaata

SEQ ID NO: 64550 - DNA, 627 bp, Cannabis sativa
aatctgattatattgaaaggggttttatttagggcacaaaacccaacatgaactgccttcaataaaacagtcataactcactcaattttgatcaaattaacacgattgaactcgagtttcgaagctaattcaagatctcaagtcaagtctcacactatagacttaattttgaagttttcatcgtcaaaattcacccccaagggagttataaaaataagctccgagttacccgcatcgggactcgtcgggctctgaaaaatagccatcaccaccatgagctagtttttatcgttagatcatcatcaatgatcaaaaatatcttatttgtattttctcctatttttgtgggcctcctttacctatgaaggacagcttccttagctcattttttacatttagaaagctatccacaaggtcagagcttctctctctagaatttcgagattctgacactaagcctattgttgtaatcaccatctcgtgagaaataaaaacttgaagtagatgtagatccattactatcacgatatagggagtgaactactataaatttgctatgtctctcttataattacttaactgtttattcattctcgtgaatctacgagcgggtgtggcttagaagtc

SEQ ID NO: 64551 - DNA, 1641 bp, Cannabis sativa
  modified_base (44)..(49): a, c, t, g, unknown or other
tagaaataaaaatatgaacacaaggtttttttacgtggttttgnnnnnnaaattctgcatagtccacaagtcaatcttattcagatttctgattattttttatgaccatgagttttttcgtccccctttttgatcttctctgccactatttataattacacagtggatagtaaaattacaaaagttgactgtaatttttacagcaattattccctcaaatcatgggatttgattacaaattatgctaagtaaatgcagtttttatttagaatccacacagctgtgagtatctttcttttattggaccgagatgaacacatatttaaagatatactgtaagccttatctcatggggatgcctcgctaggaatggagccgagttaactttgatggcaagctgttgctcgtcatatgacttcctgagattaatattgctttaactctgataactacattttttggtgtcaagatgatctttctcgcatgcatgccatcttacagcgagatagacgcctcgctgtctgtcatctatttatacttagtttgtataccatgtaatatacgctaagtgtttttatcgttattgtttttgttccactcgacgaggttgaagcctcgtcatgcacacttgcactcacatggtttctcttcgatacataagttagcagttcgtacgtttttgtctcacaaaagactactcagccagttgagttataaacatactctacaaattttgtttctaacgagttgttccatgctaagtgtacttacgattgcgtgtttgagttcttcgttcttcccatctcgacacgtgtcttcctctattgtgctcaccgaattttatgtataataatggcctcttaaaaagtttgtttttttaaaaaagagcttttttatgattacaaagggtatttccgtcatgttcctatttttgaaaagacgcatgtcctttgattttggcagttgtgcggttttgaggtacatcagaattaaatgaccatctttccacttccgctttgaatcatgtccgtaggatcaaatctttctctgatcctgccactatcatgggtataaagtaagaaaaaaggaaccacctttgaattattttctccattttaaaaactttgaaaaaactcttaagcttctttgtcaaggatcaccattaagtttgttcgaggactagcatgccatctctgtccttgaccttcttcctatgagtttcttccgacttcatcctctcaaagtgatccttgattcgtttgaagatttacagatggagtaaccactcattgccctgagccctaacttcaaacagtaagttgctttcttctttctgatgtttgttacattgtgtggatttattacttagtctgtttgtattgttgtcatctcatctagttttggtagtttttagggtttaaactgtatctaggtttatactagggttcaggcaatatgtaggttattttaagatctccaactcattaccttcgggtttgataaaattctctcgagggattgggactgctttttacttgcagaaatgtcccactctggttcaagaatttatcgtctagaagttttagagtttgagttccctacaaaatcagccatcctatataaacccaacccttcaaaacc

SEQ ID NO: 64552 - DNA, 1292 bp, Cannabis sativa
tagttaatgcgaggggtattgaagaaaatcttgaaaaaatcaaggcattaatggacatgccatcaccgacaaagcctatggaagtacaagctttgacaggaagagtggctacacttaataggttcattttgaagtcaactgataagtgtgtgtcgttcttcaatatattgcgaggcaacaaaaaatttgagtggacaaaagaatgcgaagagtccttccagaacataaaaaggcatctagcgacgcctctaattttggcaaaaccaataactggagaaacgttgtttctctatttatccatcttggaagatgggattagtgcagttgtagtgcgagaagagggaaagaaccaacaacctatttactatgtgagtaaaaggttacttggagcaaaatccagatatctccctctacaaaaactcgtgttgtgcctagaccatgcgtctcgcaaactatggccatacttctaggtgaaccgcataaaagtattaactgattagcccttgagaaaagttttatcaaaaccagatgcttctagaagattgataaaatggttgattgaattggggtagttcgatataacataccatcatcgaacatccatcaagggccaagctttggctgacttcttgatagaatgtataactctagaggaaattccacctatttagcgagacgcgaaaacctagaagttataagtggatggtgcatccaacgaacagggtttgggtgaaggggtaatattaatatcgccagaaggctttaagtttcacaatgctctgaggttccaatttgatgcatcaaataatgaggctgagtacgaagccttgatgggctgcttaaagatagctgaggcgttgaaagtcaaaaacctcatctgtcgtagtgattcgcagctgattgtgaaccaggtcctccgggagtaccaggctaaaggcttaaaaattgcgaggtatttagagaaagtttggaagaacttggaaagattcgattactttaaaatcaaacaaattctaagagaaaaaaactccaacaccaacgccttagcaaaattggcctcatagaatgacttggatgaattgaacttagttccggtagagatgccgagcgagccaagtatatgtgaaacagaagatgtcaggatgatagaaagctctcctacatggatgactccttttatcaatcatctactcgacaacaacttccaaatgacaaaaacgaggcacgaaaactattgtatttagtgcctcattacacaatgactgaaggcaaactatatagaagagggtact

SEQ ID NO: 64553 - DNA, 622 bp, Cannabis sativa
ctcatgaaaagtttgcctttcttcttgttcctaaaaattttcatgcttaaaattttattaataatctaaaatatttcatttcaaattcaaaattcaatcgactataaacttttgaatttcaatcacaatctagttaaaataattaatatgtaatctacatcaagtaatagaaacaccccaaacttttcatatatccacttcatgcaaatagaactattataagaacttcttacatatttatttttattcttctgttcataaactcatcaaatctcaaattcttgtcacactaatttaaaccatacaagcatttttttttttttttgaaaataagcgtattcattcttttaaataagctgagttagaccttgcggtcattacatagaaggtcctccagaactgacgaggctggaatagaaccatacaacttgtaaataaaagcccagttagccacattatgggccgcaaaattacaagttctactaacatacacgaaattacagcaaataaaagagggagatgacttagaacaaaaggagacatagttttcaagcgctcaatgtgactccgtcccattaagagtattgataactattctcgagtcactctccaccaaaacata

SEQ ID NO: 64554 - DNA, 2222 bp, Cannabis sativa
  modified_base (805)..(818): a, c, t, g, unknown or other
catatgaaaaaaagatgatatataatttatattcattagaaaccaaaccctaattaaattaagttgaagagagaatataattaattacgtacttcgttgtgtgattatatgaactccaagagatattgaaaaacgtaatttaatttgatgagcaaaggggaaaatgtgtattaattagagagtttattagctgcagagatgatcaaatgaaaaataattctatcttttctatttatagatgcatttttagatttttatttttataataatatattatttcaaaataaatacattataaggatataataaatactttattttaaatttaaatatcatacgaaaatctttattatttgttattattatgttaatataggttagatactttagatacttgttttttattttaattttttaaaaaataacaaatacaaattaacatgggcaatcatattgtgttacgtgatcaactgtttatttatttttttcttgattataattgttttagatacaatatttccttatttatttattatatattattgattttttttaataacgaatttgttgagattaaatgggaatgttttaagtaatttctaaaagttaatatatttcgtgttctagaagaatatattgataaatttaataattcattaatttattaagaaaatatgagaatagaaagaaagaaaaaactctaaacgtaaattagttctttttaattattattatttgttagtgtacttttgttatcttgaaaagtttgagcacaattccatttgaaattaataataataataannnnnnnnnnnnnnataataataataaaaaaaaatttatctcgagttgcaatgtccttcatcatggataacttttttttttttttttgttaagttcatcatggatagcttgagtttgtgtacaaagcaattagaatgcacccacatcaatctctattttattcttcaaaatatttcattaaaaaaataaaaaaatcttacttaaaatgttagagcactcacatcttatttgattcttacaaaatttacacaaatttaatcggtcttagcaccaaagaaaaaacattgttattttagaattattccatgggatagcaaattacctaacgccctataattagttaataattttttataattttgattaaaataaaataagtagcactcgatattgagttgtaacaatatcaatattatactccataaggatgctatgtactaagactgaatattttgaccgaatttgacctaaacccaaccaacccgtccggacccgacccgatcaacccataaaattaaaaaaaaactcattctgtttgggcaggtcaggtccaacccgacacactttcggacgagtttgcgagttggttttttataattactggatttcgagttggacccaaacccacataccaacccgatcattttttatatttttattacatatataatatattaaaaataaaaaaaaaaatagaaaatctaatcattttacttttattacataaataatatattaaaaataacaatatataatataatatagtttgaaacttgacttttgtattttagacttaaaattaatgtattttttattttattttaatttaacgaatatatattatggtggtataaatttataacttatatgattaatttaatatatagaaaaaattacataaaatttcagtttatttttttttaaaaaaaatattaacaagttgatcgggtcaacccgttgattcgaccaaccctgttaactcaaactcgcagacccacgaacccgaaactatttcacaagttgggtcagggtaaaattttttgaactcgaaattcgtaagtccgaaacccgcaaacctaaaattcagtcaactcgcaagcactactatgtactataaatgccctttaataatttttttggctaattaagatttttgtccccgaactttgacatgtaccaaatcatgccccctaaactttgaagaccgttaaaaattctctctaaactattgagattgttagatttaaggactttaatctaattttagtaacaaaaatctaacatagatgaaaatttacgaagcatgattttacacatatcaaagttcgagaggtataatttagtagatatcaaagttcgatgagcatgatttagttcatcgataattaccgaattagttaaattgaataaaattagac

SEQ ID NO: 64555 - DNA, 664 bp, Cannabis sativa
agacatttctgcacaaacaaaacagcacagttagaagcaaatatgatgaaaagtatatcatcaaagtagtacatgcaagttaaaaataccctgcacgtgggcaggagcatttgctcgaacaaccacagacggggcatcatcgtctgaagaatcttcctcctactgcaccaggacggcttttccttttccttccacaggggcagatggccgagcaggcgtatctggttccataatcctgatagcgtgttttactggtacttggttgtttgggagagccttcttcttcttcttgcttggcctctcctgctctgtcacaccacccttgcgtagctttgcctttttcttcatctccttcacaggctttggcataaagtcctctgcgaagagtttgtacttaacatagttggcctcagtggccaacatggtgatgtttcgagtagcatctggcagttgaagaattttttatgccctttccctaagtctcaatgtgaaaggagggcgacaatatgagggaatctcttggaaccaagtgtggacggtatccatgccctgaacaaagtagcactcgtcctattttgcagacctcagtgtccacaatgcccgtcagccatttctcatccagttgagagaagtagaaatacctcaactgttgggttttatgccc

SEQ ID NO: 64556 - DNA, 930 bp, Cannabis sativa
gtatttcttacagagaatgttctactttctttttttcgaccccttcattaatttggttgaggggtctttatagcagttgtctagaagaagaaatgtctcaatggtcttatgtgcttgccttggctatgcacaagtttccaaatctacgaagtagggcatgcacaacctacgtgtaggttgcatagggtttaggtgggacaagtcctcatctttccttgattgatgagattgttcataatggagccgtcacttatacccttgattatcgcgtaattgttgaaggatgggtttatggcgtctgacacatcctctcatatgcgtttgtagacgcatcctttatggtgcattgaatactagctgatagtacatcttcgctaccctaaattcggaggagctaggcgctatccagctcccggagactacctcaagtcggacctcttcggaccgaggcatggcttctagagtagttattgagttgtctcgaggggatttgacctatgtaatgactttcctttaattatatctaagtcttagagcctgacctgccacgtgttccataataaaattgctacgcatattgagagaaagctaagtcaacaacatggtatataaatctattctttttaaatgatattttcttatgtaatattaatgtatatttataaaaaaaaatcccaagaaaaagggacagattcaaaaagctaaataacaatcttcatttgattgtaagttagcaaaagggccttcattgttgtctcagtctcagagctgtaaaatatcagcatagaagtcatcgaggagggagatattattattaattaagatgtcgtttttgttacgaaactacaaattaaacgacaacataattcataagtcagtctctttctagaggctataaacgacaaatttctattcttcttcctttttttt

SEQ ID NO: 64557 - DNA, 1009 bp, Cannabis sativa
cctccaccattcttgttgtttgagaatcgatatagattgtctgcactagtcggcatgctggacagtgtttggggcgctatgaggccctgtgtttattcatcattgtcctgccctcttttttaggcctggcagacagcttctacaaactttatgaagccattagctcgctcaacgaactcctccatattactcattgagatcctcctgatatctttctagaaatcactcaacggtaggatgcctccgagtatggttgcatatcatccttcttctgtcaagcctatgaccttggtggccttggccatgaaccgttgaatatagtccttcaagggttcctcttgtctttgctttatttcgacaagatcctccaatcgagaaggtatttatcttgaagtagagaactgaagatagaactgtcgggagagttcttcccaagaatttaatcttcctagggccaacttgaaataccattgttgggatatttcagctagagttgttgaaaaaatttggcattgcacatctccaaatacttgtaggagattcgtttggatctcaaagtacttcaggtgtattagagggtcttcttttcctgtgtacatcttccaagctggcatcttgaatttgggcaagggcaaggcattgatgtatgccgagaatggtgatcccctatcccctatctagctcgagttttgaaggttttggaccagctaggcccttgagaacgtctcgtatttggtccaactatgcttgcacaaaaggatctgttactgtaggggcctagtcgattggccttctttgattcagttgcaacctcaaattggccatagcctggccgaccataccttgggagagggtatattcaaggttggccagccctgaatctggtgctcgtacatggtcggccaaccctaagctgggcagggcctgaccgcccacacttctctaccaggctggtggagcttgtgcattgacatagggtagatcacaccaattgctagagtttggtgga

SEQ ID NO: 64558 - DNA, 857 bp, Cannabis sativa
  modified_base (26)..(28): a, c, t, g, unknown or other
aacacatttttattttttaaaaacannnattttacttttatttttgtgattataaaatttaaaaacaaaagtgttaccaaacgacacattaatgttaccaaaatattctattttttatgctattttttctttttcttttttctttctttcaaggctccattgggcatccctacagacttatgactcttatacacaataacgttactttggttgtttcatggaatgacgtttgaccctccaaaccaacacgtatctttctagcgtgttttgttctcactcgcacacatttcttgagaaaatttcctaagaggccactcattctaagattactcgtcaatcgcgcttaattttagagttcttaaatgatgaaccaccgaaaaaatacattttgttgtcatagttagttctcatcaattcatttaagtcattttcaactgtataatctcatacatacacagtcttaaaatcatcacatttatcttttccaaacgatgttggattatacaacttaactgatatttctccatacaaatcacaagattgtgactatcgtaacaataccacccattttggaaactctagaacatttcttatgttgttttagaaattattgattgttttattagttgtagttttttctatgttaatcgtatagttaacaagtttactgatagattgtcaaaaaatgttaaattttctagtcattttgctcgtattattcaaggagagagatcttcctgtgattcccgtatttctttctcgatcaatgaactaaattttttaaaaaaaaaaaaaaaacaccaaaccaaaaattgacttgtgctaaattttttagttaaaaattctcatttggtatg

SEQ ID NO: 64559 - DNA, 1440 bp, Cannabis sativa
ttgattaaaagtgtactaagttgatagaaaatataataaattataaaattatttattaacaaaattagtattattcttttttggtgatataactttgtgatatttaaaatactattttatttaataaaataaaaaaaaacaaaaaaaataccagttggtcttttaattttttttttaaaacttgataaaatagtttgataaaattaatttatttagaatactatgcgagaacaaagtatatgaaataatcaaatactttttagtatcttaaacaaattactttttagtagcctattaaatttgattggcatatcaatttttttctaattacaaaatttattaattatttttcttttaaaaaaaaaaactaataaattacattttattttagtcatataatcagtgtaaaaaaaatagctttgtaaactttgtcaagaaataaaaaaactctgtacaatttaaaataaataattgaaaaaaaaaaaatcctatgcggcaccggaagtgcggtgccgaacaccacaacagtaacttaatacaaaatttatttataatatttttttattaataatatgggacccacaaccattttgacccttcccatctaaataataagcccacgcgcaccatctgccaataaattatttttcaacattttttttaatatttaaatgtttatccatgtttacataattttcattctttttacatattttttaattcttttttaatttttttctttacatcaaattctttttattacttttttaatctcaaacattcttcttaaaaaaaaattctcaaactttttagtattttttatattaaatgcttaatattaaaaaaaattcattattttatttttcaatacatgtatattgtatttttataatttttactttttcattttgttatttatgattttagactaaagattttccgaaaaatcaaaattgcactcatataaaaattaatataatttgagatatattttatataaaataaaaactataaaaataaagtatatttatatatttttaaagtgtaaataaaactatccacttaaaattgttaagataataaatattttcatttttcgacagtgacaagaaccttgaccttctctatcaaatgcataactccctataaaatacatattaaagtcattgaaaagtaaactatactactaaataacaaatttatatataatgttcataaagttttggaattgacatcattctaaaaaatatacgtggagtattactgcataataacatctcccacagtcataagatatatatgcttcggtacatattattatatatctttaggatgatcatgagaaattaatctttgggtcttggtaatacattgtttggcttgaagttgcttggtgcggcattccatcgctcaatgtaagtgtaacgcccgtattttata

SEQ ID NO: 64560 - DNA, 740 bp, Cannabis sativa
  modified_base (677)..(698): a, c, t, g, unknown or other
agaacttaagttaataaattttaaggaaatattgctaattaatcgttaaatgccacctttaaatgatactagatatgtttatatatataaatgatgagattgaattaaggcgaactaagcttacgattagagcccacccagctcaagggccaaaaaaaaaaaatcttcaaaaatacttaaatatattttagtagtattcaaaaatactaaatgagggcctaataatttttattttcttaaggcccatccaattttagagcgggccttgatgaacgaatattgttattgaacaccaatagtatctagcacattttaaaagtatactatatgattaattagcgatattttctaaaattttttacattaaattatatgtgatttaatattaaattatatcaatagcaatataaaacttaaaaatatgggagccacaataatacccattagcatttctcatatataaacacttcttttttttgttagttttgctttgtgtgtggggacacaataaaataaatggtcattggaagacttggcattgacttggcctttcaccccaaaaagaaagaaataatataaaagaaaaagattacttttgatctccttgcgtttccttcctctgtaaggagtttactatatactctttggtaacttttttattttttaattttttaatnnnnnnnnnnnnnnnnnnnnnntgtttttaaaaaataaaaatgcgttctgtaactacttttgtt

SEQ ID NO: 64561 - DNA, 868 bp, Cannabis sativa
tcactataatgattcttgttcttaaagtgataatggcgatgaagtgcatccagtttcagacaacaacagtggaagtctctccacaaatgatcttcgaagaaggttaaatgagaagaaaaaaaaaaggctagaatagaaaaaaccagaccttgtggaaatgatttgaggaaccatatcaattattgggtatgcgggagggaatcttaaagtggtaaaactcagtgcttggaaagcaaagttgaagagttaacgaagctcacaaagaagatttcctgaaggcagaatggatccctgtccgattcagagcaagaagacacaaaatcatgtgtgaagagaattaaagatgcacatctatcagagcgcttcagaatgtctcaaatggaattgtatgaaggcagaacaggccctagggaccacttttccaaatacaatcacatgatgcaggtcactaaggctagtgatgatgcaaagtgtctttgtttttcaataagtctttgttttatttgggagtgctattagttggatctaaatatataatgagattatagattaactgtttacattgaattaatggtacataagaaattcaagagataatttgaactgcttttattgattatatcaataggctaatagaaagagttttgtacatataattctatattttcaaagagtacaattccatatctatagtgtagtaataatagaattaataaacttgattattttattgaagagttctatcagtggatgacatggagtttcctccaccaacatatgcggttgggacctcgtgctcctgtgggtggctttagtaccgaaagtgcgaggcttggctttatcctttgagtatgccactcaacacttt

SEQ ID NO: 64562 - DNA, 689 bp, Cannabis sativa
atccattcaatctaatactaaagtgtttctgtccaattacccaatggcaatagagctagcatacacaaaatcggtacagtgatcattaaccctcacatcactctcaaacatgtgttatttgtacctaattttcgctataatttactctctgtcagtgcactcacacacgacaataaagctttagtttccttcaatactaacaattgtttaatacaggaccattctcagatatcggggattgggacagctaagcgtcttggcaatttgtactacctacaacaacacgattctgaggacaattctgctatacaaacttgtaatgtacatcataatcaaatccaatggcacactcgccttggatatccatctgtaaagattactaataaaatcaataaacatttacaagtttctgaaatttctacaccttttaattgtccagcatgtcatattgcaaagcaaataaagctatcatttcaatcaaataacaacatatctcccactatttttgaccttgtccatatggacatatggggaccatattttgtcccctccattgaaggttatagatatttttaaccatagtggatgaccattcaaggcacacttggttataccttttaaaagctaaatctgatgcccccttggccatccaaaatttctttcagcacatactgattcaatacaaaact

SEQ ID NO: 64563 - DNA, 742 bp, Cannabis sativa
agggaaccagggtcgtggcaaccgtcatggttgttctgaaacgtgatacaattatccatagtgtcccaactgtaagaagcaccatctggggagtgtagagggcaaggatgtttttagtgtggtatgcctgggcattacaaaagagattgcctacaattaaagaatgaagagcaaaagacaaaagaaaatctcgctccaacaacggtgcttgctcttacttagggtgatgcagaagctagcccctcaattgttacatgtcagctctcggtaaataactcgtatttctctatttgatttgactctggggccactcactcgtatgttgcggccataattagtgttaaacctggtagatcgtttgatagctatgataaagggtttggaatcctattgccttgcacaaaattagttttctccaaaaagtgggttaggtctataccgatcaggattgagagtagagatgagtgctgatttagtggaattgggcttaaaattttgatatcatacttggaatggatttcgtatccaagtattctactagtattgattgtaagcagaagatggtgatcttccaattcgagggcgaggagccatttgagtttgtgggatcagttcagggatcccatattccagtgatctcggtattaaaagccaaagatttattactagatgggtgtctagggtttttggcagtggtattcgataccacatgacctaaatcactttggtcagaagacattaa

SEQ ID NO: 64564 - DNA, 1546 bp, Cannabis sativa
acacagaggttgttgattatatattgctacaaacacttttaatcttgtaataggtttgttcgtatagatgttgagatgtatatgtacattgaaagggtatgacctatcggtaggtataatctgttgtaatgaaacctactatcactttccatgatttttctttatgtaatatcttttcttgctgagtcactgtgactcatgggtgttttttggtacaggtaagaagaatagcaaatgtattcagccatgagcaggaggtcatccagcagtgtacatatcagtcgtggtgtcttggcttcctggaagcaggattgacctttttttatatatttgaaaatgtaatcttgactttgtaatagttgttttgtatattaggtttaaaagaactttaatagcaggggatccccatattacaattgtatttataatggaagtttttagtttaaattgaaccaaaagtttaaaacctaaccacacctttttcctaaactaatatagattagtgataataagattctaaagcacacacgtggcgtccctgaaagtcagggtgttgcattattattcctagaaacaaagctaactgaaactttaagaaagtttgataaggaattacaaatattcctcactaaatcaaaaagagcagagagatcatgtttacaattcgttattttattcacaagaatttttgaatgtgaaaccacttttgatattgggaggttcattactgagcaccatctcaaagcaaacactacaagaatcatgcctttcaatgagaaaaaatttcgtcagtaacatgtgggtatttcgtcagtaatgaatatcaatggcgacatgtcgtcagtaaaaaatttttggtgatacctcatcggtaataggtaccattacggacaacatttaaagtcgttggtgataaaaagaattaccaacgactttgtcataggcaataagatgcttgttttttattatttttttttagtccgtaagtctatcaataacaacttttttttcattgataatattttcaataacgaaaaagtcatcattgatttatttattttttttaaaaaaattataaataaaaaaataatttatattaaatattaattattttcactaatcaatttatattaaatatttttttaattaaacaatatacaaaataaattaaattaaaagtaaaacataacaccaaactaaatatttttatatcaaatatcaaaagtcaaatataacaagatccttaaataaaaataatacttactaaagtgaatattcataaaacataaataaacataaaactaataattcatataactaaaataaaaatattaaaagaaatttgttgttgcgtcgtcatcatcatcatcattagcatctctcgaaatatgcgctggaggaacatccagtatttgtgggtagtatggaggcatctgcaaacttgtcatcatctgagcagtttgttgcctatgtggtgtcgacatatgtgatgtctgcttcctatattgttgtccttgtggtgtcagctgttggaatttattttacc

SEQ ID NO: 64565 - DNA, 1229 bp, Cannabis sativa
tctgtttgttagagatctatatttcataaatttggatttcgatattagagagggagttgttttaatcgaataaaaccgaaaacaaatgtgtaattttagtttcttcacagttttttttggttttttttcgtcactttctgtttagatcgttgcatgtcttcttttccaatggattttgctaaaattaatggtggtatttccctcgttttggttttatttcggttgtgttgctgctttgaacgatccagtgatgttgttcttgatcgttctgttccgtgcggctgaaggtttagaggaggtggtatttttgtaaatatttgtatgtgggcctgtataaatgtttaaagggccggcccataggatatttgttattttttttttcttttttgtattttttttttttttgttttttaccctataaaatattatgtttgtcaaaatatattaatttatattaaacaaaaaagattttaatagaaaaaaaaaaagttaaataagtaaattaacatttaacgtctcaaaaattatttacagtacttttgtatagatatgtaattgaagagataattatgtattaactttaagtttttgagataatgattctcttaattattcgataatctcatatcataaaattttagcagcttaagaaggaatcttatatattatttttgttgatagaagaaaaagtgtgctataaagaaacagaaaggtgaaaaaaaaagagtaggtgaaacagaaagtatactcatcaagataagaagcaatgtcctaaattcaataaaagtctaataactcaaattctaaaaggctatatagttgggattatgtagattcgaggtcaacaaccatgcaactgcataataataatatacttatatgcattatgcatatttatataaccgactaaaattattgtttttggtttgttattatcgttttcctttgtgggctcggatatgataataatctcatctttaatactaattaattagtagataatgctatagcctataaatattaattatatataatatatcattcacatgatttgcatggttcatgcatgcaaacactactgacaccgcatgagtacgaatcgttaacatcaaaaaggtaaattcattattaaaatgctaaagttagttttctttccatattgattgatcggtttactatcattaattaaattgaacgtatatttatttaaagagcattctttttgggta

SEQ ID NO: 64566 - DNA, 782 bp, Cannabis sativa
gactccatatagtctcttaattaacaaataaaccccaaaatcttatttcttcacaatcaagccataacttagtaaaaatgcataaacaagacaaagtctaattttagaactataactcattaattaaaatcaattaagtgagtcttacaagcagtttgtctcaactagtatggggtagggctgaacatttggaccggcacacctaaaaaacccgaacacccaccccgacctgcttccaaaaaaactgaccacagagaaacccgtgtagttgggtcgggttgaatcccaaaagcctaaaacaggtttcgggttcgggtgtggataagcagtttttttgggtcgggttataacccgtaacccgaaattatttattttttaaaaaaaaaaattaatattaataatacttaattatttattaatcagtaatcacattcagaaaaaaaaagactgttcattactaagtctaaaacgctgactattggcctgcttaagtatacattaattaaattattaagttgtcaatttaatattatttatttttttaatcaaattgaaaaaaaaaaaagactcttcagttcaatatcaatattcaatactattatatttcatgtgactcatgatcagtcgaccactaccagaagagacccgacttctcactttctcagttctcagttcatattcatttcttttggttcttacttctcagttaacttaaggcttaacaaactaacggtccagaccaaaagtttttcttctccaagggcggcgactggttctcttct

SEQ ID NO: 64567 - DNA, 1261 bp, Cannabis sativa
tttttaaatgattactaagggtattttggtcataatctattttgaaaaaacgcaagtcctctgattttggcagttttgtgtttttgacgcacatcatgagcattaattaaccatcttttccacttctttttaatttttacccgttggatcgtttattccttaatctaacggagataaactcaatggtatacaatcaaaaaaggaacctccttttcatcatcttggccatttcaaaaattttcttgagcttctctacaaaaaacataacccatttttttgaagcttcgcatgccatctttttctttgacatacttcttgcaagtttcgttagattttctttttgacctcaagctttcagagagatcaccacaccgtttgttgcaccatcggttacagaacagttcattgtgccaaaacccaacttcaaaaagtaagtgattatctctctgttttcttatatgctttttatttcacatttcttggtttgattattactttcttagtttgcacttttatcaccttattttgtattggcgatttagggttgaattgtttcttgtaaattttatcatttaggcagacagtagatttatgggtttctcaaatttacaggcttctagtttaataaatttcatctaggaattgagatttctttctttttgtaacaatgtcccaatctggttcagaagtttatcgtccagaaattttagaaacagagtgccccaatgaacttgccatctcgtataaacccagaatttcaaaacccacatccaaattagagatcaatgatgcaaaaattagggaccacgtagtaaaaacccaccaagatgatattgccagtcgccatagacgcttcttgcaagaaattatagaaggaaaatgtcatttgttgcgagatgctgcttggcctgaacctcccaatttatcatctattcctttggctaggccgttatttttacccaaagtcacaattacttttgaaatcatgacctcaaagccacgtaaatcaaagactccctaagaccctaatgtcaccttcaagtatagggtgcgagctatcagagattacgtaggtaacatcttaagaacttgtggaatttaatacaagcaaaactgttgggttacatcagtagccgctggcgagtatagttgttacccaccagcacgacttactcgcgaagcacttgaggggaccagtagcgaggcaagtacaagtgcctcgacagggataggcacttggagccttgaacacatcagagct

SEQ ID NO: 64568 - DNA, 2249 bp, Cannabis sativa
cgctagggccacaatccttttcatttcggtggcatctcactcaacccgaacattttccagctctagagccaattttgttgttgtgttttcacgctcgacaagaaaagcatcttagaaagatgaaaagaagatacttagcaaaaaaaaatatcaaaccatagacaatttgaaagcaagtgctaccaaactagaacacttaccctaatgacatgatgacagagagtttgattgagtaacataaatcctcgctcgcggccatgacccacctctctagcctcaattgactcatggaggctgaaatttgtctgttgctacaaacttatccactattatcgtcttggaaggaatgttcggatcccttgcagccaactcgatgttctacctcagggtgatctgaccagtaggtgtatggacatcatccttcccaacatcataccttcagaggatcaattggcttctctcctcattcataaacatgccctccttatctaattgaactgacttttagttttgtggtactaaatcaggtacgcatcagaataaaagtatttgattatcactgtactacatcatcaggatcatcatatgtatatattatatttatataaaaaagaataaatgaaaaatataatttacctttcgaagcctatttgagtatcctcaagtctttccgcatgttgtatccttagttgatctcaaagtactcacatcgtagtctttcgaatcttccaccacacacaaggactagtgtgggctagtagaataaagtgtatacaaagttctggttgaattcttaacacatgagcaataactattctatagtgatggatagaaaagattaatcgaattaattatttttaggcttaccaaaaataatgtctataattttttgaatatacggtatatttaaattaaactaataatgcttttatttaaattcaatttatttaattaagacatatttaattatgttaataaataatataactggattctgttatagatatttatttcttataattgattgagagaatctctcaaccacttgagggaatctctcaattacctttagagaatatctcaaccaacagtaatatctttaactacttttcaaattcaaatttaaatgaatattgatcttttgaattaattaacccaaaaacaaatctagtgggacaaccctattagtgtgggcgcctatcactgtgccagaacacaatgatagtggtgccacctatgtcttaacgagacattgggaggtcttttatctagacaacttttatatttttcctaatttaattaataaatttaaaaaataaattatttattataaaataaataattactattttgaaaaatcaaaatagattttttagaacttccataaatatacaacttttatccctaataataataatgtctagctttttctctctctcgatttttcgccccttttaccctgggttctgttcctatttatagatatctagggtaacagttattcccttgagatttattcattcataaccactcatgaaacattaatatttcccatgttttattattatgcatatgggataacattaagtaaccgttcaactgctcttttatctttatatacagacaactatgctgactctttactgtatttgtaggaaaactgctaagtatagggatacaacacttctcgtagttctcttttgccattttggaaggtattagcgaggcggttacttcaacgcataaagagtgagatgaatgaatgttgttatcactctttgaacatactcatgagtatgtgggtcaattagttgcaatctcttactcacaagtatgtgggtcaatgagctgtaagttctttgttaactcgtcttgaaaaactattccattatgtattctattcatcctgagatagacttgatgtctcatcaatcttactagttaataatttttattcttatctcacttctgcctatgtggtcgtaattttgaatatttctatcaattgtaatagctgaagtgatttatttaatgtgcatttaataatgcaattcttgagctgattcatattccttactcggtacacatgtcagcttctcattgcccatgcaatcatatcctcatgaagaacctctggctcacaaagcttcggcttttgaaatgttttcttttttatagtttttgaatttgatttttccctcaaaagtattaatgtggagttaatttcacaaaaataggcatgcatggga

SEQ ID NO: 64569 - DNA, 3694 bp, Cannabis sativa
aaaactttttatgcattttctaacgtcatgtttttagaaacttgtttcaaatgcttaccaattgtgtagtaaatttcttctatagtccgtagcatgtaattatcatgtagtaggtcccagataccattagatgtatatatttgtatttttcattattttctatttgaagtagttatgatgtcaaactgaaattgagtgtcttcaataggaatctcccatacattatgaattcatgattggataggaagaccatgttttgtaattttcatgagtttttagcttgctgtatttattggcgtttttcggctgttgaaacaggtcttaagcatgagtagactcggtggggctggtgcagtggctcagcttgtagctgatgtacccttatcatcagttgaggtactataatccttagatgaacctttacctaacaatatttgttacatagcctgtaattaaagataaacaaataaaaaactatcagttacattccacaagacggctgagctctatattagccatagtgatgtattcaaacatactattaagtagttcttcttgaaacaactttgcttggactagtgtttttacttctcatttttctaatcataaatttgtgaaataaagggaggaggagttgaaggtggagacagtgaagcagcttgggagaagtggtcaactgatggcacagaacaacaggtagcaaaactgatggaagaagatgtaggagctgccatgcagttccttcagtccaaggcactctgcatcatgcccatatctctggcttcagctattttccgaacacaccaaccagatggtccaactatggttaagcctgaatcaaacagtccctcctaatgccaccaacagaaagatcccaaaccctgtggttggtctattatcactcatgacatttgagtattctgtactcttagttcccaactcatgccgagagcgagagagagagactgtcaagtcaatgtaactgttcattctcatgttagtttttgtcaaacaagggactagagttttcatggctaggaagaaacagaaacagtagtaaggcatgtgatattttttttttgccttggtcaagtctatggaaggttttctctttgtcaaaagctcatttgattatcttactcttcttagtatgagtggtggggttttagtggtgatgaccaaaaatattggtggtgggagctcttcttttcattttttttttctttctctctttctcttttttttttttaacttggataatggggtgccggggccattaaaaggaaatagatggaactatgatgtatttgacgaaaactttagtgcaagttgaaaatagataatggttggtttttatcataaagctattttggaagcttctgcttttcttaaatatatgttttattatttatgtttgaattgatcggtttgaatttgttgtttcttaaaaagtaaacttgccctttttttcaattttggtgaatgattatacaagagaaagttattgggtgagagagaaagttagaaaatgatgtttagcaaaaaaatatggtaccattttcactcgtttgtccacgggaaaaaaaagttgattaaagtataacttcgatgataagatttttttcccttctcgagtaaaatatagtttaattcaactattatatttttctagtttgaaaatgaactgttgatgcttaatattaaactaactaaaaataaaaagtgaaagtaacccttttcttttttgtgtgtgttcagttgatggtactgaaggggtacttggtttattggtttgtgcttgatattttgttttttaaaacttattgggtctgaaaaatcgacattcgtggacgacttttagggtggattggtttattaggtagggactttatcaacttgaattaatcatactccattcagatcctggaacaatggtctgaaaacagaactcttgtgagcagacaaataaacaaactggtgttgctttgaatatattacctcgacggaaagacaatcatggagacatcgaagaaacaaaaattagcatatgatttccatgtcttcatgcataataacacagtaactttttatacatatgtaaataaaaggatatgttatttttaaacattggcatggtctacgtggctctgaggtgttctagttttacatggtttaaaggccggcggcagtagaggacatagtaaacagaactaatagattggatgtggaacaagaggttgattgggaggttaatgaagaggaagttgtggaatttggtgaacatgctctgaatggaaagatcattgctaaacgtctaggattttgaattttatctattaaataataatattttaattatatattaaaataatttattattatttaatttgatatttaataattaaaattgttgtatcaaaattctttttagaaatattattgtacatgtgtaagacaccgtcacaaggcactgcgttacgcttatatgtgtttttccatcctcagtttcttaattaattaaatactaaatatatataaaaaaaaattaattcagttatatttagaaatttttacatcaaaaatacaaaatgtaataccacaacacacctgtatcaatttttttactcttcttctttattttattactattttaccacatgcacactcattccatgcatgagtagacgtgtgtgacctatgacccatatcaatcaaccatccatcatttccctctcttcttttttttcttctttttccttttattttccatattattttcatttttttaaaaaaaaaattagtaacctccattgctgaaccttccctccccacaatcccacatccattttcccgctcatttttgttcttcaaaattttttcaactcccactaacccaatcccataaccatttttcctctttcttttttgtttctcaatccatatataaaatggctgtgacccgttcttcatcatctctttttcctgttcaaaagaaaagctccaaaatggatttgaaatcattagctaataaggccaagggaaaacgacctattattgaggaggaagactctgattttgctcctccattaacgaagcgtggacgagctcctcctaagaagaaatcaaaggtcggtgtccaagagaaaatgactgaagatgttgctggaaaaaacgataatgctggtggtgttattcgaactgaggtttgtttacagtttctttttcgtttcccccttttttatagatattcttgtatttttcattttatcgattttgtgtttctggtttgtgatattctaggttttccattttaaaacttcgtttggttttgtttggatttttagggctttaatttttcttgatcaatttatttgttcttttgtgggtttttcattttagtttgtttattcttaattttgtttcattttgttgtcttttttaatctgtttgtgttttctagttttttaaatatttttaaacttctgttttgttttaatgtctcttctcagtgtgttttagtttttacatagttttttaatagtgtaatctgtttatgtatgttgtcttttgggaatattattaggtctagttgttttctgttcatttttaggtaatcaatgtgtaacaatttgatttaagatctttgtagtttatgttcgaagaattatttatgtttgtcagtttgttttttcag

SEQ ID NO: 64570 - DNA, 842 bp, Cannabis sativa
cgagagtatgaaacgattttcatacttttgtccctttttttttttttttttttctttttttttacttttctctgctttcactacctttgggatatttgcacccgatgtttgcttacgagaatccctggatttctcgtttctggcagacatccggaggaggcctctttccagcggttaggggacccccattccctccttttatgttagggtttggtttggggactaactgctagatttctgtttttcatatgagtaaggttctaagcgaccttaacaagcacggtttctttagcttcgatcaggaaatttcagagttgtatcaatctccaagaaatgtctacccccacgaccatagcaaaatttcagagttgtatcaatctcgaaacatgtagtactcctcaattgctggctaattaagagcttttgagttttttttagctctaaaaaacgtactaaaaatactaataataatgtgtttatataggctaacaaagttacctaaaagatactaaaaagatttaaaatttaaacttaaataagataaaaatcgtagctctatggttttttttttcaaaaatttcttgctgcgacgactaatagtattttagccatagctctctccatattgtttggaacgatttaagatgttccagaaagctaagagagagacctaaaacttttatgttttgacttttttcaaaatttgatcataatatagtctaatttagtcttgaagttttagcttcaatttcttgcacaattttctctattttataaatcttctttttttgaaatttgaccaatttatacattccaactgtcgaaacctaaaattaaagaaa

SEQ ID NO: 64571 - DNA, 1024 bp, Cannabis sativa
  modified_base (536)..(537): a, c, t, g, unknown or other
tttaagagtctttaggccgaccaatcattagctcatcttgaaccttgaatagcttgggatcttctaactgtggccttctgattctctctaacaaatcagattggagtgtcaagttgtacaactttccaactaccaactcgattcccacattaaccatctctgaagtcaattgaggagatatcaaaaccgtggtgaaaacctacccagggcctcttctactcagtgcatcaaccacaacattggctttcccggggtgatacagaatctcacagtcgtagtctttaaccagttctagccatcttctctgcctcatgattaaatcttatggggtaaaaagtacttgaaactcttaagaccaatataaatctcaccttcctcaccataaagataatgccgccatatctttaaagaaaaaaaaaaccacagcagcaagctctaggtcatgtgttgggtactgctgctcataatccttcagttgacgagaggcataggctatgactttttcagtttacatcagaacacatcccagaccctgnntggatgcatcacaataaacaacgaatttctcttgatctgacggcaaagctaacactgaagttgttatcaaatgctggtttagctctagaaaacttgcttcacatttgtctgaccacacgaatcgctgatttttcttagttaactcggtcagtggcatagagatttagaaaatcccttgacgaaacgtcgataataccctactaaaccgaggaaacttcaaacttctgtcactgattttggcctcagctagttcttcaccgacttgatcttgcttgaatccaccataatcccattctttccgatgatatgccccagaaaagacacctctgacaaccagaattcgcactttttgaactttgcattcaacttgcggtccctaagtcgctgcaataccattcgaagatgatgctcgtgctcctcttctgactgagagtatgcaaggatgtcatcgataaacactatgacgcagctatcgaggaaatccttg

SEQ ID NO: 64572 - DNA, 769 bp, Cannabis sativa
agcatagaaattcaaattttccttctaaaaatacaaaatacgttagttttagaaaaataatgaaaaattaatctcacaacaacatagataataactaaaaaaataataaaaaattaatctcacaacaacatatataatctataaaataaaaataaataaaaaataattagaaaatcaatcacataacaataaaacaactaataaaaataattgaatagcttattactttttcacttcttagtgtattatgtgaaaatttctaataaataatcaaaggagctcttataaaatgatttagttaaagcgtgtttgagcatagctaaccgatatgaaatatcagaggttgcccaaatttactagaggtagtcaacctttgattatactggttttgttgtaaataagtaaaaataaaaagttaagtctttctataaaaatgaaatagaatgaaattgtaaacatttatttaccaagtcaaaaacttgtaagttgtatacacaagaaaagaaattggttacgtaaagggaaaactgaaagaattgtgaatgtttgttggattgtacactagtagtttgtttgtaatgtaggggcataagtataaacaatgaaggatctcatatgatgaaatcaattccgctcactgctacaaactgcacttttagtgtcggttttaaactgaaacttatacttttagtgtcggttcataaaaccgacacctattccatcgagacaaaaagtcaaaattttagtgtcggttctaaactgacactat

SEQ ID NO: 64573 - DNA, 808 bp, Cannabis sativa
ctagagatggtactactgactttatattgttattatttatgtattataaacttattaaaagtaaacaaaattatcgaaaatttgaataattattgcaaaaaatcatatagaacaactacgaaatacaaaccatgatttcaaaccaaactaacctatttttaagtggattggtttagtttgatcatttaattaatctagtttggttttgaatttttaaaaatctgaaccaaaccaattcatgaatacttttattattttaatttttaacaagtaataaagtataagtgatgtcactcagatagagattgatttactaactaccaaaacttaattcttaagtatgaaatatgtaaacaattatttgaaccttattttaaagtaataaactattttagaaaaaaatattttgaatactgaaataaataggaagtgcagatctttgctaaaatttaacacattataacaatgtgtaataaaagagtgtaaattaagagtgtaggtgtagttattctatccctacgcccaaaacatggatttcataatttttgtagcacactatttagaacaagtaacctttcttcaagtctaaatgaagtgttaaaattaacaacaaaggcaactttatgattatatgtatcattccatctaacatcataattaaccctaagaacattatattaacgttgttcaaacatcaaactcaacaaaataaatgctaaaccaaaaatagaactactgaaaaaatagtcagtttcaacaatacataccgagttccgactccaagaagtacaggcatcaataataagtt

SEQ ID NO: 64574 - DNA, 840 bp, Cannabis sativa
gcagtgtttatagccccttttacatgtgtgattccttctaaggtagcagaaggcaaagcaatcctagcagctatatcttggattcaagcagccaagttgccagtttcaattattgcttcagattgtaaaaatgtggttattgtaatacaattgttcttagtgacgttattaattgcattaggaactcattgttgttcagtcctaacttgcttataatttatgtaccacaggatagcaataagttatagtcatgctaaggctgacttaggattagacagtgagtaattttggaatagttctttactttttatattgggctgattactttgtatctcaactttgtttttgtttctttaatgaaaattttcaggtttcttataaagcaaagaaaaaagaattgagtaacttattaattgatacaaaagaatgatatataatacaaagaaaaaataaaccatttatcaagactaagaagtgtgctgtatgacacattgacacttttattttagtaggattctaatggaacgaaacttactgaataatcattttaaataatttaacaccttaaatttaagaagtacctcaaattattatcttaaaagaatggagagagaaatatcataacatgaaattttcataatatgattttttttttttttgataatatcatggtttttctttctcgactttttgtaagttggttggcatagcttttcttcatttgaaaaaatgagtgatctataaataaaaaatggtcaaaccattttcggagccaaacttaaaaactgatgtgattggttaataattaactatcatatttagtttcacaaaatacccaat

SEQ ID NO: 64575 - DNA, 1777 bp, Cannabis sativa
tcaatcttattcagatttttctgatacagaactagggttcttgacaatcagtgtattcctctctctctctctaagattttttcatccccttttcttgtataatctgcccctatttatagtaatatatgttgacagttaatgatatttaatttcaaatcccataacaatattcctgaaattgtgggctttaatcatgctccacgtaaataagtataattattatttgaaaattacacaaatatagtttaatctcttttgaagaaagtcaacactgacgtggattaagacacgctgccaagggtacctcgctgaggtgtctcgcctagtacataaacaacttattttattcataggccttctagcactggcatgagcaccgaggtactaagtaaatttaagaactgctctttgaccataaggccttgcagattggacaatcgtgtccttcaagctattacacttagttagtataatgtatattatacgctaagtgttctaacaaccaatttacctcgtcaacacctctctacatattgcgaggtagatgcctcgctatgtgttatcgatgtcttccttgcaattatgtcctctgacgcgaaatggtttattgtcaatacgcgaatcaataatttgtacatccttgtctcactaaagactgtgcagtctgcaagttataaatatactctattaattctgtatttaatgagttattccatttttcatttaataatataattgcaattatatttgccggttcatattctctgagattgacacgtgtcaccttctggatttcgggtgtaacaattaccccttaaaaagtgcccttttaataaaaggtgctttttaaatgattactgagggtatttatgtcataatccattttgaaaatatgcatgccattgattttggcagttttgtggtttcgagggacatcattagcattaatgatccatcttttccacttatcctccatttctatccattaaatcttctatattttgatcttacagttactaggttcaaagtacaaaaagtaaagaatccattttcaccattttcgtcttttcaaaaactcaagctttttgagaattttcatcccaccttgcctgaaacctttcatgccctctttatctttgacattctttctgcgaacttactcggattttctttttaacctcaggtgttcaaagaattcatcacgtcgttcatcccgtctccgtttgcaagattttccaccacttgacttttcgacttcaaacagtaagtatctcatccttttccccccttctttgttttatctgggttatgattatcttgcatcttgtcactccgttttgttttagcaattcgggtttacgttttctgggtaattttttagggtttaggcatgattttggcttatcattttctttaagcctctggtttaataaatttcatccaggaattgggattgttcttttttgtagaaatgtcccaatctggttcaaaagctttttctccagaatttttggaaacacaatatcctaaacaattagccttcccatataaacccataaatttccaacctcggtcaaaattggaagtgaatgatgccaaaattagagaccatctgattaagttgaaccaaaaagaaattgcaagtcgttataggcaattcttacaagagatttctgagggcaaacgttattttttgcgagatgcagcctggcctgaacccacaatattagcttctattccactcgcgagaccactatttttacccgaagtcactgtt

SEQ ID NO: 64576 - DNA, 750 bp, Cannabis sativa
aaccaagttgttgcatcaatggttatggtgaactcgcagccgatcaatctagtactttcgcacattcttgatcagtgttccatgctatgttaaggtgagcatgaacaccttatgttgcgctcaacaactatcaacacctaaatgatttttatatccaaaaccaggttgtgataaggataggtttcttccacaaggtagtagggccagcgaattcttagagaatcttccatgtcccttcggacaataaaagcccctacagtgcatacttttgcatattctgatcaatactccatacttacttgtccattccattgttccatataaccaagttgttgcatcaagggttatgctgatctcatagccgatcaatctagttctttaacatattggttttatatccaaaaccagtgggtgttaaggatatgtttcttccactagctagtagggccagcaaattcttagagaaccttccacgtccatttggataacgaaagcccctacaatgcttacttttgcataatctgatcaatcctccatacttccgtgtccattccattgtttcatataacaaagttgttccctcaatggttatgctgatcacgtaaccgatcaatctagtacttttgcatattgtgatcaatcatacatgctctgttaaggtgaacatgaacacattttattgcgctcaacaactatcaccacctaaacgatttttatatccaaaaccagtgggtgttaagtataggtttc

SEQ ID NO: 64577 - DNA, 1351 bp, Cannabis sativa
agatcctggtaaagtaaattccaacaaaaatctggtatcttcttctcctatttttcttttcgattcataatactgtgtttatatatattgtttatgtgtttttctggggtattgaatttgtttgggaaggcttttaatttctagttttccttggtatttttgttgttgttgtctttgtgttcttcaatgaagaaccacgaagaggaaggctttgtttggggttagattcgaactgggctaggggattttgttctctgatttttttgggttgctttatttctgggttggtgctcttcatgttcttcagagaagaacattgaagaaggaggctcacggctaggttatatttgtggctgggttgtgtgtttgaatgaaaagatgaacatatatgtcaactgttttttaaggttttcttgagtgatataaacgacctgtagtaatgggaaaggggctgtcttttttgttggtttaatattaggagtcagcatagggtctttgattggtaaaaggtcgaatttgacctgggcttttgattaatctattgctgtgtgtaggggcaatataggaataaaaattcctacagttagagaagaagaaagaaccatcaccggacacaggaaatggggtggacgcccaccgatatcctatcggacgaaagaaccggacgaaactggacgtagacatcatgttaacaagtgtattatatattaattaaaaacatacttaaaaaacgtttgagaggaaaaagtactgttatattaatcattcaaataaaatgtaatacaatagacaaagttaaaggtggacaatccttcaattagaaaaatctctatccaccgatagagtaaattaggccaaaatattaaagaccttactctaaatataaaattagaggtaaatttaattaattgattaataaagttatatttttcaacataccctaattttctatatcaaaaggaatgaaaaactaaataaaaactctctaaatattgaaaaacactctctctctaggttttctcgctcgaccctctctctctcaaatctctcaaatctctgcagcagcaggcgtcagcggcgccaccgcttcctcggctccgatcctcctcctcctcacgcaactgaccaatatgtggtgcggctattatatttgtatatatatgtagaattcatatttaatttttcatcttaatttggattgtacatgataattttcaactttgggtttagtttggtggactggatgttagattaccacattatttatatatagattcacttaattaattaggtaaataattttatatcgtcatagatggattcaaacataataattttgatatatatatat

SEQ ID NO: 64578 - DNA, 687 bp, Cannabis sativa
atgcaataagctcttgagcattaaaaaattgagccaaagcaatttcttcatttaagtgctcctgggcttcatggagattagtagacaagttagcattcacaagcccaatttggtcttgggcaagagaaaccggcctattagaaatagagccaatatccaaattacacggtcccaccaagccattttttgagatagcctcggccaaatttccctccagagcaggcccacccgaattctttttactagaaacaacttgaggcccattatcagtatctcctttattattactaactaaattagtgggcccataaccagaatcctcataaaccccagcctttttcattaacgcaccacacggcccaacaaccccaggcccaccttccacttgtttctctgtaacggtcgtaaaattccaatgaccatcgtttaaaccaatgactcggctatttgaagtcaaaacaggtaataactctgcttcctttctcacacccaggtcttctttctctcctccaaagccagaaatggcaactgtgttctctgcaccgataggactcctcttagggaaccacacagcacggtgggacttcccaggaccctcagccgtatgagcagtccttttcacgggttggctttgacgtcgaggcaggttggacagtcttccagtggatccattttctccctcgcccg

SEQ ID NO: 64579 - DNA, 1097 bp, Cannabis sativa
gaagttacgtgtagacttcactcgagccgaccttacatctgaatgggtgacacgtgttggatgcgtctgtttgtgatttgatgtgactttgactaggagtcccttcagtttttggctaattaatgctctgatcaatttgtacctcgagacgcgtctttcactcgcacacttttgacggttactcttctctagtacttgattgtttttaatttctcaatatttacttttcggggggaaattgaagcatttatgtttttaattgattacaccattttactaatttgcttataaatagggtagaaaatcctcataaaccacttttaccatttttcttgctaagtaatttcagagcaaaagtagctttttctctcaactctgtcgttgaattttagcagaaagatctgattagcttcatccgaacaacatcaaagcttcgaatagtgagtaagtttcttatctttctctcctttaatttcgtatcttcaattttttgggtttccattgtagaaaattcaatcgttcttgacttattttaaaaaatatagaaaatctagactcaagactttgtaattttaactgtaatagatcatatgacttcgtggtttgtgacattttgactttaacctcacaatgttcgatcttcactttgcccatttgaggttcaatgaagattaacccttaattcaaaattttcaaacattgggttacgaacttaacctttacaacatttttcatctttttaatctgtcgagtagacttggtcggtatattctcttgtttctattcaatatcccagccaaatactcatctcgtgtattgtcttttgtagatgaaccctggtgagttttgaggaggtgaacactatatcgaccagaatcttctttaacttttatacgaggaccaacctcgtctttgcgccagtccgtcctcttcgagtgacggactttctaactcaagttttgaagattgggaggtgagtagtgaaagttcccctactccaaacccgaggtgcaacatcacttttactccgagcagatcgcagaagaaggctacggacgatttgtttgggagcttaggaaggggtggagacgttatct

SEQ ID NO: 64580 - DNA, 1494 bp, Cannabis sativa
taatcattatgtaggagagatggccgagtggttcaaggcgtagcattggaactgctatgtaggcttttgtttatcgaaggatcgaatcattctctttctgtatccttcacctaatttatcgatgttattgactgcaatatatcaaatcgaataccaatagatgtcattattccaagaccaaccgttagaccttttgttgatatggattctcaagtcctaatcaaaatttttgtgatatggaaaatattgaaaagtaatggacaaggaatgaaaatccccctagttagtttaattaggtttatgtctgacgataataatattcgacaactagctagcaattcatttattttcaaaccgacccatttactatctattatttgattgatcgatccttgatattggaatgggttaaaaaatcatgtatctttttgcctataaggaggttgcgtatagtccaattcctaacccctttctactagccaaacctaatggcatatacaacagaatctctatttaagaatacttcatttaagaataacttctaatttgttataaaaaaaaatcaagtcctaatttgagccaattataaataataataacttcttaattgtaattagttatatattttctaagtcttgtattaacaaagtataataataacatcttaataaaatatatacatatatttttcaggggcggaagtatacattaggctatagaggccatggcccccttaattttcaaaactatacataataaatgtataatatacgatatatactcccacccccatcatgaaatagatacgattttatcgaagaaatacataaaattggaagtttaagttgttgacttaatcaatgttatatataatatatgcctaagtgcaaaattataataatttttaaaatgcaaattcaatattttataattgtgtattttttattttctttatttgaattaaatataaaatgtgctttgattatacattttaaaaagggtatactaatgtattacttatatgttttggtatttagggaaattttttaatctaattatttttttatacttgtgtatatattattgttattgaagacatcttacaaaattttgataaatttataggataatttacaatatagaaagttgtatttaagcagtccatttcgtacgcgtataaaataaaagaattatgcgtgcaacaaactatttgaatcttattttcagcatgttaaattttttaaaaattttcaaaattttacaagatgtgttaaataactacaactcacacgactgtaaaacaaattaactaaaaaattcttcaagaatgcatcggtgcaccatagaattttcaatactatacatacatgtattaattataggtatataaatttgtaaaatattagtatgcagaataaataaaatagaacattcttaatattaatggacacatctcttattcttttccattttagaaattacaagtaaattttg

SEQ ID NO: 64581 - DNA, 2100 bp, Cannabis sativa
  modified_base (361)..(370): a, c, t, g, unknown or other
  modified_base (1464)..(1468): a, c, t, g, unknown or other
acttgcaccaaaattaaattagatatgcatacaattgaattatttgtttttggctgataatttctccgtaattactaaagtaaaatattatatattatatacattagtttgattagttttattttaagtacataatagtaattttaggggtaaaaaagtaaaatattaggtaaagttttataaataagagctataattggcaatgatacagaaattcctaaaataattctctaaaactgttaacttttaaggaatatgagaatgaaatagcagattttacaactgttatagcagatttcgcaactgttatagaaatataattgacaattcaacagcgagaaaataataataataataatannnnnnnnnntaataataataataataaagagcttaagaagaaagtgcaccttcacttcatcctagaggttttttttttcatgttaataatttatccaaaataaaagcatgtgtttcattctctcgtgtatcaaacccatcatttccatctttaacattaaattggcctccaaaggacctatttcatgtaataacacgcatcactcaagtagagtgatcaatatgttcggttaaatacagcaaaaggaaatttatttcagattccaaaaccactgtaaacaagttaaacaatcaattaataaattactcaaacataaaaactattataaacagattccaaaaagaagtcacacatcccttcaacccagctcgaaatcacacattttgattttcaacaaaagaacacaaaaatgcagctctttgaacaagagaaattcaatcagtgaaatcacaaaaacataatcagaccaaagaattgaaattagcattcccataatcgataaataaaattaaatcttacatatgtccaacaaaataacacatacaattaatcaacatgtccctaacaatgtatcaatatctcaaaaataaaagatgaatctttatcaagattgaactgcattctatgatcagcgccttaaagccatctctgttcagagatctaaataggtcttagtgcgctattccatccaacaactcttctctcccctctctctccaagtatatatacatatattatagatatttagtaataattgattttgaataatatacagtagaacctctatttaagaatactctattcaagaattacttctaatttgttataaaaaaaatcaagtctcaatttggaccagttataaataagaataacctctaaattgtaattagttatatattttctaagtcccgtactaacaaagtatacctctatataagaataattacattttaataaaatatatacatatattttgtaaatttatttatataaaattaataattttatttcaaattataatacatgtatgaatattatatttactccaaaataattttattatgagtattaatgattatttattgttattattattacattgnnnnnttttggttttttattttttttttcctagtgtaactctatttaattaaaacctctcaattagaatataatttacttggtcccaagtatattcttggatagaggttatactatattgttaataacaagtacaaggttcaaattttaaaattcaaagttcagatataatttataaataatgacaccaaagtatatatgatattaattttattttaagaaactgctcctcaaactcagaacatggaaccttaactgcatccaacaaggacactagaaaatcgatcactagatactgtttccagttaaatttatgctgcataaactggaaatcacagctgcaacatgtagttgctttgtccactagaagctttcaaggaagtaacttggatcaagggcatcctgcaagaaatcagcatgttgaaaggaaaagtctcagtatttttagacagccaatctgcaattcacttgagcaagaactctgttgaaataaacaccctcattcgctatacactgtaaaaaccagatcactacagaaagagttacaagacagtaaaaataaagtcctaggtggccttcggcctctaatatacctaggcagatcacttaagttagttacaaagtatttaaccactttg

SEQ ID NO: 64582 - DNA, 1864 bp, Cannabis sativa
cgccaagtattataaaaacctaacgcctctggacggttactcaaatgggcagtggaattaggccagtacgaaataattttccaaccccaaacagcaatcaaaggacaggctttggcgaattttttagttaagtgtaggggcaaagaagaaagcatttcaaaaaaaaacccggagctagtacaagaacctcagccgagcaacaacaaagataaacctacatggaagttacatgtagatgggtcagcaacagatcaactgtccggtgtagggatttcccttgtcactcctgggggcaacacttacacggggcggtcatgtgtgggtttagagcatccaacaatgaagcagaatacgaagccctcattgccagcctaaaacttgctcgggagctacatgccgaacacattgagatctgcattgattcataattagtagtaaatcatgtatttggggagtatgaggctcggagaaaaaaaaaatgatagcctatctgagcaaaatacatgacctgcttgcacaattcaagagctatgtcctcaagaaaattctgagagaagaaaacacaactgctgatgccttagcccaacttgcaagcaacaatataactggtagggctaatctaatcccaatctagtttcttaaaaaacccagcataaacatgtacgaaagaaattgagatgattgacacatccccgaactggatgacgccaatagcagcctacctcaacactggggaactcctaagtaacagaaacaaggctaaaaaggagaaagaggctgcacggtacatcatcgtaggtggagtcatgtatagaaggggattctccatgccgttactcagatatgttacacaagaagaaactgcatgactcttttctgaagtacacgatggattctgtggcaaccacgtagccaggaaaagtctatcaaagaaaattctaaggcaaggatatttctagcggaccatcattaaagattcaaaggtctacattgagaaatgtgccaaatgccaaaggttttcaaagatacctcatgcaccgcccaacgaactaactcaaatgcaaagtccttgaccttttgccatttggggaattgacttaatcgaacaattgcctaaaggtaaaggtggggtatagtacgcagtgcttgcgatagattatttcactaaatggacggaagccgagccattggcacgattacatccaaaaaagtacttgactttgtggtgaaaaatataatatgtcggttcagactaccgtacaaaatcatctcagacaatggcacacagtttgatagtcagttgttcactgatttctatacaaaccatggaatcataaagagttttttcgcagtagcacatccacaagcaaacggtcaggtcgaagcagtcaacaagacactttaaagaaatgacttgaagatgctaaaggaaactggctggaagaactcctaaaagtattatggtcttacccgcacaactgaaaaagcagccgaccaaacagactccattttccatggcatacggttatgaaactatgctgcccatagaattagaacctccatcccacaaaagattgacatacgaccaagaagttaaccatgcactcctagcagaatcacttgacgaaactgaagaaaaacgaactacagcaaacctaaaatcggtggcccatcaacagaaggtacctcagtactttaacaagcaagtgaaggcacggaagttctttgtggaagatatatatggtcctcagaagggtattcttgaacaccaaagacagcattgcatgtgtgctcggaccaaactgggaaggaccatatcaggtggttgaagttctagactctttccccccctctctctctctct

SEQ ID NO: 64583 - DNA, 1118 bp, Cannabis sativa
tttatttacttataattatatatatgaatatatctttatgtttctattgttattaatgtgtttgaaatggtggtagcaattttgttgcaggtacaagacataagttggtttctttttgaagcagtaagtcccaattgttatagcaaagtgtcagtattgtttcagcattttgaagcaggaaatctagtggtgaaaagtctgaatcttgagggagttttctttttccttagtttaattatttttgctggttgtgtttgcttgtttaattagtttacttttattgttgtctctagttgttagtgtattagataatgtgtggttaattttgtgttagtcatgttacttggtaatttttattctgttttgtgttagattgcaactgagaagtatatttcgttaattttagtttggtttagcatggcgctcaatgacgaagaaaaaatatccctttccatccaattgtgtatgccttgatttttgtgtgttgaaaatgccaagtttaagtgctattttgtccaaattttaggttaggagtaattctttcaatagatgtgtacttgtgctatcccactaggttttgaatttttagaatggctaacaccttgagagagtttatgcttctagaattggttggtgtacccttaaggcaaaatcctagctagctttacaagttagagatgatcaaggccatccttggaaaattgagactttcaacctaacccgagcattattaattgtcaatagtcaccctcgttgagccaaattgcctaattttcttttggtcttaacacccattaaagtttaatataccccatacacataatttttgtcattcacaacccaaacctaattgttgaaatgtatcaatgacaaatcaaatattattggggttagggaagtgcgaataaaaattagcaaaatgtggtgaaacaagtttacatgggagataatgatggaaagtaagttcgggttggtgagagttttgattcacataacataaaagtccctctttcgctatatatatgaaaaaccgagtttttgcaaatgtcaataatacatacgaaaatataaaactgtatacgcctgcagaagcataatgtaattctgttactgcagaa

SEQ ID NO: 64584 - DNA, 1683 bp, Cannabis sativa
actcagggggccaaacctctataaaatccttatgttcttttactttctagttctaattctgtaacacgtggcaagcatcagattaatataaccctgttgtcggttggcaatttttgaggtcaacaaattggtactttcattaagagcaagctatcaagtaatctattcaaacaccatggtgaacacgagaactctggttgcaccatctacatcattgggtcttcctcaagacgctctgactgtagatcatgatgttcatgttccagccactattggaattcccatgcagatgtggtcaatcttaccaccacgacaggcacctcgaatctggtcactacagctgccagagtggcacaaacatcccggtggatctaagtagcaaacccttgcctccgaaggaagacccaccactggcgcctcccactaaaggaaagacccttggggaatagccctcaggttcaacaaccgaatctcgtctctagtactatgttggagagacaggaccaggaattggcaagccccatgtggacttgggagaagatctcgagttagctagactgagagaggtcgtctgccaagccagcctaacttaagaaccacacgctattgattgtgatgtattcgcaaagtagagatgagaattcttgagatggatgatggatgaccaccaataatagtacatcctttgaactcaccaggaaaagttggatcgccgcaacagagaagccaatgacttgataaggcgattcaatcagagaacaaacggaaaaggctaggatctcatcaaagatccactccaaggaagactagttgatagatcagagagggtctatcaacaagctaactaactaggttcttcaggaaccaggacaaaccttcccctatccaaagaaggacaggccttggcacgaaggtcttatggcgagaatagcccgattccaccaaccagcggtctaaggggctgtcagggatctcaggctcaacaatagccttacagaagaaggtcagtatacgaccatgctcgaggcatcctctcattgagtaagatatggaaagacatttagaggatctcaattaacaacacgaaggagtccctcgataaactataatgttcatttccttcactatcaccaccatctctatttctatctctttgtcattgtttttactagatatatacgattagtcatgctctttctatgtgtttctatttaataaaaataatatttatgtttagttttatgtttaatctttattattgtattattgcttgatgcataatgtcatttctaggttctacataagattaaattatttctacataagattaaattatttcttttattttcaagaacttgtatactcaaaatataatgaactttaatcctatatcatatgtgtcaactttgtgaatcaagggtacaagatagctaaacaagcatatagatgatttttaaagtcctttcttttactattgattacacattttatttggtttcttttaatatttattatcaaaaacaaaaaatcacaaactcatcagtcactaatatcactatttattaaccttttgtttctatttttctactaacgcttttgtccataatcacctccatgtggaatcgaccacctgatctatactacaaccaccgctgtggcagtcacaatttgggcgttacatat

SEQ ID NO: 64585 - DNA, 1002 bp, Cannabis sativa
  modified_base (925)..(931): a, c, t, g, unknown or other
gatcgcgggcacatgtttcttttgctctaggtgatcccggaggtcaccgtgtttcctgttaatctgatgtctcagatcgacgggagggcatttttggccccttcttcctctcccctcgggttcttggtgcacagaaaacctcttttggtcctctcgagatccttagggccaagactccctttttggagtttgcccctcttcggacctttccctttcgggaaatctgagcggacttttcgcggatcctgcacccatttctttttcccaagagtggaagtagggtttttctgttggttcccttcagagggataccttatagggctaggctccctagatttctacttttgggcacttggcgaggattctccttgtgcctctccaagtccagcagggatgactttatgatgcacgtggattcctgctgcttccatggcttttcgcatggccagcatcacctcttgcatcttttggttttgttctttttgggctgcgatttcagcttcgtggtaagcagccttttgtctcaaaagtactagctctgtatagcttccttcgtcgtaggcatcgtactcgtcgaagtttccttcgtattcatcatcgtgggttccttctccctcctcaaagcccacatttgctcttgaggccacatcctcatcgtctgggtcttgagcgtcttgaggaggacgctgttgatgtgtgttgcgagtctccaccatttttgttttgtaatactactgcctacttaaagatgcttccttcaactctcaatgaaagcaccaaaatgttgactgtggttttcggcaaccaatataataataatatcttaggaaagctgtaaggagttaatgcacgagatttttatgtggttggggcattaatgagccttagtccctgagtctatatatttatgagagtatttattacnnnnnnngttcttggtgagtttttctctctagttcttatggaaccctgaattcttgacccctgccttaatgattttgg

SEQ ID NO: 64586 - DNA, 958 bp, Cannabis sativa
gtttatgtcgttagtttcatccgcttaggatgtgtttctcccttcttcttgtatttattaaattttcctcgcctaatcaattcttcgatttcatcctctaggaaccaacgctccagagtggtatgttcgatgtccttatgatacttacagaactttttcggatcccttttatcacgatttcctcggattggcaaaggttttttaaagactccatttttctcctcgattgcataaatgcgatcgcgaggaactgcgaattgggtgtaattgagaaagcgcggtcctccatttctctttggagatgtttccttcttggaaggggacttggcaacctttggacttcgctgcctttgggggttgcgtcttcttggtcttcgacctctggaattctttcctctaggacttcgagagcgcgactgaggtacaaacgactcgcatttttccttcactctttccagttgctccaaagagttctcaattctcttatgccgctcagccatggcgaagaattccaccaacgactctggtcttcgagcttgtaactccttccaggaattaatggcaagacacctgtaatcaacataaacaccaacgaagactcaggggccttctctactttggttaccttagcgttaaaacatttaaaataatcctgtaaggactcaccaacttcctgtttgatgttagccagagttgtataaggcagtttgtatgtcatcatggcctcgaagtgcatcgagaataggttttacaaaagtctcccaagtcaagataaatgcttcaagtaattggctgaaccaatcatgagcattttcctccaaggttgccgcaaggatgcgagattttgctagctaaggtacctggtctacttcgataattgtattaatttttttttctaaataatctatgggattagtagtacctttatactttagcaattcagataccctgaatctct

SEQ ID NO: 64587 - DNA, 876 bp, Cannabis sativa
cagccctctcgaagagacccgtccctactcccaagatggtcaaccagcacaggctcctgctgactcttccccacggctttagatcgtgcgacttccttctaagtgaggccaatctgagatctatggacttccttactgataaggagtttagttgtgattataaatttcccaagtattcttcttggtagcaggttctcattctagagggggataaggcttgggatcgcgtggcttgggcacaataccttcaaaacactgttcctcaagaagccagtgaaggagcatcccgaggtaatcaatgtggttggtgacccacaatccatagggccaagcgtaacacattagttactttctgagatagcaaccttaattttcatatttggaatccccttctcgtagatcaaattgctcataggtttgacagctggtacactagattccacgttaagattaactgtcacgacttattatggtatagctaagaaatatggcaccatgaagatagggaaagtcatatagacatgagctggaatttagaaccactctagccatttgatatatttaagatcacaatctgtagggattttgacagatactacggtccttctaccacctcttctagtgatagctcaccttctagtggttttggtaaatttcttaggtggaaaattacaccccacactcccttttcatttgcctttaaataattttaatattttatcttgtcttgcagatatgcatttcgaggatgtcatggaatggaatgggaagaagtggggaaccaactcaggggctcctgctgataccgaggtggagccttctaaaaggccaaagaaaaccaccacccacaagaagaagaaaatatctgagccaatc

SEQ ID NO: 64588 - DNA, 1234 bp, Cannabis sativa
  modified_base (880)..(881): a, c, t, g, unknown or other
  modified_base (957)..(961): a, c, t, g, unknown or other
  modified_base (1036)..(1043): a, c, t, g, unknown or other
ttaactatataaattaataataattattaaacagagtaaaaaaattaattaaaagtcatagaaaaattagaaattaaattccaagcacacaggaaaaaagaaacataaaaaaatgacgtcaagagtggctgcacgtgcccacacgcacctcggctgagagtgggcttcgcggttggacatcatcttcaacctatagcctgatcctaatgtgagtcacgtgacccggtccgtgcgcaggcaggttggagctatttttcggccagaaaacacggcaaaaacaacggaaaaaggaggggtttcatccgggatttaatttctaatcaatctaaaggatcaatttcaattataaatggagtaaaaaagatagattggatcgtgttcaattcgaaactaagaactaagaaaggaaactaattctcctatgtatgtcatgcaatttgaaaaattaatcgtataaaaatattgcaaataaattggtaatgagatttacataattaattttacggtataaataattgaatcaaaaactcaaaattaattttataaataaatcctaaaattttaatcttgaaatttttctaatttagtcaatgattttaatgatgtaatacatcaacagaaagagaatttaataatgaataaaagccctaaagttttaagatgaaagaatgaaaaatttaacaaaaaataataacaaaattaatatgtatttgaagaaaattaacatatacatattaattgttatataaattattggtcctaaatcatatacaataggcaatctaatatcatatattagataaattaataatactcccaaaaacaatcaatatctttatatattaaaagtaattatttaacggcatttcttggtttaacnnaatatacttaaaaataaaaaaatattctgttaaatttaacgagttaacaaataaactcaataattaaaccaaaaannnnnacaatcttttaaatattaataatacacatatctctctaacaaacctatcttaggagaatattaataatttttttnnnnnnnnttttaaaaaaatctttatttttttgataatgtgatgttattctttttaattgctttattaatttcttttctattctgaagaaatttttgacaacagagagtcatcaaattagtccaagtgtttgcactccataatctatatatctatctataatataggtcattactcttttttttaacctattaattata

SEQ ID NO: 64589 - DNA, 1089 bp, Cannabis sativa
gattaataaaaaaaatattaattacaatctcttagtcaatctctatacccgaaattatatgttgaaatatttttttttcatagtggtattcgttatagttacaacatcattcttgtaaattttaaaaaattccgaatagtttacagtacgaaaaacagagttcccgatattctagtttactatgcgtgttaaaataacttcaaatttatttttgttgctgtaaactattcaaaaaattttaaaaatttacagagataatgttgtaactataacgagtattgtcataaattttttctaaaaaaaaatatttcagaatattttcgaagatattgtaataaaaggttattagtatagtagcactctaaaaaaacaaaacataaaagtgatagacctatatatgcatgtgtgagtgtgactatttaaattaaagcactttattaagtaaatgacgactgttgtataaaaaaaaatcaattgaatccactgcataatctttcttagtaattgtactagagaatattttaatatatttatctctttcaataatttactatttaggagctattaaccagttggccaaaaacttggcatgtgaatgggcaaaggataacataagaatcaactctgtcacaccttgggttatcaggactcctctcgttgaaaatgtaatttatttatttatctacgttattatttattgtaatttaataaatttctttagtgtcaaccttacattagtactatgaaataaggaaaaaaaaaacttcttcaattccatgattacattgttaaggtgcctgaatcatttattgtttagtttaaatataataatagaattttaactatttgttgcagttgtgtcaaaccatggaaatttacatctatatactatataatatctactttcttttttcttatgataaactacaaaagtatatgtttaaatgtgtgcataaataatcttataatttatctctattgtaggtgtttgccaaccctgagtttttagaaactgtgaagtcaagaacaccgttagggagaattggagaggcaaaggaagtgtcgtcactagtggcatttttgtgcttg

SEQ ID NO: 64590 - DNA, 578 bp, Cannabis sativa
cgtgatggcctagtaggaatatactacggtgatcttatgtgtggttcccttaggagctctgtataagacttggtagtgagtccattatagtcaagtgcacaacttaggactcactatttgtctaagtagatgtatttgagatggtacctcgctaatgcctagccttgtacaatgtaatttacttggaaagtacctttgggtacagttgaccagaaatttgtctgtagctttgttaggttgttcacttccccttgtctcttctatgcaggtgattttgagtgttgatctggggaggtggcaactgctgtgtcataggtcccatcatctttacttttgagatatagtatttagtctgtccccttgctcccttatgagtaattatatactgatagtgatatactatggtcagaaggaaacgatcatgtcacagtgcaccgccatatgaccctcatgttgcccaggtggcaatgatagacaaagttggcattgtagaggaggccacatagccttgtgatgatggagatctggaggtgagccaggaggctcagagtgctaacatcgagtttgaggtggaggag

SEQ ID NO: 64591 - DNA, 1258 bp, Cannabis sativa
atagtatttaccctattttaaatagttaaaataattaaattaagtattatttatatatatataaatatttatatatatatatatacctgtctacaacaacaaagcctgtaaactcatcaatatttctctataccattactcacttacttctgttttgactaaaaatatttaattaactaataagttgcattaatgatgttataatattttatataatatatataatatttagatgaaataattaagtgtaaaaaattattaattttctcaaataataatatacaattggaaattacatagttttgaaactaaataatagaaatgagttgcaaatctttgaaagatgataaagataaactttgtaattccttttcatattatcactcttaataaattagttaagatattattaactgtgtttagatataaatgaataatagctattggtgacttgatttattcatttataaggtgtgtatatagtttaaaattaagtgaaagtggtttgaaatactttagagaaaaattgaccaaacctaaaaaatagtaattggtaactagtaactagcaactataaactagttactgtttttttagtatataatggcatgcatttttaacatttgaaagcttctctaacagctcaaaacactttcaaatagcccaattaatatcataaacgctcatttatgattggtaacactcaaagactttatggtggtcattcatgtgcatatgagagtgaaaactctataaatagtcactatttattcacttatgaggatgtactcattcttaaatactaaactaagcatataaggatgagcatatgaggcttggtaatccttagtggcatttctaaaatttctctaactgtccatgtgagggaagaaatgacttttagcacaaaatactttctttttctctaattttcttgtaatcttgatgtaatactttgattttaattatcttaattccttcttataatgagaaaaatagaattagaaaaataagctaaatatttagccgcttaattcttaaattatttgacaaaaaaaattaaaataaaatcaaatgaaaaaaattacaatttcacaactatatattattattattattattatcttaaatccgtagctttattaaaagaaacatttacaccaaaaatacaaattatacactttattacatataaacctacacacggtcaaatcaacttttttaccttttctcaatattttattacacatataccaca

SEQ ID NO: 64592 - DNA, 1430 bp, Cannabis sativa
tgcgggggagatttcggggattctcaacatgaaaagaatgaagaatgatgcaacttacctaggccttcctctcttcagatccctcaaccggtcaagagatcttcgattcctggttgatagagctttgcaaagggttaagagttggaagacaaggcttctctcaaaagcaggaaaaatctgcttgatccaatcggttggatctgcgttggcttcttatgtcgcggctactgaaccaattccattgaatgttgcaagacaagttgacaaatgccttcgagatttctggtggggagacagttgtgagaagcgtaaactgcatctacttgcgtgggactctttatgccagccaaaactcagaggagggctgggatttagaaatgttgaaacggtgaacaaggctttcatgactaaatgggcttggaaagctttgactgataataccagtacgtggagcaaggtagtacaagctaagtatttaaagggaagaaacttcttgaatcttgaaaaacaaggaggagaatcggggatgtggaaagcaatattggactccagggaagtgcttgagaaaggtatttgtagaaaaattgggaatggagaatcaacttctatttggttcgatccttgggttcctgctgtgaaccgaacccccattcctcagaaggatgtctcatatggagtggcatgggtccatcaattcttacatccaaataactcgtggaatgttagtatggtgaaagagtggttccaaagagaagaggctcaaactatcttgaatattgatcttcctaatgacaagattgacgattcttggatgtgtttgggtgaacataatgggaaattttctattaaatctgattatcggatgatcaagggccatgatccgaattatgaggaaggtgtttggaaactcatttggagttctccaattcactctaggctgaagttcttatggtggcaggtttatagggatattcttcccacgaaaggtagactggcaactattctgcaggatattcaagttacgtgtcctctgtgtaaggaagctgcagagactaccttccatcttttctggacctgtagcttcgccaaagctatttggtttagtattgggtgggggatccgtactgagaattacagagcgcaggactggaagatgtggtttgactggtttagacatgactataatcgcccaccgaacgtcccatttattgactggatggtcacaaccttatgcattttttaagtgatctggagcgagagaaatagacgggttcataatgaaagcgacaatgaccttcctggtattatgagactggttagatttaaaattaaagatcatatgctggtccccaatcacagggtacctgaagttgtgtcttgggcgccccctccaccgtcttgggtatcctgtaatactgatgttgcagtct

SEQ ID NO: 64593 - DNA, 823 bp, Cannabis sativa
ttaaaatgaattaaagatctaaatccaagacccccaacaaacttagactgacacaccattctccaatttttccagtgtatttttcgaacctcaagaaccccaccaaaatttagaaataagtgactcaatttctcaacaaatcctagtaggaatacgaaagcaagacattgcataagaaggaattgcttgaaggacagctttgattagagtctccttacctgctttagaaaaccatttatgatgccaggagtgaataatggaagaaactttatcttttaaaaaagtaaaagactgatattttgcccgagaaagacactgaggcaaccccagatacttagtgataaaaggcttatcctcaagctggaaagtcctaaaaaatagatctctaatatcattttgagtattaggagaaaacaaaatggaggacttagtgaaattaatcatctgccccgaagcttgagaatacagggagagggcctgctgcaaagcatgacaagaattacgatcagcagcacaaaacaagatactgtcatcagcaaacactaaatgagatatagaaggggcatttctagaaattgagataccatgaagcaaacccctatgatgataattcctaagaatggctgaaagaccttcagcacataaaataaacaagtacggggataaaggatcaccttgcctaatacctctagtgggcttaacattaccatgcacagaaagaaataaaagcagaagacaaacatttaagtataagagagacaaaacgaacaggaaaattaaaatgaaacattatgttacataaaaaatcccattcaaccctatc

SEQ ID NO: 64594 - DNA, 1186 bp, Cannabis sativa
ctcgctttgtatcttacttcttcataactatgaattccatctttgatcctgagaacccacttgcagccaactactcttcttcctgcaggctttaaaattagaacccaggtcttgtttttctttagagattctatctcttcatctattgctcttccccattttttattatctactgaccttatgtttagagcacagtgaatgatgtctacaaagccaaacctttgaggagctttgtgaggcctcttgtccctgtctcttgttagttgatagtcatggacagtagtggctccttgatccatttcatcttctagttcttcctgtgatgcttgtatgttatttgtaggggttggttcatcatctgtttgttcatgtaatggtttattccagtgttgaattgcccgacagttccacctcaaactgcatactctcttctctgctggtagaggcattattgtgttgagttttgagagtttctttgtacactttgtcttcttcaaagatcacatctctgctgataataaatctgttttaattccctagttcaagactccaaagcttgtatcccttaactccatctaggtagcctacaaacacacatttcatagctctaggatccaactttcctttcttgtcatggacatatgcagtacaaccaaaggttttcaaattttggtagtttgcatgatgaccaaaccatctttccatgggagtttgaaaatttgtagctgaagagggacatctatttattagatgacatgctataaggacatctttagcccaaaaattcttgggcaaacctgaatggatgagcatgcatctaaccctctccatgatagttttgttcatcctttctgcaagcccattctgttggggagtctttgtcacagtattgtctcataatcccagcttgcttgaaaaaattcttgaactgatcatcacaaaattccaggccattgtcaatcctcaatttcttaatctttctaccagtttgagtctccactagagtcttccactctctgaacttgctgaatgcttgattcttggtctgtaatatgtgaacccaaacatatttagagtagtcatctatgattgacatgaaatatctagatcctccctttaaaatgattctagatggttcccaaacatctaagtggacataatccagtgttgctttggtggtgtgcat

SEQ ID NO: 64595 - DNA, 934 bp, Cannabis sativa
gcatattaacaatttaaaaccgcaaactacaccgcactgcatgcggtttaggaaaaattcaaactgcgaccgcaccgtaaataatttcaaacgacatttttttgcggtttgagcagtttgatgacaacccctaattatatattttgtaaaattattgtaacttttaaagacgggatcttagattatgtaaagtttgtttattcaaagttgaaagattaattatgaaaagttttaattaaatatgattttcaataaatttgttggttggcaacgaattgcacagtcaatatttaaatcacagtaacacgccgaatctagtagggtgttacaatttggtatcagagccaccaagttatctttcaaagattatcatgatgtgtataatcctcatccgagataagctcgacttacagtttagtaagcctctaatgctttagtagtttggtttattggtatgttaaaagaaacgtttgataagaagcatgttagtagcctaatagtttaaaaggtgcatgttttatttttttcaagtaagcgataattagaatttaatcttgattgcgatctaatcaagccaactcactatttcgtaggatgttctattagaatggacgccaggcagaacacgagaagccatgctaattcggttggatccaggggcggtcagggagttcaattttccctatatattcgtggtcaaggtagaggcctaaaaggtagtgcaagcagttggggtgatgctaacccaccgcaggatgcccgtattaagaaaataggtttccaaaaatgcaagccaagatcaatgaacaagacaaagaaatttagcgtttaagacagtagggtgctcccgcaatgcttactcctgaggtgcaagttgctcctactcctgctatgcaggtggggctagttattgtcaatcgaatgtaaccattat

SEQ ID NO: 64596 - DNA, 627 bp, Cannabis sativa
gtaaaataattccaacacacccgaccaggcgcacatccccctctcagggtttgtggctcggttgtttgaggcaggaatgtagcagtccaggttgcctagatagccacccttgtcaagatcccataagtgtgccacagtgattttagacggagggctcacccatctagcacccaaagcactctgcctcctttgaggaactgcgacagtaagttcctccgtgaagtaatctacacccttgacaaggacgccgctatccgcatcgagtggctcccaagcctcattgtatcccccaaagtttagaagtacaacctcctcctcttcttctgcctcggaaggactgccaggacaaacatcgccctgctcctcgatttggaggcaaatgttatcccaatttttgtaccctggcgtgacagcacacgatagcgacatgtggaatcgactatgagtacctgctcacaaaacataggccgaacagggcacctatcacactttctcaaactaagcagtgagtaatccgttcataatgacaactcttagcgaattctacttttgcattgtgagtcatcagagaaatccccctaactttgggatcaaattacagatatacggcaagctgtccaaatccca

SEQ ID NO: 64597 - DNA, 1060 bp, Cannabis sativa
  modified_base (888)..(889): a, c, t, g, unknown or other
gtctttatttgctttattattgttaggcaacatataaatttagtcaacaataatatattaaattgttgcacatgttgggtgtaaagtttttgccccttttatgtttagaaatttaattgtcttgggcatatgccatgttttctgatgaaagaggtgggtttattatatgtatgatttgatttatcttcaggatgatacagcatttaggatgcagagtgctctttttgctcttgttgtttcagatatttgagcacttagatatataactctgggaaacataactaaataaatatcactgtgggtctatttgcggggaatagtggtaataaggaattggcgaagagcccaatcgagatggagaagatcaagtcggagttgttgaaggaagcggtggaattgagcagaatcactgctggggaagctcaatcgagcccaattggtaaagtatagctccaacatccttttatccaaatttctttttccaattatttcaattttgggtatttaatgatagtctctatttctttattttttcttagtggatttgataatgtggaaagagatatcaagattagttttcaccattagaataagaataatcactataatctcatctgcctatactatagatctctacattaagttagtaagctctgacgcctgctataataagaacatgggaaatttgctcatcatatagcataaaagtagtctatcatacaatttttgtaagaagtaaaccaaaaggaaccaattttctgataatctcaaggttatggtattgtattgcaagattaagctttattggctgtgctaagaggtatatttcaaacgattgtacatacgtttagtttactgctctggctttttattattattattattatnnttattattattattttgaagatcactacgagttattcaaaaaaaaaaaaaataaagaatatagtgatggaaggaaattgtcttactttttcatttgttttgtattattgtcttacatgatggcaggtaaggtcagctataagcacaaagcttgcaaatttcaaaagagaaa

SEQ ID NO: 64598 - DNA, 675 bp, Cannabis sativa
  modified_base (639)..(639): a, c, t, g, unknown or other
tgcccactataaccccatacactattgaccgttgtttggcttacaatttgattcaataataatcatacaacttgcgttgttatgtgaaaataacttgcaattttatttatgaatgaaattggcaatcatgccttattacatcactaattggcagtatttgccttaatttaagacaaatctaaaagaaaagaatgaaaactaatagaaatcataactttgctaacgagcatacccacaacataattttttgcttaagaacaacttttattgataatacttgtagaggtgttgaccattccaatattggggtaccagtagattcatcttagagtcgtaacaacctagcttgtacatgccacggggtactatttgtgtaatctcgtatggaccttcctaatttggtcgtagcaccctcgccgtagggtctttagtattggctaagacccttcgtagtactaagtctcctaccttgaagctcctttccctgactctagaattaaagtatctggctacctttcgttggtatactgccaatcgcacttgggaagcctctctcctgctttccaacaactccatggattcacccattaattggtgattatggatttggttgttggaatatgttttaccatgatctanatttactaccatgtatgtttttaacatcctaatatg

SEQ ID NO: 64599 - DNA, 1066 bp, Cannabis sativa
tcaaacgcaagctcgactcgtggtgcagtaagtgttgagagtaaatatttaactgcttatgtgatacaatatttattgttttaaataataggcagcatacgagcatctagaagacatttataatgaaaatcatgatagttaaatgtcgataataattgttatgtttgggaaagagaattgtgagtgttagttagggttttggcatgaagtgtgtaagtgtggaattagtgcttgactcacttagattgttgattttgggattatttgaaagaatgaaccttgaaaaaccaactagatcacagggtgagtttgtagagtagggtgataacccaaccaatccaccatcaccgccggctcctctgtataattctaagaatactgaggggtgaatgatgctaatcttcctgtcgactagcagcaaatgtttactaaaatacgaagtattatacttagttaagaagaatgtgctgaattaggaagctaattcaggaagctccggtagagcaagggattcctctagttcttgctcccgtggtagccaaccctagattggccctacaaccacaccaagattcagtgtttgagcggtttgttaagttgtaagcttcaacattcttgggttgtattgatattatagaggcggaacaatggatgagcagtattactcgtctcctggataatatgggggtagtaggaactgagcgagtaaattgtgctgcttttatgtttcaagagcatgcccgcacctggtgggatttagtaggtcagtctcgagacctcagtacagatggaggattttgtgaaactagtttaaggtgataagttagtggctgaatatacactggagtttgatcgcttgtataagtttgccaatgatttggtaccaacaaatttcacctgaaaaccgattatattaatgggttggatgccacgatcagtcgggacttgaagattaccactaatcacgacactttgtataagaaagtggtagagagagcattgattgccaaagaggttgaacaacaaattaagaagcatactactaaggatgccagtacgacatcaa

SEQ ID NO: 64600 - DNA, 861 bp, Cannabis sativa
tcctcctcttgaaggagaggacatcctggttatctcgggagggccacatattgcgggagaaagcaacaatgcccaaaagagatatgtgaagaaagtggagaacgagcagtctgcctttgctccggaaccttccaagaaagctaagactgaagaacctttgattgtattctcggaggaagatgaaaaagacgtgagatatcctcacgtcgacccactggtaattaccatccagctcgccaacaaaaggataaaaagggttctggtggacaacggaagctcaatgaacattctttatagggatacactgtagaaaatgggacttgaaaaagctaaattaaaaccttgcatggtaaatctatgtggatttacaggcgacagtgtcgccagtcaaggaataatcgagcttccattaacattaggaaaaacacctttatccaccactatagtgcaagacttcttggttgtcgacctgccatcagcctacaacttactgttgggtcgaccaacattaattggactagggacagttagtttaattaagcacttaaccctgaagttttagacaccaatgtgtgtgggagtagtgcgaagtgaccaaatgttggctcgcgaatgctatcgcatagagctgcaaaatagaaaggccggccaccagctaatggcagtcttgactgaagaaggcgagaagaaggatgaggatcttgatcctcggattcaagatgaaagaaatttaatgaaaccaattgaggagttggaagagactgttctagacctaggaaatcccacaaagtgtgtatacattgggaagaacctggatgaacaattgaaatagcagctaataagctttttgagggcaaacca

SEQ ID NO: 64601 - DNA, 847 bp, Cannabis sativa
ccagtaattaaggccataggatcaactaattatcacacctaaaagtttggtttaactatttaacttacattcaaaaaagcaggtttttgcatttgaaattaggttgcaaaaatataaaagtcctcatcacttaaaatgatctacatctcatatctaaagctttctagtatgacccaaccaatttatgatgttgttcctgagcattaactacaaaaatttatgtgccattcatttcaacacgatacgtgtttaattatatataaatatatacactgtgacccttgactaataaattaaatgtgtcatcgttcgatctctactaattagctataacaacgacactagtcgatcttttcataagcattgtcatatatatatacatagctatatatagtttccaagcatgagacacaagagagtatggtacgtactcgacaaattacacataattaatctgtctatctaccacaggagatttaataatccccaaaatgtgaagctaaacgccacatatatcaattaatagtctatcatataaccaaacatacatattaatttctagccactgggaccaaaactaactacgatcctagctatagtactcttctcattaattcgtacgtgcctttccaagataacttcatccactgataatattaaatttattattgagaaatactaaaagtttgtctaataacagttgagaaatgtttatagggtagtaataatatttagcacctctttatatgagggtttatattactataatttataaagaaatgctaaaaggtaattaagtagttttctagtatgtattcttttacgttttaaagtatgtgtcactaaa

SEQ ID NO: 64602 - DNA, 1121 bp, Cannabis sativa
  modified_base (284)..(284): a, c, t, g, unknown or other
  modified_base (412)..(426): a, c, t, g, unknown or other
ttttttttattttatctcacatatttatattacaccatacatcacatactttatatttttttctatattatttaaatagtataatacttaagtttaacttccggttgcaaataaatatttaaatttaatttttgacagtaataatatctaagttattattttgaaacttctgtagaaacctagatgttaattactgttaagtaaattgcaacgttgcaattcctgagtagtccaagtcatgaatttttattttttaaaagaaaaattaatttaaatataccaanaagaaaatgacacgtagataatgacttgacatttaatggctaggtacttacagagttctaaaaatataacttagatattattacagccaaaaattaaacttaaatatttatttgcaactgagagttannnnnnnnnnnnnnngccgcaaattactctatatatttacatatattttattaataaaaaaaaacacagacccaaataagaaaaaagaagaataaaaaattaattaaaaaataaagaaaaaatataaaatatgtttacttctccattatttattgaggtatatgtaaagaagagtttgttggagaagttattgagttcatatttggctatacttgttgttatgtatgtaccatacaggtgacaaaattcaagtgtggaggctttgctttaggcttttgtgtaaaccattgtatggttgatggaataactgcaatggaatttgtcaactcatggggtgaaactgctagagggcttcctttaactgtccctccattcctagacaggactattctcaaagccagaatcccacctaagattgaaaatcttcatagagaattctctgaaatcaaagacatttctagcagcattaacctttatgaagaagagaaaatgcagtacaagtccttttgttttgatcctgaaatgcttgaaaagctaaagaacaaagctaaagaaaatggatcaccaattgaaaagtgtactacttttgaagtactctcagcattggtatggaaagctcgaacgaaagctctaagacttttgccaaaacaagagacaaagcttctgtttgctgttgatgggaggagaaagttttgtccacaacttccaaa

SEQ ID NO: 64603 - DNA, 1160 bp, Cannabis sativa
  modified_base (26)..(39): a, c, t, g, unknown or other
aacttgtgactaaaagtgaaaaaatnnnnnnnnnnnnnnaattatcattcctatattgtgactaaaaagttcgaggccaaaagtattagtcacaaaactcacaattttttatgactaaatgtatttttaatcataatacttattgtggctaaaatttaattagtgaaaatttgtatctaaatattatatttagtcacgagtaacttttttattgtgacgaaaagtcacatttagtcacaaaatttttttgttgtgacattttttttgtagtgaatcttgaaaaaataaattatcattttagatgtgaccaactcaaaaaggaagagaaaaaaaaatagatgaagttgtacctattgactggatttttagccaatcgacgcggggtcgtaataaatgagacataaaccaaaatcaaagtaataaatacagttaatgacactagaaattgcaacaaatgtaaagaaaagacacgagaatttaaagaggttcggtcccgaatgtcggtaatagcctacttcccttgtgttttattaatctgagttgcaaaagtcaagaacagcctcttaattgcaaataatgataaagtgtttattttgctaagtgctcaaaattgcggatccccttccgaggtcatggatgaccccttatatagaggagagtgtttgtgcttctcacttcaagaaacgcgaccaacgcggagctacctcaatcgtctccttaatttttagaggtagttgaagtctgatttttatgataatatcccacttttttcatgggttgacaactatctttgagcctttcatgggatttcaacatttgaaagagttactcacaacaggggtctcttatgggtatgacctggtcgtcaaccaccattggggataatacctagcatccatcattcctcatctctaactagtacatagctaatttaagtcatccagaccatctatttcagcttatatacaaaatcggtttcattagatggttaaagagtaaaaaaataagactgaactaataacggcattcctttcccaacggtaccatccttatccactagtatcgaactgagttcttggaatgggagaaaatagggggtgagcttataaagcccagtatgaaaacaacgaatatcaaaggaccattggtttaataaaatt

SEQ ID NO: 64604 - DNA, 1582 bp, Cannabis sativa
  modified_base (53)..(53): a, c, t, g, unknown or other
  modified_base (615)..(618): a, c, t, g, unknown or other
ataaaattaagtatacgtgcctcgcacgtaatatctaactagtatatatatanatatatatatttaaaattatggggatcaaattattatttaacaaaataattaacaatgcagcaaaccataaacgggagtggaactttctcgaaccagaatagttcatcgtctaaccgaagaacatgttttgccaaaccataaagctataacgtctttaaacaacaccccatcacattgaaaaaatgcatgcccattattaataattgtccccagagctagtgaaactgaaaaaatatcacaacaccaaaccaaaaaacacaattatattagaatgacaatcttcaaaataaaattaatatataaaactgtaaatttaacaaacaacttaaatcattaactcaacataattttctaaaattataaaagaaataatttgtcaaatactaatgcatgagaaaatcatatgtgtaaaaaatagtgaatcgaattatgtatatatttcatagaatagtacatatttatatacaaagttaggagattaaaataggaaactaccaacaaaataggaaactgctaaatatttaattcttttacagctaatatacagctaatactctaacnnnnctcctcaagctggagcatagatattaatcatgcccaacttgttacaaaaataatcaatccgtacccattcaaagcttttgtaaaaatatcctagtttacacataaaaatagcattatatatggtgacgatgaaagtgcattattattgttattttgtctttttaggagaaaaatcatgaatacaaccaaatcaaaataaagattttcttccattatatacatatcgcttttgttcccttccaagtaatttcctttattatttttatttgtttttttctttattattaattccaactcaaagcaaattgaatgtatgcatgttgtagcagtacaataagtagtattagattttatattaggggattcacaaaaatattaagtaaaagtttacaattttattgatatatatttttttttttacaaaaatactgtttttataaaataattgtaaaacaacaaaatatgacaattaaaataacagtggaacaactaaaaaataactgtgaaaacttaacgctgtatacaatataaaacttacagtgtatttttttaaaaaaaaaaaaaatcacctcgtagtaaaaaagttaaaaattttaatatgtggtgtaaaaacatattatacactccaattaatcacctaagaaatagattaaagaatcatattaataattaaaacaaaaatctttcaaaagaaagaaaggaatagattaatgagaaaagtctccctttgaaaagtatggtcagaagaaaccaaaatattaagttgaatgtgatatgtgatatgtgaataaaaatacacaatggcctaccaaaccaattataagaatgatataatttttatttgtatttctttttttataaaagtgtgataataatatgtaaggtcttggtcgttaattgttgtacaccacacaccatatgtgataacattttctgatacttgcttctctcatatttcctatca

SEQ ID NO: 64605 - DNA, 845 bp, Cannabis sativa
  modified_base (811)..(813): a, c, t, g, unknown or other
agccactccgggcgtacatcagcagattcatgacggaagtaaccaaagttttgtgggtaaccgaagatggaaagttatctgcaatactggggggcatcgaagtccttggtgaactttggaaggatataaggaagaataggacggtagactcaatgagtgatttccttgaccgagccgaaggcttcatcaagctcgaagaagcccattcaacgagcggaaggtgaacaaaagctgggcaagtcaaaggctccttccactggaacattcactcaacttcccaactactcaaacaattcaagctcaagtggcaaccgttccaggagcaaccacaagcaagggaacgggaagaaaggaaggttcaccggcaaattcgaacagactctccaggagaatcatgccaagtacactgcattcactattctgaccgaagatatagaaagtgtatacatggcaattcagtcgctgatcccgtacaagttattgttggagggctgcacatcgctggagattcaggcaaagctcgggagaggtatgcccgaatagcacagcacgtacaagaagttatcctagccgtggaagaaaggaagcccaaagtttcacgagcaggagatccaaccatatcattcaacgatgaagacgctgtcaagattaaatttccacacaacgacccgctggtcgtggaggtccagatagccaataaaatggtggccagaactatgatcgaaaatggagcctcttccaacattttgttcaaagctgcttacgaaaaactgggactatgaccaggacgttggaaatattttaccaggannntagatctactaacaagtatgttgtttaacacc

SEQ ID NO: 64606 - DNA, 1707 bp, Cannabis sativa
attattgcttggacatagtttattggtgttatttcaggtattctagaaagtttggttaaatttgggagaaatttgaatgagatttgaagtttttagggttttctacaaagaaccggttaactatttctacaggcaaagccctaggaaccaattcgctgtttggaaattcattaccggtttggccaatttttagagcctcagttttaatgtttcctcgatatttaggttattgtcatgctatttattgatagaaaaacttttagttttgaatttactgcctcgaaaaggtttttgtaagttgtttacccgtttatgtgattgtgacatacagtctccattcaacgcatgatttttcattcaagttgactaacacacttggatttagaaatgaggtaagactagcatagaatatgtatatgtatgtatctaaatttcatgttgtgttatatgatttgtatgctactaagagtagtacaatagtggtaatgagtgcattagtacaacatatcatgttcaaagggtacgatccattgttaccaacactagtatgattaagtacgtagtgcatatgatacaatactcaattgtactcagggtacggttcaaccctaccagcactagtacgagacgagtacttaaagcatgtggtacagagatcgtactttttattaagaacgttcttgatcatctgcttagccttgtggataggtgtatgggcgcctaaatacaagtcggtaacatatttattatatgttatatgcttttcttactgagtttgttgactcacaaatattattttcatgtgtaggtaaaagaaaggctaaggatgaataacagtgagtccagagctcagggatgattatacatgtcaagatggtgcgacctggagagtttggtcacgagacaatttggacttcattttgtaatagttttgcggcatgtttgtaaagtttattttgaaaatgaatataagttttaaaagcaaaattctaacttttttatggatatatatatttataaaagattaaatttgtcacaatattcgataaaaccctttgattagcaaaggtgtgcactataattggaaagtcaatgtagcatgccttagcattagggcgttacaattatggtatcagagccgccagattgttcaccaaagattgtcaagacatgtacaatcatcgtcagagataagcttgactcatggttcagtaagcctttacttgtttagtaaattctgtgattagaaaagtatcataggaagcacgttagtaatatgtttaaatgtgttgcctaaaatccatgaatgtagtaataaaattttatttaatcgttgtcttacctacctacttatgggtttccaggctaagtcctataatatggacgcccaacaaaacacaacgagtcaaggtaatatggtcgagattggaggcgatcggggaggtcaaaatcctctaaatccccatggacacggtagaggtcgtagaaggtttcaaaggatggtccagaaaatcctccacaagctcctagggattgagagcaaaggtttgttaaaatacaagcctgaattaaccagcatgatgaataattcagaggttgagacagcagggtcctcctgcagtgcctccacagtaattgccgaccactttggttccagtggtgcgagtagaacaacctactgatagaaaatgtatggagcttttgtat

SEQ ID NO: 64607 - DNA, 1032 bp, Cannabis sativa
aaataaaagaaaaatataaatacactaatttaactaataattgactaggaatgagtgtataaatgtccactcatcacatccccaaacttaaactattgcttgtcctcaagcaatgaaaaagaacaaaactaaactagaaactaaaaaaataaaaactaacaagttaattattggatggcaaatcaaaaaatttagaccaaagataatttatctcaaaatatcaaattctctttcagttattcaatatgtacttcaaacaaaggactagaatttcaacctatttaatctaactttcaatattgtatttttattaagaatgtgtgtatgtcaattctactaactctatatacatgtaatccatgtgcataaatactttccttaccactaaacattcaagataaccatagacttgtataaccaatttatctccattaatgtaacccaaagtcgtgtagatcaaaaggactttgtaggcatgtaacgttaggcttaggtaaatagtggataagaatgtcattttggttagtttcacaccataagcttacaagtctaatcaaaaatacaaaacctttatcataaatttccttttctcgccataatatttttttcatttgatacctatttgttcacacaattagagttataatcctatcaaatttatctcttgctattattttttttccacattatgaaatttttttcttttactcttcaaagctgttttttttttttaataacaagagacattttcaacataatatacttagattataactctttatgtacatacatcctctctaaacataattctaaaagaaattatctcatcccacttacatcatattttcatttagtacacaacaacctatgtttatggtgcaaagtagggtaagaataatttatttaaattcatggctcataatcaaggataaatatgcattttaagaataaaaattggaaaaattaagcttaaaataggacaacggagaataatgtattaagattagctttttggctcaaatgattcaaaaa

SEQ ID NO: 64608 - DNA, 1338 bp, Cannabis sativa
  modified_base (482)..(491): a, c, t, g, unknown or other
ttttgtttgtttaattttaatactataaatatttgtaacaaaaatttaagtttgacattttaattgcagtacaaattaaaaattataaattataaaatataaattttattattgtataagaataagaaattgactttttaaaaatgtatatatatcttattattttacactttacactttattagtatcaatgtaattatatattgttgtaaagggcaaaagtggtatggtaattaggggtgttcatcaaaccgcccacaccacaaaaaatgtagtttgaaattctttgcagtgcggttgcgatttgaattttttctaaaccgcgcggtgcgatttgcggttttaaattatttatatgcgattcaaaccacaccgtaccagacattccaatttttatatttatttaggtccaatatgtaaatgtccaaacaaaagtccactaattattgtattattgaaatttttttttcatatttattttnnnnnnnnnnggtatttttgacaagtgttgctcaaactttgttgtatatgtgatagtccaagccgcaaaaaccaccgcaccgcactattttttgcggtgcgcttctgctgttttttagtttcgcggtgcaggtgcaatttggaaaattaaaaaaaccgcatgtgcaggttggtttaaaaaattagttaaaaccgtaccacccgcactacgaacatccctaatggtaacatcatgagatgagttgtaaatgacccaaataattaataattgtggtaataagagaaagcatagaacagattcaacacttgttgaatctcttcgccattgatgttaatcaagcaaacaagaacaaccaaaaatagagaaaaacagagatgaagagaaagaaaaagaaaaagaaagagaaggaaaggcattgaaagagaagattgtagaacaaagagcaatcttattattgaatcaatgaatattggcattatatagccaatgattacacaagggagaattagttagtagtagcaaaaattagttacaaccagtactgaaccactaacagaatcaactaacacatggtaactgaattaactaactaatactcctaacacgacccctaaaagttacaattggaagcatcttgagaatctttgatatcttcaatggtaagcttggatcgaaatagagagagccgattagtggagattgcctttgtaagaccatcaacaagttggtcttgagctggtacatgtttaacttgaaccagtctctgaagtatctcctcacacacaaaatatagatcaagttcaatgtgcttagttcttgcatgaagaattggatttgctgtgagaagaacggtgctg

SEQ ID NO: 64609 - DNA, 1175 bp, Cannabis sativa
ctatcaagttgtatgttaattctttgaaactaatctcgagtgagaagtttagcattaacagcctgccataagataaaacgatgttttggcgcacaaattttattccaaacaaagtaatgataattcacttctcaagtttaatgaagcttttgtacaacttagccacactaaactttccaaggtagcttgcatcaataatgtcttgttgagaaaaagttcttctaatatggtacaatttacgctgatatgaactagcatcagttttaagttgataccccaaaaattttagccctttaagtagatattatgaattcatctaacccaaatcaattcttaatttatgctaattgtctaaacatacttggcaattataactttattccacttagctctcttgaaaaaaacccaaccaactataggctttaggtaagcaaacatcatcccaagaagttaagtgaaatttactcttcaaaccattattgtcccacaagaaccatatgcacatcttatctatctctttcaccatactttgaggatgtaagaaaatactcatccaaaagtttttcaatctcaaaagaatagaattgataagttgagatctacctgcatagaaaagatggcgactagctcatgtgtgcagcctcaacttgatcttcttgatgattataccacagtcctctgtctttcatttagtaggcctcaagggaactcccaagtactttaggagaaatgaaccctcttcaatttgaaggatttaaattagcttctctctgtcatgattggttacccctccaaaaaaaacatttgagatttgctctgattagccctaagccatgtactgctgcaaaactcatcaaaaatgaccttcacacacttaacacactcaacattagctttgcgaaaaattatgagatcatccgcaaagcatagattaataatcttgaggctcttgcatattggatcaaatttgaaattactctgtctagtactagcttggagcaaacaagtgagatactctatcagtagaacaaataacaagggggaaataggatctccttgccttagccctttagttccatgaaaacttccttggaatttaccattcatcattagagagtgttaggtccttttttggcaatttagttgtcaaaatatttcttaattaatgtgcattt

SEQ ID NO: 64610 - DNA, 623 bp, Cannabis sativa
gctatagtacccgccttcctttccaccaaaactctaactctctttggcgccatacccacttcgacaagaccctcctttctaagtttaagatttaggccatcgccatcgcttaacaggcttctcttcaaaatcccatctggctctgtcaaccgaagctcggtccttactggcttcagatccatttctcctgtcatggagtggcaagattgcacgtaagtaattccaatctcttgtttgaaagttttaatatttagcttattctgctttggtaatcttcctactacttggaaaagaactcttatataactccctcggatgatttagatatatatatacccccccatgttttattttgtgtcaggtttgatgtagtgattaacatttgatgtggtaaaaacaagatctagtaagaatttgaggtcgaacagtgagccattattaactaggaaaaacatgttccaatgcagtgttaagagggaaatggacgtgcctgcttcagttgcctataaatgttactctgaccgtgaagccattcctcgttggatgcccttcatttcaactgtaaaggtgcgcttcttaaacttaaaacactctctaaaatcgccttcttaaagaaggggggg

SEQ ID NO: 64611 - DNA, 705 bp, Cannabis sativa
ttaagatcttttagtattagtgagctcatcttggagaacatcttcgagccacaaccaagattcttccataagatcagggcttaatctgaacatcaaaacgcagaactccatctggttaagagctccatcaccatccaaatcaccttctctaaccatactcacaagctcatcttccctcatattttgcagacccaaaacggcagcgtttgacctcaagctctccaacgtgatcaaccccttttccttgtccatcagcagctcgaatccattacagagttctttaataagcccttctccccctaatttatcggccattacaggcaacaaatcttcaaactcagagaaagccctgcttttcccaattccattggtcattgttgttactgttcttgaaattgtttttagagaaagagaaagagaaggagaagttgttgattgatgtgagggaaaggaggagaggggtgtatatatatgtatatagaaagagagaggggttagagagagaaagaggggttcttcgaaggaggaagggaatggtctctcgatggatgacagcaatggaacaagcaattaattgctggtcggcctcgatgattcctctgaaagaaagagtctgcagttgcctctatgtttcgtagaagtatgtaaggggcattttcgtcattttctcgactagttttcttactctgtttttttttttttttt

SEQ ID NO: 64612 - DNA, 541 bp, Cannabis sativa
aagatttggttatcacaatgtatgcctaagttttctgagtggatcctcatttcaattgtcaatctcttgagccagatggcttctttaactgcttctattgcagccatgtattttgcttctgtggatgacagcactacaaccttttgaaggtttgatttccaactaacacaaccccaaagacagtgaacacaaaaccaaaaaatgatcttctagtgcaagtttccacatagtcagagtaaactaaactagttacattatcaatattattgtagactttgttgaagactaggccaattttgactgagcctttgatgtatgtaagtatccatttcagtcccttccagtgttcttcactaggatcactgataaatctggtgacaacactcatgctacgtgtcagatcaggtttggtgcaaacaatagcatacatgagactccctactccatttgcatagggtatgttttccataagcttcctctcaacatctatctttagtgactggttatgagatagtttgaaatgcaaagcaagtggagtagt

SEQ ID NO: 64613 - DNA, 2739 bp, Cannabis sativa
agtctagaacgttcatacgacaatactatcgaccataatgtcagcctatactctaacaacctggtgcccatacacccgatcataacccttctaaacctgcttattataccccaataaacataacccaagcaataaaataacaatcaaagcttagaattgaacaacaccattaaagagtcaagcttgagttctaaaactcaaagcttgctcaatcaacaaactacctaccaaaacatgttcaaatcaacctatataaacgtaatttaactactgaaaacataactaaacaccagcagcaagaacagtaaccaaaatctcaaaaacgtgcataatccattttctttaaaatcaagaaactaaagagggatttgcttaaaactttaccttggcttagatcctcttaaatcagctagaaatcatagccaaatgcagctcaaaattcagaaccctagctggttctatagagtttcgaaaagagagagagagagagaggaaggaaagagaggaagcttttcttggtttttttgtaaaaatgatttaaataaaatgattcttttgttttattaatgaaatatcagcataaacaataataaaatcttatttattaactttacataaattcattaaagacaaaagcttatgtggcaaaatgattattttgcccctcccacactaaaagaacataaaaggcacttaggggtattttgggaaattctaaaatcctgactatttctgacattcccaatgtctaatgtaatagccccgctatactaaaaatactatgatgtgattctaatagccaaacattgctttctaatgttgtctgacacaaaatatgcaaaaattattaaatttctatatgtgacataaaaatgcattttgaattcaaattaatcatcataaataattaattcaatactaataaataatttttatagttaagccctaattatctgctaatttccaaattaaagttaagcggtctttacacatcaagtcttgaagattccacctcaatcttgtcgttcgatcatggggatgatgatttgaataagaaccaagccgctttaggattgaatttatacttgaggctatccaagtgatttaagatcaggaggtcgacgagggtttattcttgggtactattgatggagtccaaattggtgagtttctgaatattgattgttatcctaaaattttcatgtgatgatgtggctcttctttaggtgacatgtaagtcgttcttagagttgtataaatgaaactctcgtcgacatatcgttcagagtgagttatcaatcaagaattacttatctagagaatagagtaaagatgacgtgcacaataaacgatattatcttaccagaattgtttttaaggccactgcatatgttgcctacatgcaatagtgaaagccttaaaaacactttcttcttttgtttgttaactaaatccctattttcttgggatttctatacgtgattattgtaatataggaaagtaaatagcttccctttttatttttatgtttctggaaacaagatagaggtcattctcccttatatatagtggagtcatttccctatttagggatcttaaattattcatttgatagagcacttaaactgctaaaatcattgtaagagcttttgagagagatcaagaacttcttgcttctcttctcacaagtcaatacacagaaaagtggagtaggctattaccaccatcacgaggtcgaacctctataacaatctatgtgttctctttgcttaattgtcattatttattatttttaatcacattaattgattgtcgttggataaaggtgaggtcaatattttggtgatctcattgagagaaaagaacacaatttttgttttcaatcctttcaagacaacaaatatggttgtacaaacaaggaggggcaatctcaatgaaacaactgatctgatggttacgattcctaatgtgcatacccttgtgaactgaagagatccaacaaggaaggatcccaaatctactattcctcagcctccaataggtcctcaatcaacaggatagagtgacaactcctctagatgggttcactcagggcatcaagaaattagaaccatgagtacctaggccgagaaaactgcctctggcactaaaaatccatctgttcaagatccttcggtggtgattggaagtgataccgagatgaaaaatttgtgagctactttagggcagatgcaagggcacaccaaccctcttcaccgtgattagaaagatacccgagcagctttgaatttcacctttgagcagcagaggttccaattccaggaatggatggatcaacaaatggagattatgagagcccaacaacaagcaatcgaaaattattatcagcaggccaccatactatttaggcaagcctaccagctaagtgggcagtaattagtgacagatagtccagttctacaagatttgaacagaagactagacgtctatatcttcactgaaccatagtacgtgctagaagaacgtccaactggaaacactcaacaaactcagggaaacaagctgtcctatccaaggtcatagagttaaactgatggccacacaatagatgagcaagtttatccagcctgttaatcaatatagcatccgtcctcagatggatatgtagaaccaaccaattgctgataatagccagacaaggaagcccctatgtgaatcaatctttaacaaattaggcct

SEQ ID NO: 64614 - DNA, 646 bp, Cannabis sativa
acgtggcttggcacgtaacaatcacctagtatatatatatatacatgaagttatagctatgttccaattttttcattcgtgctccctcagcacgttgtataaattagttataaaaattaatacaaaataattaattttggaatttttttaatttttacagtgtatttaaaataatattttttatatttttacagaaatctaagaactcacttagaaaccaacgataacttaaatcacaaccataattcatatagcaatctacgtaaaaatgaccgaagcaatctaacctataaatttaaaaaaaaaaattaaaaaatactccatatactaattttttaaatcacacgtttaaaaagtacatttgcttgaacatttattatctatctatgtatcaaaccttttctagctttcttttcctaacttaattattgaagagagagactgaagaacattaatacacaactaaaacaagagtacaagcaactgtaaagcattccctcaaaaaaaaaaaaaaaaacaactgtaaagcacttgaacaattaataattgagtggttaaaatatatattgttcttaaaaaaagattaaaaaaaaaaaaaactttcacccttgaattattacaggagtaattatattggtccacccta

SEQ ID NO: 64615 - DNA, 4124 bp, Cannabis sativa
  modified_base (4062)..(4067): a, c, t, g, unknown or other
ttcaatattctcctttaatatagaatttccttatttaaattatcatgattgattttttatgtttaagaaaagtatttatatttattgtttatcaaaaaaaaaaaagttaattttctaagcaagatacagtgtacagttgtgcctttatatttattaactttgttgtgaatgaattaacagtctatttgaacaaagtttgactttctttttagaaatatttttcatttattttttgattgtttcattacttgtaaaacacaacctgtggcatattattaattgagaagatattgttactcatattgtgtttttagatagaaagaataaaatattttattatgtaataaatactatatctatataatggtatttatttgtaattgatttattttgttccttttctgaaatgatttattattcgtatggatgaacttactttttatggagtctagactaacaatgttaactagatatattaggattttgtctgcacactttccatatctcaaacagaatttcatcattttaatgatttttgtaagaaaaccatttaatgttttctctttcaatttaaatcttttgagcttggatttaggtgtcatttattactataaacatgaccaaaaccagcagcaaaaggttaaactcttctacttcttaatttcttatattcttataagtgagtgtcccttgtaaatgatagtcgttctattattccttggtgagtttatgtgtctttataagtacttttatatgaggtacattcttaagtaaagaacataaagagcaacttttgggagaaggttcatacaagtcttactttgagaggaagtaagcaccgctgtcttcgagagaagatttctacaagtcttaattcgagagaaagtaagcaccggtatctttgagagaagatttctacaagtcttactttgggagtgttaactcagaaactaaccctgatgatgtggacattaatgtttgacgtgtgggaagaaagatgacatttcagagttgagtattcccaagttgtagatggtcgacctgggagggttccctaggcttgcgcccatgttgactttgagagctccaaaatgaaagtttgtactttaataacttaaatccaactcactatctttcattattctataccatgaagacatgaagcaacctaagacaacgtcgaggagttgaaattacacgaacctgcaacacggaaaccaacctaggcgcctagggtttccacctggtgctcaggttgacatcctcaactagggtttcagtttttgggcccatcttagtgcaaattttgcaaaacatgcatggggacattgacttgacataccacgaacatatttgagacatcaaaatgagattctgagcaagttgattttaaggcacctgcggccccgagcacctaatgcccaggttgacaatctatctatttgggcaccttccaagcatcctatctgacttttgcattgaaaccatcttcatcaaaaatatggaaaataggtccttctaggggaaaaacaacaatttttgggcaaaaaaagcaaggttcagtgcctaggttgacacttgggattggcattgcacccaagttgacaattagtcaaccagagcctcaaaaaatggagttttcccgaaattctttcaagcatcatctctatctttaaaaatattaagaattcgctatttttggggacaaaatagagctttcaaaggggcataagagggacctagtgcccaggttgacattttgtcaacttgggctgtttccaattcagctcagccaaaagtgctccaggaatcttcaacgtcatcaaaaataatgatgattcaagtaaactcggagagaaaatcacaaactcgagtccttggaaacaaggcctagcacccaggttgacctagtgttgggcccaacacccaagttgacaatctacctgggatggtgccttcaatcgcttaaatgccaaatccaatgtgaccattgaatctgatgtagtcaaaaacgggggagaaactctattctcaagtttagaagccttggaagtatcaaaaatagaatctcaagagcttcgtttaaaggccctaacgcctaggtcaacatttcgcctagtttgttgggttctgcttatccgaatttaatgttgtttcaaccattcttcaagttttttacaagtgcattgatccattaagttagatcaactaaattcacaacttcaattttggatcatttggaagccagaagttttgagttttccatttctacaaatagcaacatcttcgagaatgtgtgattagcttcaccaaaacatataaaaagactaaggggtgtcaaaccatcacttaggcatctcaaaggacttcccttggatgtttttacacttttacagcatctaggttgatgtcagatgtcaacctgggcgctggaatgtcaatttgggtgttgggacttgaactcccttcagtaaaatagacatacctcacttaatttttatccaaatgatgcaattcaacttggattttgaagatatttaagctctctatcaagttatgtctcacacactagtcaaaattctgaagctatcatcgtcaaaatttaccctcaagggagttacgaaaataagctccaagtaacttgtagcgggacttgccggacaccaaaaaatagccatcaccactagaaactaatttttaacattagatcatcatcaacggtggaaaaataattattttcattttttctcctacttttgtggtcctccttcacctataaagggagagctcccttagctcatttttcacatttagaaaactacccacaagttcaaagcttctctatctagactttctctctttagatttaggagtttttgatacttagtctattactataatcaccatctcgtgagaaataaaaactcgaagtagacgtaggccccaaaactatcgcgacataggggatgaactattataaattttgtgggtctctcttaataattacttaagaacttactcattcttgccaatctagcgagctgatttggccactttttagcgtcacatgttggtgctttcattgagagccataattcaagttccacatctatagttcgaatttctctaccaagaacattgtttgtaaggggttcataagttcaatcaagcaatcaaccatgaacacggaaagcaacactaccactcttggtagccatgccactactcagcaagtagtaggcactcagattccccattaggaagcagactacgagggagcattcgaaagtgctcaaacttaaaaatgtggatctgtggtatctttaactgatatggagaaatcatctgttaggaaaatgatttataagcgggcatctgagtggagccaaacatgagatcgtaggcctacaggtccaccacatgaagctgataggaccaaccgtaattttgttcgaagaaattcgaacaatgcgggaaacaaatctcctccatgggattctcttcccaagtttcatgactctacacccccatgaccttgcaaagggaaagggacctgcagccaaacttagaggaagaccctgaaagctctaccacaaaagtgaagagtatgaggttcggagggtgaaggtcaatgaactactccacactcaaaaatacttttaggatgaacaaggtgcttggtgtaggtactttgcctgaggtcttgacgaataatagtacaaatacttccctcgggtgcatggagacatgttcgacttgagtaatctatctaactccctccacacatgtcattctaaggaagactattttgaaggaaatagttagtatagtactccgagcagctgctcacgaagaaaatgctcgagagacaaatagccatattttctagcaaggccacacgaccaggaaataatcacaagcctaggtcgattagtgcctttgatcaacttggaagacaaacaagcctacatgatgacatcaataagaagcgactagttgatacacacatcaccttagtgtgtagggccaaataggcatggcaaaaagatccattcattcggnnnnnnttagtgatccgatccgacggatcattactgatccgaaacatttggatagttattgga

SEQ ID NO: 64616 - DNA, 2031 bp, Cannabis sativa
  modified_base (532)..(537): a, c, t, g, unknown or other
aagctatagtggcagcagtgggcgactgggcaatgagcatgggcggagctttcttggaggaggaggagtcgacgcttgggagaatttggaggttagggagagcctcgccgtcaccggactgagccaattgctggagaagaagaaggagataagaatttgagatggtggacttgcggtggtgggagatgagtgaagcagaggtggtgagttgtaaagaatattattcattttaaggttgttagtagtattattatattatatttaatagttaataacttaatactatttttaaaggtagtaaaaatatatatatagacttttagttatgtgggttttggattataacccgatgaatattgtgtgtgtttttaaaacccaaacccgatactcgtgtggcctattttcaggttggacccgacccgaatttacgggtttttaatttttcggcttttttggtagcaggtgggcgggttttcggatttaaatgttcagccctaccttcttctttgtaattattttttttttacaaaannnnnnaaaacaaaacaaaacaaaaagaaggaatggaattactaatcccatttctcaattccaaatgagtttgagactcacataattattcttattttttaaagtaataaatttcattcttcattttcattccttaatcccataaataaatatgccattatagtaaaaataaacaatccaatattctatttacaccaacgctctaacttagatccctacttgcattctaacttagatcacattgtgatgatacaatttcgataaatattgataaataattatctacaaacaaataaagtttctttttctaattcatttgtatattttaacttaacaaatttgaacaaaattaatcatgaaaacttcaaatttctttgttgattaggattaaattcatgatagtgttgaacttgtaaaaaagttctctatcataattcaaacaatcccattattagttatttttatgattatagaaaagttattttaatctagactgtaacgtaacactttataaagattttactatatatatttcttgtaattaataagtgaatacgcatgttagtagagataagatatgcttatttactttgaaggcctaaatagaaaaaaaggtatgatataaaattagaattaaaaaataataattttgtcccacatgaagtaaaagataattttttattttattctcatttataaataattggagctccattgaataaatcataaatctacatactaagttttcacaaaatataatatattagtagaagaaataattattcatatcccataatattatttattataaattaataatatataataatttaggtacaatttaggtgttgataattgtgaaattcatatttttttctaaaaaaattaatacttaaaataattaacttgcatttgatattataaatacaaatctaatttgttcaaaaaaaaaaattataattcaactttaccaaacattattaaaataaattataaattattattattttagtgttaatattagatatttaaagttaatacatgtaaattataattttttattatatagacgtgatcaataaatgaagatttattatttgaatatagcaaaaccataattcacttcttaaaatgtttattaaattaaaatatataaaattcaatatcaaattacactaacagtaataatattttttcttttttgagtgtgggtaataacatgtctctgttagaaatgcaagtaagtgttacaaagttaaaatatagctcgcttaactaataaaaaactctaatggtatgccaagataatataaacttcacacaatatttactataatacaaaatttaaccataaatatactactttttttttaaaaaaaaaaaaaaagaaaacataaataaactactttatttatttatttttatgcactttcattattttctttagtatatttaattatagcattaaattataccatttatattctttttttatttttt

SEQ ID NO: 64617 - DNA, 823 bp, Cannabis sativa
ttagaattttttttttaaaaattagatataagactaatactataataattataatatgtattgtaaaaaaaaatagatatattttgtaaactatatttgctttgacttaccgaccaatcatcattagggtagcctgagggtttgtcccaggggacataacaaacgttgaagcatcaacaactcgaagtgaatcagttccaataactttaaattctccatccacaaccttccctaccaagcatcctccatgataatgccaaaaggttgtaactgagcttcgacaataatcttccatcgatgaattatttgaattagggttagttggcaaaggaggccccaagaacatgaaatctctaacaccattcaaatcagtatatttaaactcatccaatgacttagtcttcaacaattcactaaacttcttcatcgcgctaacacaccgcgagaggtcagttgggtgagaaaaatagttgaatcgaacatgcggtgtggctttaacatcagtttttgaagctaaccggagtgagccagtggacaaaggtcctacaactttttcaacaattgttcctagacttagttgaggtggagttaatgggttagggtaaagaccgaaaggtaattttgttggtgaaaatggtaagttataagcaaaagtttctatgtaataatctttagtaattcctacaatttgagctgatgagccttggaatggaaatgggattatgagatcaataccattacgtgggttatcagccatgaattttccaacattgggttgggagaggaatatgggaatatgttgtgatgagaggtatgattttgg

SEQ ID NO: 64618 - DNA, 693 bp, Cannabis sativa
ccaagcccttggggcttgtttaaggccatagattgccttgtttaatttgcacacatgagtaggatgttcaggagactcaaaactaggaggttgcatcatgtagacatcctcctcaagtgtgccattgagaaaggcattgtttatgtcaagctgtctgatttcccagtccttagtaaccgcaagagtaagaacaactctgactgttggggctttgacaaccgggctaaaggtctcactgaaatcatcaccgggcctttggtgaaaacctttagcaaccagccttgattttagtctttgaagtgacccatcagcatttagtttaatcttgtgaacccatttgcaccccacaatattgtagaaaggtgaataaggaactagaacccatgtcttgtttttcttaagagcccaaatttcatcttgcatagctttattccacccttggtgttgaagagcaacttcaatagtcactggttcatgattggacagataaaatttagcttgtccaaggtacaccttgggcttgaaaattcctgcttttgctcttgtcaccattgaatgagtaattggaggtgctggttactctgtttggacaggatcagatgactgggtgaggcactccctggactcacagattcattaacagactgtgcaatagtaggtagatcaaattgaaaattattactgacctggttg

SEQ ID NO: 64619 - DNA, 744 bp, Cannabis sativa
aagaaagtcaaacataatttgtgggataattcttctaaataaaaagatctccataagaatgtcacagtaatggaaggttaattgtctcccgaaagtgtcttcatggataactaatttgtctatatccaaaagaagtctcgtggaatgatagttgccatctggaagggtgttcccaaatgtctatcatgtccactccaggtgtagtcttcaggaaaactaactttcctccggaaaggagttttggatagctagttgttcttcctggaagggtgttctggatagtcgactccaactggctcttttcttatccagaagtccattcagcattcgcttatgtctgttatccaggaagcatgtgtctcatccggaagcaccttgtattgtgtagatgtggagattttgttacaaagagtttattaagtttgttaagtcgtaactaacttaacagcttaacagttaaaaccactatcttaggatctttatcttgagcctatatataccaccaacacttttcatttcaagtacgttgaattgacaagctccaagaggagactttgagtttgagagagaaagataatgaaagctgtagagagaggtacaaagaaaagagagagattgggcttgggttttgtatgaagaatcctttgtagatgaagaagattcttgggcaagagtaagagacttgaaacatcttgaagagatccaacaaagaatctgtctcgattgtattgtacatgttcttgg

SEQ ID NO: 64620 - DNA, 1171 bp, Cannabis sativa
atcccacttgaccttccccaagcagtgtgggattgcacagcttacccggtgtttcgggactactgactgtcacattagtcatattgggagggccacatatcgctggagaaagtagcaatacccaaaagagatatgtcaaggaaattaagaacgggcgatcaactttcgctctagaaccgtcaaagaaagctaaggctaaggaacctcaaattatgtttatggaggaagacacaaagcacgtgaggtacccacacatcgacccactcatgattacaatccagctcgccaacaaaagaataaaaggggtgttggtggataattggagctcagtgaatatcctttataaggatacactaaagaaaatgggattacaaaatgcgaagttaaaaccttgcatggtgaatttgtgcagattcactagggacagtgtcgccagtcaaggaattatcgaactcccgttaactctgagcgagccacctatatccaaaatgttgatgcaagactttctagttgttgacttaccattggcctacaacatattgttgggtcgtcatgcactaattggactacgggcagttagttcaattaaacacctgtctttaaggtttcaaacataggcaggagtaaatgtagtgcgaggtgaccaactactggcacgagaatgctatcacatagagctacaaaataaaaaagttggtcatcaactaattgtagttacaactgaggaaggcgagaagcaggacgaggatatggatcctcaagttcaagatgaaaagaataaatttaaaccaatcgaggaattggatggagttattttagatctagaaaatcccataaagtgtgtattcattgggaaaaatatggatgaaaaactaaaatagcaactaataagttttctaaaggaaaaccaagattagtttgcctggagccactcagatatgatagggattgaccctaaagttatttctcaccacttgaatattgacctaaattacccagctaagagacagaaaagccgaccgttggattctgaaaggcaagaggcactcatagaggaagtggataagttgttaaccaatgactttatacgcgaggcattttacctctcatggatatctaatcttgtccttgtcccaaaaccaaatggaacttggagaacttgtatcgaatt

SEQ ID NO: 64621 - DNA, 667 bp, Cannabis sativa
aaatttaaagtattatttatttttcacagttaactagtaacttaaattatttatgtggatactcttgtacacgtgatacgtttatattgatacacttaatattattatataaaactgtctaaatttaaaattagagggttaaaaatataagtaaaactataattggagaattgagccgccaaaagctcttttgagaacaaatactgaactatttcactcattgtcaattaattttgaaacgaaaattttccatacacctcactctatcctacattcaaccaaacttactcatagccaattctttatatattagattattaatataattatttcagcaaaacacaccactaaaaatgctatgctgttcgtaaatcctattgattatataagaatttatatccttgagaatcaaatattatcataattgatttagaataatgaattatttaatttgataatcatataggtggagatgtcgggattgctaaagctgaaccttcaaaaaaaaaaaattatcttaatttatcccaacagcatagttgttcagcggccatattttctcccaattatgtctaggaacgcgtctacataggtagcaacttttgagtacttactaatcattcattaaatgctataataaagacacaaaataaaagtacaaaaacat

SEQ ID NO: 64622 - DNA, 744 bp, Cannabis sativa
cttgcctctttttaaagccctttgttgcgttgcctctcaaggcctgtgcagtcttagggatactcttcacacctttccctcttccagcctttctagtttgcataggtgtcttcacattcttaattggttcgggcaccttgcatgaaatgggtgctcgatcaatagaggatgctgccaagaagcagttctttttccctccttgggcagaagaggttgttggtaacttgtggaagtaaactgtgacttatgatgccatttttccttgaaaatggtaaacatgattagcaccataaaattgaagttaaataatagtcatcatagttggagatgaaaaggagaatgggtcccaccgggcgtgccaaaaattatgttaagcaaaaattttgcatttaaaatattaaaaataaatacaaaacacaatttctcctatgccaaatttattgtataagagtttattcgtttaagttcgacccatccaagattataaagaataacctcttaattacaattattttatttaaaggagataccctttgatttcaattacaatgatattagatgattaaaataatttggggaaattttggagtgaatttttaattgcagttgaactcagtcaatttaattaaccgagctgcctacataccttctttatgaaggatcaagccacttgtagttcaggatgtggtattttaaaatttgaatatagaattccagtatatgaccattttcaagaattctatg

SEQ ID NO: 64623 - DNA, 1380 bp, Cannabis sativa
aaatgtctaactctgacagggtggccctgtgttttctctttattttgaaacattaatggtccttattcctatcgtgtactagggttggaaggccatttcagtctggtcatgcttgtcatgataagcttcaacaattaaaaatttattcaaaaagacaaattatgattgtgtcattatcatatttgttgctttattggtatggagttccttttcttttgtccttcacttgaactttctttgtgctagctgtaatacaaatttatttctgtatgatcatgaagaaaataacataacatcatatatgttgtgcatggaagtaaactctacgcaaccgattgatgggacgagttccaaagtagttattcatattaattcaggatacttttcttcatccaatttcatatgtattattcgatgatgattgaatagcctcattcgctggaaaaagattattatattttccaattaaagatggccgagttatatacttcatagttcatatggaacttgtttggtacgccgtataagaatcgtattgtatttaataataagtaacgctatatttagataaaacaatgtattgtatttattattacgactaaatttttaatacaatgtatattgtattatttaatacataataaatagtctgtattagcttgtattataatatttacaaaagatttggggtcaacaccaatctccgacccggacccggacccggacccgggtgacccagactcgaactcggacccggacccggacccgggattcgaaacccagacctagacccggacccggacccgtgtattaaaaatatattataactttacacaatcaattaatacaagttaatactaaacatttgtattgtattaaataatactaatacaatacaatccaacacaatacaatataatatattacaatatgatgttttgattaagaaatctaactaacctatgattttataagaacacaaatatgggtaccttttgaatggtacttgttcttataatttactatgatggttacattattacaacatatcaaattattagataaattaatatatatatagaattgaattaatcatagttaaccatgtacttaaaattataaagtatttttaaatagaatatttaacgaaaactaattaacaattataattaaatttatttttaaaataaaattaatcttaattattagaaaagaaaatatattaatataaatgaaaccaaatgatcatatgttagtaggtaatacgttattaattagttttagttagttaaaatttagttgcaacctaataattatgatccaatgacatgactaaaacttatgtaatcattataattatatatattttctataatatat

SEQ ID NO: 64624 - DNA, 985 bp, Cannabis sativa
  modified_base (923)..(947): a, c, t, g, unknown or other
taaatttgcagcagcaggtaaattcgctggagcactagattttacaaattttgtttttccagaacttttagtaccatttgatccaagaccagcatagcctctttgcctttattcagaacttcctcaaaaatagaagacccagggttaatcatttgaataatttcttgaaattttcaacgtccttctttaatagaataatttcctcatcttttaaacaaaatcaatctcatattctttaattttcaattcaagagattcagtttgatgagacaattgtttatttatttttgacaataatctattttcagaagtaacctgtatccacttttcatacataactttgtaagactcagccagtgactccacacagatttcagattcatcagattcataattttctttttcaatggtattattcaaacataccaatctttctttcacatgtgaatcacaaacaaacttagaagaaacatggattagtgcaacatttttagaaatttcttcattacaatcaatttcatcatcactccatgtgacattgaaacttttcttattctttttcagtgtatttgcacattcagattgaatatgcccaaatccttcacattccctgcattgaattctctttttattagtcatagaggatttaaaagatgcatttccttttgaaaatttcgatttattctttttattattcgtctttttcatatatttttttaaaactcttggttaataaaaaaaattcatcatcacattcatcatcaaaaatttcattatcagcaacttttaaagcgatacttttacctttatcggcaatggatttgagtttgtccttttgtttgatttgttaattcaattcaaaagtacgcaaggaacccattaatttttccatttccaatgtgctaaaatctttagcttcctcnnnnnnnnnnnnnnnnnnnnnnnnnctctctggaagaattctaacaatttttctcacaagaac

SEQ ID NO: 64625 - DNA, 614 bp, Cannabis sativa
  modified_base (28)..(30): a, c, t, g, unknown or other
agcttcctataaatgatatttcaataannnaatataattactgaaataagagctcttccatatatctctattaagccatgctcgaagagaatcattatttcacttttatgtcaagaaagaagttatagattccatatgattagtgctctcactcaattgtactaccatgttcctaagatgtaagcattgagccgattcaattggtcatctttaatgaacaactcaaagaacacgaacaacacaattgaaatcgaacctgaccatctcaggattattgatctaagattaactacgtgatattgacttagaaatatataacggtaagtttatgatatctttaccaagttcaatattggtctagtccgatgcatactctatacattcgatactgtaacatactctatacattcgctgattatcacattagtataaatctagtacagatgaatcatgggacataagctttgaaatatataatcacaattacctttcactgtgatgacatcactgtaattgtgaacaacaatatgttttaaattaaattgtatattaaactataatcatgaaaataacatattaaattaaaaaaatttattcttctattgataacaaat

SEQ ID NO: 64626 - DNA, 1066 bp, Cannabis sativa
ggcataccatatttgcaaaccaatgctcaatatgtgcctatgaatttcagaatggtgagaaagtaagaatcaccaaatgtggtcattgttttcataacaaatgcacttgtgacatgattaagggaaagctctcccaatgccctatatgtagaatgtcattatttacttaaacaatttttattttaatgattaattaaaaagagtgtgtgtgttttttataataaccatttatgtatatgtgtgtaatattaattatatcaataaataattattattatttgtctcataagaatctcattagttattgctatttttttttaattagtaatatgatgcatgtgtgattattgctacctcattaattatggctatccatgcgaagggcatatcatatttgcaaacagggccgaccctgaaaatatatgggcccaagacgaattagattttgggccctcaaaatatataaaaaaaaaataatataaaagaatagtgttatgggatttgaacctatgaccttggacattatatcatcaatctcaaccaaataagctataaatatttgttgcatataatacacttaaattttaattaaataaaattctaataatttcttttttattttttatttttttattttgggcctccggaaagttggggccctaagcacgggcctagcccacctatgcctagggccgaccctgcaaatgatatccattctccaccaaataattctttaattaattattattagttacattatatctaagctgttaatttatagaatttaaggcatgcataatgcaataacagtaagagaattaacaaactatttagacctacttaattactttaattagttacttttaataacctttttagtcattcacatgaaagccttgtaaaatacaattacatatacattgtttgaaattcaagaaataattaattatgcttcttaatccattaagaacacaaaactctaaaaataattaaacctaaaattgagagaggaatgattaaaattacaaaacagtcgactaaaggttgattccatgccattatcaac

SEQ ID NO: 64627 - DNA, 936 bp, Cannabis sativa
  modified_base (200)..(202): a, c, t, g, unknown or other
atatataatgtaattagattagatcaatttttaattagattttgaaaatgactttaataatcaatctaatctaatttaattgtaattagatatttatttttttgtaattgaatagatactacaaaaaactgctacttttactgacaacaaaaagttacttgtgactaaaacatagtatttaattagttacaagttgtcannnatttagttttagtcacaatatttacatttagtcataacaaattgtaatttttgtgactaatatttttagctacagactttttagtcacaacacaataatgataatttataattagccacaacttttttatctttaactacaaattttattataactaaaagtaaaaaattttgtaacgagagtttgatggattcaatttaattagattggattagatgttgtccacccttacatacacttacatataaaagaaagacggctaatacctcgtgcagtcacgtgagttcatctccttcaattaaaatcaataatttggctttttctctatttttattcaattattttattaaattaattagctgaatattctttttctttatctttttttagtcgtggtatatatgtgagagagaaaatgacatattcacattgccgactttcacttattcataaaaataataaataatttcaattttgtaaaataaataaataaataaataatttttttcttattttatgattataatatgttaaattagagtaatttatagcataaatatttaaatttaatacacgattgtaaataaatacttagatttaatttctagcgataattatacttaagttatatttttaaaacttcggtatatacgtacttcatgaccgttaaattttaagtcattattcacgtgttaattttttattagtatattcaaactattttttaaataaaa

SEQ ID NO: 64628 - DNA, 1034 bp, Cannabis sativa
cccttcttctttttgttcttggcatggagtatttgtctcgaatatttaagaagattggggaatggcaaggattcaaatttcatgacaggtgttcatccctcaaactgaatcacctctgttttgcagatgacttgttggtgttttgccatggggactttatttcagcaatgctcatgctcaaaggcctgaaacttttctcctcaacttctggtttggagcctaatgttcagaagacttcggtgtattattcagggatgccagagttggaggtactaaggattctagaagcattaaatttctctagaagcacactggcttttagatatttggggataccgatttgttctaaaaggctatctagagtggaatgccaagagcttctagaaaaaatgacaggaagaataagaatgtggagttctaggaacttgtcatacatggggagagcaacgttgataaactctgtacttttggctatccatacttattgggctcaaattttgatcttaccaaagaagttgctgaaagatattgaagctgtttgcagatcttttttatggaaagacacacaagagagctcaagtccaggattggctgctttggataatatttgtcaaacaaaaactgaaggaggtctcgggtttagaaacatcaaaaattagaatatagcagccatgggaaggtatgtttgggacattgcaagtaagaaagattgtttatttgttaaatggattcataatgtgtatttgaaagatggtagttggtgggattatgaaccacctttagattgttgctggtattggaggaaaattgtaggtgtgaagaataagttgaagcaaaggacatatgctgctggttttgtacagcagagatataaaattgaacatacctatcaacttctttttgacaacagggaacgactctcttggtccaagattgtttggaacaggttaatcattcccaagcacaagtttatctatggcttgtgttctggggaagattaaacaccaaagagaggataggtaaatacaacacaa

SEQ ID NO: 64629 - DNA, 939 bp, Cannabis sativa
aaagtaaaaaataccgcctggcagtatttttgtaaaaaaatggcaaaagttactatataatgtaaatttccctatatttttacacaataaaatttgtgacttatatatttgatggaatatgatcagacattaggacgaaaaatataaatatatagtagttaaaaagtaatgatgattaactattgcttgtaattaattataaatactttaaccttaattaatttgttggataggtgtttggtagtgttgcgaatttttgttataaaaaaaacgacaaatacttgatactaaattcatttcgaactaacagcacttatattgattgcataatgttgtattgtaattatcatttttttttaaaagaaaaaataacaaagtagatgaaatatataactttaaatatccccattttcgtgtaaaaataaatgtctattttttatataccaatgaaaagaaatggtataagaaatcctaataaaatttaaatcacatcatacataccaacattcctctatttattagaggaaaaagaaaaatttaaaaaaaaatgttgtcttaattatactaaggaaaaaaatttattgttccctaattaaacttccaacccaccccaaccaaaggaaaattggttaggtttattcaaatttaatgattaaatattcctataaattaccaatcatactatataaaaataaacctaactaaactacttttttttaatcaacaccacttcatgccttttttgagagaagttaaatagagttctcataactttttaatggaaagaaaaagaaaatattaaagtaagagttgcattatttacaagtaaagtaagatgatgaatctctgattccacaatttttttttaattttaattatttattttttgtttcacaaaattaaaagaagtattttttttgtgggcctttgttttgttga

SEQ ID NO: 64630 - DNA, 1548 bp, Cannabis sativa
tttttttttttttgatattaaaaattttaatgtttcgtttttttcttaggatagaccataattttttatagatgaagaatttttttactttttttttgttaaggatgttacttttgttattttataatatttaatttattgatttttttttttttaaaaaagtatttataattttcttaggtaagtataataaggttattttttgtgactacttaggtgactttagaatattttaagtttgaatctaatttgacattaaaaaatgattaacttctctcattactcttataacaagttacatatagtgtctacttttcatagagtatgaaatgatccataaccataattattggtaaaaattaattaaaaataaaatatagttaaaaccataccatgtgacacaattaaaatataattatcaataatattataaagtctaagtgggtcaagtgtgtgtgttaaatagatattttaaattatatgattcttttttttgttattatttttttttttgtcatttttctctcaagccaaaccaacaagttttgaccttatggaacatttgtgttatatatgggctatgcatgggacatattattataaataataaagctataaagaggttatatgtcaatttttaataacttttttggtttacttgtctaatccaaaagtcaaaatataatatgacatttttgtaggggtgacaaaaaaaatttaatttaagattagcttgtgtcataaatatttaaatttaattcacaattacaaataaatatttaaatttaatttttgacgataataatacctaagttatatttctaaaatttttgtagatacatgactgtttaagtattaagtaaattaccacttgacaatctctgattgatccacgttattaaaatgttatttttttaaaaaattattttaaatatactaataagaaaatgacacgttgataataatttaacatttaacaatgaggtacttatggagttacaaaatattattaccactaaaaattaaacatgtatttatttataattaagagttaaacttaggtatttataccataaattactctaattataacaatctatttttttttttaatgatagtatatattataattaaaaatatttgttacataaatatttatgtagtttatttttgttgtatttatattttcatgtaaattttttagtgataaaagttcttgtatagttattttgttgcacttaaatttacttaatttctatgttgtttattttgctgcaacttataatttgttttatttttcagtattataaattatttaaaattttatgaaatcgaatgaagtcatttctataactacaatatatgtaaatattttaaataaaaaattgagatgtgaaacttttttttttttttgacataatggcatgtgaaactttatcaatcccccaacctaagaatttcctatacttgtttttggaatttttacaaaagaatatctaaaactaaaatgatattttgttttaacattatttttactgaaaagtaact

SEQ ID NO: 64631 - DNA, 745 bp, Cannabis sativa
ttcaaggggaactccgagatcaaatttttgtttgtgttcttctttattttctgtagtgtttttcggtttctcttcactaaaccaacaaagatcattttagatctttgttgctactggttctttctctctctcggttttgtttgtgtgttttgcaggtgtgaactcggccataacagctactgttgtagctcgaagaagaaggagaaactaagtgtcacggctgggttgttgttgctgcaacaaggagaaagaaagcaagaaggtatcggctgggctgtagcaagaagaaaagaaggagaagaaggaaaacttggttgctgggttttttgtttggctggctgttcaaagaaaagagaagaaggagagaaggagagtgatagggccggctgctcttgctttgaagaaggaaataaatgtgctagggttttctaggaaaagaaaagaaagcttttatattaaataaaggcatcagatttttaaaaaaagaaaaatctgatattcaaaggggcatattcggttttgggaaggcatattccctttggatccgcaccaaagtaaaaagtcagaattgcccttgctttatagacgttggggtgttggagtgggggtagtttaggcatttcggctgccagctttttcccacatttacaaaccagaatcaaatcatctgcaaaccaaagacgaatcaatttcaaatccttgcacctatgatgaaaccgaaaccatcttggttgccacctttgcc

SEQ ID NO: 64632 - DNA, 601 bp, Cannabis sativa
acaaaatcacgtaaaaaaatttctctcatattataatatatttatataaaatatacagtatttactaaacattaattatcaactcccattcatgttaacaaaattttgagttaactgttttcattgatagtctttgataattaaactctaaaacacatctccctacccagacacaaaagtttccattatgaataatgcaacccaagacattcttattgaacatgaagaaactattcatcgccctgaaaaggagccccaggggcctcaacttgcaggtaattaaaatacagaaataggtcctcctgaatgggactttgaaataactagtaacaaggaaaccattctaggaagaaggaatgaaaaggcatatgatcctactagacatgttcctttagtggaattagaaaattgccaacttcaacaaaggttgacagaatctaaccgaagaaatgttgaattggagcgtgagagttattgcaacacgtgcgaatgttaatggcagcttgtagaacaaactgagccccaataagacaaccacgaggaaggccttgcgaatcaagaaataggagggcaccaaacgtccctattgaagagaacaatg

SEQ ID NO: 64633 - DNA, 1248 bp, Cannabis sativa
tgatcaacaaaatcaaaaacagagccttcctcctccgtcattgtgattacacctttcattttgttggtaagaggatccatagtaaagataacaccaatcaaaaagagcagcaatggcgaaagatgtatgaaagaacagacagttacaggtaggaagtttacaaagatacccagaaaaagaataagatatggatgataaactgaaaaaaaccataaaggtacattaactgcctcagagcacaaaaaagcggcagacactcttactaatatattatttttaatgattataaaaggacattttaaattatttaaaagtatgtcattattaatatttgcctcagtggaaaaaatatatcttttttaatctattttaagtgtaaaacaaaaaaaaaagtgaagatttatttaattactataaataatttgatgcaatgttatattataaattatttttgttaatcctattttttttaatatatattatataattaaaaaaaattaaaaatagtatattttaaattctattcataattaaaaatctaatttgttttaatataaattttagaaaatgattaaaatcgcaacctaatccctagttaattaaataatatgcagttagtgaaattaatgttatctttgctattgttttgacagtgttataggaaaatgcttaagtgtagtcataaaaaatgtctatacgtacaattttttttttttttattatgtgtcactcttatatttaataccaatatttaattaattccttctatattataaattacttgttctaaacaaatatataaagaaagaaagttattaattatatatatgatatatccctaataactctaaaaaagattttttttaaaaaaaacaaaataataataactgcaaaaaaaaaaaaaaagttatcctaataaaaagcagtattatagatatcctttttgagagatttaagtgtcagaatttttatcaaaaataaaaaaaataaaaaaacttgatgacaaactttgtttgtttggtgacttctattgatgaagttaaaatgttttctttttcattagattattaacgattggagtttaaaaggaacacaattttataacaaattatccttgtcagacacaagtttcagcgagaagataaactatctcattacaagctataatgtatatctattaatgtaattgtggatcgtaatttatctttatttttttatttattattaaaaaatttatttagagttttt

SEQ ID NO: 64634 - DNA, 874 bp, Cannabis sativa
  modified_base (491)..(503): a, c, t, g, unknown or other
taaaataatcaaaatttaaaaaataagataaccaattaagcaaaatatcagattttatccattttcaagttcaaaaactactaatatgtaaaattagttaaaataaaattaattaattttaatcggatagttggatttgaaattttaaaaataaaaatctagataaaaattacacaaaatatttgaaattaattccatgaaatattatgaaaaaaataaaaaaaaaacaatttttttttgcattgagtgcggatgttatgtagtgcataccatctgggcgcataagcatagggggctggccgagaaacctcggctaagggggctacttgcagcctatttcgcggacagacggggcttcagacccgaccctgattgtgttcctggtgctgtctgaataaacgtactgaccgagtgacactcggttccgtacgcgcacgtgggtgtcaccaccccttagatatttttgattttttaaaaaatcataactaatnnnnnnnnnnnnnaaattaagttctgtaaaaaaaaagaattgcttaattttttccatactattcaaaaaaataataattctagattaaaattctaattatatacgtcaaaaatgtgcaaacatcaaagaatcatcaataaacacatagatcaacatgaatcacatccaaatcatacatacatcattttgagtctaaatttcttgaaagtaaatcaattaccatggctctaaggccagttgttagaatatattttaccaggagctagatttacaaacaactatatttttaacatcttaaacatgaacttttaaaacgatagaaaataaacacatcaaaggtatgagaaacctgacattggttgtagcaaaattaaatgactcctt

SEQ ID NO: 64635 - DNA, 1211 bp, Cannabis sativa
tattattatatattttttaaaataaaaatatgtgataaatgtatttttataattcttattagttaatttattatatttagccattttcataatttttaagaaagaaaaatttactaacttagtttctaaatttaaagtcgcatctcatcccttaattttttttggaaaaaaaatcacctgtcccatttttcctattccacttctgtccccactaattatcttttgccacatcatttaaaatgtcatatagacattaaacaaaccaccaaggcaccaaaatattgttaactccacttgttctcatttatatatattaaaataattattaattgtcagaactttaattctctttcttaattaatgttaattctctttctaaaacaaaacgttataataattttttatagtttattttttttattaaacagaatatttatttgattagaaacatacaatttttcttaagaaaaaaaaaacacatacaatttttttaaaaaattataccatgcagtaagattttaaaaaaaaaataaataaaacacatacagattttttatagttcatttttttttaaaaaaaaattactaattcaaaacatcaattaaattcaaatagctagtatttttggtatatatgtatatctttttctcaatagctatttgatctattttttttttttacaaaggtatttgaatgacctattgatatttcgaataacaaaaagtgttatttttttttaaaaaaaagtttgctttgttttatcactatttaattcattttctaaaaatttattaattctctgcaatatatattatatatgttaaattcaattaagaccgttaaatttaaatatacaagtttattgaacacaatatttagtaatttctaattagtaattttgattaaatactatttttttttgttagtatcatcatttttgccactgtagggttgtgtgggatttaattatagtttacaaaatataactaattagctactgaggttatttatacattataaatataaagatttgctaaaaaatgataaacaataaataatataataaattaaagggtatatatatatgttttaatttgttttttttttcaattaaatatttattttcttagaataaaaatataatatttatttaatcaaaattactaattacaaattatcaaatattatgttaattaaacttgtatatatat

SEQ ID NO: 64636 - DNA, 864 bp, Cannabis sativa
cattaatgaattaaaacaacaaattaaataaattcattataaaaagataactataaacaatcaaaccctaactgccctttcctatttcctctctcttcttcacgcccggctgtgttcttttatttcccctttgcaaaaaaaaaaaatgggcaaataaaattgggcttcacgcatgacgatctttacgcctatgtcattaacctatgagtatcaataaacattaaaagcaaatcagtataacaatttgatgatgtttcacaatcttgctgttatggcatggcagccgtacattatgtttacttctatgaaaaacaatgaaaaaaagataaaattactgtgatagatggcagtgttatttccttgatatattgctgaggaaagaaaatgaatttgcaaattagggttgaaaccaaatactcttcttctctacccatacaaagtgtcagatactgaaagttttagtgcagaaagtattgactttattgacataactatgatggtagcagtaatttgcaagttacaaagatatctctgtaacaacactgagaagaaatcatatttcttgaatggaatccattactatatcaaacaacacccaaagcattaaatttacgaaccaaaagcaaaatcagcaacattggacaaacccattaactaattaatcaatatatacacataagaatttcttcttcaccaccatcggtcgcccctcaggcctgcaaccaccgtcacgtcagtcacagaccactgctagcaaccaccgtctgaatcgcctgaaaaccttcgacccccaccagttaccttcgacttcgacccccaccagccaccttcgacccccaacttcgatcagccctagccctcttc

SEQ ID NO: 64637 - DNA, 1133 bp, Cannabis sativa
acaaaaatgcccctagggccacataacactcatctaggcattcaagggcaattatgtcattatcacataacacaccattcaattaattttcagattaatcacatattaataaaatgccaataaataatctcgaaaatgattttcggccccgaacccagttcggcctgaaattcccaattgtgactataccgcgtcgacctgtcaaaaaatacccgaaaaaggaaaagacaagtatactatataataatatagtctataagcacatcataatataaattctacaattttacccttctcgggtcaaaattactaaaatacccctagctcaccaacggggtcttaacatgtcatatatccaattaattcacatataatagattatataataatataattccataataatacacacttaactagttagggtttgctaatctattttcttaatcttagggtattacaccaatgaaggaggacgacagtacgagggaatctactggaaccgagtgtggacagtttttatgccctgtaggaagtaatactcgtccataaaattccctattttgctaacatcggagtccatagtacctttcagctatttctcgtccaattgggagaagtagaagtaccccgacctgctctacttaagagttaacttcagatcgaagagccagttggtgtcgtgcagagatggctcaccccatccttgagaagcatagaggatgaatagggtagataagtatttgatgccctttggtgtgaactgggtcgggcagagatgatagtagtccgcaatcctcttgaagtacggaagcaagggcagccttttaccctgcttagtatgggcacccgacaaggcatagtattcctgtcttgggctagttgcccggtgatttggagaaggaaaaaagcactcgacacctcccaggtatctgtccttctccaaactcctcatcttggctttggtaactatagatggaggagacacccaccgagctcctaaggcaccctgccttcttggaggaacagcttcagtgtactcctcagtcacgtagtcatcgccctataccaaaatgtcaccagcctcggacaccagttcccctacttcattgtaattgccaaagcgcaatggc

SEQ ID NO: 64638 - DNA, 836 bp, Cannabis sativa
atgcttatcaagtcgataaaggttgggggcatatggaggacctagatgaatgcttcaaaatcctccgtagctacaacatgaagctcaaacccagacaagagccaagcccttttagacatgaagtcggccccaaccatcaaggtagtacaagccaaacaaggatgcattattgcacttagcagatttgtgtccaagtctacaaaaaaatgtgtacccttcttcaacattcttagaggcaacataaaatttgagtggacaaaggaatgtgaaactgcattcaaagagttgaagaaacaaattggatttgccaccagtgttgcccaaaatccctaaacaaaaaagagctaggcatttacctaacaataacaaagcatgtaatgagtgctatcctcacaagaaaagaaggcgtagtacaacaccttgtatactacatcagcaagagactaatcgacgccgaaagttagtacccactaatggagatggtgactcacaacttgctccatgcctccaaaaagctaaggccatacttccaaacacaccctataaaggtgtacatcgatcaactgcagtagtaggttctatagaaacctaaagcatcatgccgaccactcaagtgaaccaccgagactcggccaatataaggccacctgtcaactaagcatggccaacaaaggccaaactctcacaagcttcatggctaatcatagaagcatttgtccctaaatctctcaaagtttgggagaaaagcagaagccagagaagaagcgagagcaagagcaaaataactcaaccgaagatgtgcattgaccacctgcccgaaataggcatggccccta

SEQ ID NO: 64639 - DNA, 1014 bp, Cannabis sativa
ataaatagagaaagagaaaaattgaagaaaagacgccttaatttggctaagagaaaaacaagaatgaaaagatagagatttacgaaaaataatcaaaatagtttaattcgttaaaaaaaataatgaggactaaactctgaacatcccactattaacagtcctattttaaatttgttaaaaaaaatgaatataaggtagctaaaagtagcaagtctttgtcaaatcgagaaattaatctaagatttttaggataattattccaactctacgtagtgtttaataataataaattttcaaatacatcaattgacaaagagattgctccttcgaatgggaatggaattgtagtaaagtaaacaatgactgagatccacgacaacatgtggtcaagtagggtaacaacatcatctttctcataattacaatgtattttcttttaaattttacttgtaataaaattattcttattttatttttctttttgtttttatatatctcaaatgaaattagcgtgtaataaaataaatcctttaaattatcactacataattttttttgcaccattttttctaaaatatctttaaactaattaaaaatatttaatcatatataaaataatataaatttcaggaaaattctaatacatccctttaaaaagatacaccaatacatctctatctattttaatattcgaaataattttttagtcaaattttttttttatggtcctgtgaattatagttatttaagacattcaacaaaattttaagaattttgaaaatgtttaacacgtcaaaaattgcgttcaaatagtatattgcacgcgtgactattttattttatactcgtgtaaatagactgtttggacattattttctgtattgtaaattatttcgaattttttaaaatttagtaggatatcatataaaaaaaaattagactaaaaaattcttttggatatcaaaacaagatgcatatcccgtttaatggtagaacaccctaaattttaatttg

SEQ ID NO: 64640 - DNA, 810 bp, Cannabis sativa
aaaaaatccaacaattttaatagttcaagggacatttttcacgactttaaaaattcagagagcatgagttggtatatgtcaaaattcgggagtaaaaatcttaattagccgaaaaattactatggttttagttatcccaaaactcagaaagtcaatatgtaagctaaatctactaatagactcaccaaattataagaacgaccggttttatccattcttataattcttttgaaaaaaggatactttgaatagaattggctagcctctttgtaagctttagtatctgtgtacttattatatggtccttcatgcctcctcctctttccctgcttcatcttcttcagtgtgtcatctttagtttctgcactaatcataaactttgctacataaaaaaaacagaagcaataaatttttaggattttttcatttatagtgtaagatcaaatttaattcacaaatatatatattattgtacaattgtaaacttctctcaaaaactcattatatttgctatgtagaattcaaatttcaaagaaagaacattttataaacccaaagttagggatcataacatgaaaagggtttcgaacatttaattacatttacagtttatgtgaaaaaaatttattattgtattctaatagcaaaaataatttaaaaatataaataacttaaaacaaaaaataaccttgaaacaatataaactcaaaatagaaacaactaatgggtgactattcactggttacatttttattgtaactatatggttacatttttctttgaccggtaataacaggttattaataggta

SEQ ID NO: 64641 - DNA, 1491 bp, Cannabis sativa
ggccaaatcaaccacaacacttttcacttccactgatgatgattttgatgatgataatgatgccatgatctccgtcgaagtggcttcgagtttggaagcatttcggcccaccagaatcagactcagacctttcgaggctagctcgaaagccagagccttgcctattccatccgtggctccggtgaccacggcccacgggccgtattcatccttgagattctttggggctctcaagaacgtaatccatacccacattacaaatttaattgagtaacttatcactttgatcaaccctagaccacttattgttactatcataagttcttggaactccatatagctatatgttgatgatctaaaagatgttaagctaaattgtacatttataatctaaattttccagtgctagcatatagttatatatctatgtctatatagcttgcctaacaagtaactaactactagtgcttaaacttttattatttgtgattaaaatatgtacttttttaactttttagttcttactaattaatttttttagattttactatatactttcttattgttattataataatagtcataatagtggggtttacagaatgaaacatttaaagctgatatcatatagctatatatatgtatacatttatacaataaaagtggttggttataacgaaaatttggtaactaattaatactgattaggtagtctaatataatacatattggcggttggctggaggtaatatgaaacggaatggaaatgaaacaattttcatttcattcatttgtttgattacatattaaagtattggaatatcattttaatagaatggtcctttcactattttggtggaatgactatttcattttaaaatagaaggaaagaccattctaatacaattttaaattttattctattccattcttattctactcttattccattctaatacattttaaattttattctaaactctttttaattaatacaaatataaaaagtagaatttatatggagtatgagttttttaaaccttttatgataaatatgggatacttaactatggaccttttatatggcttttttaaacttttggcatactctatgggattttaaagcccatacggctggaataattttgtaaaaagctcatattgtgtgttttgtagtttctttaggtcattttagtaattttaagtgtttaaattttttggtacagtttttttttaacataaccgtttatgttagaggggttttgcatgcaatcatcacgatttgatagttgcttccccattttatcttactttttcagtttccaattcatgcctatacactataaaccgcctataatattatatctctcgctctctttttttcatttcagctttcatttttttgcactttccttttcctctttctttttcctctcccgtttcgtctctgttgcttcttcttttttttttttttgtatccttacttttctg

SEQ ID NO: 64642 - DNA, 671 bp, Cannabis sativa
caatactttggagacaattttgtaaagcacattacacaacgatataggacgaagatcgagcatggattttgggttcttcttcttcggtacaagaacaatatttgtattgggaaggtttgcttcgaaatcaccagtagcaaaaaaatcaatcaccaatttcacaacgtccttaccaacaatgccccagaatttttggtaaaaaccaggactcattccatctggccccggagatttgtcagggtgcatctggaagagtgcatctttcacctcctcgtcgtcaattggagcaagcatttgttcattctgcaactgagatatagttcttggaatacaatcaacaacatcatcccattgtgtgatagaaggagtaaaaagattttgaaagtaagaaatcataacctcttgaattccactctcccaatcaattacttggccgaattcattctgaatagaacggatatggttgttgcgccgcctggtttttgctacagcatgaaagtattttgaattctgatccccttcttttagccatagttgttttgacctttgacgccaaaaaacctccttctgagtaaaagtttcaaacaagtgcttcttttcttcttgatacatttgaatagagcattcatcccttcttcttttcaagctttttaacttctttttactggctg

SEQ ID NO: 64643 - DNA, 1120 bp, Cannabis sativa
taattcaatgcatgtagagttagcaaaaaaaaaaaaaatcaatgcatgtatgggttctttagccactataaatgaattatgaatagatgaaatttgtttctatgaaataaagcaccctataataaacatatcttacgtacattatttctcaatctcaaaaatatactaatgattcatcttctacccataatacacatctctctctccttcgaacttatttatgagtttatattcaaaaactatcatctaatatttttttttaaatatctatggatattattttctaaaggacaaatctccacaaataactttatagagaaaaaaataggggaaagagagaggggaagcgaagaggaaagagagaaaaagagaagatcgaaaaactataaagaaaaaattaatgacatctaggtgggtatggtggttgttatcccatcctccatatgacaagatggagagagaaaattgggtgaaaaggagtgaatagttgtaagttgaatacttttggtagaaggtaatattagacttttttatttaagcttcattaatttttattacttctatttgagttgattagataatttttttactattgttaatctcaaaaagtgatcaaccgatagcagaattgtatagatctgatacttaccacgtgttacacggataaaatggaaaagtataacacacagatttattataaaggttcggctcccttgtgatagcggctaataactgtaaaaaccgcttaattttaatataaaaattagtagataattagggttttaattcagaaattagacgaagtataatgtttcgcatttcgagaaacatttgctgctaggctgtagatggattaacattagggcattttacaattttgtatacattatattaattaattgcaaaatatgtgcaaaaaaaaatattatcattttctcatatatttttatatacaattaaaaactttttttcaatttttttataatatatatggtaaaaattattgattattattgttgaccgaggttttcggcaactaataaaatacgaatataatagtgagctataagaaagcgagatgaagactttttacgtggttggggcgttaatgagcattagt

SEQ ID NO: 64644 - DNA, 1293 bp, Cannabis sativa
caactaacttaaattagaaaaaagccatagattaagtaaaatcataatttctccatatttatcaaactttaagaaaaaagtccatattttacataatttcctcatcaaaaaattgatttttaaaaaatatatgtattttttaaataatttttaaaaatactatttatctttatagtaagggctaatttttttttttttgcctatagcctatttcaattcagaaccgaccctgtacaagggtaaatgaaatttgcataagctatccttcaaaactcaaccatatagaattttgagcataaactatataaacatgtactcatttcttcattgtttttccaaaatccatcatatataatattaagttgtttagaaagacacatatgaaaattcaacaacttatttggaaattcgaaagtggtctctaagctttagacggatagttaaaaatatccaagtgctagtatacaagtaagggagagacgaaggcgctcaagtggatttttgggttgcgtcgatagtttgggaggagaagctcacatgggtttctagagagggcttgccgcttgtgagtaaggatattcatccaattcaatctgcacagtctgcaaaagtgcaaattggataaattattttgaatttgttaatttttttaattaaattatctaatatttattaaaaataatcacataactaatacaaaataaaataaattattattattttatatttacaagaataaattaaaataaataaaattgaaaaatactaattttatgaaaaaaaaataatatggataaattataaatatatttatacaataatatatattagatttttaaattataaattttttacattaaaatattaattttatatgtgaatcaaattccaatactcaggtccacacttggattggatgtgcaaattaaattagttgtgacttgtgagttcagaaagggatagagaatgagatatacgttagaaaggtatagagggggaaaattatagaagggatattttgatgagaaagaatagaacaatttgcggcgaaatctccttatgttttaatttttatacacttaattctcttatttttttttgtagcaaaactcccttatattttaatttttatacatttaactcccttatcttttttttgtgatggcaaaatctctttatgttttaatttttatacacttaacactcttatttttgtttttgtggcaaaactcctttatgtttatttttctttgcaaatttgacatgccagttaaatattaccgttaaatatca

SEQ ID NO: 64645 - DNA, 583 bp, Cannabis sativa
  modified_base (351)..(352): a, c, t, g, unknown or other
aaaatatattaaaaatatttaaataatataaaaaaatagaaaaatatgatgtaatttaaaattttgaggtaaaatagataaaataaaattttaataatacattctagaaattaaaagtaagaagcagttgagattgttcttataatacatgatttattcttaatcttgataaaaattctaagaattttctttttaagaaaatgtaaagagcaatttcatttacttaaaattcatatagtcatattagtacttgatactatttttaaaagggtaatatttgtagggacacgattttgtgctgagatatacttttacggaatgtattccgtgatgtacgacagccgttaaatnngagagttatttaatctgagggctggggttgatcaagggataattagggttaaaaaattataatgtatcttgagaccgatttaatgtaccacgaaatacattccgtgaaagtacattcacgggacaaaatcatgtccaatttttgtactagattgttaaataaatagtgagttaataaattttgatgggggatttgcattcatttggattcaggatttcttttttaacctta

SEQ ID NO: 64646 - DNA, 1191 bp, Cannabis sativa
tgatctacctcctatcaatacaccgacaacatcagccaactggggaataacgagcggccaggccttgcctagctagtacagggttggctggccatggatagttgctcagtataggattggccagctagaaccaacatccctacgtaggagtggctggccaaggcctgcaacacaacacagggttagccaacctctaccatacactctcccagagtatggctagacactggcacattcaagcatgtaacccttctaaggagggccaattagtcaagtctctacaacaacggatccctctgtgcaagcgtagttaaaccaagtaagggacatgatcaagggcctagcttgtcaaaaacctttagaccttgggctagatcgatcaaggggatcaccattcttgacatacttaaatccttggccctttcccaagttcaagatgtcgttatggaagatgtatactgggtgagaagacctactggcacacattaagtactttaagatgcagctcgatctctaaaagatcactggtgatgtatggtgtcacatattctcggcaaccttatcggaaatggcttagcaatggtacttcaaacttgctccaggaagattcaattcttagactgagttttcccaagaattttacacataattctcatcctcaaggctcataacattagagctagaagatcttatcaaagtcaaacaacaacaaggagaacctttgaaagattacattcagagcttcatggccgaggccaccatggtcaaaggccttacaaaagaggtctgatatacaaccatactgagggcatccttccattgagttactcttggaaagatatctacaagatctcaactaataacatgaaggagttccttgacagagatgacaacttcatgaaactagaagaaactgcccgataagtccaaacagggtaagtcaacagcaggcactcacaaggcatcctgcagccccatgactcgccaggagcacaagtaggaccagcaactctgcccgaacctctagtggcaagaacactatgagcaaccataacaacaacaactctggaagaaataatggcataaaggggaagtttaacacttctcccaccccacaaagatagaaggacaaggaggtgaagtatacatgcttcactctcctgacagagaaaccatagaccatcttcatgg

SEQ ID NO: 64647 - DNA, 907 bp, Cannabis sativa
  modified_base (183)..(184): a, c, t, g, unknown or other
aagacaataatagagtgtgcagtgataaaattagagaaaaattacaattttacaaacattgagtacttatgccacttacaaacataaaactttaagtacttatgccgctgtatatccattgaaatataacttttacattaacatggtcatttcatcacacactatatatatatatgtatatannttttttttttttgtaaaatgagtgatacaaagggtagtagttgacaaataaatgcaaattatataatttttactctttttacatcaatgaataatagaacaaaagatttttttataagaattaatatttttagttttattattttgatcactaaggtataaaaggtgaaaagtatataattttacatctatttgtcaactattatttattgtgtcactcatttcacaaaaaaattaaatagaatgtgatggataaatcatgttaatgtaaaaattatattttgagggacattactaacaagtcgtataacttagaggacacaacttagtagtgtaaaaaattgggtaaaaatactaattattcttgaattatttacaccacatactgaaatttttaactttttttttatttttttactgtggggtagaatttttttcaaaaatacagtgtaagtttaatactgtatactgtgttaagtttttactattgttatacggttattttttagttgttcacctattgtttttatttattccgtttagtgtttcactgttgttttataaaaacacaatatttttgaaaaaaattccgtgtaatagtatttttgtaaagttaaccaaaattctaatatttttgtagtttcccttattcttaataaaagtgaatattacataagacactatttttgaaaaataaaaattactttttaagtttaaagatttt

SEQ ID NO: 64648 - DNA, 1015 bp, Cannabis sativa
  modified_base (48)..(48): a, c, t, g, unknown or other
ttttgggaacatgatagtatgactaagtgggagcgctgaacataaatntggaatctatagcttctattggtagggatgaacatttggacccggaaacccgaaaatccgaccgcccgccccgacccgctgccgaaaaaaccaaaaaaaaaaacaaaactcggattgtcgggtcgggtctaacccgaaaatgtataaatcgggtatcgggttcgggttttgagaatactgctatataggattcgggtgtgaatccgagacccgaatactatataaactaaagaacaaaatatatatatataatttgatggtgacgtaggtgtgaattaatttttaggtaatgtttttgaaaatttatttatttattattggctttaagaaaaacgtgatacgtgatcagaatgggaattgggaagtagaaactcatgtggacagcagacccatactgaagtacaaacattaatacttataatattatatattttttaaatattattttatttttactactttatcagttaaaagttaaaaccaaaaaacaaaaactttaaaacctaaatcctatcgtatccctattctctccctttctcgtttcttccaaatcccagtaagtcgtatccctcattccctcgtcgaccctcatctcctctctctttctcagttgccggcgagttcatcacagcaggcggctcaatccaacgagttcttcttcttcttgtttcttgctttgatggttgtaattgtaaaaggttttgtttctttcattaaaacttttaatgaaattttcttctaaaaaaggattttatatgcattgtatatatataattgaaagtttgaaaggccaaaacttattttcaaggtggtcttcctgggcaatttttcccattttattatgagccaattttatttagtaggtcttttgatgttctattatcatcacacaactttaatttttgtgtatttaatttcaggtaaatcctaatggaatgaaattaaatggtatttttaaaaacaaaat

SEQ ID NO: 64649 - DNA, 954 bp, Cannabis sativa
taaatataaatatcattttaattagcggtttctataataacatgaatcatcatgtatatataagtttaaaaaccgcgcgaagcgcggttccgttctctagtaactcaatattatacaattatgacttacttttagagataggtagaatacaaggagagagaaacgagttttattgtaatttgtatgtcccctcaagaaaatttaggttagcaccgaatacaattatgcatgtcactagaatggaagaggctcttgatgatatcttatcaattaatgcacatattaattaagatattttagaaaacttctacaatatgcacactttaaaaatttttgatacttgagaaaattttttaatttaattttttttatagttatcgacaatatataattatttaagatttcattcataattttaagaaattcaaaaaaaataaaaaattaacacgctgaaaatagaattcaaacaacatattttatgcgagtataaaatagaatagtatcgcgagcaacagatactgtttgaactatattttcagtgtgttaaatttttcataatctctcaaaattttacagatatcttaaataattacaatgtaaacaattattatataaattggattaaaaattctctaagatcatgctaaatgagataagaagtgcatcaatagaacgttttatggggtgcattgtaaaagcaccaatatattaaattttgaagatataaaattttcctttaaaataatatcgtaaaaaaatagttcaaaatagaaatatcctaaataaaacactgtgactattaattgtaaatttaaaaacataataaacaaaaaaaaaattaatacccacacatatgattgaaaaattacacctcaaattattaactacaagtcattatttttttcacaaatgaaaaatttaatttgatttttaaaaatatataggaaaatttta

SEQ ID NO: 64650 - DNA, 624 bp, Cannabis sativa
atgtgtctttgcctcatgcattagctcaatcatgtacaatacatgagaattcatgtagctgcgagcagcatcatgtcttatttgattagattgctgcccaaacatagtctatagataattcattatttgagatgcattctccatgttctcatgcgtcttacgcagagcatcgtccatgcttactagcatgaaacatttgttcttgttgttggattgaattccagcattatatctatcccgaacattttttagggcattggcagcgagctcctcaagaagctcctcaattaggataaatgtgtgattctcacaaaccaacattaaattcatattcaattttcatttataaaagttatcactatttagtttttaaagtgctagtaaagtagtaagagaatttggcatagtggacaaactgaaataaataatgtaacataatgattatgcatgaataataaatattattttaaaattattgtaaatgcgatgcatgaacgcatacagctaaaacacataaaattttgtttaagttattccaccataaagctctttgacaattgatcgtcgccttagaatcagtatcaagtcaaatttattaagcctattatatatataatgtatata

SEQ ID NO: 64651 - DNA, 844 bp, Cannabis sativa
  modified_base (27)..(33): a, c, t, g, unknown or other
aaaatagattacattgaaatggagttnnnnnnngggcataaaacctaacaaaaggttgggggaatatggaggacagagatgaatgcttcaaaatcctctgcagctacaacatgaagctcaaacccagacaagatccaagtccttttggacatgaagtcacccacaaccatcaaaaaagtacaaagccaaacgggatgcattactgcactaaacaaatttgtgtccaagtctacaaataaatgtgtacccttcttcaacattctcaaaggcaaaaaattcaagtggacaaaggaatgtgaaaccacattccaggagcaaagaaataattggctctaccacttgtgttgcccaaatctctagacaaagaagagctaggtgtgtacctagcagtcacaaaacatgctgtgagtgttgtcctcataagagaagaaggtggagtacaacaccctgtatactacatcagcaagagacttatcgatgctgaaagttagtacccactcatggaaaagctgacccataacttgctcttggcttccagaaagttaacgccatacttctaggtacaccctataaaggtgtacactaatcaacagttgcagcaggttctacagaaacctaaagtatcaggctgaccactcaagtgaaccactgagactcggccaatataaggccacctctcaaccaagcgtggccaacaaaggccaaactctcaccaacttcatggctaatcatagaagcatatctccaaaaatctctcaaagttcgagagaaaagtagatgccaaagaagaagctgttgggctttgtgccctaaatcaaactctatttcaatgtaatcttttcta

SEQ ID NO: 64652 - DNA, 892 bp, Cannabis sativa
  modified_base (273)..(280): a, c, t, g, unknown or other
ttctgaactacaagtggcttgatccttcacaaagaaggtatgtaggcagctcggttaattagagttcagctacaattccaaattcacccaattttttctaaaattattatgattatttaatatcatcgtaattggaatcaaagggtatttcctttatatgaaaggattgtaattaagagattatttttataatcttggatgagtcaaacttaaattattaaactcttatggtataatttagcctaggtaaaattgtgttttgcatttattttnnnnnnnntaaatgtaaattttttgcttaacataatttttggcacgaccttttcatctcaaattatgatgactattatttaactttaattttatggtgctaatcatgtttaccgttttcagggaataatagcaccacaagtcacagtttacttccacaaactaccaacaacctcttctgcccaaggagggaaaaataaccgcttcttggcggcattctctatcgatcgagaacccatttcatgcagggtacccgaaccagtggagaatgtgaagacatcgataccagttagaaaggatggaagagggaaagatgtgaagagtattcttaagactgcgtaggccttgataggcaaggcaacaaagggcttcaaaaagaggcaagtctggttaatgaaaaggtctgcgacaaaggttgtgaagatagaagggaggccaacgaagattggtcccccgtaatgatccaaaaggaatgggggccgtgagtgtatcttgattggttccattcctactttcttgcccactgtcgcctcagtgatggttatctctgtggaggaaattgaggcaacaacgacttctcaaacttggagtggtaggaaggcaacaaaaggcaagaaaggga

SEQ ID NO: 64653 - DNA, 759 bp, Cannabis sativa
aattattaataaatttaatatatctttttacagttaattgtcagcataaactacttatgtatatatgtgacacgtttatattaatacatataatattattatttaaaaattataaataaattattttaaaatttataatatattttattttttatttttatgattttatttaattctaaaacaataatattatatgtaccaattaaatgtattatgtacacataagcaatctatagtgacagttaactagataatattttaaatttattaacagtttagtagtttgaaaagttttattgtcaaaatttgaactttaaaaattaaatacaaatgaaataatagttgagagaatttaactgtcaaaaactcatataagtagaaaaatttaattttttatgcatttattagattaaaattattttattaaacttaagttaatccatattggtaaaatatgttaacatttcataaaatccaattctacccctcccattccaaatacctaaccctttctcttcctcctttatcgctctcgctttctgaactcacctcaaggactcgacctacaatccactacccacaacatcagtcccttctctccacgaccaccgcgaccacagacctaatgacctacggacccaacgactcctacaacaatcacggcttcatcatcatcaatgttgttaaaggaataaattatatgattaatgtttgttatctgtgagtagatattaaatttaaggtcgaaaacgaccaaat

SEQ ID NO: 64654 - DNA, 632 bp, Cannabis sativa
gatgatgatttgttggtatattctatcacatcttctgtgtctaacacatgcgtctgccccctccactcactgtttcatgtcctacacttgtttattcgtcatcagatctagaccctagtgatgatcttcccattccactacgtaaatgtagacataaatgtacctaccctatttcttcttttatttcatattatttgtcctcgtcttcttgctcatccgttgcttctcttgattctatttagatacctaaaactattcgtgaagccctatctcatcttggttggattgttgcaaagatagaatagatgaatgctttagttgcgaatcgtacttgggacgtggttgctttacctttaggaaaacgggtcatagggtgcaaatgagtattcacggttaaagtcaatccatatagaacaattgctcgattaaaggcttgtcgtgttgctaaaggttatgctcaaacctataaagtcgactattgtgatactttttcttctagttctaaattgacatatgttcgactttttatttccatggcaattactcatcgttggcctttgcatcagcttgatattagaaatattttttttcatggagattttcaggatgaggtgtatatggagcaacctcct

SEQ ID NO: 64655 - DNA, 1309 bp, Cannabis sativa
tgtcttctctggtattggagttcttcgagctccattcatagccgcaaatttaggatccacaacgttcgatgaagtcaagggtgccttcttcgactttgatggtccgtgagctaccatcatcgccatacatcgagcaggcataatctacttcgatcagatttaacataacatcactgtcggcgagatcgacgaaaggcttctccattggcttcatgattctcacttgttcctcagaactaccaatgatattttcgacctccggcgaaataggcactgcctgagctaagggaaccagagttttctcaattgatgagtaatatagctcaactctaacatctaattcctctttgagatgcacttttattgcgttcaattgagcatctaagaaaccgatacgcaactccatagatttcaatgtggatctcacaaatccatgaagctcttcatcaaccattttgccgagctctcaatgaaagcatcaatgatagataatagtttctttgagataagaaaatccccaaatctattagaaagaataagtgtttgcattttgctctgtatcaatccttgaaaaagtgtgtttacaaacctggtgcattctataaagaaatactatttcctctatgtgaggtaaactgttcttaacttatcaagtggttccttaagctattatttttcttgttcgttttttgtttctgacaaaattattctcttcattgacagtcgaaaacgtgcaatctaagggaagctgttattattgggagcataatacaaaaagtttctattcctcttcttcattcaaggtttgtatagattttgtgttttcaaacatgtatagaagcatgtaatgcaagtaattttctaagcacactattgatgttttaaaacaatggtgacctcttatattagtgttggcgaaccatactttcctaatctttaggaatttatatcaacttgtgttttgtgatattattcgatattttaaacaagcttttatatgcttttgtagtgttgcattgttgaaacttactgatatagaatattgtggtacaacaaggtactccaatacattttacgcattatatgttagaacaaaagtattatatattctataagatgttatccatcaatgattgttgatttgaaatgtgttctacacccactcgccaactaatgatgaaatgtaacctatttgacgtttcaaattgctcgaaaaaatgtcttgacattgttgagttaaaatacttgcagttactttataaagctccttttggagaaaaagtatgctcttccatatcgggcacttgat

SEQ ID NO: 64656 - DNA, 882 bp, Cannabis sativa
agaagtgtgacggaaggtatttttaccgccaaaaatacgacttaggtatttatctgctactcgggagaaaacttaagtatttttgccgcaaattactccttaatatttaacgcttaggtacttacagagttaagtattataactgctaaaaattaaactttagtatttattttcaagtaaaagttaaacttaaatatttatgccacaaattactcttaaagataactatattattaaaaaatcaatattaacaaaaagaatcggtaaccatttatattttacaaaaagatcaagatccaattaatactttaatttgtacaatctcatatatatataatttttagttaaatcgaagctataaaatttgatcgattagcctataatatataacagtggctaattagttaatactatatatataagatgggtttaataaattcatttgactttgatcacacctttttattattatttgcttcgaactaaaaactatagtacgtggacttcacgtacgtatataatgactgcgtcatggtgagttttataataattaaggatgtctttcttaattaattaatttcacttggctcttgatccaatacattcatgcatgtgcatggatactaatctagtttttaattttaaaaaagactttaatcccattgtggaaatttctcttattatttgttttgtctaactaattattatttccctaattagtatcactcttaattagatttaccctaaccggccttatgcccgtaaaaataatcttcatgtgatggaagaacatataattacacttaggtagcgtttggttggatgtaatgaaatggaatggaaaggaaacaatttttatttcattcctttgtttggttgcat

SEQ ID NO: 64657 - DNA, 744 bp, Cannabis sativa
agatttaataagatttaatgaaattgggattaaaagttgcaataaaaacgtaacatctagtatataatccgtaaaataaataacatgtaatatttagtccgtcaaaaaaatgtagtatataggggttttatttgtccctataaaattataaatacacttcattttaataatttttagtttatattaaatataaatctataatttatactcatttttttttaaaattttttgtcatatccttaaaaaatatactttttttagtacacttacaaaatataatcataaaataaaaataaaatatattttaaatgttaaagcaaaaattttaaaataaaatattatatttttttaaaaaaatttaaaaaatacatacatgatttaaaaaaaatgtaaaaataaaataaatctagtactacgtttattaaaagaaaataaattctaaaaaagtgttaaaagtgatttttaaaaattaatttaaattaattattatttaatattagggtgcacttataattttataagtgcaaataaaatttcccataagtatataaaattaaaaaaattaaagtatttatatcacaaatatatcttattgggtgattctgcaatgcaccccttaaaagggatgtactgatacaccctttacttattttggcatcttgaaaaattttttagtctaatttttttttttcatattcatgtacgttatagttatttaagatatcctacaaaattttgagaaat

SEQ ID NO: 64658 - DNA, 824 bp, Cannabis sativa
taattattaaacggagtcaaaaaatcaattaaaaatcatagaaaaacagaaatttaattttaagcacgctggaaaaaaaatgatcggagccaccgcacgcacccccatgcaccgaggacgagagtgggcttcgctggatagtgtcttcttcttcctccagccgggttagaggcgagtcacgcgacccaatttcagaccagtcaggtctgatgtgaaaaaccagccaaaatcgatcgacggaaaatcaaggaaaatataggggttttgatcatgattggatttctagtcgatctacgctactaatttcgagtattaatggctaaaagattatatcgcgtggaaaaagcaatcaaaaattgaagagcataagaaaattgtttataataccaatttcggtcaaatcacaaaataaatcatttaagaacattaataaacaattgataatgagatattgataatcaatttcagatcaaaaacaataaaatcaaaaaacacaaaatataatttcataatataattatataaaccccaaaacattaaacttaaaattcttataatatactcaatgattttatacatataatatatcaactgaacgagaatttaacgataaataaaactcctaaagttttaagattcaataacaaaattttatcattaatttattacgaaaattaatatgtaactattgataattaacttatacgaattaattattcaaattagaggtcctaaatcatatacaaaaggcaatctgataccacatgttagataaattaacaataaatccaagatctatttgtatataatatagaacacgataa

SEQ ID NO: 64659 - DNA, 824 bp, Cannabis sativa
gatatatgggggccttatcatgttacttcccactctaatcacaaatattttcttaccttagtcgatgatcattcaagatttacttggatttatcttcttaaacaaaaatcaaatgttctctttattatacctaagtttatttcttatatacaaactcaatacaattgtgttttcaaacgtttcagatccgacaatgcacctgaactttctttcaaagatttgttctctaaacatggtattttacatgacttttcttgcattgaaactcctgaaaaaaaatgtcgttgctgaaagaaattatcaacacattttaaatgttgctagatccttgctttttcagtctaaagtttccatacaatattggagaaaatgtcttcttactgctgtttttttgatcaatcgcacacctacaccgaatctcaaaaacaaaacaccttatgagattttatttggtaaacaacctgattatgatggcttaagatgttttggatgccttgcctttgcctctaccattacttctcatagaactaagttcgagcctcgggcaaggacatgcgtgtttttgggatatccaaggggagttaaaggctatcggttatatgatctaaattcaaaacagatttttatttctagaaatgttgtttttcatgaacatgtatttccttttcacaaacttaacacaactagtcataatattgatccatttttgcctcttattctcccaaatgagcatataactaacacacatgttgatgattaccctatgcaacatcctagttctgtttcccctgatcctattctgcaggatactgcagcagaaacac

SEQ ID NO: 64660 - DNA, 937 bp, Cannabis sativa
ttatacttttcttaccttgagttctggttcaggtatgttggccgactttcttggagaacgatcgatgatcttgggccctatgtcataacaataataaactatttagtttttataagaaaacactggttaatagttgtaaaggacaacttagggtttcccactgaattccataatacaaatacactaaaatagacttatattttggctctaaaacatacatcatatcgtagagctcgttgcaagattcaaagcggtatataggatgtccaaaatggacacctaagtgaaaagttatggccaaaatacgaatagggattctcccaaaaataacaaaaacagttaaccgtttccttgcggggacgaaaaaatcgaatttcatcttctcgaaattctaccaaaatctaaccaatttattttaaacttcacagaacacttatataatacccatacaatattctctacatagcagaaatcaaaatcatgctcccaaataaaaagtgacattaaagctcaagctcaaagctccataactgaaaaaataaccttaactgtctccactcaacaattaactacatgattaaactctaaatcattttagaaatctactccccactcactcaacatttatttgtatagtctaactattacaacaccttaaatccaaaataatttcaaagataaaactgtacacttacttaccaaaaattcctagcttaactttcaaagtaatagcttcttttcaaattccaagctcaaagtatgaatattggtgaagaaaaggaaagaaaagatgattatggtgattgattggtcttggccgagcaagtagaagaaaaaagagaaatgaagtagctacttcatatatggcttatgctattaggctttctcgtatttagcctcggaaaataaatacaattatttcaagtgatgatgagga

SEQ ID NO: 64661 - DNA, 3741 bp, Cannabis sativa
cagtgttggttatgctcataacataattcctgtaaatttttaaaaaaattcgaatagtttatagtgccgaaaatacgtttaaagttttttaaaaatgtgtaataaattagaaaatcaagaactctatttttgacattgtaaactattcaaattttcaaaaatttacagggatgatactgtaacactaacgaatattgctatgaaaaaaattaaaatagaaatatttcagcatgtgatttcaggcgtggatgttgactaagagattgtaataggaggttgtaattagcattcctgaatatttgtactctttataggaatgtgtaattgtgcattgtaaaaacacccaaaaatgtctacaaatttagtacatgtgttgaacaccttgtattttcaataatactttttagtaccttattttaaaattatatatatttgtttgtactataaatttaaatatttttaataaaattttatcaatataatcacacagtgtaaaatattatgatttctgaattcaaatttaattatttgattacaaataagtgaaaacttatggttaaattgataaaattatattgattaaattttagtattatatatgtataatttaaaaatataaagtaccaattaaatattattaaaaacatatttttttttttaaaaaaaaaacaagagactaaataaatatattcccccatataaaaaggaaaattgaaaattgttccaccgcctaaaatcaaaatcacacactattataatcgaatcaacaaaaacgacactcaaattggatgtcaataggataaaacgacaacaacttcatcttctttatttataaccctttaattttatattaataataatattgagcacagcaaaacccagtcctttatataatggctttgactcagtgatagagagagaagagaccctttcgagttttattcatccattttcctctgacaaatcccaaaacccacattcaaacttaaccagaaaacgtaagaaaaagaagaaaaaaaaaactatagaagagacccctttttggggtttcgttttaatttttagagaatcgaacaatggaagattacatgaaagaatgtatgagaaagttggctttatggtatacaagaaccttcaaacccatcatgacccatgacgagttagaacccattatggccaccttaggcttcgtgggtctacctccgtcaacggcggcggtgggttccggtaatatttggaaggaatacgtctgctcagctggtcggtgggtcgctaataataactcggctgagccaccgccgaggcccaagttaccgtatccaaagattgatggtcttcatatctatacctatagagcttttacagaagccgtcaacttctacctcgagatgggtaacttctccgatctcttccatattaggtacccttttctatctctttctcttcttctttattgttattattattttaatattttaactaatatttattttgattttttttagtaatgggtttgttgtgtaggttatggtgggtaaattatacttttcttttttgtttttcatattattaatttgcttagtttgacttagttaatatatatgtatgtataaaaattagagaagggtgtgaaattctattgcttcatttagtgacatgaaaatagacccttttgagtatagagaattgttaaaatgtatttttggtgctaataatctttctagtgtcataatgttaatgttattggggtctcgtataatttaagaaaattattttcagaaaatatcgttaactagttgtgagacaacgactataaaaagtgctgagcaccattagtccacaagagttatgatttattggtattggtggtatgatagtgatggtgatagtgatagttgttatgcttatttttatacaaactagcataaaaaaacaaaaaacacatgatgaggagtattgattataacttttttttagagtttggagtattgataaaactttataaaattttaaatagtttacagtattaagaatatgtttaaagttttttaaacaataaattaaaatatcaacaacaaaataggtttgatgttataactataacgaaaataaaatattttggtatgtgttattggtcatggagattgaaataggaagttagcaataacactcatgtacataatgagattagaactaaatatttaagctaatataaaaaattacattttttttttgagatttgtcttttagatctttgaatggttttcttattaagaacttacaacagttgcactaacatgtttttgtcacttatttttgctcacaaatcattatgattatctttctacttttaaaaatgagatggttatagtgatctgatcacagattggcatcttttaattcctttgaataattttcttaaataaggtagcgacgattcaaacacgaatattcaatttttaaaaatggtattacactcgtcaaaagtggtcccaagttcgaatctccattctaaatttcaaaaaagaaactttatagatgacatgacactattacacaccctacacttgcaacatcaaccaatagctatagatgtttaatgaaagctaatttgtatccatttttgagtcaattcattccaatctttttatctcaacttttacagaactagtttgttctggcaaatggggtttcaaagttcaatttgtctagttgaatattgtttttaaactgtacacactgcaccaagttcattgtcactcaagtcgaaagatatttctcttttctttaataaaatcaccttataaaactgacaaagccaccaactttattgaagaatctttctctgatataataaacaaagaacaaaacagtttctgggttatgattctttgtgtgtgtgtgtgtgtcatgtgatggtttcaggggtatgccgctctctcgaagcttggaccgaaacaggaaatggcggaaaatggaagaagatgaaagtgtgtttgtgtacagagatggaaccatagatcaagcaacatataatctgtatcactttcctaagaacaacaccaccaccaacaacaacaacaatggaaatggagtcagtaatgagaacaagcccaagtctattggacttagaagcaagggaaataacagtcccaatagctgtgttgttccttggaaagatatagttccatgccagtagtaaaggttggagaaagtgtaagcaagaaaagaaaatgaaaaaatggaaaaaaagaaagaaaaaagaaaactttttgtttgattttttatagaagagaatctaaagaatcaataaaaatgttatttttaccatttggttgtggattgttttggaccttttggtggtggtactggtatatagtaatgggttttggaaacatgaatgaaatgaaagttttagtaggctagtatttttttcggttatatcgttatttgtgtaattaattatcgtgtcttatttaacttaagaaaataatttttagaaaatattgttaactaatcgtaaggcacctcttatagaaggtgttaggtactattagtgtccaatatcaatgctcatttttattttactttgaacttttacatgttataccatccattaacctttttatatattttttttatattatttaaataatatgtttataatacacaaataataaaatattatatattacataaaatttatttatttttacacacaagtaaataaaatatatcata

SEQ ID NO: 64662 - DNA, 5515 bp, Cannabis sativa
agttacaaacaatcaataactaaccaaaatgaatctttcttttcttgtgctagtaactcttcaaaagaaatgtcagagtattccgcatctgctgtttctatcaactcttcggattttgcttttagctccatgcgagcaccgatttccagcatctgtaatgcgaatacaaaagagaaggttaaatgcatatataacatgctatacagaaaaccacatgttatgatactctatcaacaagagtgaaaataataccttcttgtatgccggtgaaagtttgagctgttgttggagccaattgtaaacgaatgcatcctcttccagtctcttttgctctaattctagtttatatatctgaaatataatagcataaacttcttattgtgaaacaagatatacaataacatttcttaaggaccaaattcaaaacagttgttgcatgtacctgctgacgaagacgatcaaaggatgatcggtctgctttgcatagtaaagcctttgtaatagtgaatttacgctggatgagatcagcccttccatagaaaatgacattaagttagaactttagaagtcacattaggaaattaaaggggaaaaggtttgatttgtatgaagttccagaataatgagtttcaaaagaaataagttttaagagttgcaaatgagcgaaattaacactactcggtagaaaataatgaatttgtattggtgatataaaatatgtggatgaatttggcaatgaatagaataatggtatgtgtagtttacataaaaattgataactcaggttaaacaaaaaaaaccacaaagcttctttaaaagtagcatcacgacatacttgtgctgcatctcatttttagcttccaccaaacaattagcaaaatctcctatctgcattatgttgaaacactgaggattaaaaaaacattatatgcgaacccccaagaactaagtcaccgtagaaaatgaccatatgtactgtctaaacataaccataaattcataataggatagtgaaatgattactatcctccaaagattatatctttcattccatgttactatagataatataccagacttatttttttgaaacaacataacttaaaattttgtaaaaaaaaacttatttccaaagtcctataacaaatagatggctcttcattgcatggtttactggtgataaaattaagcatgaagagttagaaaatcaaaaatctcatctgttatccaagaatgacaagaacaccttaaattttatccagtccaatgttgcccaagaagcaaaatgccttaaagattttcatattacttttctcaagtttagcctaacatttcaagtacatttctataattaagcttgctaatcataggttctacatcagttccttacttaaatcttataatctctaggaggtaagagactctagaagttcccacagtagcaagaataatactgaaaccaatgaagactcttgattatgcccacctcaaattttttccaaatagtaaaatgctatcatcataacattagcaaatggctaaaatataataatgatcaatctcatatatttacttcttctttctcaggtgttttaacataaatggtcatagttaaagatgaatattttcaagacacgttaggatgtatatcaaatgtgtaaaacccacaaccattatcaaagaaagcgtagaatacaaaatcttttgtccaaacgaagatttaagactaaataaaacaaaaaatataccaacattttgcacatcaagggatatgaatgtaaaagaaaagcatgatattttggaagaagaagaaaaagaagaagcaagcacctgagccagtgtcaatcccttggattggtgacacttcataagttcatcatattgttgtttgatcttcctctgtgtaacactactcgacgatgtaaacgggtacaaacaaaccaaatcaggtttctcccgataacccaaacccaaatcgcttttctctaaatgagaaccatcttcttcaccattatcttcgcctttcgaattcgaacttttcttcttgctcctctttttcttcttcttccctctctgatctccaaccaacctacccttctccccatcaaaacccgacccgtcagaagccgggtcacaacgcttttcattctcaaacaagctctcccatttcggggaatcggagggtaaaatctcaagaagaagtgaacgagtcgaatgggtcaaatgggccgacttatcttcaggagtttgatgagtttcaccattagtctcagacaaggaagcttcatatcgtaaagggtcagtctggttcggtttcttctgggcttgctctgttttccttaaccatttgtagacagagaaagagaaaaggaagacagagaaagatgataagaagacgaagaagcaaaacgcgaacatgagtgtatgagatattttctggggttgatggagtttcgttattggaaaactagagaaaagattggatatatatatatgaacatgtagccgccattgaaacgcgtcatttagtttacagagattttctttctttctttctttgtttaatatcttttgatttatattactatttagtatttagaaatacaaacaaagggctttggctttgatagtgagtttgaagctatgtgagaaattatgttcccttctttgtactcactacactactttgctttcaaattttaaaagcttctaatttcatataatattaatacgtgtgtctttataattggatttaaatgaaagattatgtataagtgtgacactttactaactttatacttttatttattgaatattttatttaagtatagattacgtgggcaaaaaatgaaacaggtcaacttactagtttaattattattcttctctactgatatttgacattgttttcattttctttttataactgacatatagttttcaattgttgagaaagagaaaattaaatggtgtaaaatttgttccaaactcagatgtgtacggctaccatatttgtgttattgtgatttgtcccctactttaatgccgtgccgtataaagaggtactcttgaatttgaatgtgccacagagtaagaattcttcaaacattataatttgtacatttcaaaaaaaaaaaaaaacattataattcgtaggttttcttttagttcttattatcataatgtagttttaaaaaaaaacagcttcattaaaacttcaaaagtaaattcagtaggagaaacctcaagagaaaaaaagtgtcaaacaataacatgaatcattaagtctatctataaagcaaaaacaatacaattagagcgatcgagccaccaaatataattatcaatcagaaacaaaactaacttttcaaagtgtgagccacactgttaacaattctaggatagtacaaaaaagagatatgattaaaatattgacaataaagaatgatatctctaataatacaacttagataagactgatcaattttactgtgataaataacattaataacagtaagacaatcagactctaaaatcaccatttgatagccaagtaggacacagagtagatacctaacgcctcggcaacataaggagagaaacaaccattccaagcgcaagtactagaagctattacgagaccaaaatcatcacgaaatactgcctcaatcttagatttacccaactcaaaactcaaaccagcatcacgattgattttcaccacctcaaaaggtggtttggtccatttgacaactgactgattctcaagaagaatatcaaaacgagtgttacaactattggctgaatcaaaccgctttaagaatccatactccagtcaaacaaaatgtcatcatccacacaaacttattcatttacttatttattttgtggataccaaattttctaaaagtacatttcaaatatagtaatagacatagtatctaatgtagttggtcactgacaaaagctttcaaaccacattttggggtgagaaaactaaaaaactcataaaatataacttatccatccaataatacatcataggctactaataaacgacagaaaattaaataaatattagatactaaaataaaattcagaaattcatgacatctaaattaaagaatgtaataataaaatattgaactttaaattagcaactctactcttgttaagctttaaatgctaaaagtctacaagatatatataaataaatcctaacgaatccaatgatagatttagagcagtgatttttgtgcacatggtcagaacagagcatggttcttaatgggaaaaccaaagttcagattaaattaacactttttttctttctttaataaagctccaaggattcagttgttcatgataattaatgataaattatgactcttattttccacccacttgattcagattctagctaaaataagcaaaaacatttttttcttttaatccagaaaccatggcccctattttcaattaggttacaaaagtgtatttattatttctagttttacacattgatttaagctgtactgtgaggtaattgcatggaaacaatgcttttaaatcattacacctttaacaagaccaaagcttaccccaattttcaggagtacaagcatggcgtggcacatttaaaaaactaagtctaaaccagtaaaaaaaattgtacagtcatttcagcacttggaatattagacttcaattactttattcttaagaactggaaaagtcttcaaaagatcttaactttttttttttcctttggttactgataaatgagacttttcccaaaattatctagtcaacccttgcaaaaccaatagcaccataataagaattgataataaacttgaaattttctcattaaaatttgaaacatttctacaagaacaagcaatgaaacaattgctcccaacaagttacacaaaataaagaagagaaaccttaaccttaaacttactgctggaagccagaagcttccatatcatcaaattaaactagaaaaaaaaaatgtgcacatggactcccataagtgtcatctcaatgtgcaaactgaccccacaattctcttccccatcattgtataacatgcagggagccaattgaaacgagagctagttatgtacatattgcttaatcacaatcatcttgaagagctctttaggcattcaaccatgcggtgtgttgtatttttgttttgtacaacttcaccaaggagaaagccaatgaatggttgcagctgacttacatgtatagaatattaaacgtacccaaaaattaactgagattgctatatgcgagcatgaacgtgaacgaaaaacaatgcgagagagaccttttgctctcggatgtttagaatcaactgcaaacggcctccacggagagtttcttcattacactaggacatggatcacctccaaacatttctggtgctacagtaaccgagcacgagttctgaccaacacaaagctgcaggtaaaacaaacaatgtaagccggctgatgggaaa

SEQ ID NO: 64663 - DNA, 1418 bp, Cannabis sativa
gaagatcaagttttgattctcatttattttatcttaaattttaaacggtaaatcttagtgataattgttctctttgaagtatctttctactatattcatttggtaaaatcaaaacttactctttgatatcaatctttatcgataataattatgttttgttaattcgatattattgaatcttgaagtttgtaatgagcctttggttgtattaaacaaaattttgtaatcctattatgaaatattgatgatagtatagatgattttagcaaactcctattctcataagttttgttgacattattgtgtttccatttagaaattaatttttaatatcttaattttatatttgatttgtgtgttatttattgctaatagtgcttcgattgatatttaatattactaattgtagtatttaataaatattttaattttatcctacaaataagaaaaatattacaattagtcgcaataaattttcaatatatttatatatattttgaaaagagcttgaaataaatatatgatacttataatattaagcataaatatagacttttggaaggtcttgaaaattgaaactaataatatattttgtttaaaacctaaagacaaataaaattaaaccttgaaaagattgatgcataaatatatatgcccatacatgttttatttttatatttagaagatatggtatgagttatcaagttagtttatttgctttgaattgatagtacaaattatgtttattagatccatttggaatatcctattatataaatgtatgtatatggtcaagaaacattaattgaaatgtcatgattttccgacacttgcacgagaatttcaagtgattatattgtcatatacctaagatgacgaattcaattattcacaattaatgtatacacttattagatatttacggcaattttttttaatatttataattattacacctataattttaataaaaaatatgataaaaatattttattttacgattttgttatagtcatactattttttaactattaagtgctaattaaactagtttagtactagcttaagaaacacacgatgacatattttattagtttatttaatatgtggtctaataatatatcgccacatattcttgaattgacatttaatggtcaaaaaaatgtaggaatacaacaaaattgtaaaatagactatttttgccgctttttttttttaattagagtcctatatatgtttaataattataaatattaagagagtttcgccgtaaatatccttacagtacttatcaatatatgtatatataactaataaattaaattaaattgactcaagatttaaagtttgagggacataattttttttaggataagagcaaaaaaatatttaaaaagaaaaaaaatgtttgagattta

SEQ ID NO: 64664 - DNA, 850 bp, Cannabis sativa
  modified_base (181)..(187): a, c, t, g, unknown or other
atgtaaatactaggtaaatattaatagaatgcatgtatatacttatttatatatttagtttcatttatttaaataaattatatttcaattatataattagttttattttaatttatgaatgttattaaataagcaatattattttcataaaaagtattataaaaagaaatatatatatatnnnnnnntatatatatatatgtaaatactaggtaaatattaaatagaatgcatgtatacttgtttacatatttagtttaatttatttaaataatttatatttcaattatataattagttttattttaatttatgaatgttattaaataaacaatattattttcataaaaagtattataaaaagaaaattaaataaaaatgctatataaagtttcaagggaagtaaattagaggtgaaatattagcaacatgtatcaaaattaataacattaaaatttattttaagcctaattataccaatctatatataactcattgaagactattagaaactctaaaaagcacaatatacaaaatttcacattataaagctaaaaatgataaactatgtagcagcaatgataatataataactaaatttacttagccaaatacaatcctaaaacttaaaagcagagttaaacaacatgacactaaaacaccaccaatgtataagtagtaagagaaacaacataataaatctttaaagtgagaaatactgcatatatgtatagatatatttataaactagagaactaagccgcgcttcgcgcggtcttgtaattttttttaaaattcttttaattcattttttttgcttaatgtactaattcaattaattcaacttttat

SEQ ID NO: 64665 - DNA, 994 bp, Cannabis sativa
gtctcggcttcagggagtgaggcctctgctgcatgaaatgggatcttctgatgcgaggaatgaaggtcttctgcggcagagaatgaggtctatgcagcaaggatcttagagggacatcatactgagtcagtacatcaggttgaatccttttacttagagccggtatttttcgagctctcctgtctcctataatgaaccttgtattctttgtttaggaaaatggtaaaatggttttccccaggtggtacttttgtaaagacaagtttgcaaaccaacttagcttttttcttgtcttaaatgccttgtacatttatattcgaacttaatatatttgtgtttgcttgtgtttttattcacaatgtaaacaactatacattttgatcaaatgtagagtacttttagtctttccattgctcgtaattttcctatttaagtactcagtaatctactatgtgtgcgggcagtttattatctaccagaattttgattaacgagcagttatcaattctgcctcgcaggtgcagttataatttatcttaagcaatcttgaatatacttttaatgatctcgtcactttgtacatttttaattgcttatatgaatattttgattgtctattcatacattaggtttaagtacttttatcgagacatcttgatgtctctttaatactttcctatcttgcgcgaaccgttaatattcagctttgtacgcaagtttatgagttatatctcatttataacttttgattttcctttctcatcagacaggtttaaatcaaaaagttatgatggtttgatccccttctcgtcagaaaggtttgaccaaaaacttaaaagaaaatttaaagttgtgggtttgcattatatcatgtatttctaaatgaattcttattaatcatatacaaatgcctcttaagtaattttaaatagtaagactttgtaattacttaaataaaagaaatgattctctttattcatgactgaagtttaaa

SEQ ID NO: 64666 - DNA, 532 bp, Cannabis sativa
aacaataataaggattttcaatttggaaattaactattatatatcataataattaattaattcttatatgatttacttagcatttcacatgatacaacatagttacataggccaacttattaatccgaatttttatgaatttattattatgatttgagaggccggccaagctagataggtctgacaaaattattgtgataattttaacttttttaatcacaactttatgtttattgtgatgatataaattcatatttatattgaaaatgattcaaaaaaaaaaaaaattaattgaacaactaacctttatatagataaaaattaggagaattactcaatattatcttttaacttttttttaaaaaaaaaaaattaagttttaagttgttccatacggattttgattgcgatttaggttcccttccgtaaaaatgttaaaaaaattatttttaagtataaaaaataagaaaactcttaaaaattaatgatgaatctgttggatattatgttattcaaattatttttcttttat

SEQ ID NO: 64667 - DNA, 1194 bp, Cannabis sativa
  modified_base (203)..(209): a, c, t, g, unknown or other
aactttatacatttaatatttcacaatatatataaaaaaaaaaaaaagcttgttcttcaatcatttaatataatcatgaagagtctatcacaacatataatttacgaatttatattgcatagacaatcatacatattttttaaataataatttacttacatgtctttatttcttacaaagatctttgtcatatagtgcgcgcnnnnnnnaatttatatcactcaagacatgtattaaatttttttaaaatttttagataagacttatttcaaattctcactatattaagagccccaaataaataaatttttcttgcaatatttatgcgacgtttataaatcctcataaaatatattccatataataaaattttaattatattttctcaatatttaagccttatttcaattaatctcatgtcaatgcaagttttgtacaataattcattttgtgtacaaatacatatatgaaaaattctcgttagaaatatttatttgcacaccctacagatcttacttcactttatgcgagtaaacttgcctggactgtgtcataatattttggccaaaaattaaatgcatgtcgataattctcgacaaatctaataccatgatccttactatcttatgttagtttattgcatattcaaacattcaacatctattgtcgacaaaaatttcattatatgataattttttcccatattgatataacttatagagatctctttaaattatatatttttcaaatatatttatcctttataggtacctatatagaacaacttcagggattcaattataatcaaatatgttatgtctaacttctctagggagtcgcttgtagagtaccgtttttatcacggctatcatttttaaattatcaatactttataatattaaagtatcttcttagatacctctaggtttaacaacctcaggacaaatcaaatgaacatttataaataatttctacattgttcatttacgttttaggcgttttcaactcattctatctcaactttgaataatattgatttgaagttagtatatattattttgaactatatcgttcttatatactttgtgcaaggatcatttttaaaaaattattatcgatcccaactgcatttctcttccactgatcgagagaatttttaaaaattatgatatctaataatattaatatacctgt

SEQ ID NO: 64668 - DNA, 1297 bp, Cannabis sativa
ttttttttttggcaagttagatgcataaatattttttattttatggtgagatttatttacattcataaccgattgtctcacctttaagattcaattttattcatcttttctatgttagaaaagatgtattttcagcaggctttctcttgtatggaaacttcttgtaagagaaacaattttcttatagaaagttattttttaaaagaaactttgactatttctattttccttattaaattcgattgtgtcttgatacaataagattatacacactgtttatgccaggtatcaagacccaatacaagatcgaactcatttatggcaagtttccttttttggtctgatttgctgcgtcagaatccgattttgatgctacagatcaagtttttcttaggaaagttttgtatagttgtagatttgactttgtggctgtctctagggtttctatgctctataaatagaatctagagaccagccactcgaatttactcttctagttttcattttttgcatttttcttatttgtgagaagagagttctttttgtgagaacctagttgttcatctaggctcttgtgtttttcatatctgttcttactctgtcttagagtttgttagaacgacttgattaaacaagagagtggtcttcgggagaagacttgttcaagccttacttctggaggaagtaagcatgcacacttcaaagatgaagagagttcgctgtttgaaggtatttcagaagtcagattcataaagtgcattacaaagaattgcggcaataatttagagggagtctaaacttgtataagtcaattgtctttgtaattgttgatactttattaattaatttcattctttgggcgtggccccgtggactaggagtgttcaaaagaacattgataccacgtacaaatctcttgtgtcaagtgatttaatttcctgcaattatttttatattctatctgttatgttttgtcgctgcaaaactgatctttgccgtaacagagttacattctgcttctacagacgtatacagttttatatttttgtatatattactgacatttgcaaaaattcagtttttcaattggtatctctgagcgagacactaaactcttagtgtggtccttttaacgtttttcgtgtattttttttgtaaattgtcattttttttgcagcaggatgttcgatttctagacaacccttgctcaatgattctaattatcctgattggaaagtttgaatgagggctttcattaaatctcaagatgagagagagcttggaggatggttccatc

SEQ ID NO: 64669 - DNA, 1210 bp, Cannabis sativa
  modified_base (676)..(678): a, c, t, g, unknown or other
caaaaagcaaccttcactttttttatatactatgtgttcacttagattttcggtaaccgataaataagtcttttaataataaatgaactctaaaattaaataaataatattaataataataataataataataaatggcaagagggtttttaacatgattttgaagttaactcttcataatccacgagtctatcttattttgagatttaataaattgtatacaaaatacaagaaaatatttggtataattctctattttctcaaataggtcatcttttgttccttgggttttgtccctatatttataagagttttaggaagacaattattcccttgagatcttatctctgtaactgtttgtgaaacgtggacattctccacattttatatttacatcacatgggataattgtaaataattgcttaactgttctttatcattatctgtaaggagttatgctgattatgcctattcttctcgtaatgcaatctgctcaatatgctttactctgaagagggtttttaacacctaagtatattttaagtaatacttcttgtgtccttccataaatgttgagagtgaagaaaatgcaagacactatcacagtatcataattccgagatgaatcgtgttgggaatgtttattggaaacttattttaccaggatctaaatttnnnaacatgtatgttgattataattttataatctaacatcataaatatgaaattttaaaaacaataaataaacacataagagttatagaaaaccttacattaatggcagcaggataatatgactcatttcattcagatctctaaccctggattcctgtctttagtagatcattatcaagatcagaacttggatcttctcctcattcgtttgtgttcattatagtcttcctcactatgctaagtattattttgatatgtgtgggcaaactctcaacaccaaggagcacgaaatttcatgaagaaatctaagagaaaatagcctctgaatttttgaaaataaaagagaaaaagaagtgagatttttagggttttttagcttagaaaattatcatcagacaaagctttcttctctttctttttattggcttcacttagggttatgtttagatgagatgggcttaaaataaagacatgggttgaatcaactattagggcctaattacatatgggctttagagttagatttatgccactt

SEQ ID NO: 64670 - DNA, 1039 bp, Cannabis sativa
  modified_base (708)..(717): a, c, t, g, unknown or other
aagaaattttgtaagtaccacaaagatattggccatacaactctggagtgctggtttcttcaagatgagaatgaagaattaatcagacgagggaaattcagccaatataagaagaatggagaaaatcatcctcgagcggatcataacaatgatacgaatgatgtgagtggttttcaagcccctcgcgatattctgactatcataggaggaccacatgtcagtggagagactagaaaagcgcaggagcgctatgcaaaagaagcaaaagaaaaaccccttaccaatgtaaataatttgagtgaacgaccaaaaaagttattcaaaaaggaatgcgaggacattaccttcttggaaaacgacacgagattggtacatcatccacacgccgatgccctagtggtgatcgctaatatcggaggggataatgtacatcgtgtcttagttgataatggaagttctatcaacctcataaatttacaggcttttaaaaaaaatggcgttacatgaaaaggacttgcgaccaatgacctcgagtatttatggtttcactagggatacaatcgcattgaaagggatgataaaattaccaataattctagggattgcacacccgtcactgccaagtcaatggccgatttcacagtaattgatcaacactctacttataatgcgatgatatgtagtcctattctaaaggaaatgaagatnnnnnnnnnnatctatcatcttaccatgaaattccctacccctcgggtgtgggatcagtgcgatcagtccagtcgaactcaagagaatgctataatactgtgttgaaagttgcaaaaaagaaaaaattggtaaatgtcatctatttcctcgaggctcctccccttcgacatgaattttttaaaatcgagaaaatactgcatatatagaaacccgatctggatccttggatccttaactacaccaacgttgtaaaagccgcggaaaagacaattgaggtacctattgattcttctgataattctaaagtgctaaaaattggttctaaactaac

SEQ ID NO: 64671 - DNA, 805 bp, Cannabis sativa
ttttttaatgctaattttactttatattctgttgtttctcgacgtgtacttgcttatccatatactttaatttcgaacggagtttttattttttatattgtacttgctgactgtcctattatggttttcgtgctttatgtattatcgcaccgaatggacttatacacgcctttcgtgaaaatgtcttttatgttgccttttgtgaaaggtctttgtattgcctttcataaaaggtctttttattgccttccgtaaaaggtcttttttgttgcctttcgtaaaaggtctttgttccttttgtgtttgacttagacgatactttccgaattccccccattttttatttattttaaagagaaaattcgatgacggtttccatggactttgaagtccctagcttttagtttatacatagaatttcttgaggtaccttgcattctagcttcttgtgatcttggttccgtccatggtggacaacctgtacgccccatttcccgtcgggcttatcactcggtacgacccttcccgctcgggtttcttcggtgttctgaaaaacttttcgcaggacttgttcccctgggaggaaattctttggccttactttcttattgtattgttttgccaccgtggaatagtaattctgcattcgggacaaggcgcgctcccttctttcttcgacgtcgtcagctgcttgtagtcttagagaagtgttgtcttcgttacttaactcggatcgcaaagtaggtacttgcgtttccgtcgggataactgcctccatcccgtatacaagtgagaacggggtctc

SEQ ID NO: 64672 - DNA, 1196 bp, Cannabis sativa
  modified_base (39)..(61): a, c, t, g, unknown or other
attatttaatacaatacaatatttggtattgacttgtannnnnnnnnnnnnnnnnnnnnnnatatattttcaatacactcgactcgaacaccaactatgggtcagccggttaggtacgggtctgaatcctaggtcccgggtccaggtcccagtcccggtcctagccccggtccaagtctgagttcgggtctggatccaggtctaggtctgggtccgggtcttgggtctgggtccccgggtccaggtttgggtccgtgtccaagtcccgatcccgttttgtgtttggatttaggttcaagtacgagtttgggtttgggtcccgtgtcccaggttcgagtcccagtctagctccagggtctagggttcgggtctaggtttgaagtctgagttcgggtctgggtcccaagtttgggttcgggttcgggtcccgggtctaggtctgggtcggagattgggattgatcccaaatcttttgtaaatattataatacaaactaatacggaccacttgttatgtattaaataatacaacatacattgtattgaaaattttcatcataataattaatacaatacattactttatccaaacatagtagtgttgtttattatttaaatcaatacgacgcttatacggcgtaccaaacgagccctaatattgcaacatagaaaaataaaaaaaattgtaatgtagaaaatgaacgacattaataaattgtaggaaaatttttgtagtacactcctagtggatgtttagtagacttttccaatttgtttccatatgtaagaaagttttttagtctatttttttcataatcgcgtacgttgtagctatttaggattatctctaaatttttaaaaaaatcgaaatagttacagtaccaaaaaataaggttcaaatagttacttaccacacatataagaaaaaatagttgagtgcgtaacaaaatatttagaccttattatcaacattgtaaattattcataatttttttaaaatttaaaagtagtcctaaataactataacgtacacaatcatgaaaaaaaaataattggactaaaacgttttttaccatgccgaaatagataagagtttactaaaacaccatttaaggaattgtaatgtagacttatcctaaccatatttgtaatatgtaatatgaatttaattatgcatactaaactatcctctatgta

SEQ ID NO: 64673 - DNA, 1554 bp, Cannabis sativa
  modified_base (1307)..(1310): a, c, t, g, unknown or other
cactaccacccctaccataaccaggggtaggaggagtaggggctccaccaacaacctaagtccctcaagactcttgggtgcacttaactgtgtcctcagctcttagtggctttcctaccatatcagcataggtgggtttgtcatcagtggtaatcataaggtcgtgttttatatttggattaaatccatctaggtacttttctttcttactaaagtcggttgtcacaattcccgaggccaacctagccaaccgatcaaactgagttgtgtactcagtaacgctcatattctctttctgggtcagttggataaattcctttctctttgcacttttaactgcctcattgtagtacttgacattaaacaactgttggaactcttcccaagtaacagtggtaacatcccaagtcaaggacaccatgtcccaccaaactagggcttcctcttggaattggaatgtggcataggctactttgtcattaccgatgacacccataaaatttgagattcttataataattgtcagccgatgttcgactttcatcacatgaggacctcccaaaaagactggaggtgcttgcatgtagaaccttttgtacagcagtttcatccaattcactccagcaattggccctgcctacacagcagggacaggagccacctgcatctttggagcatgcattgcaagagcaccctgccgcctcaggtgtctgatttctttgtcttgctcattgatcctggcttgcattgctgcaaatctattttcccattcctgggcagcctacggcaggttaacatctccctgactgcatgccctgcctcgagggcctctacctcgaccacgaacatttggggggaatctgaactccctgacagccactagattcgaccgagttaccttggatcctagtgtttcacctgacgtctattttaatagaatagcatgcgaaaccaagaactagcctagtcagattgcgttcaagaataatttactaactattgcttattttggaaattaaaacatgcccctattcaactatcaaaacatctccctgctttagctcaaaatttagattgccttaacaaaccaaactcaagttcttgttttattgaacttagacacaaattgtgtacagaatctaaagttgcactcagtttaaagggggttatcaaagatactaatcaattagttaactgtgttagttaacaactattagttgagtggttgttagaataggttagagagttaattataagctactttttgtagctgattagagtagctaagggcccgtttggcacagctnnnngaaaagctaaaagctgcttttcaataaagctgtgacaaaaaggtgtttggtaaacagttaaaaaacagcttattaaagaatttatggaaaagctacagctggcacaacccaacttttagaaaaagttgttttgattaaaagactctataataaattattttaactaaaaatatttttaattatttattatatgttataaaaaataaaaatatttttaaataattaatatttaaatttctaattt

SEQ ID NO: 64674 - DNA, 1257 bp, Cannabis sativa
aagcaacccaaaccgctcaaaaaaacgcataaaattgcaccctaaaaaccgcgcaatctaaacttttattgggcaggtatgggttgtgatttaaaaaactgccaaaaaaaaaccgccaaactgcccaaaaaccgcccaacccaacccatgtacagccctactcgatggcaaacaaacaaaagatcactttctatcctcaaagaaaaatgacagtaagcatgcaaataaaacaacatacgacagtggtcatcagacacccccctttggggaagcgccaccatgacattcgcctaaccaccgtatcacagaaatcaaacgcaaccaaacgagaatatcaccattcttattttgccctaacatgcagaaaaagcagaaaaaatatgaacagaaacatacacaaaagtggtaaggaagaggcagacggcgtctgatggtagaactttgtctgacaacggtggaggaacagcagaagatagtcggaggtgtttagaatttttttcgaatgtgttggctggtttgaaaatcgcaaggtggtggtgaaagtaacccaacaaaggaaagtgctagcttttataggccagaaggggtgcaagacagctgtgatcagacaccatcgtgcggtaagaatttgtagcgattcaaattctgtgatggatgggatgaaaaagtgtgaagaggggaaaggacgttcgaaacgtttgagtacctctctaacatcggtattaatgcaaaggtctatcaatggacgggaagcgaattgttgcctccaaaaggaaataaaaatccatgatgacgatcataaatgtgactcacgcgctaggggcacgtgccactatatttattaaggaccaaaggccgcatacaagtctcatttacctgttactaaataagacttggagggtaaatgttgccccaggtttttcccaaaatatgtggccacggctacgtatgacacgtggaccaaaaggacacctcacccaagaattagttaagacgtatacggacaaacaagtgtagttcggggagtgagcccctggagaagtacaaaaagcatgtccttcctctctgggagctagaaatatgataaagcatctccgggagcggaggacataatcgaacaatcaccttgcattcaatgcagcatgggaaaagtgtttgcgaacgcccataagaggacatgtcagacaacgtaagcctcgtttacggcgattacacaataatcgaaggggctaatgacgactccattatgaagaatca

SEQ ID NO: 64675 - DNA, 1785 bp, Cannabis sativa
gtgaacaaaatgtgttcaaagagatatcttatattggccgcaacatggaggtgtatgtgaacgaccaacttgtcaagtccaaaaaggctgggggcacgtggtggacttagacgaatgcttcaaaaatcctccacagctacaacatgaggcttaaccccctcaaatattctttcgaagtaggcttaggtaaattccttggtttcatagtcaatgccaagagaatagaagcaaatcagtatcaaagtacaacactggacgaccaacctctccttgaggcttccatggccatctagcccctcaaagatacatccatggccggttagccccatgcaataaattccctagtcgactagcttacaaaagtgccagaaaatgaacaaagctaaaattataacttaccaaagaaagatcctgaaggccagtggagtggagcatgtctggctcgacatcaccaagctccttgagttcctcatccatgaaagaaaaagctctctctaggcgtctatgggctacttccatagccctctgcccagcacctgaacctaatccttggctgggcctctgggcaccctagctcgtaggccatcccctcctagcaggagcaccatcaatcacggactgcctagctggtgcagaccctagtggaggaggaggcagagaggatttaacagcatctccgccacgagaggttcgggccaccttggccctcagtcaacccgaaggctcatcaaaaggtcccccagcatggcctttcaacctaaaagacatatctgcaaaaaaaaaaaatagcaaagtcagaaagcaagtcataaatattcaatgcaaaccagaatgtgaaagatggtgctatcaactatcaaataccatcatcctcagaagaggaactatcagaatgctcaaaaaccaccttgcccttgcctctagacttaggtaggggtgagtagaaccctcagaagtctggcctccaagcctgatctagagagaagcatcaccaactaaacccccactgccaagcgttggtagaaggccctctctctcctctccaaattttgagctatacgagaaaaaggtacatcatcgtccaagtcaggaacttgtccatctctaggacaagctccctctacaaatagggttcccacaactctaggagcaggagggtacaaaccatacttctggaagttagccacattagttaacctgagtatgtttatattctccaccgaaaaagacaagatgtccttcgcctctccctcatctgcaatgtggggatagagcgtttgaagaatggtacccactagaacttgtagtgttcaatcctctaaatgcccccaagcaataaagtacttcttggcgtactcaccaacttttgacatggctacgctattggtgtcacctaaccactggtggctgacctgactaaagtagaagtacccagtcctattttgcttaggagtagacttcaaatcaaaataatatccgatctcataagaagtaggctgaggccagcctagctccctatataaaataaacatcgctgaaaggtacttgatactttttggagtgatttgtgttggacacatacggaaggaagcaataatgtctcagaagtatggatgaagcgacaacactgctccctgctcaatatgatgttctgaccaagccaaccaaccaaggggaagccggtgcgcacggtaatctctaggaggtatctcacaatggacactcattactaaaccactagcaagtaccttgctaaaagcatcattagaaagggtaaaagcaaga

SEQ ID NO: 64676 - DNA, 1477 bp, Cannabis sativa
  modified_base (1197)..(1200): a, c, t, g, unknown or other
  modified_base (1381)..(1384): a, c, t, g, unknown or other
tgttgttattttgatgttatttagatgttattttcatgttactttatgtaaaaaaatttattgttttcgtattgtttttatggaaaactgtaaaaatgtaaaaaaaaaattttaaacgtgaaaatataattttttttataaaaaattgtgtcttatgtaattatccgggtaactataattgacccattttttgtatttgtgctctaatgcacaaggtgcaaatatatatatggaagagatttcaatggttacatttttattgtaacaatcattgttacatttttattataatcatcatggttacatttttttaaactattggatgactattaaatagttgtgattaatttagaaattaaataaaaataaataagagaaatttgcggctaaacccctttatgtttcagtttgtatatacataaccccctattttttttttggtggtgaaaccccctttagtttagttgtgtttggaaacttaaaattacagttaaatttttcagttaagtgccaattaagacgccaactaagactaccactatgtacatctatgtacacattgcatattcttattggtaccaaaatttttaattattttaataacttttaagtattataaaattacaaaaacaattgaaaaaaaatatgttcgtatcagatttttttttctttttataattaacttctttttgttctccattaaaaaaaaaaaacttctttttcttttcttcaacatcaccaccatgactaaatcatcacctttagcattatcgtgacacactacctccagtacaacagcagcaacaatccacattttatttctaaaattctctgagattcaaatacaaatgaaaactaaaatcttaaatctcatatccaaagacaatctcaaatctaaaatttaagatcacaaagtaagacaaaagaaaaaaaaaatccaattcaaaatctcaaatatttcaaatcaaagaagacaaaaaaatatccaatcctgaatctcaaatctcaaatgcaaagcaaaaaaaaaaaaaaaagaagaaagaaaaccaatctcagatctcaaacaataaatgaagaaagaaataaaaaataataataaaaaaaaggcaattaggatttttactccctgaattttgacacgtaccaaatcatgccccctgaacttctaggtcattgaaaatgccccctgaactattnnnnttgttggatttaaggacttttttctaattttagtaaaaaagtcgaacatggatgaaagttcagagggcataatttagtacatgtcaaagttcgaaggacataaattggtagatatcaaagtctggggaacatggtttagtacataaacaatcattgaaattgtaaaattgaataaaattannnnaaagtccttaaatccaacaatcttaatagttcaggggcattttcaatgaccttaatagttcagaaggcctgatttgatacatgtcaaagttca

SEQ ID NO: 64677 - DNA, 985 bp, Cannabis sativa
gttatttaggcaggaggccctgtgtacgacataccgaaaggacgaaaggacggaaggatatccaaaatagaagagaccatcaagctgccgtttccctccatgaatgcctcagagctcatcagagtatttcggcagcacggcttaactgaccaagatatggttgctctctctggtcagcattatatatttataataataataataaaatatatcattccatcaagatagggttgagagagaaccggaggttggggactcgggatgttggggggttcgtggggttcgtggggttcgcgagaccacaggtggggtcggtatccaccgtctgcggccggaaacggtgcgtcgaggctggacagagagatcgcgcgaaggacaacaagcggagcattccgcccctgattcgcaggccgccgagaagagagggaagatggaaacggagctgcggtaatctcgggatgctacgttgtggctggtggccggagacgacccaagtgagctgagcaggagggctacgcgaagaaggagagcgagagactagagagtaaaaggcggaacgaaggggagagagaaagcagtttaggagacttcattttttttacaaaccctaatcttttaaattaggtttaaattaggtcacatagtcggcttggttttttttttaacaacagcttagttttttttttttttgaacaatagatgcttagatttaaatagagtaatttgcggcataaatacttgagtttatctttcaattgcaatttaatacctaagttaaaatttttgtagcataaataccttctgttacactttgagacattctgtaggtaccttgctgttatcttgtacaatggacaccagatggcatgactcgtcatttaaaatgggaaatttgacaatacatgcttaaaaatagcatgtgttgttttaatatgctagccaaaaaatagtaaaaaaaataacctccaattaagattaatcccaa

SEQ ID NO: 64678 - DNA, 1014 bp, Cannabis sativa
tgaatatgttgtttttatatattgtgggatcgtatactactatttattttgatctgaaatggtagttatttcgttgggctcagatttaaaatggccgaatatatcgaaaatttgattttttttttaatttttttactctttcaagaattgtgcaaaaccatcgacaattcttcctattattgccgacgaattttaactgtcagtaaatctcgttaccgactattttccacggatgcctattacagtcctagttcctaggggtgaagatcgaacagatggaccgagtttagggttagtgaattttaggttaacaggtttcaagtgaaaaaagtgaactcgcatcagcccgttcacgtgtggcgggctgcgggttggcaagtttgcgggtccaaattgggcgggttgatcaggtcaacaaattagacatacataaatataaacatacaactaaacttgaaacacttacctaattatatataaatatataattaaaccattagatttaataaaatatatagacatataaattttcaatactatggtttataatattttatgaataattaatattcttatattagaggtccaatgtatgtgttaggtttttattagcactatttttaggttgattttagtgtatttttaaacaaatttttctctagttttgtacaattttacgtttttggtagatgttatattaaaggtttaaaatagaatctaaatggagcaatattgaaaaaatatgagaacatggtcaaacaaataacctctcggggcaagagcatttgaaaattaattcgaggaaaaaattcagaaattttggtgcgattggagctcttgaggtgaagaaattacaaaacttggtggagcgcctcaacactaaaaatccatgccaaggaattaagggctaaaaatgggcagagaaggtcgaactggaccaaggcatgggcgtgccttagtgttgatgcaaaagctcgtaaaaagtctgttgcccaaatttaggggggttatgcc

SEQ ID NO: 64679 - DNA, 3290 bp, Cannabis sativa
ggttcaataaggtgatgttaagtgaataaagtcatgtcttttgacatgtgtgctgtctctctatgattgagagtttcgaatgtttgtgtgtattagtcattgctgattttgtctttgtgtatcggatttgtcctattagagagttttgttttatccactatggcctcaagcagtgaaactatgaaagacgttgaaaaacaatggtcaaacatttgtttagatgaagaggaagagtttgtcacagagttagaagaagatgcttcggatgaggttgaatacgacgatcgatggtgtcttattgggaaacttctttctgggaaaatctcagattatcaagtattccaaaacatcattgctgatctatggaaaccaggaaaagggatgtatgttaaaattcttgaacagaatcggttcttattccaattctaccatgaaatcgatatcgatagagttatcactggtagtccttggacttatgatcgcaagcaattgcttatcgagcgcttaaggcctggcgataatccaagaaccaaaccgattcatcacctcgatctgtgggtccagattcataacttacaacctggattcaaaacagataatgtcgttcgtcaggctgcaaaatacatgggatccttccttgagactgatcccaataatttcaaaggcgtatggcgagagtatttaagagttcgggttcggatgaatattgatctaccattaaaaagacgaatgaaattcagaagagttggaggagaaacattctatgccaatttcaagtatgaaagagtccccactttctgcttcatatgtggtataatgggacactcagaacgcttctgcaaaaagctctatgaactcccagcagaccgcattgataaaccgtatagcattgaaatgaaagctccctccaggcgccagaatttcttggtcgcgtctccatggctgcgttctgcaaaacagcatgttcagtccggtgatgtcgacggcgaaggcagtgatcgtggtgctggtgtctctccacaatccaaggaagctttcaattcagtatccaatcacggcaaatctgtgtattcagattatagtatgccagctaatcatttgcataataatagggatgctgatatcactatagtcaatggtgttaatggagataaaggtccttcaattgttatcaatgataacgattctacatttatgtctgatgatgaacttaccatattggatcttaaaaggaaaagaggagagagggattccattgcaaactcacttgtagcagattcggctgacatggaacaaatcaatgtgatacatactggtatttctgctgagataaaagaattgccaaaaaacgatgttatggtgggctctggtgtccaggcccaccgcccattatgaatactcttagttggaattgccgtgggcttgggaacccacgggctattcaattcctcacagacatttgtgtccaaaagaaacccaatttccttttcttatgtgagactttgagtaaaaaagacgtaatggatcgtattaaaaacaagttgggctttgacaattgttttgttgttgaagcccaagggaggaaaggtggccttgcccttctttggaaaaattctgatgatgcccatcttcttggatactcggacaaccacattgatattgaaatccatacttctggttctgcacgatggagactcactggcttttatggtgaaccgaacagatcccttcgtgatagaacctggcaactcctcaaatctattgctccctcttcgtccctaccttggtgtatcataggagatttcaacaacattgcttctcaagatgaaaaacaaggtggccgatcttatccttcatatctgcttactggttttcaagatgttattcgtcactgctgcctctttgatttgaagcttcatggttatgcttttacctgggaacgtgggagaggtactgatcatcatgtcgaaatcaggttagataaggctcttgtaactcaacattggcttgatcttttcccgaatgccattttatcaaattgtgatttttcttcaagtgaccatacgcctatctttctgcaacccgaaaccagtagctgtgtcaaccaactcaagctttttcgatacgaaaatgcctggagccgtgagccatattgtcaacaaatcgtgaaaagttgttgggaagagcatgctaattgtactctgcttgataaaattaagcattgcagtaaggctttgactggttgggggttcgaactgactggaaatttcaaacaaaggctgaagagaagtaaaaaacgtatggctgatatgaaaaattcaaccatccattcgaatactgctgagtttgatgaggagaaaaacaattactttgagattttggcacagcaagaactctattggaaacaaagatctaagcaacactggcttcactcgggagacaaaaatagtaaatatttccatgcctctgccagtactaggaagcggggtaatcaaattctgagattaaaagattcgaatgatgattggaaggactgggattcaggtctgaattcggttattgttgattatttttctaatctttttactgctgctgggactacttgcaacagtgtggtggaaaacattcgatgctctgtcacccgtgaacaaaatgatgagctactcagtcctatttctgtggaggaaatcaagcatgctctctttcaaatgcatcccgataaggctcctggaccggatggtatgggaccgggcttttatcagcatcattgggatattgtaagtaccgatttgattgcattagtatctgacttcttcaatactggtacttttcctagtgagtataacactaccaatttggttctcattcccaaaaagaagaatttttctaccatgggagacttgcgccctattgccttatgtaatgtagcctacaagataagtgctaaagtccttgccaaccgaatgcgtcctttgatcggtgatgttatctcagaaactcagagtgccttcatacctggtagactcatttccgataatatcatggtagcttttgaagtcatgcactatcttaagcgaaaacgtagaggtaaaaaaggattcatggcccttaagcttgatatgagtaaagcttatgaccgtgttgaatgggactatttgcgtgcagttatgcttcgtatggggtttgctgagagatgggtgaaccttgttatggaatgtgttactacggtcacctattctattgttcataacaaccactccatgggtcctatcattccaacaagaggtatc

SEQ ID NO: 64680 - DNA, 627 bp, Cannabis sativa
atttataactgacccaaattggaatttaattttttaataataaattagaagttattcttaaatagagtattcttagatagaggttccactgtactaataattataccatataaaaaatgaatttattagtatatataactaaattgagacaatatttatctataattacaactgtaataaaagtgttaataattttgtgagagttctatttacacttgataaaataataagtatatacctcattattaaaagagaaatttgcggcaaaagttctcaaaaaattcagtttgatacagataagtccccaacctcgaaaaatagttgtaatagtcctcaaggtcatgttttccatttgtccgttactcttaattttaactgagctgtttattttttcaaaattgtcacgtgtcgaaatattcttattaatttttccggtgattttactggcggcaataccaatttcgacgactattccgaagtttgctatcggtgccagaaaattaaccggagtagctgctggtgtcgaaaaatttgccggagttactgccggcgtcgaaaaagtcatcaaaattggcattgtcgccagcaaaattaccaagaaagtagtttcttcaccaagaaagtggt

SEQ ID NO: 64681 - DNA, 1256 bp, Cannabis sativa
tcaattgcaattttaaagttatcgacttcaaattgactctaagggagttatgaatttaagatacaacttacttggagtgaatcctgctattgggactcgaaattcgaaaattgacgatcaatttcaaaaattaatttttattgtttagatcatcatctacgatcaaaaataaccaacatgtatttttctatatttttttgattattttattcctatttaataggacttccttcacctataaaaagagagctgctctagtttagttttcatattcagaaaaacagccataaggttagaaaagtagatcaaagcatctttttttaatttttctctgtagaaattattgtttcaatatagggaattaattactataaatttttgtctagatttctaagtcattagagtgggattcaaaaataattttatgttttttaaaatttcaaaggtgggagtctacataaaaaaaaaaaatgacattttagaaacactacaaacaatgacatttttagaaacaaatttaatttttcaaaactcaaaaacactacaaacaatgacatttttagaaacaaattttaacatacaaaattcaattttttttatttccaaaactctttttgaaaacaaaatatttgaatcataaaacaatcaaccctttaacgatctctctgccaaacaagccagtattgctccttaacaagccatagaattatacgctcaagtcaggttatcaactagccaagtctactcataaagcatccgtccccaattcctcccaatctaccaaatggcagaagtctttgtgaaatctcaagatccccctaaaaatcaaacactttgtttaccatgtatgtaataacttggtgtcaacaaattcaaatcttaatatctgcggtcttcaaatcaacccaacatgtcctcaatgttaacaaggtctaaaaactctacttcatgcatcgttcagttttaagggtgttaagaagctctggttaggtacacatttcaaatccttgctttacaagacaatctttttcagcttttgacactatattactaataaaatcccaaagtgcaggaacatgaattcaatattttcctctgtatgttatggaagatctgaaataaccgaaatgtaacagttttcaatggccaaagtcaagaacacccaattaaaagaggaggcacaattttaccaccaataccaattggtgcagggagtactagaaacacaaaataaccacagaccagttgaaccagtc

SEQ ID NO: 64682 - DNA, 725 bp, Cannabis sativa
tccaaccccagttcttgggtctgggtctaggtccgggtctcggtcttggtttaggtcccaggtcacatgtcccagtctgggtccaagtctcgatatgggttcaggatgagtttgggtttaggtttgggtcctgttacagtcccaggtcagggttctcgtcccagtcctggtttgattctgattctgtgtccaagattgggtctggatcccagttcggggatgggtctgggtcctggattccaacactgattatgggtcatgttgaagactctagttcagattcagatctcggtcttggatctcagtcttgctctagttcgggtcccgggtcccgggccgagtcctaagttttagtttgggtccgagtttggggttgtgtcctggtagtgaggtcctgggttccaagtctaaggttgggtcctgtgtctcgagtctagggtcaaattttgggtctcagaccccggttcttcggcccagtattgggtccaagtcccccatctaggttcagatcctttgtccaagtcttggtccaggttcgggtttggggccaaagtcccccatctaggtcacggttcagttcttaggtcccaggtttgagtcttgggtctcgggtctcggtctcggttctcgggtcccggtcccaatccaagttctggtcctagtggaggttcagggctcggtcctagtctatgtctgggtcccagtcctgatctcggtccgggtct

SEQ ID NO: 64683 - DNA, 975 bp, Cannabis sativa
aattctgcaaaatcgtatttttgttgtttttaatcgtatttttgttgttttttttgttatttttgttgttttttttgttgttttttgttgttttttttgttgtttttgtgttttttttgttgtttttgtgcatttgtgaaattaacccttaaaaataaccttcttacccaccttaacccctagccaagcattatgagcctataaagtcatattgatctttaaattatgtgtgatttaattagtagagaatgagtttaataattaagcctatggagtagaatttcgttgaaatacacatgtatttagaaatgagtattagtggttgcatgcataagttgatttagatattagtaatgacatgattgaattaagcacacagatacaaaaaaaaaaaaaaaattgatcttgaaaagttattatcctatattgaaattctaaagagtgtggaattaaaaatctttatagtattatctatttgactaatttttaagactaaatttactgtcgatgaagctattgtttgattttcttttcttgttgagtcatttacgtgtgtttaatttagttagtgtttgctaagggactaacaaaatctaactgtggaggaatttaataagagccttttagactctaaaattgttgattattctatagttagaggatgttgatacttagcaattttagtatttttcgtcagtttttggaattcttcgagttttggaagaaaattaatttttatgagtaaaaaagtgatggatttaatattttttatggtgatgttggtagattgattgacgtaccaaaacaacatttttatagaatttcagaagtccatgaggagcaaaaccgtgagttatcgctgcagtaagggtggaagcatgcagaaaaaacataaaaaaattggggcatcagacttgcttgtcgcggcgaggactctgtcgccgcagcgagcaacctcatggccgcgacgagggg

SEQ ID NO: 64684 - DNA, 887 bp, Cannabis sativa
acacacacacacacacacacacatgtccattgccctctctttaaacttgagatttatcttgattcccactttgtaaccttaagagagctatctcagatcccacctatagtgatctgaatagtgttatctctcagtatcaatacaactaaaaggggagtaggtcattacctgctaacgaatggggacgaaccactataaatttcttgtgttcttttactttttagttcttattgtgtaacacctgtcaagcattagtgttaatacgaccccactgttagttggctaaatctaaggtcaagagtttggtactttcatggagagcgagttgatatcatatatgataaaatgtcatgattaacacgagaagaactctagtcgcaccatctgcatcattgggtctttctcaagaccctctgattgcagatgagatctgtgttccacacacgactggaattctatgaacactacaaatgtggtcgatcctgccatctcaataggcacctcgaatctggccactacagttggccaaagtgacacaaacatcctggtggatcttaaaaattggccattgcctccaagggaggaccctctgctgacgcctcccattggaggaaggacccttgggcattatccgctgttatacccaaaattcggctatcatttcaaaggagaacacatgtcaaaataggaggaatacgaatcaatgaatgtaacggtaattatatttgaaaatgaaataactcatttatgcggaattggtagagtatatttacaacttgaagacttaaaagtcttatgcaagataaagatacaccaattgttgcctcgtacgttaacgagaaatcatacgacttcagatgtacataaggcgagacatcaacctcgct

SEQ ID NO: 64685 - DNA, 1147 bp, Cannabis sativa
gacagaccttcccctgcctgatggtggacaaactttgccacggagatctggtggagagaacagccatatctcggtgaccaaaggtctagggggccagccagggatcttaggctctacaacacccccacttggatagcctctggccaactagccccttagaggtgcacccctggctggctagcagggtgaactcccgtcctaggagctccatgagtaagtaactcagaaaggttcaagaatgagtggaaacaccaaaaacaataacttgagaagtgagtctagtcacttcaaatatctagatctaccaaacttaagaaactcgtgtgatctaccctctataaacacactggctgtacaagccaattgaggggtaacgagcagccagaccctacctagcctagggctagccaacctccaccgtaccctatgcttgagctctatgcaaggttcgcaaggcatcctgtagccccacgaatttctaggtgtgcaggctgacactaacaactcttcctaaacctctagtggcaaaaactttggggcaagcgcaacaacaataactctggaagaaacagtggcaaaaagggaaagcataatacttctcccatgccacgaaagaagaaagataaggaggaggagtagtacacctgcttcaccctcttgatggaaaaaccagaggccatgttcatggcaactcagggaactgtcccatacaagaagcacccaccgatgaaaagggagatgagcaagagggacatgtaaaagttctatcgattccacaatgacttcggccatgacacaaaagagtgtcaagatttgaagagggagatgaaattcttggtaaggaagaataatccccatctacattgttatatgcagaacgacaagacccatgcacaaggtgcccaaaatggagccctatgccacctctggtggtcggtcacttaggagtcattatcggcagaccccacatcataggcgagaccaacaaggatagggagcactatgcttggacaatttttcacgagtgtaaaaaagtgatatcctcattatcaacgatagaggctccaagcaaccaaagcctagagaactgttggaaatattttaccaggatctacatttactaccatgtatgtttcattaacatcct

SEQ ID NO: 64686 - DNA, 1016 bp, Cannabis sativa
ctctctctctctctctctctctctctctctctctttctatcgatctgtctctgtattgctgaacgacctctctttcattttgtatttctttcaggcgcgaggtggtggtggtggtgcggtggtgaggtggtggttcatctcaaatcttattattattgtattatattattgttgacgttagttatgagattgtagttgttggattgttgttgttattgtatgttgttgttgttgattggatatgagatatatctaaaatttgaggttttttttattgtgtcaatttaaaatcgacagctatagtggaaaaattagatttttacactatagcttaaagggttgcataatttcaatgttgactgttaaggaccaccgcttattatgctccattttgcgtcggtggcataaactttaatcttagaaactgacaataataataatagctgactgttttaaacagtcgcctaatgccttttttcaatagtgtatataatatgcaaggctattagcgatgatttatgacaatcgctaatgaatagccgactattataaatcgtcgactattcctattatagttgactgggacccactgacgcgtataatcaacaaaacataacaatgtaactgttttaaacaggcgagaaaaagttgtgacaattctaaattatagttgtcggtttctaaatagttacataattttttccctgtgggtcctaaaaaaacaattttctaaccaacaagaattctctttttttttccctgtgagttgttttagaattactaaagggattctccatgagattaaaagtttgatagctcatttttggtggggatctactaagaataaacataagttgcattggggtaattggaggaaactttgcaggttgaaagagcaagggggaatggggtttcatgatttagaagattttaaccaatctcttttggctaaacaaggttggaagctccttactacaccggattgtttgcttgctagagttctgaaagccttctat

SEQ ID NO: 64687 - DNA, 765 bp, Cannabis sativa
taacttaaatcgcaaccaaaatccttatagcaactcacgtaaaaactactaaagaaactaccggagtaacccatatcgtaaatttaaataattatttacaactaaaaattaaacttaagtaggggtgttcgcggtgcgggtggtgcggtttttgactaatttttcaaattaacccgctcatgcagtttttttaattttctaaatcgcacccgcaccgcgaaactaaaaaatcgcaaaaaccgcaccgcaaaaaatggtgcggtgcggtatggtttatgcagtttttgcggtttagactatcactaaataattaaaatatctcaaatacaataaagtttgagcaacacttgtcaaaaatacaataatacttgaagataaatatgaaaaaaagtttcaaatttacacaatacaataattagtgggcttaggttgggccttcacatattagacatataaatataaaaattggtatgtttcaaaaaatataaaaattagtatttttatattatgcggtgcagtgtggtttgaactgcatatttcttacgaaacagagaaaagaagaaaagagctttattgattcagatgaattgaatgaatgaatacagagaatgtgcaagagcacatatttatactggagcttacaaccgacttaaccaaaaacagagagatacaaacaactaattaagtaccaacttatctaactactaactgatttaacggtaatagacaaaagctaaataagtggaagatcagttaattctatta

SEQ ID NO: 64688 - DNA, 1469 bp, Cannabis sativa
taacaaccaagtttaagagaaatttatataaaataattttatcctaattctactaaaatttcgacagcataacagctataattgaacagtctcaaaaaatttaaagtcattaataacaacaaaaaataatctaaaacaagtgatgatgacttagataatttctaatcatcattgcatttcccattaatattttaattcgagctttatgagtcaagtgtattctaggaaaagagaatttagggttctaggtctacaattataattattatctttactttagtttaagttttatgatacatctttggtatgtttgaattttatgtgatattttattcatctttaggtattctaaatgattatttcaacataatttgtgaggcttacgcgtcaaatgacccgagacttatgaaattaataactagtaactaagtatagcatactaaattactaactagtaactagtcctaattctaccaaaattttagcagcataacgactataattgaacgtttttcaaaaatttaaagttagtaataacaacaaaatacaatctaaaataatataaaataattgcaataatatttaacaatacaaaaatttaccacccatccgaccgcagtatatgtattcacagaacctacttccctacgaatgaatatgtaagattttcaaactcatctaacatgtatattattctacccatttgaccacagtacaatatatcacaaaacattcgctatggatgaatatttaagatattcaaaatctactaagcattcatgattaattaataataaaagttagtaaatgtatacctcgagctagctagaaaccgatcaacaccaaataagctgaattcttgcaaattgacatcacaacctacaatgtaaaaaaatactacaaaattaattttttttatttaactacttattagttatataattaatgagtaactagatactaactaattaatttattactaactagttactaatgaacaactagttagcaataaaaatacatcaataggaataaaattagtaacttgttaagtagttgtaactaactatttactagctactaaaaaaataaaaacacatgaataaaatttgaaatagaaaaaaaatgataaaaattagaatgaatttctaaactaatttttagaaattaatttcgaaactttttattttaatactctcctatgtcatttttattcacaataattaacaaaactatttgtttaaaatattcattatatacatatacaatacataaaaaaatataaaatatataattataatatttgtatatatacatatacatataatatatatatacaattacaaaatatgtatacatacaatacaaatttaatgaaatataaaatacatacatatatactattaaagtttagagttttaccaaattacaaaaattcggctaccaataccgaccaaaatttggccacc

SEQ ID NO: 64689 - DNA, 622 bp, Cannabis sativa
gtcataataggaggagccccaccaataaaaatttaacacatcaaacatcaattaaaatgtcaactaataactctaacatatcacctttttaggtgaggcatgtttagagaaagctagataccaataatatttatataataatattcaaaactaatatatatttcactttgcaagaaaaagaatctctttctatacaagaaacttgctactactaatttaatggaggtgaaggtgtgatttgaggaaaatgataagcttagttgaatattgtttactatgattgtttgtgaattatttgattcgatggtcttatatagaagttatgtggagagatttattatttataactaaagttattaggaagaattaagaaatggattagtgttactctcttttgagtggggttgtcgctctcttttgagtgtgtaagtttgtccttttgctgtttttttggtattgctttttggtactgttttattgctacttcatggcgtctagcagtaaaaatgatggtgatctaccaatgaaatgggctgatatgtgtctggaggacgaagaagtaacagaagttattttcgaagacgatgatgatgatgagagggaacccgatttagatgatcgt

SEQ ID NO: 64690 - DNA, 2099 bp, Cannabis sativa
tctcggatctatagagttgccttgctctggagtattggttaccttatttttcatagaggttggcttgaaacattcttgttattctatagagtggttagagcagtctttctcggacgttcccccatgaatccttttcctttatccttgttgggataaaaagttccgtgatatttaggctccgttcttgtagtattgttgtcctgaggagtgggatcatcgaaaatactttaatcatgagcccaattctttagctcaggtgtggcctctagtttagccaaggttgcttgcatccggcgggagaattcttcttgtgccgccaattttcgcttaattttagtaagttcttcgacaatttcaacatctacgagttgtatctcgtaattatatttatctccgtcgtctttatctttatctttcccatcatcttcaggatctttgtctttaagatcttcctctcgatccttattgatggggttttcatcaacgtatttttcattacattgagttgttttagcaggataatttgttacttctattagatctccatcgactcttgtcttcgcctgagcaacaagatctatgtcatccataagagtgtcgccatcgtgacaactagttttgttttaggtgagtatcatggttgcagtatacaacctttgacgatatcatttgtttctacatctctcaatgaaagtaccaaaatattaccgagatttttagaaacctatatatgataagctaaagaaatagatgaataataaagaaatagcactagagtttttacgtgattggggcattaacaagactcaatccacgagtcaatattattactataaagctggaaaattcttatgatttacacaagtgtttgaatcctagatcttgactgagcaattgaggaatggaattctaatcttttgcttgaatgtgtgttcttatatttatagtgctagggttcttatttgttcaacattgcccactgatggggtaaatacaaataatatattgacttgggcccatatggtggggcccgacccttgaggtgctcactgcatgcttatgtggatgccacatcatgttgatagttgtcaaaattgtggagaataaagacacattaaatgtataattttcaattactatcttttcatattgggaagatatgatccttggatgagatcttggaagttaagtcctgatattatgggattcggtaattaatatatgcgatatagagctggatgtctagacatttgctgactacttcgtcagatgctccaaatgatatcttctaaattctcgctctactagaggattatttcacatggacgagtcatctgctcgtcatctggaagagctgacttcactaattgatttggcacattatttgagttgggcctactattgggtctgcagtaattgagctctaaatggctttggaaattacacgtgtcctcatctggaaacttggataacaagtttcatccaaataatatttgtaactacaatcgctaaattttaattgttgcattaacgttattttttggaattttaatcttcaaatgaattcaattccaaccataataataaactaaatttgcattcatctcgcgtcatggatatggccacataattttgatatttgtgaaaaagttagaaacaataattacgggttaattattaacaaaagagtagtttagtagggttttctctctctagctttctctcagctcattgagctggtgccatggcaaagacgagggcaaagcagagtaagccccaatctccgaagaagaagaagaagaagcgcggctttgactctaccgcggatgtgaagaagaccaaatccatggatcaagtccttggaattgagcccttagctttctctgatgaggaggctgatacagtcgaactgatggatgtgaagaaggaagtcgctgattctccttctttggatgcgagcgacaacatcaggagagatgaaattcgtatggattttgcacacttcatggaagccaagcaatttcgagaagcccagaccatgtctgcgaatgcagtttcacgaggtaaggaagttgtacctcctatactcagatctggta

SEQ ID NO: 64691 - DNA, 1312 bp, Cannabis sativa
actctaatataaaatataaatacatcctataaaatttttgaatttataagatttgtacaagagctttaaaggcgcgatggtacccacttactttaaaatctgaagcctgtgaataacctgccatgtataatttgtttgtatatattaaattaattattttttttttttctaaaccctcctaactgttattttacttatatttaattttttaaactcaaattttgatgataaaatcctctaaatcattgagcttagcaataaattttatgtgtcatttggttatgacactatgagctgtttatgtacatactcttgtgcacataatacgtttatattagtgcaactaatattattatttaaaaattattttcaaaattaaataaaattataaaaataaaaataaatatttttaaaaaataaaaaatattataaattttaaaataattttacattttaaaagtaatactattaagtgtactaatataaatttgacaatgtataaaaatattcccactagccgtctatattggtagttaattgtaaaaaatagatgataccttaaatttactatcaattcagtaatttggagagttttacaatcaaaaattaaacttaaaaaattaaatgtaagtagaataataattgagagaatttaactgcaaaaaacttattaaattatttgaaagctagtgagtggttcttgaaagttctaatgaaacgtacgcataggtgtagttcatttcatttaaattactttatctttctttctttatcactttttgaaaagaaagatcatatatatggatcttttccattaattaattataaactcaatcaatctcatgctacattattagtttgataataataaatgacctcttagcacttttataaaatgtaatattgttattagtacaatttaatgttaagttttatttattttaatttaataaaaattataaaaaaattgctaacaaattataaaatatcatttcataaaagcattaaagatattagtactctataacgatacttcattctcataaggtccaaagttgatctaaaaaaactcattttaaatgccaaaggtaaatgtgacaataatagaggttaggtggtgccgacataattccatgtcatttatcatcattttttacttttcattaatttcatcctttttaatgtttatatatgagcattgctatttaaagaaaaataaaaataaaaataatttaaataaatatttttattatgttaaattcagtacatgttacaattaatgaagtccagaacatattaattagggaaattt

SEQ ID NO: 64692 - DNA, 839 bp, Cannabis sativa
cggaagccaagaccaccaagcgacttaggaagacacagtttatcccaggccttgagatggattccatgatttcccttctcaaaaccccaccaaaaatccctaaccatgccatcaatcttgttaaccattcgagaagaaagtttggttgtttgcatagcatacataggcatagacaagcccacagatttgataagagtagcacgccctgctttggatagagttttagccttccaaccctgcagtttcgacgttagattatccagaataaaattgaaatcagcatctttctgtctagatcgaaacaggggcaaccccaagtatttgatacaaccttcaggggaatcgattcccaacgcttcctttatttcccctcttaagctcaccggggtatttctactaaagaaaatggtagtcttgagcttgttgacctgttggcccgaccacaagcagaaattctctaaacatctccaatatctgtccacctcaactaaatttgctcgaccgactagaattaggtcatccgcaaagaaaatgtgagaaagggtcggaccacctcgacttagctttataccttgaatagaaccctgatcaagggccacctgaactagccttgataacacttctgctgcccatatgaacaagtaaggtgagagggggtcaccttgtcgaagcccacaggaagggctcagacttcccaccttacccccatttagacaaatgtttagcgaagtagtagatatacactgcgaaatccacaaacgaaatctctggggaattccaaagcactccaacacatggtcaataaacttccaacacaacttatcataggctttgaccag

SEQ ID NO: 64693 - DNA, 1282 bp, Cannabis sativa
gtatttcctattttgtatctgctacgaatttgtgcccctaagggacaaacatagaaagacaagtgatccctttctagggattctcccgaaaaaacactataaataccccatagatagaatgaaaaaggggtcgatcgattattaaggaatcgaagggagtaaagaagagagagagattcaccaagagcattctttgtaaaaatactctgataaataacaaagacttgtggactaaggctcattaatggccgaaccacgtaaaaatcacttttattgaagcttctacaactcttctccttctattatttaattggttgctgaaaatctcgttctacattttggtgctttcattgagagctgagggaagcgtcatcaaaaagacaacagtcaaaggaaaagtcagattaacaatggtagaaactcgtaacaatacacgtcagccctgtcctcctcaagatgctcaaaacccagaaggcgaagaagtgcaagagtaaatgtgggatttgaggagcgagatgaggcaaacaatgaggaatacgaggaaaacttcgaagggtacgacacctatgacgaaggcagctatacgaaactactggtcttgagacaaaaggtggctgatcatgaagccgaacttacagctcaaaaggaacagaataaaagaatgcaagaggtggtggtttccatgcaaaaagccaaggaagctgcagggatacacatacatcccaaggccatcccagtaggacccgagaaataccggaagaatcctcaccaattcctttaaaacccgaggacaggaaaccaagccctatatagtacccttccgaagaaaaccctcgaaaaaatccaacttcaatccctgggaaaaagaaaaaggtgtaagatccgtgaaaagttcgatcagatttcccgaaagggaaaggttcgcagaggggaaagctccctcgagcgagtcttggccctcaagaccaggaggaccgaaagagcgtatccgtgcaccaagaacccagggagagaggacagaaaagctggaggtaccctccagctaacctaagacaaaaaatcaacaaaaagcatggtgacttacgagaccatatagacaaaaagaaacacgcactgccggcttccatgggcacactaattgaaggattcctggctaagttagcaatactgcacaaagacattgctagggtcgcccggagacaaaaaaaggacgactcagattctaattgtgaggattgggaaccatgcgcctgttggaaattattttacaaggatctagatt

SEQ ID NO: 64694 - DNA, 1021 bp, Cannabis sativa
atttttcttttatttattttgggacattaattacttaaagttatataatattatattaatgagccatatggtaaatattttgtaaactatatagtatttttttcaataagttttttttatatatatatatacatataaaatagcattttagacatatatagtgttgagaatctaaatatggtgtttgaaatttttaagaaagtgttgagaatttttgataattagaggtttctcaaaaactatttttttaaaaaaacattatcaaaacaacaatcttaatataatatatgtaaattgactatcaaaataaattatattatactaacacgtgaacttcacatcattaaattatcatacatggttgagcacaacaaataattaatattcttttgacttattttttcttttcatataatcaactaaaggttgctaaaacataatgctattaatgttgaagaaaattaaaaacaagaattatgaattatgagtgatctttaaagattttttttttctaataaaatcacgccgaacataacatttattcaaatatttttacagaattattgagagtgtgggagaaggagtgatagatttgaaagaaggagaccatgtagtgccaatcttcaacggcgagtgtggcacgtgtgaatgctgcaagcatgtgaagagtaacatgtgtagtagatatggtgtgaaccctatgatgaaggtgatggagagtgatggaagaactaggttttggaccaaagatggaaacccgatttttcattttctgaacacctcaactttttctgagtattcagttgtccattccgcttgtgttgtcaagcttccctcccaactactctcttctccatctgattttaagaaaattactctattaagttgcggagtttccactggtaataataattattaataattaattctcatttacttttttttcttttcatttaatattatatcatagaaaattttataatgtggcctattttttctcctacctactgataaaagtatc

SEQ ID NO: 64695 - DNA, 1531 bp, Cannabis sativa
tatttgctttgtactgatggagatttatttaactttctctttttctttatattagagaatataacacaaaataaaaatcaagtgaactaaattaaactaagattttaataatagttcatgggtttgtttggtaaattgtgttgtattgtatagtattgtgttagattatattatattatattagtattatttaatataattttatatttgatattgacttgtactaatatattgtgtaaaattatactatatttaccattagctcgattccaatcgtgaccctagccctgaacaaggttctcaggtcaaggatttagggtcgggatcaagtccgagttaggagttggatccggcttcgggttcgggtgcaaggttcggattagggttcggagctggattcagattcaggtccagggccaagatttcgagtcgggtctgagtgtaggttgggattcaggtttagggtttggttaggtccagggtccaggtctaggtccgagttctaatccgagtccaaggttcatgtttagggcgagatccccaaccacaaaccctttcgtaaatattataatacaagctaacatatattatttgttattacagtttaaatgctcgtttggtacatcgtattgtattatattgtatagtattatgctagattgtattaatagatggtataaaattatgctatccttaccataaactcgactccaatcctaaccctagctctggacaaggtgcctgagttcgagtcaggggtcgggccaggttcaagtcagggtccgtatctagtttcagggccggagtctaggtcaaggcgtggggctaggtccagatctaagttcgggttcatgatcgagggcgccgtccagggtcttgggttcgaggctgggtctgaattcggggtcggggttggaggctaggtccgcagtcagtggacgagtccgggtccaggtccacaatccaagttgagatttgagtctggatctaaagttcttcaggtttaagccggggtttggggggtccaatcataatgttccttgttaatacaataaatctaaaatgtagcaaattttacttgtatatttaaattgatggtttattttactgtattgtttattttgcaggaaaaagtagaagtttcatgtttaatgtcacaataggtaaacttattgccaatgcctactttatgtaattatggtgaaagatacctttttttctcacagttctatggatgaacaaaataattgagtcatacatttcaaatgtgagttttctttaattttcttcactaatgcagctgcagtagcctcttcaattgggctaatcatcatgataatactgttcttctgcctgaggaattttccaataagaaaatcaatcttcttttggaagaagcaaaaccctgctcatagaaacattgagattttcctaaggaattgtggaccacttcaagttagaagatatagttactctgaggttaagaaaatgaccaattccttcaaagaaaaattaggccaaggaggctttg

SEQ ID NO: 64696 - DNA, 786 bp, Cannabis sativa
  modified_base (524)..(531): a, c, t, g, unknown or other
agaagggcctattttatctttttaaaaaatatattaaaaattaatataaatttatatttttattacattaaatatcatttaaagtaaaaatgcaacaataaaaaatttggcatcaatggttaaagaattacaaacaagtcttatggattggggtttgggatctaaacatttcttctctaatatatatctagcttaaccattaaaaagaaaattaacatctttttttgaataaagaaaattaacatctttaattacaatttataaatatatatatattataattaattaaaatatacacatttttcttggttttttattttctattcggtcgcctatatatacatgtacacaaatacccaatcgagtacaaagaaagggtctccccatcagcaccccagccaaagccctaattattaaaagaatttttagttttttgagtggacaaaattaaagaattttttattttttcggttaattggtaaaaagcaacgtttgaagcttaaaaaaaaaattatttcacaaannnnnnnnaataataaaaaaaattacaaaaaatacggtttcagagaattttaaatattttacgatttttttgattttatttacaaaaaatacgattttttatgttatactcttgttaatatgttgctaatttttttgttgtattttaatattactaggtgaatgtacgtgccgagccacgtattgctagttttatttaagattttggtatttttaagattttgaatgtattttatttttaaagattacaaattttttgtttga

SEQ ID NO: 64697 - DNA, 877 bp, Cannabis sativa
aaaaaaaaaaaaaacagaaagaaatacacgattatcgatgttattataaaattaaacgacttttttaaaaaaaaaaaaaccattacaaactctcatatatgtaaaatctatcatacaattattaattaatacggtagtggtggagctggagccggcggtggtggagagaagtgaataacaaaatttgatcgtggcggtggcggtggggaagctctccggcgaaaaaatctttggggtcgaacagatgatgaggatgaagaagaagggttgaatggtttagctatggccgtgtagttactaggattttgtgataaaagcactactgcatacatcaacaccacacctactaaaaaaaattttccacccatttttttttcggttaatatttcttcgtttttactcaaaattcaattgtctaagtaagtcatagataccgtatttatattattgcttaagaatacaaaagagtcagtttagatctactcaaaattaaaataatagcatattgtatggttgggtgcttataaaatcattttgaaggtccaacaaggaagcttcacatgcccaagactttgacttggtcaaataattataattatattttaatattcataatcttcatgaaactgaaaagattattttattgggtcagctaaataaaatgaagatgaattattttatgtattactttttaattttatttttcaaatttatggttttagttgtttcggtagtttagattgttatgtgaattttagttgtgatttaggaagttccgtgtaacaccctaactagtatagacgtgttaacgtgattttaaacatattgtgcagctcattgctaatcaacgaggttatcgaaaatcgtgattaattaa

SEQ ID NO: 64698 - DNA, 4541 bp, Cannabis sativa
  modified_base (3896)..(3897): a, c, t, g, unknown or other
  modified_base (4151)..(4151): a, c, t, g, unknown or other
  modified_base (4184)..(4184): a, c, t, g, unknown or other
  modified_base (4212)..(4213): a, c, t, g, unknown or other
  modified_base (4268)..(4271): a, c, t, g, unknown or other
agctttgttgcaatcttatagataacattgcaacaaacaattggcctaaaatctttaacagagttaggacttttgcatttaggaaccagagtaatgcgaatggctcattatatattattattgtgttttatgttatatacaaaaaaatcttgggtatattattaatttttataacataaaaggttcgatattttactataatttaatttcttttttttaaaaaaaaataaataaataaaatggtgccccacctattttttttaatttttttggcatttaataacatgttgtattttcagttagtataggaaaaatttataatactctatagaggtgtttaggtagtccttatttatttgggacatttataagagttttttagtttatttttttctttttattataattgtgtatgttgtagttatttaaaattatatgtaaatttttgaagattagtagaaaaaatatttgagtattattttcaaagtagtaaagtattcaaaagtttttgaaaattgaaaagttatactaaataactacaatgtagaacaaaaaaaaaaaaattctcttaaataccaaacaagattaaaggcctacctcattagcatacaatcaattttgttacaaacaaaacctataaatatgtaggagtagaatgctgtaaaatggagcacgtaataaataaagggtcattacaacagttaataatatatatgctgttgttttcattggttccattatacagtttaccaaacacgacttcactaccctttcaaaaggaaacaactgcactgcatcacattacgattactgacactcattaatttgaaaggaaattaattaaaagcagacaaaatctcatagtcataactaataagctacattaaatatatacaaaagtaagaagacttgttcaaataatatgaggaaaatggagaaatacaacaatacaaaaaagacattaatcgaggtctacatcaaacaaggtgtaaacccctaaacccttgcagcatgattgtatattgattaatcatagtctggtttactctaaataaacttaaaaacccaatattggtgttacaaacaaacaaaacaaattaacactatagttatcaattgatttcaactctccaacgagtctctctatctacattgcgtattacataattattttccatgtaatgaagctattctgataatctagtagtatcacctctaccatgttggagaagagagagaggagaagtagaaagagaagcaaaactctggtccataccatctctgtgactattattattattccctttaaacgaataagacccacttaaattatcaaacgaagatgatgggaaagagagtgcagaaaatcatcaaaaccgtctcatgaccaccaatacccatctgatatttcttcccttctaactcatcatctggggctctcaactctccgggcaccataacctctccttcaaggtacctcaccacctgtctcatactaggccgagccatcaccccattgttcgaacacatcaaacccaacttcaccaccatcactgcctcaacgacgtcgtactggtcattcagtctcttgtctattacatcaaggactctcccagcttggtaatagtcccatacccaatcaaccaacaccaactcctccggtggagcatttggctcaatgggtttacgcccgcaagccacttcgagcaatagagccccaaatgcgtaaacgtctgagctcgtcgtggcttttcccgttctgggtagctccggtgctaaataccccaatgtccccaccacacgtgttgtgctcatgttggagccgtggtcatggagcctggcgagtccaaaatcgccgagtcggccgtttaactcgctgtctagtaatacattgctggcttttacgtctcggtgaagcaccacttgttcgaagccttcgtgtaagtataacagagctgaagccacgccttttatgattttcattctctgttcccagttcagaatcgtttttggcttgtcgaagatgtacttgtctaagctcccattcgacataaaatcgtagaccaataagagatcgccacgtcgacggcaccaccccagaagttgaaccaggttccggtgacggagcctaccgatgctggcgatctctgccacgaattcacggagaccctgtttagattcgtgcgaaactcgcttcactgccacttggacttttgatttcggaatggttcctttgtaaactcgcccgaatccgccatatcctagaagctccttctctctgaaacctttcgttgctttcttgagttcttcgtaggaataacgatgtggaccgagctctaattcccatttctcgattggatccgcgttcttgatcttgtaaaagaggtatacggcgacaaggattaagaaaattaataataccgtggctgaaactccggtgccgatcgctatagctgtgtggcttttctttggaccgggaagggaaggaagatcagccatgtcaagagctcgagcttgaccgttgactttaaagctccaacccaagaggtaatgagagcttgcgagtaaacccgtcgaagcagagaaacccacgtacataaactcttgaaaaatcggtgtcaagtccatcttaaccgaaagaagcggttttttgggtttcttcgaaaatggagccaccgtcacactgagaagattgtcagcagagtcgtaatcaatccaagcctgaatcgctttcccattgagactgaaattagttgtcttggagggatccttatcatcaaaatacgaagcggcaccagcaaaagttgagtttaagctgttgatatcaattccgacatggttatcattgatatcaccgaactcaaaatcctgaactgtatcgaactcaacagcgaagatatggttggaggagtttccagaattgtcactagcgttgaagataccaagatactgactcggaagaccctttgtgtcaatggatggtgcgatggtgaaagcgaagccatggccaccgagcttggggtactctggaacgatggtgaatgcaaaagaagtcgaaaaggagaaagctttaccgtttgtggagttctttaatcgaatcatagagcttgtaacggcatgaccaatgagtcttctgctatcgtttgtcagtttcaagataccatttttctgaatctgtgcaactcctgttaaggttagattgttagtagtcgcagtagtggtagtgcgggcaacctctttgaatcccgggtagaacaggtcggtgaattgagatgaagctgagacgaaaaagagtgagagaagaaaaacttcccaggtgatggttatgatttccatactagattttgattgattcatcaaagttgaaaggcctcttgtgttttctccataaagaatgagaagaaaaagttggtaggataggcgttgtttcgaagaaaaagaaagggaaaatatggtaagacgtttttatttattgaggttggtaaagaagatctgaaatagatgagggtagtggagaaaaaaagagggtttaaagagaagggtctacttgagttaatggaggtgagttgctaaaaacaccattaatggggtcacttgctcacactatctttttttttttccctctttatgtgtcagtttgttttttttaatattcatagaattttaaattcatgttttaaaaataaagtaataagtaattttacatctttcctaaaaataaaagatagttttatttacattttagtaatttactgtataaatacttaattttaactattaattgcaaataaatacttaagttatatttttagaactttgtaggtaccttatcgttaaattttaagtcattatccacgtgtcattttcttatttggtatatttaaattatttttttnnaaaaaataaaaaataaaaatttgatgacttgcaccaattacaaattgacacgtggcaatttatttattacttaacatctacttacctacaaaagttctagaattataacttaagtattattactgcaaaaaattaaacttaggtatttatttacaactgggagttaaacttatgtatttataccgcaaattacttccctaaaaattataaatacacctcattattaaaaaatatataaacttaaataatttttnaaaattacttttaatatttttttaaattttttnctctcattattttatgttaatttcaatnnttattttaattttatttttataattttttctaactcatgtatatatatatatatnnnnttttaatttttttttaaaaaatatatataattttttattttaatattttttgtcataatatttaaaatatgatttaatttgtttgataggtatatttttttaagtatatgaattggaagaaaaaagctaaaaaaaacttagtagaattaaagatataaattttagaataattctacaattcaccccctttaaatggatgtattgatgcacccctatctgttttagtatccggaatactttttttagtcaattttttttcacggtcatgta

SEQ ID NO: 64699 - DNA, 1091 bp, Cannabis sativa
ttatatttttctatcctcgtctatgaaccatagacactattattctatagcatttgtcgacatggttgtttgtttaaaatcatgttgtaattttaaaaataattttccatcggttgctacaaaaagatagaaaataataataataataataataaaaattaggaagggatagaatagaagacttaaaatatggaaagttggtatttgaatcttgatggagtagatgttaaggaactgtttggttataatatccgacattaaaaagaaaaatcagataatcttaaaaaggagagatgattatatgctgtttttggaagagggttttgcatgtaatgtaaacaataatgcataaataatcaatatatatatacaaatatattagtgttgtaataagagtagatttctttggtactactagttgaaattaacatgtgggttaagtaaaatatatatatataaatatatatatttagttaagaattttgttcgaactttaatatgtattaaattatgttttttgaatttttttagccgttaaatttttatcctgaattattgagattgttggatttaaagatttttatcaaattttattcaattttactaattcagtgattgtttatgcactaaatcatgaccctcgaattttgacatgtaccaaatcatacctctaaacttttatctatgttagactttctttactaaaattagaaaaaatccttaaatccaacaattttattagttcaggtagatttttaacaaccttaaaaattcaggaatcaaaatttagtacaggtcaaaattcggaaagtaaacatattaattagcctatattttttagggcttctttgaaaattactatgtaatttgaatggagggtaattcaaagtaattattaagtttaacatatttgttcaaccacataattacataataaatatgtaatttgtagtaattgatgggtcttaattatactctctaatttttatgctcccaataaaaagagaatataattacactgtataattacaaaatatttctatttttatatatttactagctaacccatttttgtcaaaaaaataaaaatc

SEQ ID NO: 64700 - DNA, 1204 bp, Cannabis sativa
gtggaagggccagcatcagcctcggcctgtgagggcaaacacccgggcaggagtaggtgtatcatccttgttttgctctggtcgtagcagctgtgggcaattcctcttcatgtgacccactaccccacagtagaaacaggccctggcctaacactcgccctggtggcgccttttaaacctcagatattcaagaagagtccgcaaattttgatcccaccacgatgaaaaccttagttacctggaaccttttttttgggcctgtagctaatgattcattagggcttttcttgcggtcaccggggtcagtaccccttccaaaaccaacactagatgtctgcttccatgaatctcctctagcaatatttttctttcgtatctaatcttctgcacccttagaaactagggccaattcaactatctgggcataagttcaagcaacccaaggttgtttagaagcaacaatcacatcccgcccgatatgttcatccgacccttgaataaactttgcttttctagaagcttcattagccacctcatctgaagcaaatttttccagtcgatcaaacttagtggcatactctgtcactttcatacaaccctaggtcaatcgtataaactcttttgcctttgctgcccaaatagacttattatagtacttctcataaaacatggtccggaaggcatcccaggtcatgttattcaggtcatcaccctgagacacaatctcccaccaaatacgggcatcatctcgcaacatatagatagcacacctgacccgatcattatccttgacccgcataaaataaaaaatcgatgctatcatactcatccactgctacgccttgagtggatcagcaccaccctcaaacactggcgggttctacttcctgaatcgctcacacaacgatttgaaacgattccttgcatttggtggcactaacagaggtgccagaggattaggattagggtttagagcaggctgagctcgctgctccctcaattttctaatttctaatttgttcaccctgctgccggatagtctcttgccatcgcactaatacaacagtttggtggtggtggagggttctcacgttcaccagcaaccccgagcctagctagctcgcagttacctctaccattttgcctcgggtgcataatctatacacctgcagtcacttttcaggtaataacaatacttataagt

SEQ ID NO: 64701 - DNA, 1687 bp, Cannabis sativa
  modified_base (1026)..(1046): a, c, t, g, unknown or other
gatttccccaaaacaggggtcaatgttgtccttgtcttgggcgcaccatcaagtggttttaggtgtcgtctgtgtcttctctacagtttgaactctaaaggccttcattgtctctctgacttttctaggagaggccttgttcgttcccctagtgccaaagtaatagaggaggtcttcttagtgagagataataaagggttatacactcataggcaattccttgattgccaaggagacagctgataccaaccgtcgttgggaatttaacggacaagtggtatattaacgagatagctctaaggtcatatagggttggcttttcgagcatcacgttgtacggagacttcacatccaccactatgaacgtggccatgatactggtctaccttggagcagtgctaactgtgagtggtagtttgatctttccacatggagatatgctcgctctgctgaatccatacattagttgcttgcatggctctaggtcttcaagtgacaaacccatccgaattagggtttatttgaataggatgttcaaagaagctccatcattgatcatcaccctatccaccatcaggttggctatttgcacctcaacaactaagggatcattatgagggtagctgacatgatgcgagttagagtctccaaatgtaatgggtcacactcatagcgttgagactttagaggacgttctataacttctagtactttggctcttggctcatgttgcaaagaccttgcatatctttctaaggcctttcttgaattcccagctaggcgtgggcctccaatcataatctcaagcctgcttgccagtgatgaagccagaaatttggctcagtgagggcttgaataaatattaagtcaaaactaataaaaataactgataaatgtatcctttcaaattttcatgttcaacaaaataaaataaaacattgtcatgaaaaataaaataaaaattacaatctacctcgatgacttttcatgttttaaagtccctgcatgatgacttcattgtcaagnnnnnnnnnnnnnnnnnnnnnaatgtacacaagtaaacaatcattcataaattaatcccctattcgattgcacaatctatttttcaaaatattcatagaaaaaaatactctttccactacagcagtaatagcaggtagaataattgctaatgtaatcagtcaatacactagaggataaacaatatgcttcttcctctaaaccatattccagtgagatcaccaatacttttcaaaccaaagaaattctcagtggaacttacatcaagaatgtaagtttcaagttgattattaagcatgctaagctcaaaagtagaaaaatctctagggtaatactcagcaaatcggatcaatcttttttttttttcaaaagcttcaaatgaatcactagggcacaaggaagctaaagagagaagtagttcagtgtttatctcgttgaaacgttcttttagctcttgaagttgcatatcaataacaccataaaataattccacacaaaagtgatgtaaatttgtcatttcattgaccttatacaacacatgtatcatccatagtaggaatataaacattatatttagcacaaaatgttgagacttgaataagaaaggaatcccgaacattgtctctcatttcttgtaattgtttcttgcaaatttccactaatt

SEQ ID NO: 64702 - DNA, 1173 bp, Cannabis sativa
ctaaccactgtcttacctgatgtcccaagtgcgtggagattccaaatccctgggtgctcctgatcaagtaccagtaatcctagtcataattcttgacatttacaaatagggttaatccctaaatccacttccacataatcatacaattggcattcaaatacaaataaatatatagagctcaaaacaagctttccaacgatatatagaacacctcaaacggagtccggattgaaaagttataaataatcaaatttagcattcaaaactgccaagaaaacactaggcggggcacgacacatgggttgaaaaacccaggattttcaaggaggcaggtcgcaacgctcatagaggaggccgcggcacctgggttccaaacccagaaaatcccagtttcagcaaacaaattccaagcccaaacataccaaaactcaaccaaaaacatgcacaaacacaaacttattatccatagattatagtcatctcaacagagaattaaaaacaccaattcaagctttaacaaccccaaaatatgcattttacacaagtcaataagcatcaatactagtaacaaattctaaacttaaactaacatcaaacttccatttccaaacttgaaacaataccaaaccgaaccaaattcagattcaagcacaactaaaatctttaaaacctcctccaaatataccaagagcaattcacactaatttactaacacaataatcaaattcccacatacatgcattcaagagccagaggatcaatacactaccatttaccaccacaattagcataaatttcagaattaaaagagtggagtaactacctcaaattctccagcaacaactagcttcaaaacaccaaaatccaagtttgattttccaacaaaattgctaagcttgaagataatgaaaaagggaaggaggaggggtcggttaagggctgtgggaaaaatccgaatatgtgtttcctattttgccaaaaattccattttgttgaaaataaactcaaatggttaaatgaccaaaatgcccctagggccaatacactacatatgcatacaacaagggagaaattgtcatttcatcacacaccaaacttaaataaattttagattattcaattatttataaaatgccaaaataaaatccaaaaaatgtatttcgggccttagac

SEQ ID NO: 64703 - DNA, 1859 bp, Cannabis sativa
  modified_base (1321)..(1354): a, c, t, g, unknown or other
attatgttatataaccgaatctattttagttataaccgatttgagttatcttgtgttatttgtttttattcgtttatataaccaattatattttaattgtaactggtttgagttatttatttttattcattatattacagaactggttatatttcaattataatcggttttagttattttgtgctgtttatttttattcattatgttatagaacatgttctacttttatttatatttaagacatctacttctaatgacttttttagtaatttttttttcgacgattgtgtctttttcggtaacttttgtgacgatttttctggcaacactaacttctccagtggctttttcgggaccggtgactttttcagtgactttttcggcaaaccttttattgttttataaatatgagatttctattttttttttttacaaaaatatggcatataaaaacttatataaatgtaaaacaaaaaaaaaaaaaaaaaaaatcccacaactccatgatattatttatttatgaaataaaatagtaaattcttataatttttccatatattttgtaatttctactatccgattctattagatcggttgggatttgatcagtcaattgtaattagatcagatgactttctgcacactcttaccctacgacaacgtttttcttttctaaataaaatttatttcctattacacttattattattttatataaagaaaccgaacgaaatttatttagggataattttaaaaaacaacacaaaaattacaaaaatacagtttatacaaaatttttaatatttttatggttttaaatttcatttatataatatgatgtatttttgtgttgtactcttattattttgttgttaattttttgttatttgtatattattttttatattgttttcgtgttgttttgatatcatttttttattacttgtgctttttttattattatttttgtatttttataaaatattataaaaatgtaaaaaaaatgaacgtaagaatataaaaaaaatttattaaaatttgtgttttatgtaattattaaaggaataattacataaggcactatttttttgtaaaatatttacatttttacgttcaaagaatgatttttttatatatttttacggttttccaaaaaataatacgaaaacaacataaaattaacaagaaaactagataaaagtaacattaaaataataacaaaataacaataaaaaataacatacatataataaaaaatcatcaacaaattaacaagattacaacataaaaaagactttattttatgtaaataaaatcaaannnnnnnnnnnnnnnnnnnnnnnnnnnnnnnnnngtatttttgtaattttttttgtgaaataatcctattattaaatgctgtaatgaatggaccagtgtggtgggctcataactggggccttttgtgtacctctgccgtaacccaataatgatccacaagtcgcccttttgtgggccatcaattaggccacgtaatgtgtggactgagagacatatagctcaaatatcttgatccatgagattttatggataaatttttgttgttcaaaaaataataaataagttataacttttggggttttttttttttaaggaaattacagtgtatttacttttaacttttttattattttttaatttatatttagttttatagatcatattctcatgtgttagagactctaaattttgataagtgatttgtgattatatttgatacgattataaaaaaaaatggtaaattgcggcataagtacttaatgttttaaattttatacacttaaatacttaatgtatatttttagaggcaaaaataccta

SEQ ID NO: 64704 - DNA, 1177 bp, Cannabis sativa
tatttttgaaaaaaattccgtgtaacagtatttttgtaaaaattaacccaaattgcagtatttttgtaagtttccctaacatgattcatcaatgggttcgataagatcaatttacattttgtagttttcgtattagcattgtgtagttaatatcattgaatgatatgtggatttatgtgagtaatgacatcgaatgtagcattgttattattaacagtggtacttattactattttgaagtgatgttttgtgactagttaataatattttataaaaattattacattaaattatattaaatctgatatttaattatattaataacgatattacacttaaaaaaatactaagtaatactaatgtattttagtatttctctattgaatggaatgggtactatgaacaaatttagtactatttacaaagtttgatactaattatatgtaatatagtaaaatttgattttttatgcattaaggtagaccctaattccaaaattacttactacttaaccccatgataaaattatgatatttcagtgtattcccaaaataccattgtcatttgaaaagtttatttttcacactaacctaacgttgttccacactagccaccaccaccattgtggtcttccctctccgacaaatcactactgggcttactctctctgaggaaccacctactattgtctcattcaataacatcaaatcataattcatttacgaactcttaaattgtaattttagttgtgaacccacgaattgtaatcccaatcgtgaactcccaaatcgtaatcctaatcgtgaacccactagacctcggcagtggtggatccaagctcaaactcaaataacgactctattttgttgaatataaaaatgggttttatttcatttttctgagttttacacatcaagcactattaaatttttacgagcaaaagatgccaaaaaaaaaaaaaaaaaaaaccaaaaaacacagtaaaatgtaactccaaaacttttacaaacaagtcaacaaaatagtctaccactactgctgaggtccagtgggtctgagttgtgggacaacagtgggtggcttctcaaaaaggataggggttgtagtggctggtgttgggaggaagagaagactaagagagagtgaaaagggatgaaagagaaattaagttagaagg

SEQ ID NO: 64705 - DNA, 696 bp, Cannabis sativa
catttgatacattaattatattaccaataacatcagaattaaacaagcaagaaagaattatttataatatatatgtttaccttgacgtataattcaaatttaaacgcaaggatggctgcaacagtcatgccaacgatataatatgttgccaggttcacataaacaactatgtgctgccaaccgcatcctctagccacaccttcatttagtgaaaaaggaaaaaaaaatatcttaattacataacacaaataaaaagatcaaatgaaacagaagtagaaaaacaattgaaagtagttcctaattttaatacctgacagaacaccctgaaaagaatcaacagtcatggatattgcaagcagaggagtcatggaagcaaaagattttattatatcagaactgtcactgtatgtgccagcccagatgttgtgtccgaatcctagagccaaaattagtatcaaggcaaaaactccacatagcttcagggaaacaatcattgcacttttagctttgtcaggacgatctgctcctaactcattcgacacccttgtgctgtatgttgtgacaatacgcttattaaataaccaagataaggtaaaattgtggaatttgaaagagtacaaaatttgatttctccctaacctggctgcagcactgaggccatacgtaaaattgtatgctatggcttcggtgttcaca

SEQ ID NO: 64706 - DNA, 832 bp, Cannabis sativa
tggtctcatttttagtgacaaatacactcctgctgatgtggacaactaaatcttctcgtgtttccacgtcactgccagaatgctgaattcgtttcagcattactccagcattgcttcagtaatctgccccattttcagcttttgttcccacttcttcctctcttccttttctttttcctatcaatttaattctttatttttcaacaacagacaagcacaattaattagaaaaacatacctaacaatatcaatttttacaagacttaaaagttagcttactaaatagaaaatgaaactaaaactaactaaaattaagcaaataaattatgacaaaaaaactcattttcaccgactagttttttggtcattaaaactcatttattagtcatccaaaaaattttgcgactaattatttttagtcactatttagtcgctgaaagtcggtcgtagaagaaatttagtgactaatatatttagtcacaaataatattattttctatgactaaaatttagttacaaaatatattaaagttagtcacaataagattaatatattggtcacataaataccaatatgcactttcaacaactaaaatttagtcataaaaagggtaatattttgtgtctaaataatttagttgcaataataaataaaaaattgtataaattaattattcagtgactaatatttagtcattaaactaatttatatatatataatttagagtacgttcatttaaattatatattaaaaataaattattcaaagctatatttaaataacattatacaattttattcattacataaaaaattacaatgtcaatcataa

SEQ ID NO: 64707 - DNA, 845 bp, Cannabis sativa
tgaacttggtctgattccgatgatgttttctcagaacgcttctgggcatattctttgttttcagcaaaaattaagattcaactatttctggggactaaataaaacttcctaatggctaaagttggtactcagcgcccaggttaacatattgtcaacatgggccagttctaatcagattctcgaaaaaagtatttcagacattttttcttcattagaaataatgaagattcaagcaaactcgagtagaaaaccacaaactgagggcctcaaagctaagtccaacacccaggttgacctggtgttgggcctagcacccaggttaacctggtgttgggcccagcgcccatgttgacaatcaacctggtacgttggtttcgatcacttaaatgataaatttgatccaagaattctctttcgaatggtcaaaataaggcaagagacctcgtcctcaagttcaagagccttggaagtatcaaaatgacatctcggaagctccaaaatgagtacccaacacccaagttgacaaatggcctggtgcgttggattctgcttatttgattcttattcagtttcgaccgtccttctagtttttcacaataactaagattcatgaagtcaaattcacaacttcgcatttctcatttccaacatgggaaaaccactaaaaaatgaagagtttcaagtctcatttctgcagaacagcaacatctctgagaattgttaacaaattttccaaaacacagacataaaaaaatatatcccacgacattttcccactcgcccaatgtccaggttgacgtcatatgtcaacctgggcactaggccatgaacatccttcagtaaaa

SEQ ID NO: 64708 - DNA, 736 bp, Cannabis sativa
  modified_base (194)..(203): a, c, t, g, unknown or other
tcattctttgtcagacaactaaaaattgagagtctccttctatagtaatttcgaatcccctcttcttctttttcattgattttgttcctttagtgatagagtaccatgcccactcatattaagtcaagtactcaatcatagtgtggaagaatgtgaataatccaaccaaattgaaggagagaagatccaggttnnnnnnnnnntaatgctctgctacagaaagaaataaagggctagagatctaaatgaaaaaagtcattattattccgctgccatcaatgtaaagatttcttaatctcttatatgtttatttcatcgtattagaatattcatgtttagggtgttagattataaaattattatcaacatacataagtatatctagatcttggtaaactaacttccaacagcaaggagttcgaatatttctatcaaccgtaatttattgaaacgagttatttaagttgcatttaataatgcaatttaatactataatcattgagttgattcatattcctcctgaagtacatgtgacaacttctggttgatagccgaattttaggtataacaatgcatatactaacctgacacttaacgaccaagtacttacataaattctacaatcgtaacgaaaggcatttttattgttaaaaaatttaattagatatttatctataatcaaaagtttttttttttttttttttttttttttttttttaaaagggttttttttttt

SEQ ID NO: 64709 - DNA, 1170 bp, Cannabis sativa
aatatacatgtttctactgatgatcacttaatgaatcattgattatacatgattggaatagaattccatgtatatatttgaatagtaatttaaacctttatattaaatctcatttaatttaaagtttaatcatatagaattaaaatcgcaactcatcttaaacttaactgtagatacttttataagtcactattgaaaattgttacttatttattttaagtcaaaataaataattgatacacttaaacttgcttttagaattatactatgagcattgaaatcttttgttaactttgtacacttaagattggatattaaataaactttattgaaaaaacataaagtgtttaaaataaaattatttaaattaaaaacaaacatcaaatgtgcaactaagatttagaacaataaactaaatacactgtcttttaaattttaaattaaagttgacttcttcattgctcttctaaaatcttcttccatcacaaactttgtagaagtctcacttttttgaattatctttatcttctgttcacaaatttacaagtaagagagaaaaaatgttagtggtttagaacaattcaatccaccattgtttaataagacaagaagaaaagtaaatcatatttaccttcctctctagcttcataactctgccaaaatatccatcttgttaggatgagtatttctctcatatgccaattgatcatgagcgacaacatacttattatgtactgccttttagatgtcacaggaatacactaatagtcatactgatctcttatctcttccttaaatgaagtagcaagatatacatagcacgatcattatcatcatgccattgggtaaaagctctcttgactacgtatctagaatgtttacacaatttgatcaagggagttttaacagcggcaaggtgaagaagattttctctttacaagagaacctctatttcaattttccatttggattggaagttaccatcaaattcagttacatagtaatagggatatgtgtcaatattgaattgttgttccattttatatcgttattagactttaaaaaaaataagtaacacgaaaaataaggaatagaatataaatactattagaatatttctaattaaggaaataaaataatattattgattctgataaatgaatattttat

SEQ ID NO: 64710 - DNA, 1214 bp, Cannabis sativa
ttcacctttatttttataaaaaaaaaaaaaaaaaactattttcacttttgattcaaattttctttttattttgtttacttttacttattaattttacttgaaaatctcacgtcccttcataatattatttattgttcttctaacactggaaaaaaaaattacttatttctttttctttaaataacaattaagcctaaatatacattaaaataataaaataaaaactaaaaaaatatatttatgaattgtactaaaaaattattgtgaacatgaatacttacaaaatgggtattataaaacattttaaaaatatatagttttaaaatagtaaaaaagaaatacatgaataaagattcttagaaataattttttttaaaaaaaaaaaaaacaaaaaagttaatatttaaaatattatatctttttgcatgcatataacttattttttgtgatgattagaggcatatcaaattttgagtttcttttatcactattttttttttttctatttttcttttaacactttttaaaaatagcataaataaaaaaattggagttttatattattttttagcaacttccttacgtttactaatttcaaataaagttttgataatagttttaataaattgtattttttgtatattattttgggctactaagttgttaatttcttttgtctaagtcgtgaattgttaatatttatgtagtttgcttgttatgcatccactatcttttcttctatcttagtaatgtaattttatcctgtcttcttattatttttttatctaaatatattttttattatttaatttattttgtaaaaaataattcttattattgaattgagttgccgtaataaaaaaaaaagattggggtcgttgtcgttgaggtatcctttaggaatcaaactaaaaaaaaatcaaatagatcaggagtactaccgtcaactttcgcacccgaaaacacatgccaaaatattttctttttcaatttttctatggcgatgttcgttatagttataatattaagcttgcgaattttttcaaaattttttgaataatttacattattggctacaaagttcctaatattctaatttaccaattgtattcaaaaaacttaaaacttatttttggcactgtaaactattcaaaaatttacagagatggtattatagtaccattacaaataaaaaaattgtgacatctattttc

SEQ ID NO: 64711 - DNA, 1535 bp, Cannabis sativa
  modified_base (224)..(233): a, c, t, g, unknown or other
gaattaaaaatttaagctaaagaaaacaagaaattcacattttctgtgaatttgaatacaacttttttttataaaataagttttcttgattttttctttttcctgttctacttttttaagagaaatgctaaaaggcaccagtggtgtctagcactctcctatctgtcaatatcgctattggtccaattaagtatcgggtatcatataatttaatataataactnnnnnnnnnnatcgctagccaatcgcaacgcgacatgttgcaaaagtgctaagcaccgctggtgcctaatagcaatgctccattttaagtatattctattattgtgcatttctttctttgttttcttattttcctaactattattttttccttttctctttgttttcttattttcctaacttattttttctttcattctcatctttatacttttcttcattctacaattatatgactaaattatttttaattaaaaaatgatacaatttaattgtaatttataataagagaattttatttgcatatataatatatatgattgatattttctcttcattctctcattttcaaaaaatacatatataaataaaatataatttttttctaaaagaaaataaaatgttgtttaaataaatgtatatcaaatatatataaatatatatattataagaaatttttatagtaaataccctaaatgatcgttctagtagatttcttatttgtttcggcatctaaaatttttttttacactacttattttttttgatcgcgtatattgtaatagtttaccgtgtcgaaaataagatttatataattacttatcacgcgcaaaagaaaaaatatttacacgtgcaacacaatatgtaaatcatatttttagcattgtaaactactcataatttttgtagaatttacaagtgatcttaaataactataatatacatgattataaaaaaaaaattggactgaaaaaattttcttagatgccaaaatagataggttctaccaaaacactcatttatgaggtgtactatagacttatcccatattatatactattattggtttaaaattaaaatatttttctaattcaattaaaccaatcacatattctgatactgttatatttttaaattctgtaccaatcacaaatttaatatttaaaattcaaaaacattttatagatattaaaccaatcacattttcagaaacttattttcaatcacaaaattcagattttcattttaaaattacagtatttgaaaacacagttttcaaatcaccaaccaatcaggccctaaattaccttagtaaacctgctattgcataaaaattggtaataagaatagaatcatattaaaccataatcaatagatacaattaaaatctaaagccctaacttttattcattgttagtttccttattaatttacctgctttttacttccattgtttttcttattttttttatttttattttctctcaaaattttatatagccaaatagaagtaagaatttaattttaaagta

SEQ ID NO: 64712 - DNA, 1094 bp, Cannabis sativa
caacaacttatccacttcctacttagttgtctctcggaatccaagggtcgcctcttctgtcttttggctgggcaattttgattgacatttaagtggtggtagataatcttagggtcgatccctatcacatctccatggctccatgtaaattgatcctagcttgccctcaaaaagttaattagctactatttcaattgtttatccaagttcttcccaatgtatacacactttgtgggattttgctaggtctagaacaacctcgtccagctccttaattagttttaataaatttctttcatcttgaatctgaggatcaagatcttcatccttcttctcaacttcttcagttaagactgccaataactggtgaccaacctttctatgctacagttctatgcgacagcatttgggagccagcatttgatcacctcgcactactcccacacccattggtgtctgaaactttagggacaagtgcttaattgaactaactgtccctagtccaattaatgctggtcaacccagcagtttgttgtaagctgatggcaagtcgacaaccaaaaagtctgacattatcgtggtggataaaggtgcttcgcccaatgttaattggagctcgattattccttgactggcgacacagtcgcctgtaaatccatacagatttaccatgcaaggtttcaagtcctattttcttcactgtatccttataaaggatgtttactgaacttccgttgtccaccaacaccctttttatcctcttattggaaagctggatggtaattacaagtggatcgatgtgaggataccttacgtctttttcatcttccttcgagaatataattggaggttcttcagtctttgctttcttggagggttccagagcaaaggaagactgctcattcttcacttccttcacatacctcttttgggcattgttgctctctcccgcaatatgtggccctctcgagataaccaggatatcctctccttcaaggggaggaggttgtaacccttgatttcctgggttattgggcagattaggctggttttgtccattgccttgtcctttcacatattgcttgaagtgacct

SEQ ID NO: 64713 - DNA, 623 bp, Cannabis sativa
aatgatataattattattatatttggtggttcatattccccttgattgacacgtgtcactctctgaagtacagctgaatttcgggtataacagtttttaactaagtgacatacagtgtcctaataggcgacagccaaagcatcattacttgaatagagttgtcagttcatctaaaatggatactattttagcaaccttttaattgatcaaaataagaatccaacgttgtcctggtaggtaagagtcaaggctattcttatctcatgagcttctaccattgttttatatttgtaaatttaattctaagtagtcaccgtagggatgagtctaatagaaaagaaaatttacaaaatatttatctttcgatatcttacggtcttaatggtttaggggataactatcaataagggagacaaagtctagcgtctcaagatccaattccaacattaaccatgaaagaccaacaatggagatcaaatgtccttaaactaaatctcattatttaaagtatgtattttcattttatatctattttaatctatttatttaatatatatttggttaaaattactaatttagatagatctaaatacaaattttaatttaatatttataaaattata

SEQ ID NO: 64714 - DNA, 772 bp, Cannabis sativa
tgctctattgacttgtggctctaccatttgtagagaagaaaaaggtcacaagggaaagcttacaagaacaactacttgataaggtgttgctaagagacaatacaaagtcatacaacagctattctagtaacaaacctgctatgcaatgccagctatgatgtatgagtatgagtactagttttatattttatttaattaaataattaagtttattatctttagtataattattactatttattaattttattattatgaataataaacttaacgttgacagtataaacttgttgacaatgttattgtgctaaaactctatgtatgattgatagaagattagaagagaagtaagcttaatgaaacttaaagaaaatcatagtgcaacagtggtgaaaatgtaattattgtactgataagttttgtgctagtaaaattttcaatccccttgaatgaggggctgggtcttatttataggtgagctctgatgactcgtattacatgtggtcccaatgtgtcaacttagtacctttcggaaatattctcattaaggattataatcaaaatacttaaaatataaataaatatagggtaaatactatttagaccctgtgttttgtaaaagttaccaatttgatcatctgttttgttaaatgacaaaaaaaccatattttttcccaaattgtacaaataggactctgaactgattttttatcaaaataaaatttaataataatttgatctagagattttatgacgaaactggttacatttt

SEQ ID NO: 64715 - DNA, 868 bp, Cannabis sativa
tggcaccctatgagatgtttatgagtgctaaatttacttggagtgaggtaccacctataagtgggtaagaagtatcaagaatggtagacaagatacgatagagtatgcacactgctctaacggatggagaatgatgaggatttaacaatgataaaaggtgaccgtatgttcttaaaggccacttcaatatggaaattttatgtacctcaaaagaaagggcaagtaaagcatgacatatataggtccaccttcaatagcgaatatgcataataaattttacattttaatgtgaaaaagatgcgtatctgatcccacgcagatgcttaagtatgagaatttgaaactacattaggatatgggttgtacgacatgtcagtatgcatgataggaaaaaagggaaaacaaaaaagtaagagtttacccataaataaggtcatgtagagtgaaaattctaatagaaaagctgtgaatgggtaaggatataaggagatgataccccgagttttgctgggttcagttaattttgaggacgaaatttctttaaggagggtagattgtaataacaaaaaaaaatgttattattatataattacgttatttattattattatttatttatttttaactaactcgatgtggagatagtaacttagaataattcattttctcgataaatagtatttttctatgttacgagaatgatgacattttgataaattagactattataaattactatgagatttagacttagtccattaggtgtgggacttatagaattaagacgggattttattattagtacaagttaattttgagtaaatattaaagatagtagagtatcactttaaattgacaaggagtatta

SEQ ID NO: 64716 - DNA, 862 bp, Cannabis sativa
actcccactgagcatgcagtaacttggcatctttcaattcaaatatgatttcaagatttatcaattttgaggcctagtctaattttctaatgagagatcgacatgaaaaaaaatatattatagtctcatccgataactaagtggtagaggttttagaagtgcttaaagctaaagaaaaatatcttagagcagtatcactatgtgaaaataaaaattatacaatctgctcgttttcttaactttctcaatgatctatcaacggaaacgatcatgtcatgctagagtggctcaaacaaaatatatgactcttatgcaggtaaggacaactacttcaaatatcataacaaagttcagctaatttaataccaattgggtagaaaagattgtgtggttcatgatatctaatgtattttttgaccatctaagcatatcctaactaacaattgaaaaaaatcattgacaggatgactaaattgcatgtatgaatcttagtattaattgtgattaatataggagaaaaatatcaacatgaatcacaattttcgataattgacatgtgaaaatttaggacaggtaagtataacatattcaatgaacaattttaatcttataattatgaaataaagtcattgcgcattttcaaaatttctaacattgataataaattttatatcatatgcgctaactataattaatattttattacacgttaatcatagtgtatgccgaaaaataatttataataataaaactcacaaaattataaaagacatacatataacataattatggaataataaataaataaaatttctcttgtatgagattaaataactaacaataatgcgtgacaatcctcaca

SEQ ID NO: 64717 - DNA, 810 bp, Cannabis sativa
  modified_base (70)..(75): a, c, t, g, unknown or other
ttttttgtactttagagataaattttttgtattttcatgtaataaatttattataaaaatatgaaatttnnnnnnactaataaaattattaaatcttaccaaactatcgattgttcattactactttaacattaacataaaagttaatatattttataatacaataaaaagatataacataatatagtaacagtaaattataaaatttaaaagaactaaaaaatatttattaattagtataatgactgcgcggtgagttatgtaattatgttgcctactatatatatatatataaaagagtgttttgaagatgtgatgtggcagcttatatggctgttttttctaatctctcaatcctcactttttctaattttattgaattgtttgttcgattacccattaaactgatgctaaataacatcttccatttttttaaaaaaaatatataaaataataatatacaaccattcaaattcctataataatttcaccataaagtcaagagtgcaagtgaaagccataaagccaagagtgcaagtggaagcccaaaagagtctagatacgtttttcttttaatttataaattaattaattattaattttctcatttaataatttttttatttaattagctgtagctttttatttgactcatctttttcttaagtttgcacgaaactctacatttctctctctctacactacttcaattgaagagctcctaacatccaccattgcttctgtcggctctgcaatgccgcaatatcaacaaatgtggctgatcggagagaaaaggaaaggatggaagaa

SEQ ID NO: 64718 - DNA, 1109 bp, Cannabis sativa
tgttatatgatatttgatacaatactataatttttgtagtttttaaataattatagcaaatataaaaatttatatttttttttaaaaaaaaagaagctcgatttggtcggtttaaaccgaccaaactataaattaaaacaatcaatttttttacttttatataatggtcggtcgattttcgaattataaccataaaaatcaaaaaccgaatttttgaattttttatgtgtaaaaaatctaccaataaattgtaaaaaagtatacataaaaagaataaaaagtcagtggctagatatagataagagggcatcgaatacatatgatgagctacaacaatggttaaagagcccaacatagcaagttaagagataattgagcatgctatgacgttgttaggatctcatataagtttttatggccctgaccggtaaatggacctttataaaatatttctaccattttgtaccaacaaaccaaacccaaaccaaatcaaaaaaatacaattatattagaatgataatttttaaataaaaattatatataaatttaaaatttaatacacaatccagttataattataattatttattacatttatgttaattttttttgtcaagacatttatgttactttgtataaggttatagttgtatatttccaattaattactaaacatataaggtaaaaaaggtgtcaaaaattgttacatcaattatttttttaagttaaggttcaataaaaactctatttattttataaagaattttatatacttccaaatccaaatgtttttatgcatattatattaaataataataataaaaaaactaaaaaaaaaatgtgaaatattccacaatattatgtttagttcactgtaatagtaattataatattaatgaatatgtccatcatattgtgtattttttccttttaatttttgtaatatattacaatgtaataattaattattacactcataattacactctattacaaaggaaaaatagtatttaataaaaatatagtaaaaaaatgaaaggtttattactttttttttgaatattttataattataaaataaaaacaataaaattattttagtcaataca

SEQ ID NO: 64719 - DNA, 1646 bp, Cannabis sativa
tttttttttttttttttgtgatgtcagatttgttatgtttttttttttttgagatgtcagatttttgctatgtttatcctccaagctaaccattctttaatttcattgaaacacttatactatattgacaagcaaaaaataaatgatcaatggtttcatgatgattttcatatactatacatcttgaatcaagtattattttaataaacaataatatagtaaagaattaaatttatatattttaagtaaaataattaacaaaaatattcgttcaaaaaataattaatataatggtgttgattttaactattaactttgataaaaataaataataaaaactgtaaaaataaaagttttcttttataattaaagaaagataaaaatatcggtgacatgctagtcgctccaaattattttatttttttccttattttttatttattatatttaaaataaatgtattttttgatgaactatttaagacagagtttagtttaaaagaataaaaatataggaataaaaggagaatataaatagaaatatatggaatagaatcaaatttaaaatacataaaaaaaaatgttgataagaaaattattaaatttttctcataatctattaaaatgatcgttctttccatttcaaaatataatagtcattccgccaaaataaagaaaaagtcatttattggaatgacattccaatactttaaaatataaccaaacaaagaaatcaaataaaaattatttcttttctatttcattacctcctaccaaaagccacccaaaacaaatataacaaaaaaaaaaaagtctatatgatatttttttattaggctaattatgatttttactccctgaactttgacatatgctaaattatgcctcctcaacttttctgagctgttaattaaagttcccctgaactattgagattgttgtatttaaggactttagtccaatttcattcaattttgtactaaatcatgctttccgaactttgatataccaaatcatgctcatcaaactttgatatttgtcaaatcatgtccctaaacttttatctctatgttagacctttcttattaaaattagacaaaaatccttaaatcaaacaatttcaatagttcaggaaaaaattttaatggtcttcgaaattcaaggagcatgatttagtacacgtcaaagttcagggacaaaaattataattagccttcttattattatactttgaatcaactcaaccatagctattttgttaaaaaaaaaaaaataatatatacatacatacaacaaaaatatctacctaacacaattcactaattctcgcatcaatttattatatccttcctacttaattggctgctacgccactgatgtcctacctatctagctcagccaatgctctatacaagagcagttttgttccctttgaagtttgtttcattggttcaattgttttcttcatctttatcatttattattggaggtatctctatattgtgctactaaaccgagtaactcttacttattatttctatgcagaaaaaggaaaaggagaaaatggcacatcatatgctataaataaagaaattaatatgtatatatatataaattctaacactactacaaaataccctttagaag

SEQ ID NO: 64720 - DNA, 809 bp, Cannabis sativa
attcccaaggcctcaattactgcaacagagtaaactccaccaaagcagcctgctcgagcctccaaacaattgccaaagtgatcacgagccacaatgccaaagccatattgttcttctttttcaaaaattgctgcatcaacgtttaacttgattgtattagtttcgggtttgatccaacgctcacctccatcaactttgttatttaagcataacgatgatagagagtttttgtcttgagctttctttcattgatcaagtgcaattgtagccaatccaacaatattcaaaacagaagtgtttttcgctttccaaacagtgttgtttctggctttccaaagggaccagcaaaccatagcaacagttgctatttgttctgcagtggccgaggtaaatatcagctctaaccagctgcggaattggcctccaggatcaaaaacaaaggtaactccaacctttctccagcaggcaagagcaatgttgcagaaaatcaaagcatgggatgtggtttcgggttgagctttgcacacgggacaaacagtaggcacttccacatgtctaaaaaccagattgacgcaagtgggaaggttgtttgttgcagctcgccataagaagtttttgactttggggggtatacacaagccccaaagtttatcccagaagctatgttcggttttagtaagctgagtttgtttctgcctttggaggagaccgtaagcacttttcacagagaattcttcagtattctcatacatccaagaccaggagtcacatgtagcatttagattgagaggaattcctaggattgcagc

SEQ ID NO: 64721 - DNA, 4310 bp, Cannabis sativa
atatctcaaaattaacatttgataagcaaataatgtgacttttgcatgacaacaaaaataattttgttcctcagataataagagcgctgtataatgtcagtaccgagagacaataatgagatatagtgaagcactagccaccatatcctattgataatcacaaatcatttaatcataacaggaattgcaagtaattttccaacctgcatccacttgttggtgctcttcttcatgaagcattacattgtctttattgcgtctcctttttgacttttcaaagctttcggtagcagctttaagtaaacgatcaacaccaacaccaaaaccagatttgggatatataggtaggaaccttactgtaatacgatgtctcaagctgtcaagaaccgcttgtgaaaaccatccacttgcatactgcaattacatagaacaagataattaagcatgatagaaaaaaggtaacctgaactctcagactatttataatagcttatcccaaccctcttagagagataataattcctagaaaagaagaaaaagatctagcaataaataggttctattgcaactcaagagagaagttctagtaagctgcttcaaatgacagcgttcaacccttgcttggtatacatactttagttctttatgaagaccctcaaaaccaggatataaatgaagaaacattttaaaagttgggtggaaatccatgcaaattagatactacatagaacctatatgatagtctacttgaatttttcaatataggtcttataagttaagtcaagtagactatgaatttagcttttattttcatttataaactagttatataatttgctatatttcttttaagtttaaataacaaagcaaatttcgtgtcaaataagtaagggtaaaaaggaatgagaaactaactgtgcaagtagtctgacttggaggcttcctaatctcttgttgaatgtagtcatcttcaagttcgaatagttgcaatgacgtctggcacttgaatggaaaagctcgaaatgcacatatatcctcccatctttgctttgccctgtttaaggaaaaatgcacatatattataaacacatgggtatgtctgtaaccttcttaagtgttgcatgtgtacatttcgaaacttactggttggcagtgttagcatcacaataacttcgaatagatggatgtactcgaaaatcaactctttgatatctgttaaagcaaaatagtaggaactatcatttctatcgtaaataataaaccattgataaggctcataagaaaaaatcattccatcaaactataacacatgaaaagattagaagtgcaactttcaatccaagattggatctgtcccttctacaaaggttgatgaaatatttgggtgaaaatcttacatgcgagattcaggatctttacgaggatcgtatccccttctgatccagaaccttagaaatggtccacttgaaaagtagtatgcaactctagaaagaagcctgcaaaaaccatattaggataagcccatggcagcaactagaactcattttttttactagttctcttgctgaacagaataatcttgcaaaaccgtaaaaatacaacaagaatcatatttttacatcagttatataggtttcacgctttcagcagaatgctataccttctaagcatactatgcacaaaattaaatcccttatcaagtaaccgttcatttagtgcacgctttatccatatgggtcgctcatcaaacaaattagaaacagccatctgtgactcccacggagttgagtcctgaggaatgtagtcctcccaatttattctcttcggtatctgtaggaatgcttaagtataacagaaagaatgcagattttggttcatattctgcctttctaacttcctatctacataaaaaattaaacagaaagtaaatctatatcacagattttagtcttaaataaggatatctcgataaaacacacgacaaatttgcacaaggaatgcagaatattttggagaaagacttgtcgggtcaagagatattcatgttgtatccaatgattttaatatgtgcttcataattgaataatgatttaaatgggccatagacgcaagatgtagaaaaatggcaataattgtatgaacaaagaaaaaagaaaagatatcccaaataatatctagaccgtggaaagaatgtaaactgaataattaggatatcattgatgttgaaatcgattccaaggacaggctccatgtctacctgccagacaaaataaagaacgtatcaattttactgttttactaaattcaatcttgatgatgcaaatatggtttactaaatcaatttaaatattcaggggcatggatattctcaagagcgctactcaatcaaaacagaatgatgattcaataaaatgaaaacaaagattaacaaaatcataatgtgcaatatatattaacaatttaacaaggaaagttcagtgagtgagcttattatttatcattaatgagtcaatgtgcatcaagtaatttggttgccaatagacattacatcacattcaggttgagcaacttcctcttgattcttttttggactcaatactactgatggtttcaacctgataaatcataatgttccgaaaaaagtaacactgttagaagaaatacattatgaaataaaataacagttctaaagttacactctactatgcatctctccatagacattatatcaaacatttcaaatacgaagcaacttcaaccaaaaaacattaacagaaaaaaaaaaaaaattaaacaattaaatcgtatcctagattttggatgatttagtttaatgaaatttaatcattattcaaaaaaataaaaataaacaattaaatcgcattggctatctctagataatcaaccacggcctggacaatgtaaatttaaaccaaaatataggatcttgctccaatatccgtttaaaaataattgaatttctaactgtttcttcttaacaaacttcactagactcaaataacatcacacaagtcttgcttagtcttacttccccattttgaaaaatatgaaaattattttcagcttgaaaaggctttgtcagggagtttcacatattttcttgcatcaattcactaaaatgattatctttcaagcaaatacaagataaatgagattaacgaagaaattcattctaatcaagagaatactagaaaatcttacactaaattctcaggaatatcttttagtgcaaagagtggaggcactattgtcatcacatcctcctcatcaacaccgagaaggtcacccttttctgaaaaacaataaatataatttagaattgttttccaagcattgaatttgaagaagagaaacacaaagacttcaccagtagcccctgcttctatccattttctcttcttcgttcgagccacatctgcatgtacggcaaccacatgctggtaatccgccattccttcataaacatatacccggaaaagaaaagaaaccaaaatcagctcaaaaattgtagaataatatatgttttcccgaatgataaaacaaaaacacttagcagatattattgaaattaagttgagtctcaccatcaaagtgataagcctcaggaacacgagcaacaatatcagcagaaatgttttcagtttcaggtgcttgaacttgagcttcttcattggaagcagctgatctaattttagattcacctgtttgtgttttattatccaaaatattcccaccctgcaaccctacattatcagaaactacactagtttttccattggtggacttgcttttagatattctgagcaacagattgttacaaggacgaaagtccccaaatgcaggatgcgaatatgggtcctcaggccgaaaatggagttccaacctatttgagtgaagattcctaacctgttaatagtctcaagttaggagaaaaatccaaatagataaaaactaatgcttctattagtcttaggatatgtttcccaagccaaacaaatcttggcaagtcaggaaaataataaggaagaaaaaaatatctgattataaaatataattgaaaccaaatttctgaaaaacggaagataagacaactaccctattttatctagatacagaggaaatcacatagaacaaaagctttttctttatagttcatttcattgaaaaaaaaacatgcttaattttttacaatgaacagaatcacatcagtactaaaaattgagtttaatgttagtcaaaaaaactgaacaaaaatagtaaagaatataataataccgtctgaatttctt

SEQ ID NO: 64722 - DNA, 939 bp, Cannabis sativa
  modified_base (714)..(719): a, c, t, g, unknown or other
aagaaaaagaaaaagaagcacgacaagtacatgccaatcgacaccgtttataccgagcttaatgaaactcaagaaaacatctatcttgcacatgagcatagggccgcttttcgtaaacttgaggccgtgaggcatgcgagacataagagggatgcgaccaaattttacaagtatcacaaggacattgggcacacaacagacgagtgtcgtcagctgaaagatcagatagagagtctcatcacgagaggtcatttccgacaatatgtgaaaagacaaggtaatgtacaaaaccaggaaaatccgcctaataacccaggtaaccaaggattacattctccccatcttaaaggagtggatatcctagttatctcaggagggccacatattaccggggaaagcaacaatgcctagagggaaatgctacaacagatgggttgtttagtgcgaagacttgcatgattgctgcaagctgtagatagacaatatgcaggggcgtagactgagatcaagactgagctagtttgttgcatgtacgggcatgctttgtgtttatgggaacactggtgttgtatgggacactgtaagctgaatgattcagagagcatatgtcgatcgaagatagcgaattgggatgacatcaagtcttaagagtaagactttgtgttatcaagtttgtcaaaagttagtgagtcatcagaggatgcagggttgatnnnnnnagatggacttgtgacacagtttagagagccgacatgatcaggagccagagggcaaatttgtggttttgggtgattgttagatcattaaccacgtgaaagaagctcaaaggagcaggtatgaagtgggttagaggggccttttgcctgaagttgtgggtgtgtggtagggccggaaggccaatattttgaatacttcgcaaagagattttgtgcaagagtg

SEQ ID NO: 64723 - DNA, 1780 bp, Cannabis sativa
  modified_base (55)..(65): a, c, t, g, unknown or other
ttttgtatttttctatttttttccataaaaatattgcataaaatacaatttaatnnnnnnnnnnncaatacaatacggtgtaatacgatgtaccaaacgaatctttaatagtcatttttgtggttaataaccatgcagcgtagtgaattcctgatcaaacacgtggcgtaagtacgtagatgcccacatttacattactccaactttggacttcgaagattccaactttaaacattttagaaagatagacttgtgattgtgactttgaagttcaacataccaaaaactaaaaaattccacaacactgtacgatgataatgccacgcaccatatttttgcatggtacaaattaacctttggtttaggcgagttttgtaagcgtgttattgttccattggtgagaaaattggtcaaacatttcaatacgagtttcgcaaagagcattgctattaagcattagtggtgcctaacaccttctcgatatgtcacgttatgattggctagcaatactcccgaaaagctattatattaaattatatgggacccgatacttaattagaccaatagcgatattgacacacaggaggatactaagcactactggtagcctttagcatttttctttggaaaataagttttattgagtaacaaaaactaactctttaaggagagattctattcatgtgtatatttcatattatttgtgtctggcccacttttctacattttaaaatgatgattagtgcaactttaaaacattagaagaaggatcacattgccctatatgctaatcatctttacacagacaataaacttattcatcacgtcaacatatatatatttttttttacttttttacattatgaaatgtgtaaaaaaattgttatcttatcttctatatcagtttcttgattctcatgttgtcataaccttcaaggcctctcttgtttgtcctagtacattgaaaactgtggctgcaatgtgaggtggcgtgagacccgcgtcgacatattgatcagcaggcgaaccgtggtcgatgtatcggtcaggaagaacaattggtctccactgcaaaattaagtttcaaattcaagtagttgagtatggtgattgtgtgatatgcataatattgagaaatagtattaatatttgttagttcaattcaatggaaaaggccagactgtttactatgtacctttgtttttccatcaagaaggccatcaagggccataaactgagcaacatgagatccaaaacctcctatagatccttcttccactgtaatcaaaacctcgtgatttttggctaattcgcgaatgagggcatgatccaaaggcttgcaaaatcgtgcatcagcaactgttagccgtagaccgtgaggttctactaaggctgcagcagccaaacaactctgaactgctgttccatagcctagaagtgctactctctccccttcaaccaataccctgccttttccgatctgaatggagattacatacaaaacatacaattaagtgttttggttttggatattgaaaagaattgtctcaagacaacatagattaagcgaaaagctacctcaagaggagttcctttattcccttgaggtaatggaacaccaattccatttcctctggggtaacggaaacaacttggtctgtcatctatggcagcagcggtggcaaccatgtggaagagttctgcctcatcggaaggagccatcacaaccatgtttgggaggcatgccatgaaagtaacatcaaaagcaccacaatgtgta

SEQ ID NO: 64724 - DNA, 2139 bp, Cannabis sativa
cagtatcactagtagaagcttttcgaccgccacatttctcccaaggatgagcgattagatttaaatctccaatcaccatccaagggagagagcacttattgatcttatcttccatccaatcccaaaaacctcttttctcattgtcatatggtcttccataaacggcaaacatacaccattttgaactagttattgactccttgattaaatcttcaaaaactcccccactcgcttgtaaaacttccaactcaatggtaccattccataagagagcaaagccaccccctatccctaccgccggaatagtcgatgcaaattgataacccaacattctagccacttcccaaattccttcttcactacatttagtttccattaaaaaaatacactccggactaaatcttctaacccatgccagaagggcttgggttgccggggttctacgaataccccggcaattccaagataggattttcatggcgacggtgggggcttgcatagggccgcctcctcacccaaaacacagtttaacttctcagatagattagtctcaataatttctcctattccgacattcgaattcatacctgcgtttagttcttcgctaatctcgattcccaatcttttcactggggctttaccattctgcctagctcctctacggctaccactggaagttcccccccttttgcgattgtaactccttctctttgacgtctcctctcggctgctactaccagggacaaaggtattgatatccaattggggcagcaaggtgattggtgttgatggagttttctctcccagagcttcaacctcttctccatttgtgatcacaggaacgatcgtcactgtagccttcctcttcttcgcaccagagaatgaaactcccgatgtagaaaagttggtattttcatgggagactactatttgattaggcccaatttccttactctgggctgggtccagaacttgatgaataacctcctctaaattactattagtgggccatgtgacataagtgggctcagggtgttgatgtggcactctagacttgcaaattttctcatgtggtaattccaccatttgatcacgtgtaggcccaatatcagccatcagactggctattatgccttcatctctccttctgttgtctatattagtcataggatgagtcctagacctttgtgaaagcctttgtccttgtctcagttgactctcattacccaaactagcttccttccatagtttctcaatgcacgccttctttgccccctgcgaattcaccctatttggtgagggtgtccttccaacggctccctgttgtcttgtgctctgcattaggggccttgtgcagtcactttcatccccaattattaccgatttacccttgttcctggctcccaccggctctccgatctcagaccgtcgaaccacatcaatcaccttcattctggggatggccgggtcgaaacagttacgaatcggcactcccacttttatccaagctccgtataatggcaccgccttgcccacgggggggtacgcatactccatagggcgatcacatttgccataggagtgagccaaatgcccacaagtgaaacacactgctgggagtttgtggtatttatattgcacccattctttcctatccctggagatattcagataaaagccagctacaagcctttgattgagcagaatatccacttggaatttcagaaatcctcttcttgcaattgtcgtccgggtagctctatcgaaatctatatattccccaactttccttgctattacgtcggtattctcccatgtaagatatggtgtaggcaaaccatgtgcttctacccaatatcgagctttgttcatgtccaccttttcccaacatccatcttctggccattcccttatattaagtagagcaccattgactaaccatggtctcttcttaaggacttcttttttatccgcttcattctcaaaaaatatgccccatattccctgtttcattgtcttcatacgccaagatccttccagcttccatattttggacaagatttccttaacccgtcctctggccatctcccttcttccaaagacagatgctaaaatcccttttttcgttacttcctcact

SEQ ID NO: 64725 - DNA, 829 bp, Cannabis sativa
  modified_base (682)..(682): a, c, t, g, unknown or other
aaactattttttgttctcatttttaaaaacaattatttaaaaacaaaaaaaaaaaaaacagaaaacaataccaaacatgctctagagttgctaatttttttttttatatacagaaagaaaaaacaacaaagccaataatgtatcttacaaatctgggacacccataaacacgtctacctggatttcgtctgctccatgagattcgaactactgctttctctacacaccgacatttcattataggtggaaagtcaacaaaattcatattaattgaaccttcagtgcttgattcgctgcactctaaagaattttttgaatcacttcgtccaagttcttggagctcacctcttattattgaagcacattgtttgaaacttagatgagccatggggttatagaaatgaagaacttgacaaatgaaaatgttaaaaaaaaaatgaataaatgttgggtaaatggccatcgtttgttataaatatagggaaatttataccctatactgtattattcccatttatttcaattatactgtgatacgacagttttttctttttcactgtctatttttatactgccttcttattttgtgtattctaatattgttttgctgataaaagtttttttattttttttgtttacacgtgtaagcctagagttttgcatgtgtttattattattattnttattattattattattttggtattttaagtgttaaaaaggtagatgtgactgtgtattgtcacatttgtggcaggcttttttttttcttttaattcaatgtaatcatcacttgaatacaataactctctctttcacaccacgtttt

SEQ ID NO: 64726 - DNA, 894 bp, Cannabis sativa
ctgtcaaacctttcaaccaaagtgcttctttgaaagcttcagcaactgccatgtattctgcttctgttgttgaaaggacaactaccttttgcaggttagatttccagctgactgctccaccaaaaacagtgaacaccagtccagttagagatcttctagtgtctatgttggcagcataatcactgtcaacatatcctgcaacttcttcagcagcttgtgtttgattgttgtagattattcccaggtttagtgtgcctttaatgaacatgagtatccattttatagctgtccaatgagcatttccaggattagccatgaatctgctcactacacttagagcatgagccaggcccggtctggtgcagaccatggcatatatcaagctcccaacaatactggtataaggcacttgctccatgagcttcttttcagcaaaggtttggggattctgagattgagagagcttgaagtgagggaccagaggtgtagatacagcctttgagttgtccatcccaaacttttcaagtgttttcttcaagtattcagtttgtgatagatcattcctctctggctttgatcaatttctatccccaagattttcttggccttgctaaggtctttcatgtcaaattcctcactgagttttcccttaatcttcttgatctcactcttctcttttccaataatcagtatgtcatcaacatataagagcaaatacagaagttgattcatatacacacagggatcgtactgacttttagtgaaaccaatactagtgataaagatgtgaaacctgatatttcattgccttggtgcttgctttaaaccatatagggaccttttctgaatctccattttattacaatatagggaccttttgagcaaccatatagg

SEQ ID NO: 64727 - DNA, 845 bp, Cannabis sativa
tttagggcataaaacccaaaactgggttcgagcccgagttttggggctgggttctagtctagttccgggtcccaatcacagtcccagtcctcttccaagttcctggtcatgttatgattcaacttttggtttcaagtccttggtctaggttgggtccaggtcctggtccatctttaggtccttctcctaccgactatgggtcttgtccaagccccggttcccaaatcccggtacaagatttggatcccaatcacaggtcccattctggtttcgattcatgtcctaggtcgcggtctaggtctcgttctaggtctgggaccgagacttggctgcagttttggacctcgatcccaattctgggtcccgagtccttttccatgttcgggtctaagttcaggtttgggttcgggtcccgagtcgcggttcgggttaggattcaggttagggacccaatcccagggttggtctgtgttcgagtccgggtcttgatccagttatagttttgggttttggtctaggtcgatctgcatctagttttggttctagtttcaagtcacggggtacgggttcaggtcgattttcggtccgagtttgggttcgggtccttatttaggtacagggcaaggttcaagtccgggtttcaatctcgattagggtccgaggttgggtccagttctgggttcgggtcagggtccaggtcatggccctgttccaaaaagccaatattgtaagaagaggaactatatgttattcgataagggtatatatttaatactcttaaactacaccaaatcggatttctagacctgccttagtgcttcaaagtttcctgatgagatggtgat

SEQ ID NO: 64728 - DNA, 1189 bp, Cannabis sativa
  modified_base (508)..(508): a, c, t, g, unknown or other
aaacattaaagtgaagataaaccccaaaacacaattcattagattaagattcataggctttacagaacgagaaatccttacggacaaacagaacgagagatgatagccatgttggaatggactatggagacgatattgctccaactaagagggctgggtggcctgggctccgtgatcgtcagagagaaaagaaacgagagagaacactgagaagtgagaagaaattttgaattgaagaaataagaatttgggattttttttaagggatttaggttttttttttttaatatttgaaatggggccgggccagaccaggccgggccagaagcccgataaaagcccgaataattcgggccacagtcggcccgggtgaccgacccggcctgcgaaaatggcccagattgacattcctagttccaggtcttgggtttggatccaggttctagtcttggctgtggtcaggtttagggttgagatcgagttaattgtaaagaatttataattttanacaatgtattagtacaagtcaatagaatgagtagcttgaaatggcaacgtggtgcagcaaagggaggaagaaaattattttttctgtatgagtttgtccttttttattcttctaagacagagactttgggggctgtgatttgcactagtcatttatgttgattttgggaattttatgctgcaatttctgattgagtgactgtgatttcttttaactgcatcatttaattgctccaaaaccagtaaaaagagaagatttatgatagctgaaaaaccactaaaaagagcatattaattttgagagctgaaaaactagtaaaaagaccgctgaaaaactagtaaaaatactgctgaaaaaccagcaatatatgaataatatatagttagtgggcggtgcatgctgtaatcagtaagatactctctcactacgatgaattacaggatttcatgttttcgaaacaatggtttttttcggggcattgctattaagtatccgttagtactttttcgatgtgtcgcgttgcgattgactagcgatacttctaaaatgtattatattaagcaaaatacttaaaattatatattttttaatatttttatacactattgttttatagcaggaaaacatggagtattatattatatatttataacgtaaaaataacatttttttttttaaaaa

SEQ ID NO: 64729 - DNA, 876 bp, Cannabis sativa
cccactcagctgaggaggctcttaaaaaaattttccttttaaaaaatattacatattcttaaacactaaggccaaataattaactttttgaggaaattataaatattacgggttttatattttttttttgtgtaaaaatggcttctttttttttttcaaaaaggttatcttatgaaaaaattaaaaaaaaaaagttgaaaaatataagaaaatcaaataaaggtaactaagtacccttatagtacatggtattgggctgcagagaaaaatgacttctactcagtacgaagtgcatataatctgctccaaagtgtgaagcatccttcggttttgtcagaaactaatgaaatttggaagactttatggtcactaaaagtgcttcccaaagctaaagatcttgtttggagggcggcttctaactgtcttgccaccaaagtcaatctctgtattaagaaggctttggttgaaaatacatgtcctttgtgtggagtgtttactgaaaccgaattgcacatattggtttcctgcaattttgcctgggcttgctgggagtttgctggtttggctgctgcaagtcgagaagcctcttctctcggacattggatggtcgatatgtttagtcgtctgcaagctaatctccacggcagcatcgagatgttgtgctgggccctttggtgtgctagaaatgacctcatatggcagcagcgatcccgtagcgtgaaggacgtggttacatttgctaatttgagtcttgatcaatggttcaaagctcaaggtaagggtaatatcccctcgttgtctcctctcaaagatggagatggttcggagctttggttaaagccgagtgtaggtatcaaactcaatgtcgatgcagcc

SEQ ID NO: 64730 - DNA, 1334 bp, Cannabis sativa
  modified_base (27)..(35): a, c, t, g, unknown or other
ataatttacatgaccatgagaaaaaannnnnnnnnaaaattatttcggatactaaaaagaaagagatgtatcggtatatcctttttaagggggttcattatagaacttcccaaaaagatattaggagttagattttttttttaataaaaagaaaaaactatttctgcaatataatttctaaaaaaaaatattcaattctgctataattttttttggagcattgttagtatgcacttcaacactttactcatgtgatagttgtgattgcttaacgatttcttataacttattaaattaaaatgtgtagaacttaatattaaattgcacaaataacaatatattatcttacttagcatcttaatgtctcctttaatatttttttaaaattttatactaaatattaatgaagtatccaatgtcgttttggtttgtgtatttttaatacaaatgctttaataatttagagatattgttgtttattattaatcatttattatcaagccaaataattcaatgcttatgtggaaaataataagacatggagggtcatgagatgattcaagttgttgagacttgaaattgtgaattaccaaagcaaaactatcatctctaaatatatgaagaccattatttgaaaaagtaataattgttttgtgagataaattgattttttgaataattttgatagaatttaacaaagctaattacataacaaatcaaaattcaacttttgcacccccttcaaactcaaattttcaattatgttaccatattgacaagaatgcaaaaggtacacattttgtgaaccagttcaatagtgcatgcccttccttttattatggggtcacttcaaagttgaaagattttttaaaataaaataaaataaaaccaagtcttaaactttaaggattaggaaggagacaccttccccaaacactgccaaattaagttgtttaaaaatgaattttgttactttaaaataaataaagaattatgattagtaagcaacttgttgtaaaaagaatcactactatttttctctttcaaaataaacatactttaatttgtgttaattatttttcatcagctagatagtcgaactacgtattattttgcacaaaattctcgttattttattaattgtatgttttatattaattgtgtattttctgatttattgtcttgaatgatttactctaattacacttattaattaaatttatatataattttactataaggtaataaggtatcccaatttactaagaaaaatactaaattatttattaaatgtgttgagccaaacaaatacaaacaccacatgtgtttggcta

SEQ ID NO: 64731 - DNA, 894 bp, Cannabis sativa
ataacttataaaacaaccgaaaaagatatcgaacaatttacagaagtccatatttttgtaaataaaaaagttcaaacattaaaaataaaaatttgttaacgtatatttataatttttttttcaaatttttctatattatgtaaaaattccgtaaactttttcgtgtagtgattaagatttgagaaagtgctttaactaaatatatatatttgtgtgcaattttaatgggtattacttataatgcaacaatatatttttttatatatattttttttaatgaagtagctaaattaaatataaaaattcaattttttttcttgatgagtaagatcaattgtattgttcaatcaaaaccattacaacaacacatttacaaccaaaacaaacttatcccaaaccaataataatcccttcacctatatgagcagccccctacctttatttatagctatctatacaaatttgtaaaaaccaatttttatcaactggtcatcttacatggtaatgtgtctgctaatctaatcttataatcatgttgtattatctttacagtatgcttaaaatgacatagtttctggttccaaaaagcatcattccgagctcgccaaatgtggtacactactgctgcaataatggacagcagcatactcttacgagtgttgctcatcttttttcccttagatatccaccggagaatctaggcaaaatccatctaagccaaactttgataattcccaagcaccttttgctacatgaacaatcaaagaagaggtgattgatatcctctttttccacagggccgtctcaagatgatgagaggcttagggcgaaatttgaaacaaggctttttcttttaataaaaattaaaataaattttaattaaattttgacaca

SEQ ID NO: 64732 - DNA, 1058 bp, Cannabis sativa
ctatactaatgtaaagtttaatacagatcctattttcatcatggatggcataacatttctaaggtgccttatgggaaaggttgtaggggtcgcaaaaggtattaaattatacaaggttttgtaaaatcagaagagtaaaaaatatcaatgaacaaaaaggttcacgattatgatgggaaaaacttgcaagtctatgaaaacactttataatataaagtgtcttcagttctttcagataacatttataattaatgttatgaaaactaatttaatgtttgatcaattgagggaatatttgaaacataagtagccttgcaaagtcaccagcaaaggagacttaattaaatttttaatactccaacgattatttttgctctgcttgcatatgtagtttaatatatttctcacttgacttgtgaaaaatttcgataaatttgtctattcaaaataacttattaccatttatcactttttataagatgactcgaatatatatcacttgttattcctcatattatttttgtgaaagttacatattttatgaattttaatataatttgtgcaaaaatattgttttttttcaaaaaatttatagaaaatatatttatagaaaaaacaacatacggtaactagttaccttcttaactggttattcctctaattactttacattgtctttcccatatttttgaacttttctcttttttaattttttccataaaataattttcttcaacaaaaaaaactatatttttgtaaaatatgccaaaataatcataaaaatgaaaattttccagtatttataaaaatccaaaatatggtattttaaaaaaaattaaatgagctattttacttaaagaatttttaagccatcaagaataagaatgggatcttaggtgacctagctaggcttgctaaggtatcactaaaaaaactatttctagtgacaaccttttagttataatataaattttttgtgaccaaatgtgatttttagtcacaataaaatgttacttgtaattaaaatataataattaaatacaagttgttactaattt

SEQ ID NO: 64733 - DNA, 829 bp, Cannabis sativa
aaaaatgagtagttaacttggcttgattggtttgggatttgaaaacagttttatgtttttgaaaacttaaaagatgggggtccacataagaatacttgattggtttggtgttttcaaaaattaaatttgaatataattttgagtttaagctaaaaaatgaaaacaacaattttatgtgttttctatgtcttcaaatactctcttattttttattttgagattcccaaccaatcacaaatccaactttttaaaactcaaaaacacacaatctatcacatttttaaaaataatttttcacatacaaaattcaaatttttgtttccaaaacactcttttagaaaacacatatttatataggtgactttctataatttttgtccattaataggatataaaaattgggtaattaaattaaatcaaattagtgatattttttatcagatagaaaatattatgtcaattagactaaatattgactttgaataaaattaagtagaattaatggtagagaaggcagattctgaaccaatttaatgacattgaaccaattaaatctaataatccattgaatcaatccaattacaaaaaattgaatatacagttacaattaaattgaattagatgtaaaaatttaattagattctaattatattggattggttattaaatgacatttttaaatctaaaattgatccaaattcaattacatctgatacatattatatttatttatatatcataaaataacacctaaattttattttatttattaatatttattggagcctattgcacttgataaaagaaattctttaaaaaaaaatctaag

SEQ ID NO: 64734 - DNA, 607 bp, Cannabis sativa
tatatatcaaaaaatctctaaacataattgtataaaattattaccaaaaatattaatttatctaaatttttcaatatttattatgtcattagctagggatggctcatctcttaccaaattaattaattaggccggtcccatcaattatgatgagcttgaattttttaattattgaaatgaaatcactttcaataataataataacaacaacgatagtacatagggtaaatattattttagactttgtgttttgtaaaaattactgattagactttctgttttattaaattaaccctgtattttccaaaatagtaaaataagacattgaactgaatttttgacaatttttttttaatacaaccaacttgaagacaattcttaacacgaatagatatagaatatgtaaacagttttgtcgcaacatctttagttcatattattattaaagtttattatgtaaaaaatcagttcagggtcttatttgtactattttagaaaatacagagttcattttatcatttaacaaaataaagaatctaattaataatttttacaaaacaccgagtccaaagtacatataacgtaggaaattaaatataattgcata

SEQ ID NO: 64735 - DNA, 1068 bp, Cannabis sativa
aagaagtcttggctgttcagatgtctacagtagcatctgaatcaactttttctacaggtggaagaatcctagatgcatttaggagttctttatctccaaggatggtggaagttttgatttgttgtaagaactggtatacttgtgagtatgaggaacctattgtacttcgtcaatacatagacgaaattgaaggtttagagacatgtgaacaagttattccaagtaacatattgttcaatcattatatattaattgttaattgaaattattttgtatatgttagattttatgttaatgaaatctttatcaggtgattgatcatgtattactattaatgagaatcttgacaatgcctctggaagtggaagtgggacaaagaaaatcaactaaaatctcaaggtaattaattcaaaattgatttttttttttttttttttttttttttactttgaagctttatttctctcaatagtactttcataaatcatttctttaattgtgtattcttgttttttgtaagtgtaggtggtgatcagggaccatggttgctttgcttgttggattggactctattttctatctattgctttaatgtatttcatttgtttggttgtggaataatatatttaatgcggacttatatttgatttgtgttttagactttagacttttaactagatattttggatatatggttgcacttataatatgtagaatcatgtgtttacaattggtctttgaacaaataatttgtacggttgtagcattttttttaaagaaagtgtctatatggttgcaatagctttagatttaagaataatgggtttatagaataaattggactttattttttgcaaaaaaaaaaatcggttttggcggtttgaaccgaccaaaccgctattcaatttggtcagttttagaatggtttttaaattggtcagtcagttttggattgaaccaatccagaccaaaaaatcgaaagttggatttttatgagggaaaaaaccgactaaaccgaccaatgctcccgtactggagatgaaagttcaaacgagagagagagagaga

SEQ ID NO: 64736 - DNA, 961 bp, Cannabis sativa
  modified_base (511)..(516): a, c, t, g, unknown or other
ctctacttgctcatatgcagcccaagattctcgatcccatttaatgagctttgaggggatatttatagtgttcttggtgaggctcttagagaatcactagctactaataactaactttgccatgaaaatgacatatatatacaatacatataatattatgatattattaggatgagaaaaacaaaagagtactattataagatattagtggtgcataacaccacttaaaaacgtctaataaataattaaatattttataataattattaaatatatagatgtgatctttaattactcactacaaaatttttaatcacaataaaatttgtggttaaaagtataaaagttgtctaattacgaatcttcattcttatatggtaactaaaaagtctatgactaaaaatattagttacaaaaattacaatttgttgtgattaaatgtgttttaatcacgatacttattataactaaaattaaattagtgacaatttgtatttaaatactatatttnnnnnncaagtaattttttgttgtgactaaaagtcatatttaatcacaaaaatttatgttataactaaaaaattatcactaaaaataattattttttacaaactctaataacgatataaaattttaagtaatgttaaaaattactagtgcctttttttatttctcaaaacaaaatacactaaatcaacattagtatttttaaagcaatataattataagtttaagagagttataatatgtttttttgggatccagctggttacatctaatatcttttaactttgttacttttccccacacgctaaattcaccaactactccataattttaagataaccttccaacacttctcttttctctcttcactatataaatctaatctcataattcaaactcaacattaactataattaagtgttaattaattcagtgtttttcattcatggctttt

SEQ ID NO: 64737 - DNA, 725 bp, Cannabis sativa
gtataagtatatatatgtgtgtatttgtataaatgtatataaatgtatatatatgtaaaactattgctatatgtgtatatgtaattgtatgttaaaatatattagtgtgtatataatatatatgtatatgtatatataaagatatataggtaaatgtatatatttatgtgtatatatgtatatatatgtaaaagtatatatttgtgtgtatatatatatgtatatatatgtgtatatgtaaatgtatatattaagtatagttctatacttttaattttatttagttaatatttattcttttggtgaataggttttgtggtatttattttttttgtgtttggcaaaactcacttctcggcatattggaaggttagtatgcctatgttatattatttataatattaaaaaaaagtttatttgaaaatgcatattagtagagtttgaatatcttatatattcatccatagtgaaaaatatggatgggtctcataaattaatatgtatgtaaattgttctgtgaaaaatatactgcggtcggatgggtgtcataaattaatatgtatgtaaattgttcttgtattgtgtttgtgatttttgtgtaggtgttaaaaatttgggaatggtcaagtagtgttatgctgtcgaattttcggtagcataacattttcaatttgattgtaagttatatttaaaaaataattagaacatcattaatattatagata

SEQ ID NO: 64738 - DNA, 883 bp, Cannabis sativa
tggttgtgctcatccaaaataagtcaacaaataaatcaactattgttgaaaattatttaataaatgtgttatagtgcgaatttttcacttaaaaattcgagatcagtctcttatgaaattgacatgtgggtccaatcctcaagggatggatgagctgtcaattaatgactccgagagttgagctcgcttgacccaaactcgcgaaatgatgtgaccttaacagagtttagtcacatactgtgtctcgcatagtataaaataagcaagactaagagagatttatacaagtcgtgcatataccaagacgtatgtgatgattaggtagccttctcctgcgagtaagtaaagatcgcttctttacatagtgaactagtctaaatgacaaagcgtattcaataactcgatagggactcgtgtattccatgttgtcgatgcatatgaggtgtccatatacgcgactcaaatagaacgcagacaccttagcatgaggctaattagccctgcttagaaagatagaacacacccaaaacctgcgagtttgtgcaagaatatgaataggcaactcgcaccctataggtcgcatatgttgctatattcattaaaatggatttaaaatgttctttatttatttttttacgtttattctaatttaatgttaatattaattgtaaacggttctataaccggtcaaattatgtgtaactaaaagaacacttgctttgtatataagagagtgatccaacatgaataaactagatttgcaacaatggactaagcaaaccgtgatctcattgaaccaatatattcccttgtgttcattattttttccattttgttctattgtctgggcagtctctttttgtaataaccaaaatatttagtt

SEQ ID NO: 64739 - DNA, 929 bp, Cannabis sativa
gatgttgtcgtttagacttaaataataagactttatttttaattgggtacccatattttaaaaattattatttttaaataaaggcaacattagtaccttaacgctagtttatttatggcattttattttaataaataagggctttacatcggagatcatggggagaaattttttttttataaagaaaaataattttgatcgtggggaaaaaatcaaattaattccataaatgtaaaaataaaaataaaacttaatataaattggaaaatgtataaaaaaaaatagagggttattgtgttgagtgtcaataataacatgtcatcatcattgcatgtaaattgtgtgtaaaaagtattttggtaaataaaatactaagaaaagtaaaaatgtgaaattataataaaagtaactttttgtatttgtcttataattttttctaatatatatacatataaaaattgattacaaagaaaataccataaaagataaagcaatgccctagtatagaaatttcctttcatgtattgggcagttacagagtcccacattgttaatgtgtggaaagataataggaggaatgggctactcctcccatggtcaattggttttgagatggaaccccattcatcttattcccaatttctaacatagtatcagaggaaaaaaaaaactcacgactatccgaccaaaaaaataaaccgatcgaagttgagcccaaaaaaaatgagctaccaaaaatcttaaaaaacctgatcaaacagccaaaaatcaacaaaaaatttcacttgtaatttggggatagtgaacgaagaaaaaaagagagagagccaccaaaaaattcaaaaatatcgatccaaaaagtagagcaaaagagctagtgatcagggatagtgagccaaaaaatggccgcttatgatcgagttgtccaa

SEQ ID NO: 64740 - DNA, 2428 bp, Cannabis sativa
aaatcagcaatgtattattattcacaaaacatttacaatctaagagcatctctttttggttaagagacctcaaatatttttctaagtattacaaggtttggtaccattctttttttgactcactttttttttggccaaagtgaatcaattttgtgtatgacactatactgaattttctttacaattacatcttcattttcagtcttgttattccatgtgtttatcattccttgtatgccatatcgagtagaccaatcatgccatagctgctgccatgattttctttttaaaattttaattatttttacaatttttatgattttatttatagataatacgatcttttgatgaatttttatgctattgttaacttgttattgatttttgttatcaatattttttttaattgttttgatattgtttggatgttatttttctgttacttttatgtagttttttttgttattttcacattatttttatagaataccgtaaaaatatataaaaaaaaatttaaacgtaaaaatataaattttttacaaaaaaaatattttatgtaattatctcatgtaaaaatgtgctctattccacaacccacgataaaaagaccactaaaattgaaagccaaaaggattttggtattatgggtacgagggctggcttaagggtggggctgcataaattcatacccaaggccccatccaagtccaaaagaattctttaacaaaagactataaatttatttttcaaaaatactatattttataaatatataattatttttttaaaaagatacctaatttattttttaagaaaatatgcttaattatatttttaaaatactgtattttagatttttaccattatatatacaaaaaaagacataaattttttaatataaaagatctcaattatatctttgagcttcaattagcttgagacgacctgatgattggcacaccaaaccaaatcatcaaggggtgcaccctaaaaatttccaaaagtatatacacatatattgaacaagacataaaattagcacgagcccggaaggcccacgagcacgactaggtaggaaaaaattatatgtttaggcacgacacaacatgatactacaaattggcataacacgacatgaaaaatatgtcattaagcacgacatggtacgagaaacacgaaaggtacaacacgtaagtatgaatagactagcccgaaagtacgaaacacgacaagctttaaaagtacatcacgacatattaaaaaaccttataatttattattaataataataagatatgaatttatcaattataaataagtcaaaaaaataataaaatttaaatataatattgaatattataattctataattaaaattattaaaatatgagaaattaagattatatattaatttatttataggatatgatataaaaatttgaatatttataagtaaatattcaaattctaatgatattatcaattttttttatataattatctgtaaaatattattcgaaagttatataaatagaactatagctttcaaatatatataatttagtaattgtaaaaaaataatattaaaaagtaaagcacgaattcaaactcggatataaaaatggactgacctgtttaaaaaatacagatcgacacgagcaaagcacgacacgaaaaataccgggccttcaggctgtgccaggcctaccctttaaaaatattagcacgacacgacacgacctatatttttatgtagcacgacacgacacgacctattttttaaaaaatacgaataaatacagaccaaaccaacacaacacgcaccaatttacaacactacttttgcattagtacaattaattttttgtttttaattgcatttaacattctaaagttacattgcgttagtaaaattgattttttttaaaaaaactacaaaatctaatattgcatttaatattctctctttaattcactcaaaaaaaaatattctctctttaaaaaaaattacatttaatacgattgggaaccctaaaaaaaacgtatattgaccgttaatattagatttaattattattctatttttttaaaaaaaaagaaagacttaattaacttatatggatcgaatccagacatgttattgtatccatatcaaattttacttaataaatcagcaattatatttataattcaggcattatttttaatttaatatcatattcatgatcttgtaggtgtattttggtatatataaataaatttttatcaaattttcttaatgttcaatgttctgaggatacagatttgtgtacatgcaccaattttcacacaataatatgtttctatttataaggtctcattttatgagtattaattggttaaaaatcatttcatgtcaaaaattgatgcatatcatatcatactaata

SEQ ID NO: 64741 - DNA, 730 bp, Cannabis sativa
acatataaaagtttgagggacatgatttggaagatatcaaagtcaggggaggatgatttagtacctaaaacagtaaaattgaatgaaattagacaaaatccttaaatttaacaatctcaattgttcagggggaatttttaacagcaaaaaaagttcagaaggcataaattggtatatgtcaaatttcggggggaaaaattactaattaaccttatttttaatataataattaatttatttttgagggtcaaacaatacattaattaattgattattaaacaacaaaaaaattttgttttccatttgtagtgcatatcttactaactaatgtgttgccgtagtaccattttgcattatatgtaaaagagatacacccaaaaagatagataataaggatttaatagatctagaaaaacaacctcaatcagaaacactctcagaaaaagaattgacagaatcgacaattcagcatcactctctacaatggaaaccaaaaaactcaacaatgaacaattctcggtaggagagaaattagcagcataaatgtgacaatcttgtacttgtgagaattgactctcttgaagagaaaatattttaattgaaaataaacaaaaaatacattagtaaaaaaaataaaaaataataattataacaaataaaaaaactttatttcaaagtttataataaattttcactacaaacaaatagtattgataaatagtaacaatag

SEQ ID NO: 64742 - DNA, 647 bp, Cannabis sativa
aagttcttaaacctataatcatattttgtataatttttccaaatctcaaaatggggggaagaatagtgtattccttcctcacaacgagcagaaatcttttctaatatcttcttcttgttgaatctgtcggagagaagaggatggagtgagcaccatctcatcgtgtttataattttcttcagtttccaaatttggttcagagattgcaagcgaagccacaccgaggagctctgccacggacttcgttttctttacagtgtccaacggcatcggacctcacttcttggcagtcggagccatcgctttcttcagctgccctttcttcttccaccctgcgccatagcccagcaaattgtcgctgagagagacagagaggaaagagaaaagagattatatatgctttcttaaagttaattaatatttatatatttagtggtaataaatttaaatttaaataatttaaaattgttaaatatacatgtcatttagcaacttgtttgaaaatatgagtggaatgcggataaaaaacaattgggatttttccccgaattttgacatgtactaaatcatgtgccctgaactttcatccatgttagacttattttactaaaattggacaaaaatccttaactccaacaatctcaata

SEQ ID NO: 64743 - DNA, 1101 bp, Cannabis sativa
aaattaattagtagttacataaaatgattatgaaaaaaataccaatttcaaatcacttggtattgcataataccttttctttcaaccatgtactaaaatttcgaaattgttcatcttgcacccatttgtggttcctcgacttactaggataagtagtcttgatccaatcaaaatgtttccttcaagatgtagttatatatcattcttattagtacacttttgatttgaattgaatattaaaaattaaattaaacttactcaatgtacggttgaacctcatcacattttacaaaacgagtcggtgtgcttcatctcgatcagctcgacttacgtcgcagaaagaaacaccccgaccccctttactaatttcattatcaatccgaggaagacacgacccaacactagctacatttgacaagtagtctgaacaaaattctacagcttcttcaatgatgtaggattcaacaattgaaccctctggcctacttctgtttcttacataaccccttaggattttcatgtaccgttccattgggtacatccatctcaaatacataggcccacacatttttacctctctgaccagatgatcagttaagtggatcattatgtcaaaaaaggatggaggaaaaaattgttgtaaataacccaccacttcagcgatttctaatcggagattttccaactttgacacatctaccactttgcaacaaagagatttaaagaataaacataacctggtgatagcatatcgaactttcttaggtaaaacagaacggatactcaccggcagaatatgttgcatcagtatatgatgatcgtgagacttcagtccagacaaaattaatttgtccatatctaccaaattggagatattcgaataatacccttcaggtactttaacatgagacaatggcgtatagaaagattatttttcttccttagtcagggcattacacgctggtgttaaaaaagttcgtttaccaataatttgtatatgtaaatttcctctaatccccatctctttcaaatctagacgagatttaattccatctttactctgaccaggaatattaaacaaggtattaattaagctatctg

SEQ ID NO: 64744 - DNA, 679 bp, Cannabis sativa
tattcttatcctttaaatagaaaatctcatactagataagaatgtaaaatagaaattttttcatttttacaattcaaaatagtttttttttattattattttttttttattatttttacggaattttacatagaatcccctattgcaattagcgctgcaacctaaatcgcaacaaaaaatcatatagaaacccctattgcaactagcgctgcaaacttaatttataaaccgaaactgtaaattaaaaaaaaaaaaataatatataaagtaattcccgtataaaatgttaccattcctgtttaaaacatcaattcataccaaacaaccttattataagattatgaatttaatattttataagtttactagttctagtttgatttgatgagattaatttaatggagttatagacatggtcaacattattccatattgagtggttactatgagtttccataatgtggtcaaaggtcaaccatggcaaaaatagtttttgtaatggactacttcaccatttatttatttatttttttttttatgtatttggttattattcaatagcaaaagtaaatacatatgtgaatgtacatatatagaagagcataaaaaattaaaatgattatttttattagagttttattttctaatttttcggtcacatcttttttttttttttttt

SEQ ID NO: 64745 - DNA, 972 bp, Cannabis sativa
caattatttaatttttttttttattttaccttaatggatacccaatgggtttcccataactaatgggtattcccctaccccgaatctgttggttattagatggggttggtgcggggatgggggtataaataggtagcggggatgagggcggggattgcattccccgtacattaaccgtccaatttctatctctaatttcaatagtttaaagaaatttttaacagctaaaaaaattcagtaaaaattataattaactttttttataattgctattgaaaaaataaaatatttaagatcgtaaaacttgatgataaataaaaatcccattctgaatggaattatgtatataatatatgagttagaacttttggaagagataactgagaacatgttggctgcttggagaaaagattcttttcattggcttttattggcgcttgaaaaaccatcgttcaactattatttcactattgaagtggtagtaaattgttataatattaagtgtagtaatataaatgtaccactgtatataaatgttgacataagcagtttatatattataaatttactaagaatttagtaatttaaaaaattttaccactaaaatttgagtttaaaaaattaagtgcaattgtaataatatttaaaaaagtttagtaataaattttttttacttacttttataagaaatgttaaaagcacctgtgattgtacttttttggatatcaaaacaataatttttaaagaatatctctaattaattataaaacaccacgtcatttagatgtgttaaatagcactcttttttttttttacatgcaaatctaatgtttgagctttcttccttcctctcataaactctcctacaaaaaacgacaattgattctgccttaatgacaaggcaaacgacaactcacattctcatctctcctcgcttaaagcatcatgtatatattatgaagaaaaaaatgg

SEQ ID NO: 64746 - DNA, 2446 bp, Cannabis sativa
ttggtctaatttcttagtgggattaatgttttgtcatatatatacatatttcttaattttggaatttagtgattaatatctgcatgtattaatatctgattaatatatatgcaaataatcataggactgttgatcattattagtttttttaattgggtcatataatgtaataaatacattgtttttgatgagtttctgatcatatagaattgagagtcaaggatttggattgcatgacgtcatcattttgactatctaattaatgtggcactcttctttattagaattcatgagttaacgtattaaccaattgaaacaagatggcttaatctattaattattctaaatatatatagatgacattatatataactacagccaaacatgtttttgaagtgaaaaagatataaatgaataatatacataatagggtgttgtgcaaataaggtatatatgaaagttaaaaggttaaattttcctaaataaatagaacacacatgaaaaaaaaaataccagatatatataagactattagtaaatttcataatcataataatacaaaatggaagattgaagaagaggctatatattgaaatcacaggacatgacttataaataaataaatagaattaatgactttgcttatttatttatttaactttgactgcattttcctagcttattatagtctttttcgatgtgactaaatctaaaagcgtatataatatatattaatatatattacttacaaattaataaacaagaaaataatttctaattatatatataaatttactaaactcacaattattggctgtataaataatggtgaataatagtacacaaataaagaaaacaattaatatgcatgtgtgaaagaataactgtatagatatatggcaagaaatgaaattctatggcacaatttactataaactaaactaatgacatgtttactaattaggatttgaaatgtgatgtaagttagtgattctctttccattatttaagtaatgaaatggaattaatagaaagaaaataatttttattttctttatttgtagtattaaaatgtaatttataatagaataaattttttattattttggtggaatgatcattacattttaaaataatagaagatattaattttttttgtattttttaaatttaatttcattttatttctatttcatccttatatactcttttttttttcatatctaacaataatacaaaatatattaaaataatcaaattggataaaaagattatagataattaaaaaattatcttatatactattttttaaattttttttattaaatttacggtttgaatttttaaagttgtttctctagtggtttttatgtgggttgttatacgatatttggttgcgatttaagttgttttgttagttgcaataggagtttatatgtagaattccgtaaaattaaaaaaaaaactattttgaagtgtaaaaataaatgtaagaaaggtttgagaaaagggaaacatagacatttaagaaataattcctcaagccatcgaaaccactatttcatgatgtagtactcaaatttataaaggatagttacataaattatcccttataaattagtaaaatgttatgtatgattttaatttgcttcaaatcacaatttataataattttttcacttgatttaagtaaaaaatattttataaaataccgtaatttttttaaaaataatcgtacaattacaaatttatttctataaagtatataatcataattaatttttattaattactaattcaatcaaaatgttgagcaattataaaaaccacaaactttgtacatagtataaatattaatttatatatatattataaaataaaaattgtatatatatatatactagttagtagcgcacgtgtgagctacattgtggtcttagaatagtaatttatataaattatattgtatatacatcttattttatcaaattgtggtgtatatcatatttttagaatactatgttaaattttgatttgtattaggttaatttagaattttcctctccccttccgaactttgacacataccaagtcttgccttttgagctatttttaacgtaaaaaattctccttaaatttttgagaatgttagatttgaggtattttgtcttgttatgttcatttttaataacggtgaactgacgtgatgagtgaccgcaatagattgtgcttgaatgagagagaagaaaaatttcaaaaaggatgaagacgacccaaaaaaaagcagaaagttcttcttcttgtggatgaacaaaatagggtttcaaagccctcaatcaaacaatataatttagggattttatcagttttaacaaaaaaaagcaacaatattacaaaaatacttctaactggtcaaataaacaaatatacagcctaaataaaaaaa

SEQ ID NO: 64747 - DNA, 1332 bp, Cannabis sativa
actaggccggccagtatgctgatgatggggcctgcctagattctatggatcttgatctcgcaactccaaattcagctctttcttcccttacacacatttagaaagtatttttattagcatcatttagcattatatttgtatcacatagataatgtttcatgtttcgcatagcctgtggctttttatggcctgtggcctttcagctttagaacaatactcacttttgtgttccacgtggtatgtggcctttttggaacattactttcatgtcatatgtggcccgaggcctttttagaacattactttattttcagctccagggccttcatgttcgtatctttggccataagccctctattttttaacactactagtatttggccttcacagtaagggttcgaatttacttttccaagccaaagtatgcctacacgacttagaggcaggtttagtagcttatactaagggtgaaaatttctctacacaagttatttgtactagttcaatgcgttgtaaagtatgggtgccccccaagcgaccatgcagacaagtctcttggtcacttgctattcaccaagattcatagattttgcctgggttctgtctggcgagggtactatagttcgcatgtggaactaaaagaataactttaagaaattaatctatgaggaagtggttcatagacacaataaacaagaatatgaatattgttattattcattaattggtctttattgttgtgaaacttccataaattgaatctacaagcttacattacataaaattagcttctatatgtcaagtggccacccctactcgcctagaaaagtagaggccactattcacgccaataaggccatgggtgctagtgctttttgtactctaatgttgactacataaaactactactttgtagtacatttccgtaagctagttactgatagtatttgcaaaggttctctccattccagtctcttggtaggagaatgagctccatgttctacttgtaccttcccagcttgtaggctcccttactagttatctcggtaacttgacaagggccttcccagttgggtcagagcacacctactactgaatctttgtgttaaggaacactcttcggagcacaaagtctcatatgaagaattttcacctcttgatgtgtttgttgaagtgccttgctaccttttgttggtaggcatgcacctttagggtggcttgttctcttctttcttctacttcgtcaagggattctactagcagggtgctatttgtttgttggtcataggttgttctctagtgacacggtggcaatagctctataggcaacat

SEQ ID NO: 64748 - DNA, 1667 bp, Cannabis sativa
tttgatggtcttctcagcctcctctttttccttcttggcttcctcttttgccttctcggcttccttttttgccttctcgacttcctcctttgctttctcagctttttgcttaaggcgagtattatcctgttgggcgtcgtccgggtgcttactcacaaccttacattgggataataacttgtggaccgcgccctccaagtattcaagtcgctcagagagtaaataattggaagcaaaagaagcctggagaattgcaaacagatgaatatgaaagaggtataaaaagaatattataataagaaagccaacataccatgaagtgacagtccaagctcctcgaaagcatctcttttggactcctaagattgagaaaatcccaatcaggagggagaagagtttgaagtttgcgccaacaagcaactccatatgcttaggtaaattcagacccgacctcccctgctgcgaccaacaaggtctcaatagcattgcttgaagaagcagtagtagaggttgcctcgggacaaggagcattggcgtcggaaatggttggaggaggaacttgttcttggatcttgctgtcagaaacctcgagatcgatgggctcagccagtgatttcttcttaagggtggtggttttcctttgcctcttgggaggaaccacttcagcagcagtagggactccagggttataactccttttcttccccttctggcccatgatatcttcataacccatgtctggaaaacaagacaaagcgttaaagttattaaaaaagactgatgaaaaagggaagaatataattttctacctaagggatttaccaaaatcactagatgaaggggtagaaggaccataatatccactaaaatccctacagcctgtaatcttgaatacatcgaaaggctcgattggttctaaatcccagctcacatatatgtgacatgccctgtattccatagtatcgtattgctcagctatacaataaaatgactcgtgacagttaacctggacgtgaaatgtagaataccagctgtcaaacttatgagaaatgcggtccacgagaaggtaattccaattataaaaattaaggtgagagtcttcaaaggtgactaatgtactacgctcagccctaagtacagtaagataccaaccacattgattacctcgggatgctccttcaccggattcccgaggggcgatgctttgaaggtattgtgcttgagcaaagcgatgccatgcctgatcctcgggcggaacagtaatctattgccaagaagaatacttgggaattttataatcacaaatatactccttatcggcgagaaggcctactgatcgcaggttaacctcgctcaaaaggaaattgcatgaccaaagaccgtagggaagagttaacaagtacctgtgcatactaaccattttgagggtaggagtaggtctcgtcaaaagagctgtcagaacaaaaaaaaaacattagtcataaacttgaaaaaggaagattgatgtaaataagcgagaagggaacaatcacttacaaagtttgggaaacgtggttgtggcgatgggggaaagaccagacgtccagaagaagttgttcttgaaagacactatatttggcaagtctacaataattttaggctcgctaggatgagtaccgagatagaaa

SEQ ID NO: 64749 - DNA, 855 bp, Cannabis sativa
ggcctataagtcatcgttgcctgaaaatgcgtgaggaataagtcgacaaaggtttcccatgtcgatattgaggcctcaggcaattgggtgaagcaatcgtgggcgttttcctccaacgttgccgcaagaatgcgacattttgcgagctgaggtacctgatccacttccactatagtgtgaaacttttctaaataatctatgggattataggtacctttatattttagggatttggataattggaatcccttgggaagctgagattgtcgcacttctgcagtaaaaggagaggtcccatgcagcttctatatgggctttctctgctgctcgagtattttcaaagcttgcaaaagcatgctttggtcaattcctccggctacaggagtcgggactactgcgactgcaggagttgtgactactgcggtgaggtttgctgggatattgactccggtagtcgctgccggtgtgttaggcgggttggtgggagtgtttacaccttgatcgaccatttggggatcacggggtgtttcctcgtcatgaggagcgcgggagcgcgctctgaaaatagcattgaggtgatcacgtagatcttctctatggacttggtatcgtcctccctgctgtgtctccatagaaccggacatcgtgtatctgctaggtgtgcgaccatgcgaggacgaggaggcggattctgcgtcattgtctcttaaaggccggctgggaggattacatcgctcaaggtcttcgtcaacctatttttcctgattgggatacctcacagattggtctctcaaggttggctgatttaggtccagaccttcagggttggttcttcgttccctgcgaacacgatta

SEQ ID NO: 64750 - DNA, 1434 bp, Cannabis sativa
agtttttaattgagaggaaaagaggggttatccattttttcatggataaactactcaaattcctacttctttaactgattttgtactaaataaagagattcttagctatttggaaaccgaaaagtattgagtatggcagatgatgaagatgagcacgcattgaaatgggccgcgatagagaggcttttgacatttgataggatgaagaaagggttgatcaagaagttgactaaagaaggaaaggtggtgcatgaagaggttgatgttacaaagcttggagttcaagaaaggaagcatgtgatagacaatgtgctcaaagttttcgaggaggataatgagagcttcttgagaaggcttagggaaaggactgacaggttagtgcttctttgcttggtttggtctttttgttgagtgtctccttgtttggatgctgagaaagtgatggaaagtgtagatagccttgttttcatccaatgaaactctatcataaaccacttatttaaacatgaaatgatttgagtccatgtacaatgatgaagagcaattcattgtattagatacttattattttcattttcattattttctccccttttggggggataatagggttggagttgagattcctaagattgaagtaagatttgagaatttatcaattgaaggagatgcttatgttggtactagagcacttccaactctactcaataccaccttaaatgctattgaggtacttttcttgtgttcttttaaatgctattggtagtttttatctacaaaagacaaaaggaaaaaaaccaatcgttaatgtattttgttaaataacaatttagattctctttttcgcaaaatagattaaattgatatcgtgagctcaattatgattaaacaattttcaatatgatcaaatccaaagtctctgttgaaaatttgagttttaggatatcaatttgctgaaaatttgtttagattaaattgaactcagagtatacccatgatctgaattatcatttaacaaaatacaaggaccgaccgcgcattcacgctaaatacagaggccaaattggtatattccctaagaaaacacacacttttgtagatttcattgaccaaatgagaacttttatgttgcatgtaatgttatccaaaatgaactcatattatagagtaagccttatctcttttccactattgatcttcatcatgtgactcaaataggatgttcttgggctagttaaactttttccttcaaagaaaaggactattaagatactcaaagatgtgagtggaatagtgaggccttcaaggtatatatctttaatgaatttccattacatataagttacttttggactattttatattagctctatgattggtttttgtttctaaatttcacaaatgaatttatattattgttaggttgactctact

SEQ ID NO: 64751 - DNA, 859 bp, Cannabis sativa
tgaattcactttcagagcttgatcttgccacaacctgctgctttttggcagaccaagagatgaggtttcctccaagataaacaacataccctcccgtagacctacgatcatccacacagctggcccaatcggcatcggagtaagcataaaggtccatagttgttgctggttttagtaacaaaccatagctgagagttcctttaaggtatcgaagaagctttttgcaagcttcccaatgagtgactgttggggcatgtaaaaattggcttagcttgttgattatgaaagccacatcaggtcttgtgagagagaggtactgtagtgctcctaaagtacttcggtagagtgtaatatcagcaaaaggttcaccatcagttaaggaaagtttctggtttgcactagtcgggttaggacagctttttgcaccatcgagttgaactctaaccaaaagatcagtgatgtatttgctttgagataggtacatgccctctgaattttgatgaacttcaatcccaagaaaatagtgaagagatcctaagtcctttagagcaaatgagttgttgagatcatggacaagtttggaaatgatagttgagttgggacccgtgactagtatatcatcaacatatactagtaaaataatgaggttgttgcccgaaccataggtgaaaagagatgtgtccgattttgaggccacaaaaccccattctaataaggtgttcctcaacttgtcattccaagccctaggagcttgtttgaggccataaatggctttgtgtagacgacatacatgattaggctttgtagggtcttcaaatccatgaggttgctgttgcgatattttgcacacgcaagtgta

SEQ ID NO: 64752 - DNA, 5056 bp, Cannabis sativa
atcaggtactcacctgcatggtcgtactttaggcgcgtgctctgctttcattttcatgtttatattattattatttgttacttaattaatatgcttatggctttgaatttgcatatcaaacaaccttcaatacatgattatttttatttcatccataaattttactttcttaagtacaaacaatttcacaaacaataagacaaatcataaattgtatatttatctttacttgatcagttgatcatgagtattacaataagaaaagcagaatgaaagaaaggaagaaaagagaaaagctgaattgaattgatgaattgaatgaagtgtacagaggtatatatagcagttcagaacaacagcaggagggagacaaactaacataacaaacttaactgacaaaactaattaacctatttaaacggtaaaacagttaagctaatatccccccctcaagatggactgtaaatgtcatcaacagccatcttgcggacatgagacataagagtagtagagggtagaggctttgtaaaagcatcagccaattgcaatatcgtgttaactagtgtaagtctgataggggaagctttgatcttctcacgaatgaagtgacagtcgaggtcaatatgtttggttcgttcgtgaaatgtcaggttgattgctatgtgaattgctgactggttatcacagtagataaaggcaggagttggttgaggaatttgaaagtcattcaagaggtactgaagccatgtaatttcgctgctggtgctggcaagagcacgatactcggcttctgcaaaactcttggaaatagtgttctgtttcttcgttttccatgaaacgagacagtcccctatgaagatgcaaaaactaataattgagcgccttgttgtggggcaagcagcccagtctgagtcggagaaccctcggaggtgtagagaagaagtggatttgtaaagaagaccttgtcccggacacccttttaaataccgtagaagatgatggacgacttgtaagtgaggagttcgaggggaggacatgtactagcttaaagtgtttactgcaaaggttatatcaggccttgataaagtgagatagaggagtcggcctatgagttgacgatatggggaagggtcatctaatagggtgccttgttgatcatcgagcttgcttcttgggtccataggggttttggcagccttgctgcctgtgtaaccagtgtcagtaagaagttacagggtgtatttacgttgagataaaaatataccctctgctgaacgagcaatctcaaatcccaaaaagtactttatcgggcctaaagctttgagttgaaattgtgcatgaagagagtcttgaagttgatggagtaatttgatattagggcttgtgagtataatatcatcgaaatagacgaggagagcaataaaagtgtcatgagatcctcgtgtgaatagagtgtaatctgcttgtgattgggaaaatccttctgttagaagagcatcagaaagctttttataccattgtcgagaagactgtttgaggccgtagattgatttatgaagtttgcagaccaagttggagttgtcttctatgttgggaggagtaaaacccggaggcaatgtcatataaacttcttcttgaaggtccgcgttgagaaaggcattgtttatgtcgatttggagagttggccaattcttcatagaggaaatggccaataggagcttaaaggtgacaattttggcgaccgaagagaaagtgtcaaaaaaatccaatccttcttgttggttgtatccctgagcaacaagtcgtgctttgcatctttcaactgagccgtcactgttgtattttagtttgtaaacccaacgacatcctattgctcttttatttggaggcaatttgatcactgtccatgttttgtttctgaggagtgcaaatatttcagtagccatagcatcattccacaccctgtattggctggcctgcttgtaatttcttggctcaaagagagcagttattgcaagaacaaaagctttgtgatatttagaaagcttatcatatgaaagaaatttatgtagggggtgaggtgtagaagattgatcctggataatagaattgcattcataatcttttagataagtagggggtcttgtgattcgagtggtccttcgggtggcaggaggatcgattgcagtaggattgggatttgtactagttgatgcaggattaatagcatcattttctggtgcagtagcatctggtgccatgttagatggggctgctgtggtatagtgttggacatttggagcagcagcatctgatgtgggatcagttggagttgtgttgaatgtgacagaggaaggatctgctgtaggaaagtcacttatatatgtatgagataaagtagatgagggaaagaccatatgagagaaaggatcaacatgtacatcagtattattgagtttctgaaatggaaaaatattttcatgaaaataaacattccgagagatgaaaatttgtttagtattcaaatcataaagtttgtaacctttgatcccttggggatagcctatgaaaacacaaggtgtggctcttgattcaaatttggtgcgattagccgttagagtagaagcaaaggctaggcaaccaaagtttttcaaatttgaataatcaggtaaggcatcaaataacagttcgaaaggtgttttattttgaagtagaggagtgggggttctatttatgagaaatgcagctgtcataatacattcagaccagaattttataggcatgtttgcttgaaagaaaagagcacgagccacatttaataggtgctgatgttttctttcagcaatagcattttgttctggtatttccacacaagtgaagtcatgcataattccaagtttagaaaaaagatttttgaacacaagctcaggtgcattatcagaacgaaatcgtttaatagtgcattgaaattgggtttgcacataggaaaggaactgtggaattatgtcagtaacatcagacttgtgttttaaaagatagatccaagtgaatcttgtattatcatcaactaaagtaagaaaatacttgtagttagaatgtgaaggaatatggtaagcgccccaagtatcacaatgaacaacatcaaatttatttttggcaatagaactgttattaggaaaaggtatttttctttgttttgcaagaggacaaacataacaaggactggttttgtgtaaagaattaacagtacaattcaatttatcactaagaagagcaagtctttgtttggataaatgtcccaatctcgaatgccaaagctcagcagaaacagataaggcatgagcagtacgggttgatgcatccaccatgtagagaccatggatgacactacctttgccaatctccttcaggttgtgcttgtcctgaatggaaaaatgatcagtatggaatttaacggtagtggaaccattactagttaagcaactaactgaaataatattatatttaaaacttggtacatagagaacttcagtaagagttaggttatcattgatagcaatagaaccacttagattaacattaatagagtcattattaggtagaattaacctggtttttacagtaggacatagatattgaaacaatttaacattgttgcatatatggcgagttgcaccagaatcgattatcaatgattaattaactggtgtaatgtgatgatgagatagtaagatccctatagttcccgaagaagaactaggatcagtagtgggcataccagcttgatgattggcaagtaaatttaggagttgttgatattgaagcgcattaatttgtggcaaaagggtgtgtccttcatcactggaggtttttgaatctgcgttggtttggacctgatctgtagaagcttctttagatttgttcttgaatccagggggatatccatggatcttgtaacatttttcgacggtatgaccaagcacatcacaatgtgtgcaaaagggtctattccttcttggaggatgattcttggatccttgattgtcgggctttgaattggtatttttatctgactgaaaagcaaaagccatattagtattcgaatctttttcagaagcaagattacctttctggttttcttcctgagtaactaagtggaacacacggttggcttctggtaatggatccatcaagagaatactgctacggatctgtgaaaaatgatctgaaagccccatcagaaaagacatgatatactccatgtggtgatgttcttggagcttctttacaccaccacaagtacatccattgcaggtacaattcggtctatagttagacaactcttcccatatagttttcagtcgagtgtaatataagctgatggtttggctttcctgtcgaaggttcatcaagctttttctaagattgaatatatgtggcccatttctttgatgaaatctgaccttaagatctgtccatattgcagctgcagattcatcataaagcaaactggaagaaatttctttagaaacagagttaagaatccaagatataactatgttattatttctaatccaggaattatagagattaaaatcagtaggttgaggtttagatatagaaccgtctaagaaccccaatttgttcttaacagagatggcaagttgcatagcacggctccatgatatgtaattatcttgccctgttaaaggttgagacacgagaatgttaccagggttatcaccatgatgaagatagtagggatctgagggatcctccagtggatttctttgactgacgacttgattagtagagatggtaggagttgtgactccagtttcgacttcttgattgtcgttcgccatggaagatttaaaggaatagtgctagagggaaaatccaggagagaaaaacaaacgatttcacaaagaaatcagtgagacgtgaataacagagtagctgaacagggcaccaccatcgccggagaagaagacacggcctggcaggagaagggcgaaagcgtagaaatcagtggggaatcttgattctccgctct

SEQ ID NO: 64753 - DNA, 1940 bp, Cannabis sativa
aacatgggaacatttcattaccaaattcatgctttgaaaatctttccaaattcggtaaatttgtaatgtcaagactttctaaacgttcaaagcttcttcttcttaagtctccatgacataactcattgtcaatgtactgcactaacttcatttcagatacttcaagatgttgaagagatgttagtttcccaaaaggtggaagttctctacagttatggcaattagacaaatcgatgctaacaacacttccaaggatgtcatcacggaaccaagacgggaaatgggcaccggtgtacttgtgaattttcaaccatttcaaactcgtgggaggagcaagagcttcgagtatgccttctacattcctttcaaattcatatttattccaacacaaattcagtcctttgaggtttcttttggctgacagattagcaaatcttgcttcaattggactcttcacattttctaagtttctgatctctagatcacctcctatgttcaggtctttcaattcatccaattgacaaccttttctcttatccacaatgtaatttgtcaaagtctttaagcaacttagcttcccaatgtttggaggtaggtgtgataatctgctacagccttgaatgtaaagatggcggagacctttcaagcgaatcatgtgtttgggtagcttacgaagttcatcacaatagcttaggtctaaagtcaacaaatggtgtagcaaacaaatggaatcgggaaggactttaacatcacttcttgagagattcaaatagcgaagatgttgggaattgttgaccaatgatgacatggatattctacaaatatgtttctcattgttttcgaaagcccgtaatgagcgaaaatttaatttagtatcaataggatctgaactataattatatgataatgacaagaatgtccttaaggattcactactttctatgttaggaattggcccccctccacttaacgtcaagtgacgaactcttttttgcaagtcaatggtacgattatcagcctccacattacggcatttgtcacccattatagattgagctagatcatgaaccaaatcatgcatcttaaaatacgttctgtcaaatggatctttctccatatctaggaaaaatgatctccaacataaatcattaatcatctcatttccaacatcttccacctcaagttctgactttgaagaaatcaacccgtttgccatccaaaggtgaattagtagtgtctttcttattttatgatcctttggaaatatagcacaataagagaagcaacgtctctgctctactgaaagatgacggtagcttaacttcaaagcaggcaagatgggagctttatcctctggtaaattccaaagctcactacgcataacagaaagccacacctcctcttcttcacttttggaatgcattaagcctcctaaagcttttgctgctaatggaactcctttgcacttcttcactatctcttttccaatttcgacacaaggttcgggcgcgctcttctctgtgtggtgttaccaaatgcacgttgcttgaataatgaccaacaatcatcgtctgataaaccagtcaagtagtgatgcattggtgttgttcccataatggatgcaacatttttcaaacgagtagtgacaactaccgaagcaccttttgatccacattccaacacatatttcaacttgtcccattcatcatgtttctcattccacacatcatccaaaacaatcaagaacctctttccttgaagcatgtctcgaagtcgtttctgtaaaggatccatctccattgcttcacaagcacatccagttccagattctatgatagctttgatcaatctacgcacatcaaagtcttcagaaacacaaacccacatcttcagctcaaaatgctcattgaccctcccatcattgaagaccaattgagcaa

SEQ ID NO: 64754 - DNA, 859 bp, Cannabis sativa
ggtcccgaaaacatcaatcttgcttgtaaagtccttgtccgcacaaggacttggggaacaaatgttatcccaattttttgtcctcatgacgtggtatgcttacatggatagattctttgccacgtggtagtacaactcaccagaaagaaggctaagtcaacatccgaaccaacaaagatcccgacactcaaacgagaatcaaatgacaatctagctcgctctcgagagctggccagccacccttggccggccctgtggctagccaggccagtaaacagcttaatgcccagccaaggaatgctcagtgggtcccacaggacatacctacatgtgaataacacaagtgggctgtgaattgggccccaaaagcccaacaggcaggctgagaagcatttagaatctaggggtattttggtcttatgtaaatatctagctaactatcctatatttaagggaattaagttgtaaacctgggatttaggcctactatataaaggccttaatctctagctaaaaacctaagttgcctaagcctcctataagctagaaacctcatattctctaagtgtcaactctctctctctctttctccctcactctctcacacgcccaagcatacagcactctaggctatccagcactagagtctgccagactctgatccatacattgtaatcctaaagggcactatagcagatcccacctatagcgatctgaataatgattacctctgtataatacaactaaaaggggagtaggtcattacccgttatcacaagggggctaaacctgtgacagtcagtagtcccgtgatctgtaaggggaaataccaggtaagctgtgcaatcccacaccgcct

SEQ ID NO: 64755 - DNA, 906 bp, Cannabis sativa
tttttttattacagtttacatatatattaaattattaattaaaaaataaaaaatcttaattttttttttaaatttaaactctcagattttttttatttttttattctttataaatttattttctgttaaataatataaatgacatatatttttatatataattttttattaaatttttttatatattatataaaataatttatattcagaaatatataataattttttaataatatatataaattttattttaatttattgttatttttattagttttaactaattttttttaaagagttgaccaggtcaacccaccaacccggtcaatccgcccaaccaaaacctgccaactcgtgacccgccaacccgccaacccatgccttattcgggtccgggttcagtttcttttttttttgaatccgaaacccgtgaacccgaaacccagtaaacccgcccgatgttcaaccctagagcctggagctcacctgaaaggggatttttagcttgaattttcactacatacaaaacactcagctgatttgatgatgaatccaatggcacagatcctctaaaattattgttccttttattcatgaccagccaaagcacaaaagaattggggtttttagttttaggacctagggaatacaatcccgtggtcctgttggaccacccatgaccgtggacggctctttgtcctggccgtcattgcatagggaaaatgcaagatagggaaagagggaaaatcttattcatggcgaggaggagagagggggtcaggttcttgagttttcataatcggagaactgggtttcagggtccccttggaccatcaatgccaacaacgaccgatttttggtagagcagaaagaggaagggagttacatgagagagagagagagaga

SEQ ID NO: 64756 - DNA, 721 bp, Cannabis sativa
ttctcatccatttcattcatagtgcttaagtcaaataacactacatatttatactaattaagctaggcaatgaaggcacaaagataagaaaaaactaacaaattactgataagcttatatacggccatgttcctagtgtaacataactagagaaaaaaacaaaagtggtgtctatctttgctaattcaaatgatgctttgtattcttaaaatatcagtacaacggagatgaaaaattgtgatgtgattggaggtttttgtgtaaccttagttgaatccactaaagtctttaaccagtgtactactacctcccaaaatcaagaacaaagtttcactcaatatatcctaaactttagagaaaacataaaaggcaagtattctgagcttataatcagttattagagaaaatctagcctagtataagctcgactccgagaattaattataacaaaaactaacttagtaaaggtttaactcttaaccccaatagtaatcatcagattatttgggtcatatattacaacaatagtggaatattgttcaacgggaacataattgttttcaaagatcgtacacatgggttctttagaaggggattaattaagttccatttcaaaaagttatttgttagagaattacatattgctcatgtgtcgaaaataatacatatatatgatatataaattaattactttttttttattgccaattaattttgaaat

SEQ ID NO: 64757 - DNA, 1311 bp, Cannabis sativa
agagagagagagagagaatcaatgtagtcaattctcattacttactcttaatgatacaaagcctatataaagaagataaagagcagtagaaaacaagaaccaacacataacctaaaagaaaataccaataactaactgactaaaacttgatagttaacaactgtcactagtttcctgaacaataatttatctcccttaaatatcaataaatttttatggtgggggtatgagttttacctttgccctttgatgaattttttttttttttgaacaagaagagaattctttattcaaacacgcaaatacaaaccaggaatacaaaagaagcaagcctgctggccgagcccctagccctttgatgaaattttagactattgatgtataacttgaatgatgtgctattataattatagtaaaagtaacttaatttttattaacataacaagtcagttaatttcttaattatttgatttatctatatttgagggcattcttcataggtagtttgttggggtgtgttttgcctatttatataagttttgttaataatagggccgacaaaacgggtcgaacacgataatataacttgaaatccacacgaaagttagcaaatttggattttctttaaatggattagggtcatgtttaagttgactcatctaacttgtttaataaacaaatcgtgttcgagttgacacgactaacacgaaattgttataaatgacctatttaaagttatttaagtactttaacgaggcatactaagtcataaacgtgttaaacatgtcatattaatataataatggatttatatatatttaaacaaaatctatttataaatgggttacatgattcatgtcatgtcaacccatttataaatgggttgtgtttgagttttattctttgataattattaaacaggtcgcgtttggatgaagtatatacttataatgcatgagtttcaatatgatacaaacatgaattgccacccctaattagcaattgagattattcagagaatcaagagaaactatttgcaaattaagaatatactactcgaagtgaattgaatgggatgcgagataagagttgtgtagctgggtcgtattttattttccatttcttttatttgttttattattattatttttgttgatactatttttctgctataccaactttgattttatattatgtgtttacataggtgccgtttgtaatacttttttttctaattttttaaccacaaaataaaagtaaaagttttgtttttaaaaattttatttttgaaaaacaaaaatgtgttctgta

SEQ ID NO: 64758 - DNA, 894 bp, Cannabis sativa
ctggacaatcatgtccttcaagttattaaacttagttattataatgtatattatacgctaagtattttaataactgactcgcctcgtcactgccttcgtatacatagagagatggatatctcactatgcgttatatatgtattccttgggattatgccttcgaatgcaaaatggtttctcgtcaatacatgaatcaatagtttgtacatccttgtctcccttaagactgtgcaatcaatgcgttatagagatactttattaactccacattaaatgagctattccattttttatttaatgaaattattatcactatatttgtcgattcatattccctaagactgacacgtgtaaccttttgaaatacagcaaaattttgggtataacaccagcctttcaagatgaaggccagcattcgtagatggaggccagccctcagactactggcttgccctactgggatgtctggacataatttgctttaggtgtttttgtaggagagtgaagcatgcacacttcccctcgttctcccttgggcttcatggcataaaggaatcgttggatttccttctttttcaattttgttggttaaagccatcattgttgtgcttgcctccaaaattctcattttttgagaattaacagagatcgtctatgctggtcggcatgtacgaccgtgcttgggagatatgaggccttgtgtttgtccatcatattaacctgccctgttgtctaggcctatactgaacaacttcttcgaactttatgaagccataagctcgctcaagaaactcctccatgtttccagaagtcattcaatgataggatgcctccgagtatggccatatatcaaccttcctctatcaggcctttgacgttggtggcctcagccat

SEQ ID NO: 64759 - DNA, 1188 bp, Cannabis sativa
  modified_base (432)..(445): a, c, t, g, unknown or other
  modified_base (511)..(529): a, c, t, g, unknown or other
tttaaaatgtaatggtttaagaaattttttttaatgttttttaagtataggaaatcaaatttcccaactaaaatacatgcagtacaaaaaataaaataaaataaaatacatgcactataaaaagtatagtactattgataccatttattaaaatcatattttcttccaagtagtgaaaatatttggatagtgataaaacaatcgatccatctaaataactatgctaaacactacaaaacataactacttttagtaacaactttttagtcataatataaattttttgtggctgaatatatgatttttagtcaaaacaaaaagttatttgtgacgaatacacactatttagctacaaattgtcactaatttagttttattagtcacaacaagtattgtgactataaaaaacacatttaatcacaacaaattgtnnnnnnnnnnnnnnatacttttagccacggactttttaatcacaacataggtatgctgatttataattagtcacaatttnnnnnnnnnnnnnnnnnnnttttgttatgactaaaagtaaaaatttttatagtgaaatttgtaaaaacttattagattattgtcttttaatctctccgaaacagagaaggaaatcatattgtttaagtccttcattattattagttttttaaatctatatcaaaaacatggaaagaaaaaaataaacattctttagcactataacaattttgttaattaggggcggacccaatatcggtgggccaaatctgcccctattaatagggatgtcaccgacggattttggagccgctcgtattagtgtgtaaaaattaataaataaacaaataataaatgtaatatcagcgggcaaaagttaataccagcggactgccaaccactattgttgggcagataataagtgtgagaattttcctgcttggtgcatttaaaatgaattagagacggatcattaccaacgtggatatatatatccgttgccaataatattaacactggcaggaaccagtattattgatgggtttctgccggtattaaatttctatatatactcccacgaatcggttttcatatttttttttattattttttcaattttttcatttttaaatgtttccaacacttactgcttcttcctcttccaccgccaccattttactaaggcgaacaccaccatat

SEQ ID NO: 64760 - DNA, 1188 bp, Cannabis sativa
cagcatacatgaaaatggtggaaagtagcaatccactaaacaatgggcactttgtgttcatgaacaaccttactgtatagacatgtgctgcttaagtcatgctgtgctgtgtgagttggttgcaatatggcaaactggttttcagccactttgtcccaacataaaaaaaaactaacttagaggcttgcattgttactatagctttagtgaagtcaatgttaaaatctagagtaggaattaagaaacacgaggcatgactttgaagagaaactagttgatgggagttttaccccagactttttgaatgtgaaaggtgcagagcagacaaaatgttacttttcatgcataatagggccttgactttcaaactaatattttgtgaatcaacttatgatgattggctacttttcttcaaacaggatgaatggacaggagagcaaaaactgcagtatactgatgttccagaagatattgaacccgaagaaattcgaccaatgggaaattatgcagtgtcaataacatggcccgatggctttagccaggtgagttgtgtgtgtgaattggacatatacttgccatttcttccctttaatgaggcccttaaataagaaagttgattattgtgcattagtattgtgattttgttttatcttatattatttcaaggaatttatatattctatgccagtgttagatttttatcactgatataaaaataagacaaaagaatagtcagtataaagtagttgaattaaactttggagtttaacaattaagacctataatagtggagattcacttttgactggacagtttgaacttatcaaccaatacactagggataatgatcagctctgacccaagtgacatgcttttaaacaaaagtttgtcaatttttgtttccagcatatgctttactattttttcttaatgataatgataaataaataaataaaaacaaagtcaaattaggacatcaactttcagtagaaaataaggttcaaagacaaaagtggggaaaagtcgtgtaattagctatagtaatacccatatttggtcatatttaagctttaaacttttctatgttgtaatgcagatagcaccatatgatcaactacagacaattgagcgattagttgatgttccacaaccaactgctgcaaaggcatgattatatttttcaatgtt

SEQ ID NO: 64761 - DNA, 803 bp, Cannabis sativa
aaaaaaaaaatagactaggaatttcacccattcaaaaagtattttcatcaaactttcgagcatattttactaaaccataaacagttcaattaacatttatgctgacatgagaaataataactctaacaaaaataataaaagaaaacgaatatctgaaattaaatcattaaaactagacagatttaaagatataaaagataaaatagtggaaacttgtaatgcatctatttcaatgtgggtgagaggctgaagttacattgcccaattagtgttgtgaataaagttttcgcctctatttcatctgatctaattctgccttcgactggcttggataaagtagccataacatgacccttgtgatcacgaagtatcgccccaacatctaaaactttggattccatattcaccagtacattaatatttaatttaaagtcatgaagatctggtggcttccaaagaataccttcaattggtctcttagacccaatgaccctcgtgatctcgaagtatcgcccttatacctacaacattggattccatattcactactacattaatatataatttaaagccatgaagatgaggtggctttcaagaaataccttcaattggtctttcagtagtaggcattgatgtagcaaaatgaaataagtaggactcatcatgcctcttactgtcatggagtactttatttctttcggtccactttacccacataatgcagatgatcaattccttgatttgcgatgtattgatttctgatttctcaatttgtgctacattttctcttggtgcatcttcaa

SEQ ID NO: 64762 - DNA, 795 bp, Cannabis sativa
atattttataaaattggccaccctaatattaactattaaaataaaaaatttaatttgatttaaaactaatttattacattatataatctaatttactacattattctaaaaaaaaaaaactaatttattacattatataataatctgattattaaaaaacattttcaaaatcaaaagtatctattatacaaaaacacaaatagaaaaccctaaaagtaaggaaacacagtcggggagtggcggctgcagttcttctccgaccacgacgggacgacccatcatcttctggcaggaccagaccattagcgccggggagagagaaagtgttgggcgagacgaccacggcaaccctccagcagctacggtacgttcgaggttcatcttctccgaccacggccaacgatcgagagagtaggctgagaaaaatggggcgatgggtatgtaattgcgaaccaccacaagaagtcgcgatgggtatgtaattgtgaaccttggctgagaaaaatgggacgttggtggttgtcgtggttggagaagaagctatcgcccaacactttgtctctcccccgacgttgatggctcctcctgtagtcgaagaagaaggtgtcgccagaatttttggtcgtggtcagagtttatcgtccagcccccaccattttctctctccccgattaagcttccacaattttagggtttgtttttgatttttttttggaacagtttaatcgttttttgaacaatgtatgttttttaacgtaacattgattaatgtttattattattattattcttatt

SEQ ID NO: 64763 - DNA, 1418 bp, Cannabis sativa
cctagaggcgtgaatcgccttctgcgcctaaaaaggcatgttagcctgatttgcattttttttttgaggagttataggagcaagtgagttcttaggatcacttacctttttccttccccttgtcatgtgcaggagtagaggttccaacattgatagggttttccttggtgtttcctctaacgcattcaaccaaggggttatcatcagaatcttcttcatctaggtctccaaacttgactcaaaggtgagccatcattttctccatcttttgagaaaacttctcctaacgggctagcttttatctactttcaagcagctcgttagacactcaagttactttggagtcttgctcataatggtagttgtctttgtaatacccatgattgacgtaactgtcatcgtcttcctcttcttcgttcatctcaacatctctatcatcattgacgtggtcatgctggttgtttgtgtcgtcctctcaatcgttcacattggacgtattctcgcctctcacattgcttgtctaggcgtgcttcggcaagagtgggtttacttcctccatgactgtctcaaagacacattgaagagtcttcttaggaactgactttcatgtgaaaaccatggcagtagcatgagtttatgtctttatttagctctcaatgaaagcaccaaattttttatcgagattttcaaaaactaaatattttaagaactaaagaaataataaaaggaataaataaagagatgaagatttttttacgtggtttggatattaattaactttagtccacgagtcagtctattagcctctcgaggtgcttttcatgtgcttaaagtgtttctgcaggataccctaactctttgctcttagtttctcttagaagaagaagaagactaagagtaatactagcatagttttagctatgttggacatccctccattatttgagaattgaggggtatttataagataaggggcgggtatggacatgcccatgacccatctagggttctggtagaaacccactaatggggtatattacatgcaaagcaagaggtgactgttgggtgccttagaaaatactgtgctcgtccttgatgcagctagactatgggggaccatttgtacgaagtgcacacatgtcatccaaagatttaacctttaaaagtagaggccacgtgttgcccaaagctttctcttttaaaagcaatggtctgtaataccctcctagcaaaaaggtggtggtggtgtgcacactaccatgagacaatatctaatctttgtcataaaaagcatcatcgtcacttggtgatttgatgtgcgtaaaaggttgacatcctaagcccttcgagtacccgtctgagtattgtttgggaaagcttctctgcttagaccactacaggtttgggagaagcaattt

SEQ ID NO: 64764 - DNA, 1825 bp, Cannabis sativa
tgaacaccctgatgggagaatcatcatttctcggcatgtttccttcaatgaaacaaattttccagcccaacctgagtatccagcagctgacacccagcaggtacatgcttctcattcatctccttcatttacttgtcacacttctaatggctctcaatctaatcctaatatttcatctaatgtgcatgctaccactgctccaccaacccgagttctctccaatccaacacctgtcctacacacggttgacaccctcccacaaaccagaaatatcaacaccagttccaccactatcccaccacatataccaactccaccaaccattcaaccaatagaaaccacaaatgactatcccctgccacctataccaatcacaaataaccaaaacttgccacccgatatatccactcaaccttctacacaggtgttggaaccctgcaatgccaccaatgtccttccctcacaatctaccataaatattaggactcatccaatgagaaccagaagtcaaaatgggataactaaacccaaatcatacttagccactaaatttcctcttcctgaagctctcattccctctgagccaaagaatactactgctgcaataaaaagtccccaatggttcaagacaatgcaagatgaatatgttgccttaaaaaaggctggtacctggtcccttgttccttacaaaccaggtatgccgattatcagcaataaatggctgcacaaagtgaagctcaatgctgatggcagcctagatcgactcaaatctagacttgtagcaagaggttttttacaaacacccggcattgactatgaagagacattttcaccagttgtaaaaccagctactgtcagaataatactcacacttgctgtctctctcaactggtctgtcaagcaattggacattagcaatgcatttctaaatgggacattacaggaaactatttttatgacacaaccagaaggctttgttgaccccaacaaacctaatcatgtatgccttttgcataaggctctctacggtctcaaacaggctcctcgagcatggaaccaaactctcaaagacactcttacaaagtggggttttcaagtctcaaaatctgacaactcactcttcatatatggctcgggtactcaactgtttattttgctagtatatgttgatgacttccttgttacaggaccaaatgacagtcatattaccaaattcatcacccaactacatcagtccttcaagcttaaagatcttggaaatgttcactattttttgggtgttgagattttcagggacacaactgggatgtacctttctcaaaccaaatatataactgatcttcttgtaaagttaaagatggaaggagcaaagccatgttcgaatcccacaagtgccagtaccaagttgtccttaattgaaggagaaccatttgctgacaaaactctatacagaagtacacttggtgcccttcaatatcttactctcacaagacctgatgttgcatacattatcaacaagctaagtcaattcattcatgctcccactacaattcactgggaagcatgtaaaagacttatgcgatatctcaagggaaccattactcacggcttacacatctcaccagcttcttctttaacaattcaggggtactctgatgcggattgggcatcatgtattgatgataggaaaagcactggtggttatgtaatgttctttggaggaaatctagtgtcatggtctgctaaaaagcaaaatgtggtggcccattcaagctctgaaagtgagtttagagctctagcaaatgcagcagcagagattaagtgg

SEQ ID NO: 64765 - DNA, 1046 bp, Cannabis sativa
tttattaaaataaatagtatgagattcgattttgattagtataccaataacgatatgctactttagataatgcttggaaccataagagacattttaaattgccaatatcataggagatatcatactgctgtgtattttaatatcagattccacattataattaatttaataaataatataagaaactatttactaattataatgcgacccgtcgatattttactatatacatcttaaaatattttaataaatacatatatattgccaaataatagtattgtatactaactggcttgtttaattatacgtgataattttgtcctataaatagagaaagaaaataatctcatagagaaagtgattattattattattaagatggtagagaagtttgagaataaatctatattagtttagatttcaatatactattagaaaaaatatatttggtaaatgtgaaggactcggaatttttactttgtggaggtttatttattattaaaaaatatttatacttatattataatcatttttactagatttatttaactttgtggggtttttttttattattttggtctataattatcaaattaaaaaaattatatttaattttttaaaaaacaatatttttggactatagtccccacattgagagtagtgggtccgtccctattgtaatacttttttttttttgacttaatagaattaaaaagtaacatttttatataagtgttgcctcctagagtgttgctaaaaatttaagtataaaacaacattttttataagtgttaccacatgttataaacttaagacacatataacaacactagttataaaaatgttgtcatatcatccttttttattttaatatttataaaaaataaaattaaaataatcacaattttttttttgaaaacaattattttattactgcaaattagctataagaaatagcttgcaaatcaatagagacaagccccccgcaataactacattttcggtgtaaacaaacagctctagctaaataattggcagcctttgtt

SEQ ID NO: 64766 - DNA, 935 bp, Cannabis sativa
  modified_base (897)..(905): a, c, t, g, unknown or other
tccctccaccatttaggcttttttggttctgaccatcgggctctcaaaattttacttagtgatcatcttcataagactactcgtagttggcgttttatgtgtgagaatttatggttttctgaacctgactttctttctgttgtggaggatgggtagaagaacaatttgttaaacttttgctcttctgacccacttcgttctttcctacttaggcaagagtcttatcttaggtctgttcaccattggggctctaataaaaataattttagacatagaattaattttcttcaaagtagtcttgataatgttttgtcttgtcaacccttttctgatttgaataataatgaagccaaagaaattcagtcctaaattgattctcttctcttcaaggaagaggtcttttggaagcaacgttcgagagtcaattggcttagagcaggagataaaaatactaaatattttcattctaaagcctcctctagacatagaaataacttaatccgtaaccttatgcttgatagtggtgagcttattgataatccggttgatatcagtgagcattttctcaatttttagagtactctctttattgctcaaggttcggatgatgatgctgttgagcaactcttaagttttgtctcgaatcatcttggtgatttggacattcagatgctcgatgagcctttcacttctgatgaggtgaaggctgttctttttcaaatggctggggacaaagcccctggtttggatggtgttaatgccttgttctatcaaaaaaactggtctactcttggttctaacttgtgtgctgctgtcctttctattcttaataataatgctgacatttcttctattaatgatgcggttattgttgctattgtaaagcccgcttagttnnnnnnnnnattagcagttgtttatgtttaattatgaaa

SEQ ID NO: 64767 - DNA, 920 bp, Cannabis sativa
taataattgagtatttctaattttataacctttagaaaaagaaaaagaaaataaattacaaaaataatttctacttttgcaagggcatttttataattttgtatgatcctcataagccttacaattaattaaaataatttgaattaattattcttaaataaagattttatttaagacattactataaccctttaattaattaaaataattttaattaatttattcttgaataaaccctttatttaagataatattattatcattaaattttttcttaaaattagaacatttattatttattttgggttaagacaattttggttttaatatggttttaggtttgagtttgaatttcaaacctaaaattaattatatttatttaattctaaattataattgattataaatatccctcaaaattctattattttgtcttaattatgtaaaataataaaactattttattatttattattaaataattaagatagctattattttgaatttgaaattcaaataaataactatgatattaattttgattccaaatctaaataaatattctaaaataatgattaattatttataataaataattaattaataattaatagtacattatatacataatatttcgtaagtttataaaaacaaaaatataattaaattctattttcgacatagaaaaacatattagagaatttttttgagatgaaatgttaactttattgaataatttagcattctgaatacaaaagatgtaagagttcaccagaattagaaatatcaaaaatactatgattagattgatatcgagaatgtctaacaacataatgtgctactcagtttgttgatcatctaatgaaaaataaattaacatttgggagggttaataacaaaagttggcagtctttgattaa

SEQ ID NO: 64768 - DNA, 2226 bp, Cannabis sativa
atttttattttgtaaaatatggctacataggataattttttagtgatctgtcattgccacgtgggcaaaattaggacttcacaagattggacagacgactccttgaaaatgtaaactgaacattactttggaggattttcccacaaaaatatgaggttagatggttttttgcaagtaaattgataattaaggaggttttgccgcaaattactctaatgtatatgtgtggtacctatatgatgtgtcgttttgttggagcacttcttaccctcaaccacatgtattcatattcactgagaaaactttatacatatatgctaagatgatctttctaaattatgttctttccaaaaaaaaaaaaaatctttctaaattatgtacatcgagtagcattgttatttgttacctgtaatatattatcagctcaaatgctcagcgttatttttttcttaaatttttagctgaggtctgagaaataagtagcttgctaggattcggtcgcttgatgtagtaaaattagcttcttctttttagagttctactttcacaaaaaaagaaaatcctttttttgccaagaaagaaaatcttacaaatgttttttcttccaatttaaatacttttaaaatgttcttttttaataaaaaagaaataaaaacataccaaaaacaagttctatgccgtcaagagtttttagaaaggggttgtcgtttatttcctcgaaaggaaaagcgaatgtcgtttacagaaaaacgacaaatttgaaaggcagaggacaaagatatctgaaaatttcccctaggtattaaaataatgttcccttccaataaatatcagtcctaaactcaagcacacccatctgtactccatttctcttcatttcttcctctctttctctcaaacctcgaacctccaaggcccaaaactcagtctcagactcaccgcctctccgatccctcctcgtcttggtttatgaggtttcttcttcacccttcgatttccgctttcaatctggtttgatttaggcgtttaatttttcgttcttcgtcgcagatctggttctgtagttttacgtaacttttctttcaaagtttttctctttttgattggagggtatttaggttttgaatttacatgatgggtttgtttggttttgagttttttgattgatcttgtacggtttagctttattgcggtgagtttttatggtattttataagttattaaagaaaaaccttcataattgctctgtagaaaattaaaaagggggaaattttgattgatgttttcttgttttcccctttgttgcgatccatctttctctcaagtgcatatttaatttaggtcggaagttgatgtttgaaactttattttgcttgggtgtcttacacttataactggacagtcattttttctttctcctgtgggtttcgtgtttcttgattattttatcatcaatttggtgcaatcttcattctttttaattaacttttgatttttttatttggttgacctaaataataactaaatctttgtctttttttaacgtgcagctcgaaggagagacccactctcgggtaagttttcaccgtgttttcatttctttacaacattattattgttttagctattgaagttgtaagctttattgcatgtttaatttattttcatgaatctgtctgtatacagtggtacgcggattaagacccgcaaacggaacatagcagcgcctctggaccctgcagcttttgcggatgcagtggtccagatttatttggataatgctggtgatctggtaagtatcttatgcacttgttgaatttcagcaagtatctgtgagcttttatgctgtgacattttgttatcttggttaacaacatcagcaagttttttccatatgcaggaagctattgccaagagcatcgaatcttcagaccttaacttctctagatacggtgacaccttttttgaggcaagtatctttgtgattcactggtttcttattgtattatttgtctatcttggtctacagctccattaagaactatgatagggcattataatgtgatttgcgcatagtttgtttataaatagataacataaattttgcaaaagtgaaatatcatatttgattgagttggaaatagggctcaagtttatttagaaatgctggcaagtttaatttttggcatatctttaaacacttgaagtttattggttgatgtactt

SEQ ID NO: 64769 - DNA, 1065 bp, Cannabis sativa
  modified_base (261)..(269): a, c, t, g, unknown or other
tagtgacacttcacacgtgtcactaaaaccttttacattcattttctgcgcgtcactataggcgtatagaatcaggtttttgtcagactgaaaaggtattagccacacacatgaagtgtcactatatcctttttttttctttttcttttttatattttattaatatatttagagatataataacacacaaaaagtgccactatattaaatatttttctaaaaaaataatatttaattattttaattcaaattttatatatnnnnnnnnntaatttatattaattatatacaaatacaattaaatataacaatataagttccaagcacccaaaagtttatccaaatgaggatcacattttcatttttactttcaaaagtgcataaatattaatacaaaaagatgataaacattaattcaaggggctctcattttacttatcaaatgcattatataaaatagtttgtcaatgatcgtacacttataaattttgatggctattattcatttgacccattcaacccattcaacccattaagactaacaaaattgagatgaaaatagagagtgataaatgatctaacaagtctacaaaattgatcttcattgtggctgtgactgtgactccaacagagaaaagaagattgagtcatcactattattataattgtaaggaagaggagttaatgttacttgatcttcttcgagtgcatcataatatgtagtactgttgttgtagctttcgttacttgttaagtatgcattattgttttgttcaactttcagattcgaaccactgctgctattgacatcttcattcatgatcaagtttatgttgccaccactcttatatgacatagcctgttcctatatatatacatatacacatatcatcattattaattatatgccctgttcattcaagtagcattttggtaaagtaagaaataataactgctatatatgatagaataaaagcaagaacagaacaagtcttaaaaagcttcatacaccactcaagtatatgaacacaaaacacaatgaaaatagagtccaaggagagggga

SEQ ID NO: 64770 - DNA, 1092 bp, Cannabis sativa
tatgtctataaatattatcttttaatacaaatatatgttgtaactaattaaaatacatatacatttttttctcgatttttttttcaggggcgactgtccccgctcgctacaatgtgggtccgccaaatagtaatgtttaagattactatatttgtaacaagggtttccaatttgcatgtcatccaatattattacaacaaaagggtacgtatataatcctaacacctttaaaaatggtcgtataaaaatgttacctttcattataattccatattgggacttacatttaattgattaaaaaatattacaatattttataataataactcatacaaaagataagagtacacacaccaataaaatcataaaaatataatacaaaagatctataaattaaatacaccaaaatcgatcataaatggtgtcaacattttccctataaatataaacatgcataacaaatcttttataggtagagaaagagtgcacacatttcaaggcaagaaaagagatatggagataataataaacgtgaaggagaggagtatggtgaagccatcggagaaaactccacgccggcggctttggctctcagttttggaccagattaacaacctaactcataattcagtcatctacttcttcagatcatcatcgtcaaataataacaataacttttttgatgctaatattctcaaacactctcttagtaaggttcttgtccccttttatcccatggcgggtcgcttagtgcggcccacccaggtccacggaggtggccaaggccaccatccgcggactgagattgattgcaacgatgaaggtgtcctctttgtcacggcggagaccaccgctgtcatcgatgactttggtgatttcgctcctacgccacaactccggagactcactccaactgttgactattctcttggaatttcttcttatcccttgctcttaattcaggtaattacttatttattatttaatttgttgttgtttttatattttgtataacctgattacatttattgttaatttcaaagttgaaaaattattattatgaagtctgaattattattgttaatttaattt

SEQ ID NO: 64771 - DNA, 2173 bp, Cannabis sativa
tataaatgggagttccgtgaatttgttgattaaaaaagccttcacagtaataggcctcacgtaccgggatctatcactgagtggttcccagctcacgagattcaatggaactatgcttatcccaatgggaaaactgaggttgcctatcacattgtgccaggatacaccccagagtactttcaagtactgcacatttgtggtggtagactgcccaactacatataacgcaatccttgggtagccggccttggtggattttggcgcaattacgtccattcagcacttgtgcctaaaatttcccacccaagaggccggagtggggaccgtgaggggcaatcaaggtgaggtcaggcagtgttataatgtcgcggcccatttacaagtgttaatggtccgtaaaagtatcgagcaagaattggcagaagaggatgagttggatccccgtgtgggattcgaaaaaattgtagaacccatggaagacgtcgaggaagtgccagtgtgctacctcgaccctaccaagatcctccaactgggaaagagcctagaaccaaaggagaaagataaaattgttaaagcactaagggcagctacggatgtttttgtgtggtgccaaggatatatgatcagcatatccgcatgtgattacccatgtcgtaaacgttaatttggacatgctgccagttcagcagaagcggcggcctcttgatccaataaaggcagaggccctggaaaaagaggtggacaagctactggctaatggcctgatccgggatgtgtattatctggagtggctagacaatcccgtactggtgcccaagccgaatgcgacctggcgggtgtacatagactttaccgatctaaacaaagcctgcccaagagactgcttccctttaccccgaattgaccagatggtggacgccacctccgggttcaagctatcatccttcatggatgcctacgcctataaccagattaagatgcatgttgcggatcaagaatgcactagctgccggaccaataagggggtatacaactacttggtcatgcccttcgggctaaaaaatgctggtgcaatatatcagagattggtcaaccagatgttcaaaggccttttgggacggaacatggaagtttacatggacgacatgttggtcaaatcaaaggcatgtggaagtcatgcagacgacctcgcggaatgcttcgaagtggtccggaggtatggaatgaaacttaacccaaagaagtgcactttcggagataaattagggaaatttctgggatttatcgttagccaaagaggaatagaggcaaactcggaaaaaattcaagctttactgaacatgccttctcccaagaagcacaaagatgttcaaagcttgaccggaaaagttgttgccctgagccaatttatttcccgttcaacagacaagtgcattcccttcttcaacattctgaagaaatgtcagaaatttgagtggactatagaatgtgaggaggcattcaaaaagttaaaagaacacatggccaaacctccgattctgtcaaagccggtcgacggagaggatttgttactatacttggccgtcttcgagaatgcggtcagcgcagccttagttcgggaagaagaaaaaatcaaacaccacgtgtactatgtttgcaagcgtatgataggggctgaaatacggtatccggtgcttgaaaagctagttttttgcctcctggtggcttcaagaaagttaagaccctacttccaagctcaccccatcaaggtattaacaaaccatccgctctggcatgtcctacagaagtcggaagtgtccagaagactcctcaagtgggctatggagttaagctagttcgacatacattacatactacgcacttctataaaaggacaagcgctagctgacttcataacagagtccaacgaagctgaagctagcacaaacgtaacagtgccacaaacccaacatggaaagtattcgtggacggagcgtccaacaaaaatggatccggggctgggatagcgatgatctctccgaacggatttcaactccaggtggctctgcgtttcgaatttctggcttccaataatgaagctgaatacgaagccctaattgcagggctgaagttagcaaaagccgtaggagccacgagagtagaagtcttcagc

SEQ ID NO: 64772 - DNA, 3764 bp, Cannabis sativa
agccctgaacccagtttcgaaccccgtcctcatcccctaaacctggacctagctcgaacccaatcccggccccatttggaactctagatctgaatccaagcatggctccagcctcgacctcagcatgaaaccctcctcgatctttgaacctagactccgatctcagcacaaatcaaactcaaaccttggaccccaacccactttctctaacattagtttcttattccttaatttaaagaaaaaaaaataaataaaaataaatttcacgagacatatttttttttcaaaaataaattctatttttatttgtgtgatttaaaaaaattaaaaaataaccaaacatttccttaataattattatagaaccttctaaatttgaaatattatttcctaaaccctaaaccccataaatttggttcctgaatttcaataaacaaacccgaaaagcttaagagttaagagcattgtttagctatattttagttaagttttattttgattatacttatgggaacaaccgaacaacagccatggaagttggaaaattggccaatcgatacgcaacccagttgcaattttgccgatttcaaaaccccatttcagaatctcttgctcaacacgtccatgcccacataatcgtttctgggtttcgtctacgtggccatatcctcaaccgtttgatcgacatttactgcaaatcatcaaatttgacttatgcacgcaacctgttcgaccaaattcctaaaccagatatcatttctagaacgactatgatttcagcttactctgtagctgggaatcttaagttggcaagggaagtgttctttgctactccattgaccatgagagacactgttttctacaatgccatgatcacttgttgttctcataacaatgatggctttgctgctattcaaacattccatgacatgaggagggttggtgttggggttgatgattttactttatctagtgctcttagtgcttttggacttgtagttgatgatgaaaggcagtgtcaacaaatgcattgcgtggttgtgaagttcggattgtattttgttacttcggttttgaattcgttgatttcggtttatgtcaagtgtgcatcttcgtcactagcttcctctttgtcttcggcttcactgatgctttcggctaggagattgtttgatgacatggtgaaaaaggatgagttgtcatggacgacgataatcaccggatatgtgaggtgcaatgaccttgttgcagctagagaatttcttgatgggatgagtgaaaagttgggaattgtatggaatgccataatttcgggttatgttcaccatggccggtttgaagaggcaattcagatttataggaagatggtttcgaaaggtgttccacaggacgatttcacttacactcatttcattagtgcttgtgcaaatggtggattctttcagcttggaagacagatacatggttatattttaagaacagaagcagagttcacaccagaatttttttcattgccggtgagtaatgcattggttacattatattataaatgtggtaagattgatacagcaagaaagattttcaacaaaatgtctgtaagagatgttgtttcatggaatgcaatcttatccgggtatgttgaatcaaagcgaattgaggatgctaaatccttttttaatgagattccagagaggaatctattaacatggaccataatgatatctgctttagcacaaaatggatatggtgaagaagctataaagctttttaaccagatgagatcagaaggatttgaaccctgcgattatgcattcgctggggcggttatatcatgtgctgttcttggagcattggagaatggaagacaactccatgctcaggtaattcagttgggtcatgatacaagcctctcggctggaaacgcgcttattactatgtatgcaagatgtggcgattttgaggctgcagagcttgctttccttacaatgccttatgtggattcggtttcatggaatgctctgattgcagcgctggcacaacacggtcgtggtcgccaagcattagaacttttcgagcagatgttaaaagaagatattcaaccagataggataacttttctcacaattctttcggcctgcagccatgctggtctgatcaaagaaggacgccgttactttgattcaatgttgaccacttacggtgtttccccaggtgaagatcactacgcccggatgattgatttgctatgtagagctgggaatttctcagaagcaagagaattgattgattcaatgccaaccgagccaggtgtggcggtatgggaatcgcttctttctggttgtcgaacacatgggaacatggatttgggaatcgaagctgcagaacgactcttcgagctgaggccagagcatgatggaacctacgtgctcttatcaaacatgtatgccaatgttggcaagtgggaaaatgtggcgaaaattcgacaactaatgagaggaagagggatcaagaaagaacccggttgtagttggattgaagttgagaacaaagtcaatgttttcttggttgatgacactgcacatcccagagttacagcagtgtacaagtatttagaaaaattaggacttgaaattagaaaattggggtatgtcccagacacaaaatttgtgttacatgatactgaatgtgaagagcataaagagtatgctttgtctactcacagtgagaaacttgctgttgcatttggactcttgagtcttccacaaggagccaccattagagtcttcaagaatcttagaatctgtggtgattgccataactttttcaagttcttgacaagagtagtggagagggaacttgttgtcagagatgggaagagatttcaccattttagaaatggtgaatgttcttgtggcaattattggtaagtgggcatagagagttttctctcaacaattttgattttagagaagtataggacttggcttagcatcttcattccttgatcttgttgttgagatatatgaaaaaacaattacagtttgatcaaggacaatcatttttatgatattgtaccataaaaattcattataaagatatatatgcaattggccctgtttttgttaaaaatccattttaatgatatcattattagtatagtgataaatgacctgcactagttagaaatctaatacaatgctattgctccctatgttttcttttattattcatatatatgcaaaccattagtgataggtcatatatctacatatatattttattgaaactattcatatctagttcatccttctttcgaaattatattacatctcggagctgatgaaataaattgaattgagacagtattttgtaaatacgtaattatcttgaatatattaattatatttttatttttcgatctcctgaaaaggataaagaaatattttgttctttcttcatcaatttttaatctttagtgaaccttttaataagattcgaacttagatgaagttgtgatcatctttatataaatatatagtgtctagtttgttctttctctctttggtatatacattatttaatatatataataaaatttagtatatagagaaatgatagaatctggatttaacatagtaattgtgacaataatattgatgagaaatatagttacaaggttgtgttatttgaacaagactttaacaatagtaatgttaaagtgatgaccttttgttcggattttggagaatggagtagtttgatat

SEQ ID NO: 64773 - DNA, 554 bp, Cannabis sativa
ttgtgaatgatttctagtgaatcatatatttttaggttaattatatcaaattatgttttgaatggagagtataactaactgtcgctgaattatatatttatatattgtgtttatgctataatttttataattatgagaattttattcaacatgttatgttataacaaactaatttttcttttctcgtcatcttaacaaaatgtatacgtaattaaaaataataaattgcgattaataattctttaatattcttaggtcatcattgaaagataatttgtagtaaaatgatataatttaatttttataaatgaatttttagtcctccaaattttatatatatatataatataaatttgactaaaattaaatttgtagcaaagattaatagtatattatttagaatccaaatcaattttatttgtgaggaaaagtaaacgttaaatcaccaaaaaaaaaaaaaaaaatcatgagcatcatagcaaaaaaaattaacatatattattgcagattgcagacctatctgacctacctaacagtgcatagttgtggtccta

SEQ ID NO: 64774 - DNA, 793 bp, Cannabis sativa
gagggaaacttgtaatttaaaacaaaaaaaaatgaataaatttaaaatataacaaactaaaaatctctcctaacacaataaccatatgagtttattaaaaaaaaaaaaaaagacacgaagaagatgacgaacactaagagagaataaatgggaagtgggattaaactgaaaagtacgagtaaggtatgctattttttatcataaattttaaataaaaaaaatgtcactaaagtgacaacacaagtcaaattaaaactttataacacttaaaataaaatatattaagacatgggaataccttgagacgccacgtgttaaaaaaattggacaatttttttaatacaaaagataatataccaattaaaaaagagacagtataaaagaaaataattctgtataacgataaaaaataaagaaaacgagaaaaacagaatagggtgtaaattttcctttcaattatttaatatttttcttcacatacaacaataataaaacaccagtaaaaaaatatatgtttgttagttttttttttcttttttttttgtcctgttatgatttaggtgtccttttattatcgatatccctaatttacaataaaatgcaggttattaaccaataatgactctagaacaacgttgaattttataatgtgaattattaatcatttttgttttctcagggataatgtatattaatctgcattttctttaatctgacatgtatatttatacattttcagtttctacttagcaattttttacgaattctgaatctaagtttgggcatcattttt

SEQ ID NO: 64775 - DNA, 837 bp, Cannabis sativa
ctgaagcaccgcaagaaaggttcctgaggctatgctacgctcaaacttgatatgagcaaagcttttgactgggtggaatggtcttttttagttgctgttatgggaaaaatgggttttaatattagatggatttcactcatcatgacttgtatgcatacaaaacacttttttttttctcattaatggtgttgtttcgggctcagtaatacctcaaggaggtttaaagggatccactttctccttacctctttcttatttgttctgaaggcctctctagacttttgcaatatgaggaacaatttagacggcttaagggattggttgtctcccgtagagcaccatccataacccatcttttatttattgatgatagtttgcttttctgtcaagctaatgaacgttcttgtggggctattaagcgtgccttagatatttaccatcgcacttcaggtcaagagcttaatgccgataaatttgtaatgtactttttgctgaatacttcaacagtaaccaaatattctttcaagcagatccttggtatccctattagtgaatgccatgaaaaatatttgggcttacctgcttattctgtgaaagataaaaagtaactatttggtgatataaaagaaaagatatgaaaattaatgcatccttggaatgataagtttttctaaaatggagggaaagaagttctcttgaaagttgttgtttaatctattccaacatatgtcatgagttattttaagttgccatctactttttattgtcagcttgagcaaatgatggcaaagttttggtggggttcagacactgacaagaagaagactcattggaaaa

SEQ ID NO: 64776 - DNA, 836 bp, Cannabis sativa
tttttcaacttacccctatattttaaggggaagattagatagtgtcgaaaattcaaagaactaaaatactaattattcataattaaaaataaaataaataggatttacaccaactattatcatatttaaatcttgctacttaaacttaaatttattcctgataatgagttatgtctcttcttttagttgaaggtctacgtggctaataaaaaattcaattggcaagaattacaattaatagaaatatctgaactcgccgtcatatagtaggcaatagcgagatgtgaataataactatcaacaggtgagactagcgagacaacaagtctatctcgggataaacagaatataataaaaaattttcagaatgagtaaacaaagagcttacaacttattgatctacatactcgtgagtatgttaaaggggtggaatcaacttcaacatttactcacctcgcttttgatgtgtggaagtaaccatctagcaaatgcttttcgaacaacaaagtcattgttattaaaaaaaaatagtttaaactatttattatttaaaatattattgttatttaaatataaattaaaatttacatataaagtcatttatacttcaataaaacaataggtatgttttttgataaacagataaaacaataggtatttttactatacaataagcataaaacatgagtttttattttatttatagaataaaaggaaattacacccaaaaaattaaaagaatattacaattcttttttttttggttgaaaaaacagaaatttttaccataaagaaaagaaaaaaaaagttttcaaagttattcattataaaaaata

SEQ ID NO: 64777 - DNA, 1223 bp, Cannabis sativa
aaaatcaaatttcccattatatattggatattaaattttaccatcccatctgatccgatccaattaatttcagtcatccaatcggttctatccgttaagtatatttcatatacatttattggtttaatttagatttatttaatattttagacttagtattttttggataagatcggatccatctaatattttaagtccagtataaagagtaaaatttaatgttaatttctttatatatgtattatttataacaatataaaatttaattactcatccaaactaaatgaaaatactaattagttcaattagatgttaaatgtattagatttttggacacttcatccaacatccgatccaatccattagaatattcaaaaataatatccaatccgatccgatcacaattggatatctaatattttggcagtcggctataattggatcggtcagttgtcattgaattgaatgatttatgtacactccttagctcactatctctaaagtataaataatttttttggctctacattttgaattttcagtgactctattccgtttatgaatcacaaataactcttttgatttgactattattttttgaatagaatagtcattaggtatttttttttataccatgttaaaattgtaaaatgcatgagattatgcatccttacctttgtttccatcattatagataaaggtggggcaaccttctctcgtcttgtttacatctttggcaaggttggcattgagttaagacaaatgagacttgcacttagaaactctaaaattttctttatttttctaaaaatatcaccttttttttttttttgttaattttcaaaatgccacattaagggcctcataatattttttttttccctaagaagggctacctaattattatttatgatataggactataattaactaattaatgttgtttaaattcatcaaagtgatatgcattggtttcttcatataaaaaagttgttatctcattggacaacgaaccttgttttctttcgtcccattctccttctactattattattgcttaacacataaggaatagaaaaagaatacttacttatttaattaattaactaactaaaatttactttttaagtgattaatcaacaaaagaaataaactaaaaacaaagaaaaccccacaaagccaaaactaaaactctatttctctctcacaaaaaaaaaaaaaaa

SEQ ID NO: 64778 - DNA, 734 bp, Cannabis sativa
tggttacttgagcacaatcacatgtattgtacaagatattaaaaaaatcatgtattatagattaacaatagctaaacgagggagcttgaatagacatgagaggaacttcatagagcatttattttgtaaaaattagttgattttgcagctggttttttcctcctcagctaggctatgtttgtaattgcttgttgattaatgaagttgttccttcttgatcaaaaaaaaaaattttagatattttaaataatataactaataaactttttataaagtatgattgattaattgaattaacgtctaattcatataaaaattaagattttttatataagaaaatataattatctaattttattgatacttttaaattaaatttaaatatttaaaactattttttttaaaaaaaaaaaagataaacaattgattaatttaaatgtgttagttttgactgttaattttaatggaaaaaaactcttaaatcaataatatttgttagataacaacatttaatacaagaaagagatatattgatgattagagttttttaagtgtaaatggtttagtttgggtatttctttaaaaaatagtgttattcgcgttggttaataattaacgttcattgttcatataaaaaacaataattaacactgtattgcgtctattaagtgtttttttttttttttgagataagaaaactattatattaaaatgaaatcataatacaatagtca

SEQ ID NO: 64779 - DNA, 3042 bp, Cannabis sativa
ctatgttaagtgcatgaaggacatcttgtctaagaagagaaagatggaggatttcgaaaacagtgccattaacagaagaatgtagtgcagtacttcaaaagaagcttactccaatacatatgggctttaaatagtggcattaaagcccatgtgtatattcgaccctaagagtaatattcagcccaagtctttattttaagcccatctcatttaaacctaaccctaagtgaagcctataaaaagaaagagaagagagctttgtctgatgatggttttctaagctcgaaaatcctaaaaagctcacttcttcttctctttttttttttcaaaaattcagaggctattttctcttggattttttcatgaaatttcgtgctcctttgtgttgaaaacttgcccacacatatcaaaccaaaactcagcatagtgaagaagattgacatgaacacaattgaaggaggagaagatccaggttcaaatcttgataatgctctattacagataggaattaagtgctagagatataaacaaaaggagtcatattattctcctaccatcattgtaagcatttcttaatccctaatgtgtttatttatcatttttaagaatttcatatttaggatgttaaattatagaattttaatcacacatgcttattagtaaatctagatcttggtaaaataagtttccaacaacaagtgcaaagagacaaaacaatgttcacattcatatatgggtttgttaaatctccatttcttgcaaggtaactaagccgagacaattaacaaaaatttcaagacacaaaaacaggggtgcataagacatgtcaatcgtcagagcaacttcgttctataaaaggtcaatactttaaaacataactaattagttctaagaaaacataactccttacttacccttttctcaatcttaggtcgtcaatactcaatatggcattgttttctttattattctctttgctaactcttattgtagcactaacggcataggtcattacttcaaaagcaggaaaaatagccatctactgaggtcagaatgaaaaaaaaaaggcaccatatcagatacttgtgccaatttgagaatgctcaaacaaaatagcaaaatcatataccatattcaaaaacaactaatgatcttggttgaggaagcagagcaaaccttcttagttctctctcccaactcagttgtaactcagtggaactaaaatatgactcaggaagtattcatatacagcttcgtcgcctgaggcacaatgatattggccgagtaaacggagttcaccggcaacatcccatcgattgcagcttagtgcattcagaagcttccttcttctaacaacaagtcacctacagttatgaccaccacaccttaagttttctagttgagaatggttatggtaattctcattccatttgtttcttcttcttttcttcctggtctcttcgtttcctttaagcaattctttttgttttcttgagaaacaaataaagtagaattttgaattgcatgtgattgttgttggatctagtgactaaaagtgtaatataatttggtttttacttagtttggtggaagaactccaaaaaattgatatattgtttacaaacataaagctcagacaaaatagtaaacttatgtaccagatttaaatttgaaaatgcaaaagatgtgccatgaatgaaaatcgaaggagatctcaaagataaagcctatacaagaaccaaccattccccaatacacacgacagagaacaaagtggatatatatcatttctcatatctttaaatattctaaaagagaagaattgcatagatttaaaaagaaaagaaaagaaaaagataagagtaagaatcgcacataatcttaatacaagaatatatgtttgggtttgaagataaaaatagaaattattttattgtttgcacttacaaatggatcaatttgtgaatatcttcgatcataaccggagctcaccaaaatagtttcactaacgctgaaacaaccaaaaggaatgtcgacaactggcgtagatcgcccccaatgaatatcaaactaaaaatttaggaaaatttctataacagatcaaaattttatctgagacttaatcacatcattatatttccaagataaattataaaattttagtaagtaattcaatgctctgaatgagcagaacactttacaatgtatatttcatctaaattgattatcactgctagcaaacaacaacaatgtatatatatatagagagagaaacattgaagagcttatgaagacgataatacgtgagatcaaaatttttgagacgcaaggtcactatatccttgagatcgaagatggaggacaaggccttgggaggttgaaacaacagagtaataggagaagcaacgaccatagatttctagttcttcttagagagaaacagatatttgggaaaacagttgagagtggtagccatcgtcaatggtatttcgacacaatcacaccgaatataacttagccccaaacaactccaaaatagatcaaatagctcataaacaaccaaaaataggtaccagattccaccccgagccaaaatagggttcagagaaaacccaagaattttttccctacaggcaaccggacgaccggttctagtacaccagaaaaaccagtcgacaggtttctcacaaaccagaaaaattctgggttttcttccccagctcgaaccaaagccatcacagacctaaataacatttcctgaacagtataataacataaatataacatatcccaagcttcaaattacagtagttcaatctctaactcaaaatcatatactcaagtgaaagaaactcatttcctttagcttcttcaaaaacaatataatccaaattgccatgggaatcaattaaaacatgctcaacaaacctaattcaactaagaaatcatgctcagatttcatctaagcctacagccatgaacacccataaagaactaataaaaacctagcttaaaacctaggaaatcaccaagaacataagg

SEQ ID NO: 64780 - DNA, 1703 bp, Cannabis sativa
gatttttaataatgggaagatatttttttaatgtggtggggtgttgtttgaagacattatagttttattgtctaaatttttggagacaattttgttttatatggctcgcgattagaattttgcagcttatgatttggtaaaacatgttcttcggttagacgaagagctattttggttcgagaaggttttaccgtcgattgtgatttactgttttgttaatcatgtgtgactttatttactatgtaaaaaaaaggatcgttattattagtacaattaagtatcagatatcacctcaacaatgctagtgatttttgttctattcacctaacttttagtatgtcaatcaaaaatcaaaggaataaataaagggcatcacctctatggttgttaacccataaaatcttctctacatatttatcttcacttttcattcccaaaattctaatctataacaacatgcctatactcaatatagtctacaaaaagccactctttagtcaatcttccattatacacaacctaactacccaattttaaaatcatgcaagagccactcacactgaaaaagaagcctagaagatattgacttaacccaacccattttcctttattctttcttttctttttcattttttattaaaaaaaaagtgactttagatatgagttgagattgagactacacaaattgtatgttcacttcagttcagttgaatacaagtagctttccatgtctttttaccatgggagcaaaagttaccatacttttccacaaatgtaatattggacaatattaatattgtcccacatgaccccataaatatgttgtacaacatcaatggtttactttgtttatacgtatgtaggagtaatgatgtctgaactatacttatgcataaaaatatttacatactttttttaaaaagcaatagagtaatgatatgtatactaaaatattacacatttataaaaataacgagtcatatatgaagtaaatgcgattcgttaaaaaagaactattatgttactatgtttataatattttggtgcacatatcattactcgtaattttatacacaaatattacacactcataaaagtaacaagtcttatatgaagtaattgtgattggttaaaaaaactattatgttactatgtttgtaatattttagtgcacatatcattactcgtaattttaaattaatgctatattttggtgcaagttatgttcatatattttttacactaagtaaaattacaatatataattttttaaattacaatatataattatgaattctctttttctatataaatatagaaaatcaaagtgaaacaattttgttaatttatcactcattctagtgttcattctaataacaaacatcaatttctttatttattctacacttgatcaaccaagttaccaaaccaaaggttacctaattttaaagagttttctttgtatagtattcatagtatagggggccttaaataaatgagttgatcaagtgtagggaggcatgcttctgtggcttctgctatattcactcatttcttttggaggaccactttttagcttctgcatttattcaactaactaaccaatagacctactttccactttttagcataaaatctacaaatatgcccaaatttacatgtcaaattcatactttatttgatgttataatttagttaaatgg

SEQ ID NO: 64781 - DNA, 914 bp, Cannabis sativa
ttttttttttttttgctcggttttctttcctttattttttaagaaattcaattttttttttctacttgctaatgatacaaagaaaaaaaaaaggaaaccaagtagacaagctttatgaaacaattttgggaaactaatgagaaacaaaaacaaggaaacagatttgtgacacaaatagggaaactagaattcaacaataataaattagagttttttttttcattttcgaatatcaataacaaaaagggaaacataatttgacagaaaaatttggagacaagaaatcaaccaaaaaattaagagttttgaattttcaattttttttaagaagcaaagacgcaatgtttgacgcaagaaaattatcagaatgtggttctaacagtttttggattcacaaagaaaaaaagaagagatcaaacatgaattaacaggaaagtagaacacaagttaaacaagagtgtagaacatgaattgaaaagaaaaacacaaaagatagaaggccaaacctgatgattctaagctctgttaccaaatgatatgaagcacacacacagttgtgatgaaacccgataccaattatggcagcctctaagaattcttgaaatttggatgtggaaccgcgacccaatgcttagttaagcatgaaccttggtatgaaggaagactccgcaaacggtggtggaaatccgtttgataagtcaggttgaacgccacaaggaatactccttgataagttcgaatagtaatcgcaagaactcaagagaaaacctctaaaaattttattcccaatatatcttgatttttcaaagtgcatgtttacaaggctttatatagccaacttacaaccaagaaaaaaagaaactacaagaaagaaaattttccaaataaagcaaagacaaaataaaggaaacaaa

SEQ ID NO: 64782 - DNA, 852 bp, Cannabis sativa
attgcgagcagatgcatctagtttcgccaagaaatgcgacaaatgtcagcgaatagctacatatatcaataagccaccaagtcagctaaactctatcacaagtccttggcctttcacagtctggggcatagacctaattggagaattaccaaaagggaaaggaggagtgaaatatgttgtagtcgctaccgattacttcacaaaatgggccgaagccaagcctcttcggactatcactgctgctaaattacgcgagtttgtgtacagtgccatcatctgtagattcgacataccatacaagttaatctcaaataatggaaaacaatttgactgtaaggagatgcgccagctgtgcaatgagttgggtattaagaaagcattttcagcagtcgcatatccacagagcaatcgtcagacagaagcagtaaataagataatcaagcataccatcaagggtaagctcgaagaacgtaaaggtgtatggccagaagaacttccacaagtcctattgtcgtataatacaactcccagatctacaattgatgaaacctccttctcgctctcttacgggtgcgaagtcatggtgccagtcgaggttggggcaggatccctgcaaagagatgtactcaaccttagtgaaaatacagaaaattaattgtttcaactagatcttttagaggaaaagcgcgatcaggctcatttgaaaaaagcggcctatcagcagcgaactgctcgctatttcaattcgaaggtcaaagagcgaactctaggagtaggagatttggttctgtgaaaagtcatgccaaacacaaaaaaccctatacatgaagtttccggtgataattgggaggg

SEQ ID NO: 64783 - DNA, 719 bp, Cannabis sativa
atagttgtatcataaaaaaaaatagatttctattatgtcttcgcattctttatagatttcttggcatattaggcttagtcccactgtagagataaattgtcatatataagatgaatggactactattttcattgccaattagtttttgagatgaactttatttatcttatcccgaattctaatatggtatcgtttgtgagcaaacaaatactttccagtgttgggtctttgatctgttttaaaaatctacaaatttctcgacgtgtacatctacaaatttctcgatagtccggtcatggtctattaaaggtcgttcgttatacccatactttttaggtctaaacgtgagaaatgtgtattaaagttaatctcacattgctaatgtgtgaagataaattgtcatatataaaatgactgagttactcttctcattgtcaattgattttgagataaaacctcattcattttattctaaattctggcaagaataatctttggttaacagaatttgcaggtagtgtttattcataatatttgtcgtaattttaattatgtaacatttaaaatttttaaccgttctacaaattttattacctataatcttgttaagatgattctttttaacggtgataagatttatctaagtttgtgcaagtcacttcgacgtatttttaggcattgccttatggaagatttcatttcattaaaaaaaaaaaaaa

SEQ ID NO: 64784 - DNA, 957 bp, Cannabis sativa
tttacttttttatttttgtttatttttgtacctggagataaaaaagtaaagtttagatgtaataaaggtataatagaaaaaaaccctaacttttaaggcaacaaaaatcaatctcaaactttggcaataaaaccatcaacagatttcgaaatacgcttttaatgcgaaaaagccaatttcaatattttggaaagcaaccagcagctgattaaaaattgtttaaggataaacaatacatttctcatacctaatgagaaaagacaacattcaaaagcgctttaaacttatcaaagatctaacaaaatagtcgtttattaagtaaatttttaaaataacaaaagttcatgtaatatttgagaaagcaactagcaacagatttcaaaacaaacaactatgctttgctgttcaaaacttttttaagaacaaacgatgcaaatcacacaaacagtggcatttgaaggtattttttacttttaaagagggaactgtctaacaagtaaactttcacatcaacaaaacccaactttattgtttgaaaatgcaaccagcaaaaaattccaaaataataattgtgcttcctataaagagaaggaaatcgtttaaatttttaaaacatcaaaagtcaatttcaatatttcataaagaaaccagcaaaatagattccaaattagcaattatattttgtactactcagccatgttcgaaggcaaatgacatatatataacattaccataaggtaccatttgaaggtacattttatttttgaacaatctgaggaagcatacgtctatcaagaaacttctaaggcaacacgtcaattttaatacttgagaatagaaccatgagcagatttcaaaatagcaccaatatattaccattcggaaccgttttaagggcaaacaatacaaatctcacacctagtagcaagagggaacattcaaaagttctttaaactt

SEQ ID NO: 64785 - DNA, 825 bp, Cannabis sativa
gaataatattatagaaatatatatatgtatcgtaattaacattaaaaacttctacagagttctacggtcttttgatctctttggatcttttcggttaatgtgtgtaatttttagtgttgagatctttgtcttttcaagagaaagataaatgttgaaaaagagaaagacaaaacaaaaagaagagagaaggggtggttgaggcgcgtgctagggacgacggtggctggactaagaaatacatagaaagagggagaggatcaatggcgaaattacgaaaaaacataccttttgggcagtcgaggacggttgtgagccaaacaaagagaaagagatggagtttctttaaggtttttagagttttattatgggttaaagctcatttagaagttcggaaacccctttagctaagattatttggaaataactgcaaccattagtggtgtacatgatttctgttatagtttggttatacaaactcaatataaatgtcatcttgtaaatatttaattgtgacctgtccaattgaaaaataaaaaaaaaaattaacatgtccaataatttcttcacgttaatctgtccaaaccgatctttattattatttttcttataattattgttagttttgataataataattattacaacaacaatgatgatgaagaagatggtcttagaaaaaaaaaatgtagaatagcaatgatgatcattgatcatcatcactaatatgacaaaaaataatatgttaatattaagattttatatgtaggtgggcctcgaaatggttggcatgtcttcatttggtgaaagatcggccttttctatttt

SEQ ID NO: 64786 - DNA, 1324 bp, Cannabis sativa
gtaaaaaatgagcagtcgatattttctccagaaccttccaagaaggtaaaaactaaagaacctccaatcatattctcagaggaagatgagaagaacgtgagatatccgcacgtggatccattggtgattacaatttagctcaccaataaaaggataaagagggtatcggtagataacgggagcttagtgaacgtcctttataaggaaatgctgaaaaagagccagtcaaggcataattgagctcgcattaaccttggacgaggcacccctatctgccacagttatgcaagactttctagttatcgatctgccatcgacttacaatatattgttgggtcgtccagcattgatcggactaggggcagttagtttgaccaagcacctatccctgaaattttaaaaaccagagggtgtgggagtggtgcgaggtgatcagatgctagctcgcgattgctatagcatagagctacagcatagaaaatccggtgatcaattaatagcggtcttggcagaagaaagcaaaaagaaggacgaggatcttgacccccaggtccaagatgaaagaaacttattaaaaccaattgaagaatttgaagaagttgttcttgacctaagaaatcccccaaagtgtgtttacattaagaaaaacctggacgagcagctaaaatagcagctaataagtttcttaagggcaaatcaggatcagttcacctagaaccgtggggatatggcagggattgaccctgaatatcaaaatccctttgggaatattctagggattaaccctgaatattaaaactcattttatcaaaaccagatgcttctgaaggattgataaaataagcaattgaatcgggaaaattcttatgggagtaaatcgatggtaaattaatgattgcaaacagcatcggtgatgtaatattttgaacttcagtcgttaaaataatcctttctttcgacaagtaattataaagcatgaccctttaaaattacttgaggggcatatatgtatgattaaccggaattcatctatctggatggaaaatacatacattatattataattaatgcatgcaaacccaccactttaaaaataaatatttttttttaaaattttttaaaggttcttgaccaaaccattctgtcgagaaagcggtcgaacttttataacttcctgaccaaatcattttaacgagaaaggggtcgaattgttataacttcctgatcaaacattctgacgagaaagtgatcaaacaattataattttttgattaaaaacctatctgacgagaaaggaaattcaaaagttataaatgagatataa

SEQ ID NO: 64787 - DNA, 610 bp, Cannabis sativa
ggcagaaatatggtctttagtagagataacatggccaacagaaccaagatgatctacaagagtcttgattcggagaagatattcattaatagaaagagaacctttcttgcagttttcaagttgggtagtgtaaagatcaattttggcagaggtctgagtaacaaaatatacctcaagtgttttccagatttgagcagaggtttcggccccaactatgcgagttagaatcccatcggacatggaggacagcaaccatgaatagaggagttgatcttgcacttcccagtcaatgaattttggattgacattgttaagtatttcatcttcttgattgagaaattttcgtggaggagaatgcgaagcagagataaaatgttgaagacgatgtcctctaatggcagaaagaacttgaggacgccagaggagaaagttattttcatcaagtttgacagaaactttgtgagaaaagacaacaggggtgaaagtgtttggggtagaagaagccatggcaggcaacaaagaaattaaaaaacagagaaacagagatcagtagatgacaacggcggaagcgagaaaaaaatgctctgataccatgttgagtatacaaaag

SEQ ID NO: 64788 - DNA, 1254 bp, Cannabis sativa
aaatttagatgactccttgagtgatttcctttgagtttagatactttgaaatcatgccgacattggaatgttaacatttactttgatctttagttgttgtcttagtattgactctcttgtcaccatgtgtgtttatgtgaatattgatgtagtatttgtctctgttaggttgtagccttgaagttctttagcattccctcagctgtgtttcagcgaaggtggtctttttcatctcctcggtttgatagcggaggaggccttcgtcaactccttagctttacagtgcaggaggccttcaacacccccttggctttgtagtggaggaggccttcttggcgactgtcaacgatgtgttgtagtagttgctggctgttctttggtcaattgaggatgtgaccaactcttgaattaatatacccaagatgggggtgatgtcttccccatctcgaatgcaccttagagtgatcgtaggttaagctcatgtaatgtgcatagctctcgtatactatttcttatttccccttgagtgatcgaaaaaaagccttcattggtcactttccataccaaatcccgttgggctttcttgatcatgggtcttagggagttgttacatgtgtgtgcactcgaccacttatctagagattcgtgggttggcagtgtttaactcactaaaagaaataaccgtagttacctcaagaccaactctacaagccttgttcaatgcttgagagtgatcgtgaggtttgtgagttgtaattaattaataacaatgatataccaacaagagttactcaacgcttttattcattagatattaaattcaattacatcactatgagctaagttgaaagaaaaagaagtagtagttgtagatttttgtttttcatcaaagcttagctgaagtgatccccactacactaatgccttgttcgaataatagtgtaggggccataccttattgatggatatcccaacaaagagatgattttgtcgtatcttgtcgtttcgagaggcgatcgattcacttgtacaaggtaaagttgatctcactttgaagtgaactacttagggaacaactactttattaatgatattgtctcagatgatccccgttccagttccttagtaccggcactagattcaagtggtagtcatagcaaactccaacctgtttatccttgattctgacgttgtaacaatataaggtccctccctctctcatttggagtcttcggtgttactttcttggttaat

SEQ ID NO: 64789 - DNA, 1228 bp, Cannabis sativa
gattcaagatgcaggggaagatgctcctatagttgatactcaacctggtagagaagatgaagacccaattatataccaaaccacagtctacagatgagccaagaattcaccaacccaccataaatgacccaatgatgtatgagtccaatacatttgacccaacaccacctcagcctactatatttgacacaacaccagactttcccactgcatttgacccaacaccacatcaggcccaaccatttcacccaataccaccttagcccactacagttgacccaacaccacctcaccccactacatttgacccaataccacctcagcccaatccatttgacccaacaccacctcagctcactacatttgacccaataccacctcagcccaatccatttcacccaactgttgacataccactaaaccagcccaatgttattgacccaacagcatcgcaacaccaaaatagaaatgggacacaacaggctaatgatgaacaagattttgaatttcatgaggaggaatatgagcaagatgtccaagctgagaggaatatagccaaagtaacagatcctagcaaatggtggtcaagtgtcactaatttttgcagtcaaggtggtgagggtaatgagtgtgaaggagatggagttgaaagtgaggatgacttgcaaagtttagcaagtgatgatgaggaaggtgaggttaggaaaaattcaagacctgagtataatccacagtgtgacaaggccagttttgagtttaagaaatggatgatttttgcaactattgaagttttcagaaaggcccttagggaatattttattgctaatgataaggacttcaagtacattagtaatgaccaaagaagagtgagggccacgtgtaaaggtaagtgttgtaagtggctgatttttgcatctagggttaactcagatgagtcaacttttcaaataaaaaagctagaaaacatacacagttgtggaatagtccttgacaacaggcttgcaaagtcagatttcttggacagacatttcctggacagcttcagattaaaccgaagttttcacttctcagccttcaaggagatggtgtcaaacactaaattttccagggtcagcaaatggactttttacagggctaagaacattgccttagagatgttggaaggatttgtggctgaccagtatgctattttagatgactattacaagcaaatactgctaaccaatcc

SEQ ID NO: 64790 - DNA, 603 bp, Cannabis sativa
attagtttattaaataataattaacatgtaatattttaatttttatgtagtttaatatttttgtatattaaattttttattataaactatatttttttattaggagatttcccgtctcgttcccgcgcccccattagggaattcttcgccccatcctcgatagggaataagcagaaatggggattaaaattcttaacggaataggacggggaagcactccccgccaattatctgccccgtgtgcattcctacttagcatcctaattgtttggtattatattattattgttacaattaaatatcaaatctctcatataacttaaaataataatttttaaaaaatatcactaactaatagtgcatacccaataacaatgttgtaatattattacactaatatcactaattattatgaaatcatatgtacatactaaaattgtttgtagttaaaaattttcacaatttatagtgttgaaattaaatttttatcttatattacatatatgaccttgagatgtaacaataacacatcagcatcaacattttgttagccgtttatagctagaaatgttatattttagtactgtgaataattaaaaaaaa

SEQ ID NO: 64791 - DNA, 3479 bp, Cannabis sativa
ataataatcatatatataaatatttaatctttatatcaacttctgagtgaaaggtttgtggttttttctaattagactctttctgtaacactttgaaacactccacgagctctacactctgcgatttcacatctttcgcttctctttcatccttatctttctcaccctctttctctctctctgcaattctctcaactcttcaattattcatctttcactttctatctcttacttctaataatacccattttctatatctaatcttcttcatcttcttctggtttttgttttactataatacacacatatatataaccatggcgctagagacatggctgatcaaggtcaagaccgctatatccagcaaattcgacgtggttagatcctcatcatcgccagcaccggctcaccccaataaatcatcaccagcaatgaagaaatcatcaaacgtcggtgttttggcattcgagattgctggactcatgtccaagctcatccatctatggcaactgctttccgataagaacatgattcgtcttcgtaacgactcaatctcactagacggagttcgcaagatcatctccaacgacgaagctttcctactcgccctcgcctgcgcagagatcgtcgaaaacatccgcctactcgccaagtccgtcgcccgaatcagcaagcgctgcgacgacgttaatcattggaatttcgaccaatgtttcagagattttgcagattccggtcgagacccacacggctgggttctctcttccaaagacatggaggccaagaacaagaaaatggaccgttacgttaccgtaacggctgcactttacagggagatcgatgagctctcggttatggaaggagggttgaggaaattagcgttgcagatgagccaaaacgacgccgttagcatgagtaacagtagtattagtagtaaactagaggagaagattacggatcttcagcaaaagattttgtggcaaagacaagaggtgaagtacttgaaagagaggtccctctggagccgaagcttcgatactgttacttctgttctcgtcagatccattttcacaattttagctagaaccaagcttgttttcggtttaggagcacactaccccccttgttctttgccacgtagtctctctgcttctgcaacagttcacccatccgatcatcatcaaagcccatccaatctcgatacgtgtagtcatttcgtttctggaccgttaatgaagcgcgacgacgatgatgaaccgaataataagaagatttctactgttaatactgggttctttgagtcgaactcgaagctgctaaagccgccgccgtcgacgacgctgggagcggcggggctagcgctccactacgccaacttgatcatagtgatggagaagatgataaagtcgccgcagttggtgggtgtggatgcgagggacgacttgtactcgatgctaccgaacagcgtaagatcttcgttgaggtcccgattgagaggggttggattctcggcgagcgatccggtccttgccggagagtggcgggaggcgttggggagaatcttggcttggctttctcccttggctcacaatatgataaagtggcaaaatgagaggagctttgagcaacagaacttggtacccaaaaccaatgttcttctattacagactctattcttcgcaaacaaagagaaaaccgaagccgccataactgaattgcttgtgggtctcaattatatttggaggttcgagagagagatgaccgctaaggccttgttcgaatgccacatcaataataatcttaatgggttgctcgacaataatactttgaagagttcttctagcccatcgtcatcatgatcatggaaatatagatatcaaagatcacagctcaagcattaattttgataatcttcttttcttcatcatcttttttaatgatatgatttttcaggttttaaattaattgtataagtctgtgtatgttgattttgagaggtttgactgatgattactgaacagtaatttcagatctatattttgaggttaattagtttttaattgtattgatggactcttgaatcttgatccatcagatcattgtatatggtaattaatatatatagagttatatatgtaaatggtctgattttctgctaagtttatttcaaatatatattggatgcgtggatgcgtgtggttgcaatgataacatacaatttttattattaatgcaaaatcttagattgttttttttttttttttgaactggaaatcttagcttgttaaattgtagtacataaaatttgaaagaaaaaaaattgtagcacatacgatatgtatatatatatggttagactactgactaaagaattggcatctcaaacacaaaataagtacttagtctatgtgtaggtagagtcagttagttgagaataagaaataagaatatttgtggggtcctaaatttatttataaaagaatatgattcagctgcagaacattacaacaactaatagctagatggtcggaagagctaatgctaaccactatatatttattttaagaaataataaaacagatcattatcatttcttatttattttattatttgtaatgattgattccaaaacctacagtcttctctgttgactatctatatcatggcaatgccaattagagttttctttttgctaaacgttatcactttatacctttattataaacctctttacaatcactctctctaaaaatatttttatttatcttaaataattcttaagggattaaggaattttttaatttgattatttttaatctactaaggtgagtgtggataaatttttgtttttaagcttaatttatttatctaattagtttaatttctcatttttacattatatagattaggattgttccaccaacagaagaaaaataaagaaaaaaagtttttagcaaacaaaaaattgagtttgacttaaatattttttatttaaacatatttttgatatagtataaaaaatagatattttttgatatatttttttaattaagtaactaaactaagcatatatattaaaatttctcttttattattcgtcattggataaaatctaataatttaatatttttaaatttaatattggactttttttcagttttaaccaaaaaaaagtaacaatactacaaaaatactttcaactggccaaataaaaaaatatacaacccaactaaaaaaaattacacgaatacctcttacacacaccttcaacccacggtccacactttttaggattgaaaccttcatgtgatgcaaccttcggtcgaccacccagcaatccaagacaactgaaacgaaaaccaactaaaaagagaactactattaattctggcgacttcacatcaaaataggggctgttttgaatttataaaaaaaaatttgcagaaaaattgttgggaatattttaccaagatctagat

SEQ ID NO: 64792 - DNA, 545 bp, Cannabis sativa
tgtaatgttaacgcttttttttttgaatctttttcgataatttcgtgatgtttgtcgatatatttaaatgtagtgtccacccaagtccataatgacatttatcgacaaggagcgatgtgtcgcgagatagttttcaataatgtccacgataaattacgattcttttcgcgatatttcgtgacatatcagtttctcataattttttgtcatttttgtttgcagattcaactgtgtttgtggttatactgtatgatgggacttgggcagttgaaggtttcaactgatattcaataacccaaaaagtaagatgttaatgtttgaggttgacactactttacaaaaactgcatgtaattttgtatgaagagtttgatatagaccttcttgtgtataaacttaaaatagaggtgtgttacatgtacatgaaaggtaatatgataccaccagaagtttaagtcaaagatagtcaagtaagattgttcttaagaatgaaggtaaaaatgagtgtggagaacttgctgccactatttgtgactaaggttaaaa

SEQ ID NO: 64793 - DNA, 798 bp, Cannabis sativa
atgcagaaaaaaaaaaaaaaaaactgttttgaagtgtaaaaatgatcaaggcccaaatatatattcaaaatcaaaagcaacttatttttagttttttttaataaattttctagcttttttcttttaaatgttaacaaaaaaaaaaaaaaaaattaccccatataatatttttagttttttttttattcttatggcttgaattgctccggtggttgttatgtagaattagattacaatttaagttgttccgtttgtaggaattcgattttgaccgaatcaaaaagtaaaaaaatataataaaataaaataaatatatataatatgaataacttttccccattagcactctctttcactctttccctttctttttctatctcttcaaagcttcaaagaagccataaccaccatcaccatcactctccggcaacccatcttcggccccacgcgccagaccatcgaaaccccaagtgtcggcgacctcaactcccaagcagtgttgctcctttcgccgtcgttagtccgggattgcaagtcaaagtttgtcagttcaaactttgaatggattccagccacctctggtgtccgtttgacgagccatcttcaccactagactcagcttgtcgaggagaacaacctactctaagctattttcccaactcgctactttttccaatgacgtttttgtagctatgcccctttccggcgatattgtgaaccgttttgacaaactaatggcatggttgtgatctactcgtcgaggtggtcgttttaatatacactactcttattttcggt

SEQ ID NO: 64794 - DNA, 664 bp, Cannabis sativa
agggcataaaacccaacagaagctcctgtagctagagctcgcaagggctcgttatctacaaatgagatagacaatggttcaggaattagcagaaccaatgacatttgaagtgtgcaatagcaagtctacaatatcagcccaaggatctcatccatttgcgacatgccccagacaccgaagtcgaagaaatgggtgaggacttcgagttaccagaccgtgaaatagaggacaaggaggaaggtgaaggtagcaagatagattctgttgacaacgctcaactaaacgaacctttctcctgcgaggatctagtctcacgggtcaagaaatctgatcagtcaacatatgcgaggttaaatttggttcacactgctacttccaagcctttgccaacataatgacctcatcttcccttcacgaatcctgcgatcatcccaacacaaaacatggtggttttaattcatattcttcaatacggggtgacactgcccttccatcctttcgtgaaggacattctttcttactgtgacgtctctcctttccagcttaccctaaatagctaccgcataatcctagggttttatgcgatgtatatggagtacacgcgaggagagccaacaatcaaagattttggcttcttctatgacataaagagtgttggccatga

SEQ ID NO: 64795 - DNA, 1123 bp, Cannabis sativa
  modified_base (1067)..(1071): a, c, t, g, unknown or other
attctcttaaaaagcataacttgtatttttgtcagttgttttgaaatttgattagctgcttgctttagaataccttatatttattgtgcatattttatttttttgtatttaattcgatttttcaaaaataaaaataaaaaaaaggagagaaaggcgatggtgacttggcttgtgggctaagaaaattttgtgctttatttggtaagtatcaacatttaatctaaattgatttattttgataagttaccttttaaagtttgatttcatattcattgtattttgtccttgatcttgaaggattttcttaaattgcctatttttggaaagtatcttggttcttctagttttcttttattttttttttcaaaataattttggaaaaagagtggggcggtttctttgtgtttgtgggtgggtacttttctttttcaaattttaagttggtttccttttatgcttctctctctctcacatgattatataaaccaacttcttttgtcatttattctcacaacctactcgattcctattcttttgttttctgcttctttgtttgtctttctctctttcagattcccatggctaagacaaagaacctagggcaaccaaaaagggtggacgaatctgatcctgccccttcgaatgctcctcctactgctccaattttgctgcctgctactgcaactgcatcaaacccaagagattcatcgcttcctcagcgtgaatctcagcctgtgaagccgaagccaaaatgaattcctaaacaagcggctcagaaatctgtgcgacctcacaaattttacacttcatcgtcttcatcgtcgaaggggtctcctcctggtgctactgcatcgcctcctgctgcatcaagtaagggtgttgctgcctctcgcacccgtgcccagcaagaccagctcctcctgccaagaaactaaaattgaatcccccctcgacttcttcaagttttgaagaggaagaaccaatggaggtcccatctgatgatttcgagaccaaatccatgtctatcctttctgaaaaagagcttccagaagactttggagtctccnnnnncagtgaggaaactgatctcgaacccgagcctccattgaccaaatctgctcca

SEQ ID NO: 64796 - DNA, 2769 bp, Cannabis sativa
  modified_base (536)..(549): a, c, t, g, unknown or other
aaattgtatagtattagtaattatgtttttttttttttacacattttttataatattatacatttacttgtatataaatgaaaattgcccaaaatgtaatgcctttcttaaaaaaaatacttgatcctcaaagatgaatgtgggcatttcatcgagggtgatatggaggatttactatttccgaaggtctaagtgaaggttttatgagttttgctattactgatttgcgatttatgttagggttaaagttaattttttattttttgttttttttttaagagaggggtgggggggaggaattcattaattaacaatctatgtaagctttttcatttgaaaaataaaattaaaattaaaaagttgaaaactaatgatatatatgttaagtacttttacaatatgcacttccttaaaaaaaaaatatgtaattgatgcactttttttttatttcgacatttaaaaaaaaatagtttaatgttttgatagttctatatgttatcgttatttaagaaattttgtaaaattttaaaaaattnnnnnnnnnnnnnnatataaaaaataatgttcaaacaatttattttacaagtgtatataataaaagagtcacacgtgcaacaaatagtttgaactttatttttagcatattaaaattttctgaattctcctaaattttgtaaattgacttaaataattataatgtacaccgtcataaaaaaaaaaaaaattaaactaaaaaaatttctcaaatataaaaacggagagtagtgtatattttcttttaaaagagtgcattatggaatttttggttattctagcttgaaaataagagaggggactatctgtgtacgttgctaagagagctccagcctctaataattacttatcaatttctcaacgaggacacctagtgacttatacgaggatccattttcaaacaaagccatcctacacttttgtttcatacattttactctctccctaacctcacaatcacttgccattaacctctcaattgctctttgtacctcctctgccattactaaatcactaccctccctataatccaacctaatatctattgctaatcccaattctttcaccatctcaaatgcattcatctgttgctcagcatacactggccacgtggcaatcggtacaccatgccacaagctctctagaattgagttccaaccacaatgcgacacgaaccctccaatcgccggatgaccaagaatcgtcacttgcgggacccacccacacacttttcctaacccaaccgtacgatccaaaaaaccacttggtaacacgtcatcaaaattaacatattcattcgggagacccaacttagcattaggagccttgcgtaatgaccataagaaccgacacccgatccgctcgagcccaatagctatctctctcacttgaggcccattaaggcttcccatgcttccaaagcataggaacaccacggacgacacaggcttatcatcgagccatttcatcacgttcttctgttgggctttatctggatgccactgctctggcccattgtaatctattatgggcccaatagaatacaccttaggcacatttctttcggacaatgaatccaatacaaaggtctctaactctgtgaatgtatttacaattataccttttgtttgggtgtacctttgaccatgataaatataccatgcatacccatcacctcgctttagtactgtcgtgggaagaatcgatcgaggcactggattagcaaaacccggaactctaaactcagtaagcgattcagaatcgagttgcgtgtcaagaatcggcacctccaacataaagctgagaaaacttgccggtgaagcaaagaaaaggtaagagggaattccaagctcaactgccacgtcgatcataggcgtacaaaacatgtcaacaaccaatccgatgattcgtcgttgttgattggagttgaaaggttgactaaggcggaggctggaaatggcatttttaacattgagtttataattttctatgagggatgatatgtgggctacgtaagagtggaagtgattaggtgtgggagggtccatggtgggaaggaggaagaagcggagattgggggaggaagatgatgatgagttggagaggagggattgtgtgtaggcattgattgttggccactgtgggacagggatgaggaggatggtggcggagaggcggctaggatggtgatctactaggcggcgagcaaattcgacagttggggttagcattcctattgccggagtagagatgaagaccacttcattgttattcatctctacatcagagtttttttcaaccatgtttcgatcttttggagtcatcattgtggatctctagacatttaaatttttaatttatttgacaaattacagaagaaaaagatatagtacaatgcgtggttgtatgactatattatatattatggagtaaggattgacatggattatataatataataacatgttaggtaaatgtatttttcattctattaaagtataccaccacttgacaaaaatatttatatagtcaaagtattaatggcgaatatgactatataattattaatattgagtgttatcaaaaaaaacatatatttaatattgtgtagaattattgataaaaaaattatgattttgaaaccatataccataattttagtagagattttttttattattattattaagaaaaatattaaagacttttatgaccaaattcaaaaaaaaaaaaaaa

SEQ ID NO: 64797 - DNA, 1002 bp, Cannabis sativa
taaataactattatttagttttgacaataaagttaaagataaaatttcatatgtatatatacatattattggtaattttttatatttgattataatttattaatttcttaaatattaattaacatgaaaaaattgctaaaaaaagtagcataaatatatcttaaattagcaatcaatttcatgggtcacttaaaagtattgtttttttttaaaaaaaaaaataatttaagttatcaacttgtttcatatgaatttttgtgaaatttaaaatttggttacttatctcttaataaagtataaaagaaactaaaatgttaacttttatttatatcattttgacatgttagaaccatagatgttttgaccaaataaaagttttggaattaaaagtaattttatagtttcttttatatttttttttcttattaaaaaagaaaaagtaactggtaacttaaataaattgtttataccttttaactaatctcattagattactataaattgtttgtaattttacatgtaaaagttactatacaatatgtattctatataaatttattttattgtattatattaaattttatatatctttaaaagtaacgtaaaagttactataaaaataaataaactaaaatgtaacataattgtatcttgattaataatatataagttgaaaataaaattataatttttaaagttaattacctaaaataaataacaaaaatatatatgagataatatttttcacaaactaatttgtattttaatgtcttatttttgtaataacatctaataatttttaaatatattttatttttatttgattaacaacatataaaataaactaaaaagttgctttcattttgaatatatagtttcaacgtttttaaatgatgacattgaaaaggtaaattggagtggcactatgtttaagcctagactaatagtgcaactgattttttttttctttttaaatgataaaaataaatattaaataaggaa

SEQ ID NO: 64798 - DNA, 1873 bp, Cannabis sativa
aaacaagataattatcctcgctcaattaatatccaaaaaaaaataaaaaattaaatactattttaatctggatattacacatattttctactttactattcaaatgattaatccttctagagataaataagtataaatttatgcttacagtccacttagcttaggacccaaaattttttctcttataaaaaaaaatattttttttattaattttataaattattatattttcttaaataagaattcaaaaataatttatttcgtataacccactaaaatttaacatccacctatatagctctatatatagatattgatacacttatggcaattcatccaatcaaatccacactattttactcatattcgatccgcacaatagctcaaattaaatccaattcaatccacacttttgtggattggatcagttattttagataattggttactttttaatattaaattatttaatatttataaagaaaatatttttttcacataactagcaacaaaataaaataagttattattattttatgtctccaacaataaattaaaattaataaaataacaaataacaaattcaaagaaaaaaaaataattgtacatgtataaagaaatgtttaattttattttaaattgtatgtagaaatatatatatataaatatatatatataagaatagaatacatttattctattaagttttaaaatatattgtattatatgtattaaacttttcaaatattaattttttacattaaaatgttactatatataactttttaatttttttttataaatatgtgtgaattagattggatcagttagttttacatgtcaatcaacatatatctaatctgtacaaagtgcaaattttgaatattttaatccaatctaatctgcataagtgcggatatcctcactttgcagattgaactaaattggatcgtacagattaaattggatcgactattttatgcacactagatactacgtacacacatatcacaataactaataaagtgaagttaacaaattaaggagatgaagatgacatgtttaaagcaagcatgggctttacactaaccaagtatttgttttcaataactcgataaggattaagctaggttagctatatatataggatataaatatacatggaccaatatcgatatattttatccaataagagtataacattgattttatctcctttcaaaaagaaaatagcattgatcaagttaagattattattgaaatattgttgtgttttactgaaaaatattttatcattaattaatgtcataatttttggtccatcaactgcttttttctaataaattatgaaattttattaataataattagttaaaataatagtatgcaatttaattagtacatctccctcattagaaatataattaagattagaaattaaaaaacaattcaaataatcagttgctttgcttgattctcaaattgtttgaaaaaaaattaaaataaaatcaaataaaaaattacaattaatcttaagaacatttatattttgtcatccactgcttagaagacaatacggtaaaaattattacaaaagattcatttagtcgcagagaacttattattcacaactactaacgacgatttgatgacaagctactgaagaataaattagaagaactaactaatgaaacaaaacagaacaaaattatgtgacatatataagactaaaacatcaaaactactatgtcatgaaaacaagactataaaacattcaaaattatatcacaaaaataaaattaatcacaatagtaaaaattaaattatagtagaaaaatacaatcggagaaaaaacccaacctccactagttat

SEQ ID NO: 64799 - DNA, 869 bp, Cannabis sativa
gaaaggagacgtttgtatgtcatcattggttaaaacaattactccttcagattttttagcaatattatgcattgggcgccacaccatataacaagaagggacgtgttgttggtaaattttaagcaaaacttatgtagcctcaattcttgtatcttgcctgaattccaagcaatcaaagaagttacgaaacaatttagtttttaacaacgaatctaccatgctgtctggtttaggtgattcatatataatttcctcgatatgtatgccccgtgatatccctattgaaatgaggggaaactcttctgtgcatgtcatagcagctcctccattttaatgttggggaaacggcgtttgttccacttcattttgatccaagataattcccctttcgctaatcgctcatgaaaaattttcctcagagtgcagtatcccatggttgggtggttaatctttcggtggaagtgacagtagagttcatgctgcttttccattaaagtaggtagttttgagacaaatggtagtactacctctccatccctgatccatgcctccaataggctacagattctttctttgttacaagggaactccgccggtttatcattctgtcgaccttttttatgaactttaaaatttcgtttttcttgtgccattgctatgtcaacaccacgttttaaacccttccatggccgattttgattgttttagctagatggcttggccggtcgacagacagtagcttcagtactccttaatttggcgatgagctctgcaaaattgtatatagcatagttttcgatatgtaagagatattcatcaagcatacctttgatacacattttgactagatctttttcagccatggtttc

SEQ ID NO: 64800 - DNA, 683 bp, Cannabis sativa
attatttattttattttttttcaattaacaacttatatatataattaaagtccaaaaaagtatgtgctgcttttgcttaaaagaaagctaaattggtaaaattaatgcaaatattattcccatacttaattattatcaattaattaattaatttatttttaagtacgtaatctaaattctccacttacatttgtctcccatgcctttagatatataataataatgccatgtgacaaaaagcataatatatattgttgttgagacatatgtttttattttttatttttttataataatgttagttaaataaaatggggttaattattgctgtcatctgccttaagcatatagttttaatctttattttactaataattacataaaattatttataatatttatttatttatataatatgtactcatgcaatcgtttgtcattatcattaacaacacataattgatgagattaattatggggttatacgaagatgtatgatgtgatgagattttcccattttccttaattattatataagtatatatcattaaagaagagaaaattttggtttgaaaatattttactatctcaataattaatgatttttaatttgacaaagaatattatttaaaaaattgtatcaccaatattaacgagttccatgccaattatataatttataa

SEQ ID NO: 64801 - DNA, 2489 bp, Cannabis sativa
  modified_base (663)..(663): a, c, t, g, unknown or other
gctcaaatggaggtgttgtcgtggatgaaacaagatttactaatggtcagtagcatcaagactggttgtctggtattagtccaagattttgtagtcctaaggtgatgttatctacgtttggaggtgttgtggaagatagcaaatatcttttgaattctttagtaatgtttcgttaaattttataaaacgatccgctaatcgagttgctcatcgaattgcaagagcttctcatttaaatgctgattgtattttttggctttaatgtcgcgagtgatgtttccatcataattgagattgagttagtctaattgaatgaaaaaattcagtttaaaaaaatctaaaactaccacaatatgaaattaatagagttagtacaatatgaatataataataacaaaagggaaattttattctgagacatgaaaattaaggtggtctttgattggaggtaatgaatggaatggaaaggaaaggaaagtaaacaattttcattacattcttttatttggttgcatattaaagtattagaatgtcattttgtcattctaatggaatgacctttctattattttagtaaaaaatgactatttcattttaaaattgaattaaaaaccattccaatgcatgatgagaaaaagtttaataatttttttattaattttntttttatatatttttatttttattctcattcctattattttatttctcccagccaaacgtcacctaaacataattaatcctccgtgtaccttgctagaactactacgattttctaagactgcccttaattcaaaattaaatgagaacaaaaaattgagagaaagaaagacaaacgaggcggtcaaagcatgatctttgtttgatatgcgctttgagtaaagtatcttcttcttcttctcttggaaggaatttcattttctttattattagaagaaaaaaaaaatcttttgctttttcagcttttataacaaataagcaaaactctaacaatactcactcgccccaaatattttttttatttttattttttattaaagcatcttatgtagagttgtttacccacttcctatccaatcaatttttctctttgcaaatgtataattttaatttggtaaatattattttaaattttgtattttgtaaaaattattaaatagtttatttattttgtaaaatgataaattgaattttgtattttttaaaataatattttaaattgatttttagtcaaaatgaaacttaatcatacctggtattagaggtgttatgacaaaattaattatgttttttatatttatactaaaaattatctttaagttaattatattaaaaatacttatttgtactattttaaaaagtacattattctttttattattttaacaaaatttaaaatagtattaacaattttaagggtatgataaggttgccgcattttataggctcttctttttggcactgttgtatgtgtatacatatcatatacaatagtgtttggattttgattgttgagagatgaaggaaagagctaggaggtacttttattttctttcctactaaatattttggcaaaacaaacaagtatttttccaaagctaacccaattggattggggtcaggggacctctctctatacttgctgatgtggcttctgatgtagactctttggttcaattctccgacatgtattcctacgtattcgcctttcaaaaatgtatgtggttttagctgttattataaaatattcattgttttaaataaatataaaactaacctaaagtataactgaacaatatgctaacattacatacttccccttgatgaagtcttgaaaagattagacgatcaagattcaatcatcccatgatccttataattttttttctttccacagttgtataatttgtttttttttcttctctaaaaagtatatatgtttttatttttaaaagtataatttgttttgttttttgatctgggcctttatagagacgggcctaactatctctaaaagtatatggagcccattaaggcccatataacgtgacaaacagaagaatacaaatgtaaaaaaaaaatcaaaaaggttcttgccagaaataaaatgatgtaattaggggtggaaggagggggtcttatggttatgggtcacatcctctctcattttttttttttttgggaaaaaagaacctccctcaatttttgataaattaaattttacatgttatatatttttaagtatttattttttgtcctataaaattaatagttattttatttatactcttacatatttttattttattctcacaaaattaatatttttcatttttattccatgtaatcttatttttatttatacttatatatttctatttttatttttttgttaatatcttttttttgcacatagtgtgactggcctcgccactcgatgtaaaaaaataagtgagttttgcttcgaaaatacttttacctttacatat

SEQ ID NO: 64802 - DNA, 978 bp, Cannabis sativa
ataataaatgtacatttttatattctaacacttttttattctcttacaaaattttattttattattattttttaaaaaaaatacaaacaattatggtgtatatttttagtttattcaacctaatttttttgttgtatatttgtacatttattttgttagttttacactaaaaatacaaaaggctaactttattacatatatactacaacacggtaaaagcaacttttatacactttaagtttattttattacacttttaccacttgcacacacaatctctatttcatttcatttcagccattattgaagtaggaagaaattactcgagataacaatggcagacgaagagacctccgccataacccctccgtcttcaaacacagtctcagatcaagactcaacaatggaggctccggcgaatgagtccctagaatcgaccaccacaaagaagccgagcagccaagccacattcagtatatggccaccgagccagcgcactcgagacgccgtggtgaaccgtctcattgagaccctttccaccccttccgttctctctaatcgctacggtaccactcctcccgaagaatcctcctacaccgcccgcatcattgaagaggaggccttttcatccgccgctagctccgcttctgcctccgaggatgatggcattcagattctccaggtttactccaaggaggtcagtaagcgaatgcttgatgtcgtcaaagctagggctgccgcctcctcctcctctgctgatggtgcttcacagcccgaaactgggggttccgttgattcgaatgttgagaataacgaggcatcttcttgatctgtctatctctagtgattctgagcttttattttacaatccaatgcatattaggttcttcttcttataagttctagggtttttttttttgtttattttcattgattgttctttgtcagatattggttaaattggagttgaatttcagg

SEQ ID NO: 64803 - DNA, 1440 bp, Cannabis sativa
  modified_base (1327)..(1338): a, c, t, g, unknown or other
gaaccaataggtatttaatgatttaccaaaaaaattcaatcaattgtgtcatagaccttgcttaaatctatgttcattaaacaacacagatagatttgttttcgatgataacctttgattaaatcttgcaggatcaatatattgtgagtgagggagcgatttttgacaaatgcttcttagttatcactgaccagtcatggaagaactttagagattctattgcaaatcaacttcgagatgcatttgtatagtgtgttacaacaaactatcagcctgtagtctacaaccttggaaggactttccactttcggaatgagcatcaatagagtttcatttagttgcttaggcaagataccatcctgaaaaaatctcataatagcagaagaaaactcttagcctagctcttaccacatgtttttgaaaagtttcaaaccataaccattcgatcaaggactttttaaatcaggtactgaaaataacacccttttaatatcttgaacaaaaaaaggcttgataatttttacatgctgttttagataattatcaaaattgatttttaaaagagtcttataatttcactacaagaaatatcactttttccagtacatttttatgctagcaaaagttagaattgcgctggtaaaatagaatttacttgtgatgtgttggcaaaagggggttgacaaatcaatgttgctattagaatttttgccaacataaaataaaaagcgctggcaaagatgacttttcccagtacgtaaatgcgctggtaaaagttagatttttgccactgcaaatgtacgctggtaaaattttgacttctttgccagcacagtttacgaaatgcgctggtaaaagttacttttactagtgcagtagcgaactgtgctggtaaaagtgacatttcttgtagtgtttgtaaagttatctagtattgacttgtgttacaaagttgaaatttaggtaaaccaaacattaaagtaactttttacttttgagatataacaatttttgttttctcatttgactaaaagaaaatttgggcttgctatttatgaaaattatatcttcaaagtccaaagaatcattaattgtaccagaaaatacttcgaaagcagaaaattccaattgattatataacaaattaaaatattaaataaaatgagcatcaattaattttatgcttataaatgtaataatatttcaaatagtaccaagctcaaaatccattaatttttaaaatgtatgttcaaactttattaattaaaatttatgagctttaaaaatatttttgtttttatttgtgttaataataataataataatnnnnnnnnnnnnaataataataataataattattctatcggtatagacaggctcgaccttgggaatatattttttgcattgaaaaaaaatagtatttttgaatttttttttttt

SEQ ID NO: 64804 - DNA, 1134 bp, Cannabis sativa
atttcaattcgagatctgtaacagattgagacaatgctgaaacttgtctcttggtaaagctttagtaagcatgtcagatggattatctttggtagggacctttaggagcttgattttaccacctgaaatggtatttcgaatgaagtggaaccttacatctatgtgtttggttcgttcatgaaacacttgattcttgctgagatgtagagcactctgactatcacagaaaatttctacaatttcatgctgaattccaagttccctggtgatgcctttcatccataatgcctccttgactgcctcagtacatgctatatactcagcttcggttgttgagagagcaactatagactgaagattggccttccagctaactgtgttgttgttcattttgaacacataacctgtttgagattttctagagtctatatcaccagcaaaatcagagtctacaaaccccacaacacctgaatcttcagtatttggcccatagacaagtcctatatcagaggtaccctttaaatatctcatgatccatttgacagctttccaatgttcaatgccaggtttccccataaacctgctaactacactaactgcatgacataggtctggtcttgtgcagaccattaagtacatgatgcttcccactacacttgtgtatgggactttctccatgtaatcttcttcttcctctgtgcaaggagattgatcacttgttaatctgaattgttgactgattggggtgcttactggctttgaatcagcaaacccaaacttagacagaatctttgaagtgtacccttgctgagttaacttgattcttctcttggttctgtctctgactatttcaattccaaggatcttccttgctgcacccagatccttcatagcaaactctttactcagtaacttcttaattctgtcaatttcagtggtgctcttacttgctattaacatatcatccacgtatagcaataagaacactggcccttttacatttctcacataaacacaacagtcataggcactccttttgaaaccaattttgatgacaaactcatcaaatcgtttgtaccattgcctaggtgactgttttaggccatatagggatttctttaacaagcaaacatg

SEQ ID NO: 64805 - DNA, 1060 bp, Cannabis sativa
cattctcattcccattcctattcccattcccaaacccatgcccattcccattccaattcccattccccagcccattcccatgcccgttccccaaactctgaaaccccaaatgtcaaaaccctaaaaccccaaaccccaaacctcaaaccttaaaccccaaattccaaactccaacccccaaaaccccaaaattttaaaaccccaaactcgaacaagttcatcaggtcaaattttttggatctcaacccgagaaggtattcttggagccctcttgcccctacctacctttacaggtgtcgatggctcacaagcatgcttgcaatatgctaccaattattggcgccactataagatcttttaataaaatgactggaaattaatcaataggcgcaacttctaaaacttgatggcaaggagtgttgatctcttgcattcgattagtggtagagagactacgtgacaacaagttcatcattgaagctttctacccagcttgggtggctaaccccgtactggtacccaagccgaataaacaatggcaagtatgtattgattttaccgatctcaacaaggcgtgcctcaagaactattttccactcccaagaatagattagctcgtggatgcaagcacaaggtcctaagcttcatggatgcctattcggggtatagtcaaatcagaatgcatccaccagaccaagaacatacatgtttctgaatagatatgggcctgtactgttacaaagtcatgctgttcgatttaaagaatgctagagctacctaccagaggctaatgaataaaatgtttaaagacgaaatcggatgaaatatagaggtatatgtggatgacatgctcatcaaatccaggaaggcttcggcgcatatagaggacctggatgaatgcttccaaatccttagaaaatacaccatgaaacttaatcccttaaagtgctccttttgagttagctcgggtaagtttcttagttttattgttaatgctcgaggtatcgaagctaatcctgagaaaatacaagccctcctgtatatgaaattgccaataaag

SEQ ID NO: 64806 - DNA, 1189 bp, Cannabis sativa
tatcaccaatattattggtgttcagtatcgaacatcacctattataatttaataataaataaaaattaatgttttcttaacacaattttagagcattcccaccaacttttttactcgatcttttaaaatatatcacaaaatactattttttttaatttacaatactctttatattaacttctcttttatgtaaatatattttcttcgtattatttaaataatatattttttaatatatataatacatattaataaaagtaaaataaaatatatttaaaggaagaatagcacttcttaagtaaagaagcatttgaaaatttaggagtgttcattgaattcaatccgcactattttactcgttattaggatcaaaagtctaattattataaaatgagaatagagtatttatacaaggcttaagaactaggggttttgttacatccagctgagcttaacagagtaggaataacagaatcactaacctaaccataattaactttaagagaaaaaccaatctaatcataacaaactcttaatgagactctaatactccccctcaagatgaggtgtagagattgatgacattcatcttggacaaaagaaaattgaattgagatggaaagagtgatttggtcatgatgtctgtaatgttgtgctgagaagggacatggatgagcttgattcgatttttggtgacttggtctcaaactatatgacagtcaatatcgacatgctttgtgcgctcgtaaaaaatagcattcttggatatgtgaattgcagcttagttgtcacagtatagagtagcaaattagggatgtgagatgccaaagtcactgaggatgttggaaagccaaaggagttcacatcttgtgtttgtcatgtacctatatccagcttctacagatgacttggatacaatcgtttacttctttgacttccatgagatgagggatgtacctaggaagatgaacctgttatggatcgtcttgtgtctggacttgttccacaatcagcaccgagaaatgcttagaggtggaaagcacgatctgcaatagggtgtgaagagttgaagaagagtccttggctaggggtgccctttaagtattggaggattctagtggcaaccttaatgagaggttgtcttggatcactgagatagtgattgcatatgaaatgtcaggtcgagtga

SEQ ID NO: 64807 - DNA, 1044 bp, Cannabis sativa
tcttaaatattcaaccatagtgaagtaggttatgcgaatatatgtgttgcgatgggatggatgaataaacaattgttatatctgtgttatttgtcataatataggcatatttaaaatttttgggggcattcaattacatccgttatgctgccaaaaatttggtagaattaagatgaaatttgatatattatggtatgttttgtataggttccactcacttaatcaccatcaagacatgatgtgtcgaaggggaaaggtcccatggcttctccacaaggcggtggtgatgaagaagattaattattctcaccaaaggttatggctttaatccctaagtcattgaaatagatggctgttaaatttctaagaatcaaagataaacgtgatataatcacaattcgggtgccccaaggattcacagcaccgcgtctccagatcacgttatctggagaggatttgcagtaggtggcattgtgtgacttcatcggcagccagtgaatgctatttgaaatgatgtatactcttctttaattcaattaaccttgtatatcgaattctagtgaaattattataagacactaatacttaacaatttaatgcaggcacatctgggagagcataaacgatttgagaaaatttttcaagttttatgacccaaagcttctcgcgatgaatggtatcaatgataaagagaagagtcagtcttttgagaatgcaacaaaatgattgactgcttggttatcattgatgaataacagccaccaactattctttattccctggaatatcgggtaaatactatttaattttttagtgctaattatttatttcgatgttataacttgaaattatttgtatactatcttacttatattccaatataattttctagtgcgcatttgatgctagaagacgttggccaggggaaattatccatttagaccctatacgtggacacaaagttccccaacaaattattgaaatgttggaaaggtaataatttaatgactatttatgtaacaaattatttaattaactaatgaa

SEQ ID NO: 64808 - DNA, 1047 bp, Cannabis sativa
tgtgagaagctccgagccgtaaaatttgaaaatttgtctcaaatcatgtaacccctcacaaatgcacctgcattaaattgttaagtattaaggttttataataatttcagtagaaattgatatataagattaattaggttaaagagagtatacatcattctaaaaagtattccttcatttccaatgaagtcacacaatgcctgctgctgtaaatcttctccagatatcgtgatttgggtacgaggcgttatgaatctacatggtaccagaatttggactatagcatttttctactttgttctcaaaaattcttcaaccatccatttgattgactttggaatttgcgtcatgatctctagagtgaataatagatcatcttgatcaccaccgccttttcgacaaggcatgggaccttttcccttcgatgtagcacgtcttgatgatagttgagcaagtggaccctatacaaaataccataatatatcaaaatttatatatatgatttgtaatgatgatttcttggaaagaaattttaccagaatgttaaaattaaatatttaggtcaagagaggaatgtgttcgctgcttctctaacatagcgtaacccttgaattggtaccaggatttttgcatcttcttgtagcatttttaaaatcaaaatgcgtgcatgcaaatcatcatagtccttggtgtgaactatgatgggaccctcattatcctaattttcttcattctctaagaattttctttctggtatcgataaaaacataccatttatcattagctggataaaaaatgtgaaaaacttgtactgcttggttacccatgatgaatggatcatttttgcttcctctcttacataaatcaacaaaagttaaacaaagctcgttagttttcactccaacattgttgtcaacccaagaacatttaaaaagtggaattcataacttaaaataattgagctcccatatttttttaataaccccataatacgtcacggtacctaaaacaaggtttttatcgtttacacttacaaagtgcatggtt

SEQ ID NO: 64809 - DNA, 697 bp, Cannabis sativa
tgcaagtttcttttttagttcttgaattttttttcacactcctcgatccattcaaactttttgcttccctagaggatgttgaagaaaggaacttatttatctgttgattttgacacgaacttacttagtacagttattcgaccagtgagacgttacacttctttcacctttgttggagacttcatatccagaagggcttgaatattctctggattggcttctattcctcgagcattaacaatgaatctaggaaaatcaccctatctgacctcgaaggaacactttaagggatgtagtctcatgttatattttttgaggattttgaagcattcgttcaggtcttctatatgccccccaacattttttgattcgataagcatgtcatccacatatacttccctgttacgcccaatctagtctttgaacatcttcttcactagtcgttggtaggtatccccaccatttgttagtccaaatagcataactttgtaatagtacaaaccaacacctgttcgaaagctagtgtgttcttggtcaggtggatgtattcttatttaattttatcctgagtaggcatccatgaagcttaggatctcatggctgatgtagcattaaccatttcggcttgggtaccagtacaggggtgttacgaattttatgatttactacgcaagtatacgcaatcaagtagtatctc

SEQ ID NO: 64810 - DNA, 3050 bp, Cannabis sativa
tggtgaaatgatggctatgttgggaagctaaatcaagttcattatgcaaactcatgaggtggattgtacaggcaaaaatcagtaagttctatctgctgctattgcagcgttggacatgtattatatttagcatgttagaaatgatactctgaaattcgactgtaagaaaggaagatcaacgggtgtgtaagatcaaagaggaagttaaaagaagaattagctatgttttggcctaaaaattttagtgtagtagacaagaattggtttgcaacattgtaaaaattataaaaaagttgtaagggaaaagcaaacaaaagggaaaaaaacaaatagggagattattttaaaataatcaatatactgtatagatggtgatactttaggttttcggattgaaaattttattaggatgtaaagttgttatttagagtaatgaatttcttactgattcaccaaaaaatattaaataaaaaaagtttgaaatctaataacaactataaaattaaagatacgtttaactttttttcccatttctccttcattatcgtgtttaaaaaaatatttgaaacaagtgggataaaattacatagtgaaacgatcaccgagaaatagcattgattgaggagatggagcctctttctctagactctccaccgtgaacttgatgttttagctttttttgtatgaaatttttagataaaaaaatgcaggtattatatataaacgacataatgatcatgctagaaatattacttaaaaacaaatggacctaaaaatgacatcatgtgaagggaaaagaacaaagtatatgaaaaagatctttgaagaaagtaggcaaggaaaaataatgttttgttgttatttatggcatccaatatcattggggtctggccgagtggaacgacatttgagaaccagagaaaaaggggaataacatgataaaactggtggatcagagaaatgggtttgtgggtgatacgtaggagattgcttcgaaataaaaaattcacatgatgtattgagttgggacaaactgaaatcttaatttgcgaaattagatttttttttatataagggagcaagattagtcaagcagttctgccaacaattaattaaaagtcttttttaaaaaaattaattagttattcaaaaaattattttaaaagaggtagaatcgaattttaatatttgtaaaaaaataaattttattatagatattataattaaatagtttgaatgttaaaaaaaataaaaatttaaatataaaaataaaattatttataattattaatttatttaatatttaaaataaaaattaattattttaataaaaattttacctaacaaccatatataaatacatcactatataagtgtagtgtatttacggtactgtatgagatatttgatgactaaatggaagtttgattacatcaaaatatattatttaaactatttttcttgatcctttcaaaagaaaactatatttcttgagaaaaaataaaaaatatcttcttctcaaaatgcaaccttccctctctctcccgccctcttacaatttttttcttggtggctgtgttaattcggtgtgaataaatcttgtttttttagtacttagtaattatgcaagaataaaattcatcaacatacatttttcaataataatataaggccatcggacaacaaaaattcaaaataataaaattttgacacaaaaatgctctaacttaacttaaaatatatataaaagagtctacactaacccatcattattagtgggacatttttggagcactacaattttttttttattttttgtatattttaataattaaataataagtttattaaaaaataaattaagtccaaatgaacatatacaggattggatgtgttgttaggtacaatcagagagtattaattgttcagttataaaaatctaataattcttactcatttttgaaaaaaaaaaaatctaataatgatgtactttattcggtatttttattgagaattttgtttacacgtttgttttctaaagcatatgggtcttttttttttatttaagtgtttatatattacaatcatgttttacctgggactcaaaccaggacttccaagacacacacccacctatggccacttgagctagcctcaagtggttctaaaacatatgggtcgatacttatactattgttatacatatatatatacatatatacaaattttatatatttacataatatatatgaactcaatttgttagtgcttcattagttagctaaatcagaaagccaatcttgtaattggatagattttcggagaaagaaaattattgaattttttatttaaaaactatgtataattttataaatagatttttttttttttttggtttaaatacaaaccaaagtttagaaactaagttaataagtgtccttatttaatttaaaaaaattaagaaaatggctaaatataataaattagctaataaaaattattactcatattattttttaaaaaaaattatataataattaaattaagttatataattttttttatttttgaatattattatattgtaacaaaaacgaataaatatattagatcattaaatatatacaatagtatttgatatatcgtattactaaaaattaatataccgtagtaataaaattatatatcataaaaaaattataacaatactaaattaatactcaaaatatatatatcatgataacaaaattatatgtaccactattaaaatatatatgcataccaaaaaatttagatataataaaatagaaactaaatatcatcgtaagtaaataatatattatagacaacaaaaatcatatatcatacaataaaatatatatacctataataaaaaaataaaacaaaataatataatattattaaaaaaaaaattgtatataccatattaacaaaattatatatcacttttatataataaaataaaaaccgaacatatatgcatgatctaaaatcaaatgatatactatacaataaaacttatataccat

SEQ ID NO: 64811 - DNA, 930 bp, Cannabis sativa
agaaaataaaaaattgaagaaatataatggggtttttacaaaaatatttgattttagataaaaatttataattttactgtcacacgatttttcttttttacaaaagtactgtcttcttataaaacaactgtaaaacaacataacagaataattaaaacaacagtgaagcaactacaaaataaccatggaacaacagtaaaaacttaacacagtacataatataaaacttatacagtatttttttaaaaaaaatctgtctcacactaaaatgtaaaaaaattagaaatttgtggtgtaaaaatccaaatatatatatgctagtttaattctaaatattattataaatttatgataataattcaaatgacaaaattataaataaataatgccaaatttatcaatacaccaagttaatttattgaaaaacgctaaatggtgctattgttattgatacaatttaatattgagtctcacttataataattatagaaaatggctaattatttataaaatactgtattactagctacataataataagagtaagtactattttagaccttatgttttgtaaaagttaccgattagaccatctgttttgttaaatgataatatagaccctatattttttataattgtaaaaataggaccttgagctcaattttcggcaatttgttttttttttttaatataatcaacttgacgacaatttttaacacgaacagatacataaaatgtaactagttttgtcatagtatctctagattggattattattatgttttattttgaattaattcaggctccgattgtaccatttggaaaaatacaagattcattttatcatttaacaaaatagaaagtctaattagtaacttttacaaaacacaagattcaaaatgatatttatcctaattataataatactct

SEQ ID NO: 64812 - DNA, 1623 bp, Cannabis sativa
gaagttccccaaaaaatattgttgagcactttctctttgagtttacctaaaaaatagttcgattccactattggatcttcaagatcagcaaattacaagcttagattccaaatcagaggtacgattagtaatcccttttattttacaagagtttatagtattttcttctctctctgttactgacttcttcttcttcttccttgtgcatggtgttcccttcgaatggatctctaagctctaattctagggctccaagacttatctctgtaagtctctccctttttttttttctcttttgatccgatctgtatttttttagttgattgaatttgcattaatagcttaggaagtagatgagagagctgagaattagttgcaatagttttaacaaactttgcaaaactttggttctactcaataggttgttaaaggccgaatactacttgtaggtttataattcttttaactatttttatgttgacctagacaagagatttattttaacaagatttttttttcttttttaatgtacaaattagtcacaatgtatattatatttgacaacaaaatacaaatattaatgagagtgctgtataagttttctaagtttcaaaatgttgtaagaaacaattattgtgtggcacaataaaagctcctagaaatacctataatttcccattaattaagcatatatatgcggttgacagttaatccaaactaactaacatgagatttggtcaagtccaaatgtgaaatagcaatatatctctatataataaatcattgctaattaatttccacaattaatgcataatcaaaactatttacatattttgggaaagaataaaaaaatgaaagagtacatcacatcatgatgatatagcataatatataccattattattcttccttaaaagaaaagttatccaagatctttccaagccaaaaattatataggagaaaaacagtcaaaattatgtacatccaacaaagcatgaatatatcccatcaagtatacgtatgtacaataattacatctataattaattatttgaggaaaaaagatgattaagttgtgttgtcaaagataataatgcaagtattcgagttaagtaagaacagtacttagaataataggaagtattcacaaagtgtatactcatgcgtaacgagtattaaaagtaaacaacgagtatgcaaacatcaaaaggacgtataaattgtgattcgatctgcttagtccacttttacaagagtctgtgattaggtttaatatgtacgtggatcacctatttatatagaaatgcaagtgatcacctatacaaatgaaatccattaaatgaaatgaaaaatgtttgtaaaaataattaaaaaaataattttaactgttcttaaagtttggaacgtatgcaactatcttggttgtgtattgaccattcgtatattgacaaaacttaaaaacttatacgttaatacgttgtcgcgtatatttagaaagtatatattaatctttattattaaaagatgtttggtcgattacgattgacaagaattatgagatttcatctcaaaattaaaatgatgagtggaacaatctatgcttttatatatgatttaatattt

SEQ ID NO: 64813 - DNA, 877 bp, Cannabis sativa
tgtagtattttttttaactattgaatgaacttttttgtttttttaaaaaataacaaataaagaaaaagagatagaaaagtaaatttatggtgtatagttatacccaatataataataaaaatattaaaaaagataataaacgattttaataaactagtttataagaaaaaataaagctaccttatcattcaaaatctaccttcaccattgccaaaaatacaaataaaaaatctacaatcaccaattcaccattaccaagcctaatttagtatgacttttttttaaaaggtcaaactttatggtagcgagtaaagatagttaatgtttgatagtatggaagtgaagtatcacataaacttgcttccagcgttaaggtaattgaaatctactaatatttattacgttattaaataaaattgatgtatgttttaaactgcccgtctagctcagttggtagagcgcaaggctcttaaccttgtggtcgtgggttcgagccccacggtgggcgctttttccatttaattgttatttaattttatatcaaattgaattttaataaaactttaatttatattctcacattaaaggcgtcgatatgtccgagtggttaaggagacagactcgaaatctgttgggctttgcctgcgcaggttcgaatcctgctgtcgacggtactgttgactatttttatttgagaaatatgagtcccatttattctattttaataaataatcgatacctcatagcaaagttcatatatttttagttaataatgtaaaataaaactttaaaataaatttaaatttagagtgtcttaagtaataatttttcaatcagttttttgtttttttaattagaatagtgaaaatatttttca

SEQ ID NO: 64814 - DNA, 967 bp, Cannabis sativa
gaacaagcgccgtatccagaagctaatcggctcgtttgatcgaaggaagcaaataaaactggaactttcaacaatgcttctttatcttgactcaataattttagtggtgatgactgtatacccttgtaaattgtaaaggagggaaaccaaataaggaaatagtgatgatgaatttaaacatacaagtcaaggcgcgtattctatcacaccaattttttgaccgttgtattttattattatattattattatggctaattatgtagaacctcaattgacttttgaattattacacatacctcaacacatgacagtccattggatactaaaaagcaaacatttattaagatctaacggtaggaagatgtcaatcaaaaagtaagggtaaaataataactaaaactggtaaccggctcttttttttttttttgccatttactttattttatttggtaaatatacatgtataatgtctagtttggaataattaattagtttaggatgtgttctactccttatgtatgtatataacaccatgcttttttttttaaaaaaaaaaaaaaaaaaaaaacagatcatatatttttgatgtaacaaatacagtttatacaattttggtaaattcattaatattctataatttatttttaacaccctataaattcatagaagcatttaaattacacatcttaaataattagaatatttgaagatgtcatttttgccacatgtatctatagttagaatgccaacaagtattaattacattatattaatatttgttgttgattttttatatatataatttatatttaaatatacaagtcaaggagcatattctatcacaaccattttttaccgttgtattatattattactagattaattgtcacgtgcaaggcgcgtggttagttagttaaatataatatttattttataaaagtattggattataaagtatgaagaga

SEQ ID NO: 64815 - DNA, 596 bp, Cannabis sativa
  modified_base (287)..(300): a, c, t, g, unknown or other
  modified_base (434)..(443): a, c, t, g, unknown or other
ttttttaccgatcttattttagtctttttatcaaataatctaagaattagacaactaattatatgactcgtttttttaattttaattttagtcatctctaatagagaaatatctcgattgaattgaattgcagactattaatttcgttgattgtcattaataaaattttattattatttagaaaaaacaaagggcaaaaaaagaatttgttataataataatataaaaaaggaaatggaagttttatttacacctaaaattttctaaagacaccctattttaataannnnnnnnnnnnnnaaaatttatatctttaattatattaaattttttaaacttttttcttttaatttatatttttaaaaaatatatctatcaaacaaaattaaattatattttagatattatgataaaaaattaaaataaaaaattannnnnnnnnntcttagaaaaaaataaaaaaaaaactatgtacatgagttaaaaaaaattatgaaaataaaatcaagtattcaaattaacataaaataatgtgaagaaaaaattttaaaaaaatattaagagtaatttagtaaaaaattaagtttatatttttt

SEQ ID NO: 64816 - DNA, 753 bp, Cannabis sativa
catccattgatagagcttcaaccaatccaaaattaccaagacgagctctcatcttctcgtgctaaagacaaaagttatttttcccagtgagctaattcccattcacgaccttaacactcgtcatcttcctaaattagtacagcttcaagtctgtccatcgattccttcttctcctttaaacaatgttcttgatcatcattgattgagttctttctcccatcacctggagctctgataccactgttggaatttaccaacactaacttgatcacgtccctgcacacaatcacagcacggaaaccaaataacaaaaatggcaaaaataagaatttaaacaaacaaaaattaaacaacattgatgtataaaggttcgaactttccctcacaattgtgaggagcctattcctctatctctgaactctctgaaacttggttcaattcatccattccaatctttatagtagcttaattactgacaatactaacaagtatcccaatctctactctgtacactcacaaaattcttctctaattctttctgatctgttctctcaaactctctttctctaattttcagaatacaagtgtatataaaaggaaagctaacatagcttgagaaaccgagtaataacttaattgaaatatagtataagattaaagaacttaactaattaactaactactaagtggactgcataaatcttaaatgaacacgtggtataaattttagtgagagttttttttttttttttt

SEQ ID NO: 64817 - DNA, 623 bp, Cannabis sativa
tggtcgacgaggatgtcagaccctgtaagggggtttgtgacagtcagtagtctcgtgaatcgtaagaggaaataccaagtaaaatgtgcaatcccacaccgcggtcaagtgggatgattctgagattgtgtatgtatgggactgtatagttgaagatagcttaaatggattgattgatactcctagaaacacaataggaccactagggacaaactccaagtaggttaatacaaacctcctactttaggccacagagtgacttcccctttggctgggatcacatcaggcgtacaagaaactggaaacattagtttagcagccgatcaatccactcccagcgctttggtcccatccacttctaatactcaaaggactgctggagacgacactaaactcaagaatctgcaagcgcacttgagctcatgcaaggtcataatcacattttgcatcatgatcaggaggacgtccgagtagccataagccttgcatttgatgagcaaagacgtcagttcatagaatgcagggacctggagatggaaattatgagggctcaataggtagccattcatgatcgtattaggcaggccagcatactaataagaagggcctaccaagttaccaat

SEQ ID NO: 64818 - DNA, 1077 bp, Cannabis sativa
aaggtactacacctttggtattacacctttgtccaaaagcttatttctccctatctctaagatctaagggaactttttaagaaatagctttgcgaattatcaagccttttagagtttctagcaaagtacttttttgatagaaacttctcatccaaatgagcacattagactctttttgtaatgcccatatttgaaaactgactaaatcagatttaaacttattttattttattttatttataaaacctcgtaagtcaggatctcgagtttcaaattgttgtctaaaatacatatactatatatagctacatatataaacaatgcaatatcggctttgtgctaagctgtcctgagcctaaatgctaagctcaccaaatggttaagaacgttctcaacagaagtacgaccattgtaccacatgcactagagtactcactctgtactcatgttggtagggccgaccactgtaccacatgcactagagtatcgactctgtactcttgttggtagggccattactatactttcgagaattaccgagtgttataccccacgcactacgtaccctctggtactcatgttggtaacaccctctcttaaaatcctacactgtactagcacccttaaaattatatctatttcagtgctagtagtgcaaacaaataataacatgcattctttcacatatatatactttatgctaatcttacctcattttcgtgctcaggtgtgccggtcagccttaatggaacaaccactcgatgtttcacagggccctatatcataacattcaaaaatttgatgagagatacaccataacacctattagggacttagaatcaaaactagaaatatccttatcgataaaaaacatggcaataccctaaatatcacaaaaataggaaagcaagggtttccaaaattgtcccaaccggtagactgattcccaaacctgaatttcaatttggtgggatttctggggaccaatcggtcgaccggttgctacaggcccccctgaaccggaattctggttcagtgcaggaaaacccaaaacaaccctaacacctcaaattaacc

SEQ ID NO: 64819 - DNA, 730 bp, Cannabis sativa
  modified_base (339)..(343): a, c, t, g, unknown or other
tttatgtgtcttatgatatatacagcaaagttatttttttaataataatgataaacttgtcaaacattctcaatcttcttcttcttcttttaactaaatattttaggtttttttttatatatttcgttaataaataaataatatttaagtttaaataaagtttaatttatcaaacaagttaataagttactaaaaagtattttttttttttatttttatatttagacattataagattaaataaaaataagcttattttttgtaaaactattttaataggtttataatttataaataaattgaataatatctaaacatcatatgagttacattaaaaannnnntaacctcaaggtatcttaaacaataaaataacataatatagcataaaaatgtgtaaaaaaacaaaagttccttttaagattagtcgtcattttttggagacaaaaaaatataagttcctcacatattaaaatagttattttattatttttttatgtgtaaaattcttaaataaattttttaatggaaaagtaattaatttatattttattcacatcaaaagtaactaaataatttctttttttaaaactcccaaaaaacgaaaattcttagaaacgagattttccaacttttttcattttcggtaagtttttgaatttcgatgtgtactgaagtggcacattgatatgtgtgcaaataatttttttaaaagtatttttataaataaa

SEQ ID NO: 64820 - DNA, 998 bp, Cannabis sativa
accatggttgcagtataaaactttgtttgtatcagttatttcttcagcacttaataaaagtcccaaaatagttatcgagatttttagaaaccgataaaattaataaagcttaaaaaaatatattattgacaaagaataagactagagtttgggctcatttggtgaagtccaacctatgaggtattgatctttagctgacgtgaatgccacatcacgttaatagttatcaaatcgtgtcctacttttgtggttaataaagacacatagatacttgattgataattactttatttccttatttgaaaaatacaaattcaagacatgatcctagaaataaagccctgatattgtgggatttgacaataaattattgtaatacggatctgaatatccaaagcctcgtttattacctttctagaagcattatcttgatgctatctggagccctactgtgatgaaggtttatctcagtggacaaataatttttctatcatctcatcgttgaattacacgtgttctccatccagaaatactgattacaatatgatctaagtatggggttgtaatccaggttgataaataaatgcatgtacggggtttaggttttgctttaaatattgttgaagtggtaaatatgcatgatgccatgtgttagaatttggaataaggtgaatgaggttctatctcaaaactaattagctatgaaaggagtagcccattcctcttatatattctattatctttccatagatttacaatgtgggactctttaatacatttcaattccaatgggtcggattgtacctttaaccttctgcttttgtgaaagaattatatagtttgatagtactagaaaagtaattgatgttaggctttggaatttcttaaacaggttttgtcaaactcaagatatgagcattttggcaatggggagtaaatctggaaaagattggtagttttcactgtccagattctaaaattattttaattatgtttta

SEQ ID NO: 64821 - DNA, 957 bp, Cannabis sativa
taaagggttagtctcagtctcttatgaggttactaaagttgatggattgttggggatctgcataaagttgatgattgatcatgaaacgaaatattgtagcgttatagcctatctctaaccttgaaactaaatttggtggtgcatcagcactaaatataatgttatatactctttttattccaactacaacctaaaaaattacataaaaaaaaatttatttattatttaaaataaaatagactattctttttattattatattaactcacaattattatatttaattaattatcctctatagatggtctatatagagtattatccattgtttcaattagagcaatcaatgattatctatagatggtctacatagagtgaggacaaaattactttttttatccctcaatacattttatcatttgaagtgaaaggatgataaaagtgtacacatcatcctaaaatatatatttttttattttctctctcatccacataagatttaatgatttttcatacaagaattactctaatggttgacaattacaaggtgccaccttttggtagtgctaagcacccaataacaatgctcgaaattaaaatacttatataaataaagagcattgttattaagcaccagtggtgcctaacaccttctcgacatattgcgttgcgattggctagcgatactccctaaaaactattatattaaactatatgggacccgatacttagttggatcatattaaattatattggccagcgatactccctaaaaactattatattaaactgacacataggagggtgctaaacaccactggtactctttagcatttctcataaataaaatataataatattattctcacttttatcggaaagaaagtctatccaatagaagtactcaaattggatcagtgcactcaaagttaaggcatttcccatttttataggaac

SEQ ID NO: 64822 - DNA, 988 bp, Cannabis sativa
  modified_base (518)..(521): a, c, t, g, unknown or other
ggacattttggtggaaaatagtgaaagtgagcgagctcgattttacaaggcggaacttaattacaaattttggcaatcctagaagtagaattggacttggatctcaccatgaaagttttagatctcattcttaactttccggaacatcttgaattttccaattctgagttgtattgaagaagttatggcaaaaatactaaccaatagtgtcgtacttatctttttttttttaaaaaaaaaaaagaaatatatatatatatcctaattctaaggagattcatctatctttccaagcaatataaatagaacatttttaggctacgaatttcagaatcctagagctaccaaattgagatagacacttagagagagaacaaggaagagacggagattgcggcttcgaagtagttctttcttttttcttaaactcttactatttattatgattatcgttataatatttagttttgagtagttttcttttagttaagggttattttaaaacccgagacatgaannnntaatttcattattgaatgttaatttctagtttctattatatcaaattgtttcttttcttctatgctcaaagtcatggttattgttttatcttgtttatatggcactaaattgggttttactttaatctaccgtcatcttatgattactattcacctaatagtctaggattctaagtgtttgtgataaattataatttctaatattttccaaggtatttttaattgtgatgaagaataggacttaggttaaatgaattatatgcttcattaatttattgtctggattagtctatctccataaatcttaaagctttatctaagttaaataaattgcatgtttcgtgaatttactgcttagataaaagagttaattattgagtgcttcgccttgattacatgtaataggaagattgtgataattgactgcttcaacattctctacgggattaatagtttgattggaaatt

SEQ ID NO: 64823 - DNA, 1286 bp, Cannabis sativa
  modified_base (844)..(853): a, c, t, g, unknown or other
tttttcaaataaattaaataataaaaataaaaaataattattttattaaataatttttttgtaaaaactaaagtgtcacaccacaccaactagctcgacttagctcggctggtcgaatgacgcgcgtgtgtggtgggccaagtgtgtgtgtcctcacccattcgcacaaaattgggtaccccttggggccctatcccaagtgccaaagttgcaccttatatacccttgtaaacaagagttcacatcccatgtgagactcgttctattccttacacactaggacactcattttttaaaaaatcattaattttgtaaaaagttccaacaatctcgcccttgattttttttttaaaaaatatttccatctaacagtatcattcaataataagattgagcataaacaaaggtatctttcgatttgaatctcttcgtagtgaatacgatttagattttatagagtaatttgtagtcttaatccctatctctaacattgctccacgcaacaaccttttcaagatagtcaaaagcctgtgcgttaatggccattcatgtctatcccagtatagtgaacactctagaaattttgcccaaaatttcataggaagcggccctactcccacattcacatagaggagtctatcaagagtactcctatagctcggtactccactgcacttggagtatagaactcattaagagcttttattaactccgccttaaattgcttcaggaattcattcataacttttcgaataattatagcatgaactcatttctatcacttcataacttgttattacctattgaacttatttcttaggatctctagtctataggtcgggtnnnnnnnnnnagtgattcatcaatctaagggcaatagtctcattcctttcaatgaattagggactttctctctagctaaatcttttgtcaaaggattagccaagttatcatcagtgcgtacatgatctactctaacagctcttgttgagaaaaactctctaccagtgttgttcttacaacgtatttgtcatctattaccgttgtaataacagttatgaactcttacaatagctaaagtactatcgcaatggattaacacaattggaataggtcttttccataaaggaatcttagctaacaggcttctcagccaaattgcttcttcactagcaacagccagtgcaatcattttagactcctttatagattgagccaaaatagtgtgtttcttagacttccatgaaatatctccactagctatgctaaaaatatagtcactggtt

SEQ ID NO: 64824 - DNA, 671 bp, Cannabis sativa
  modified_base (28)..(31): a, c, t, g, unknown or other
ttatttcctcttactttaagttgtaatnnnntggttttacatcaaactttgtttgcaatccctgtggagacgatcttacttatcactttattatttgtttggttgtgtatacttgcgtatataatttttcacaacaatttgtccgaacaaagagatcatttaaattgactatagagagcttgaaccaccgttaaacaatcagtttcgatgaccactcactgccaattatattctttaagacagctcaaggcttagcggacaccaattgcttcagccatttcaagagttgtagcccccaagaagtaatcagtttggcattccactagaaaaccatggtggtctcttgccactaaccaaatatcgtagttgtttcccctttcgaatagagcaacatcaacattaatcttgatattgttctcatttggagcaaacctttactcagcaccatcaaattatggaccatagcagaatcgagagcagggtgagtagatgtaatgtacgagttatcctccaaaggcagccacagttccccttgcagctaagtttttaccatctctcacttgccaacgaacaccctgattgataatgctttgagcctctcccaaatactctgccaaacaaaacttggattgttcctcaattcagctgaaagataggagctatgggtgtag

SEQ ID NO: 64825 - DNA, 534 bp, Cannabis sativa
aaatttaatagaattacaaatttaataatattgagtacttcactcgctaaaaactaaaaaatcattaggtgttacaaatccaaaacattagtcacttatgtcatagatatcccttatattacatttctatcaaaatttgaaataatataatttattaaattttgttttaatatttattagttaaattcataacatattgtattttttttttatataaatactaaaaggcacatgtgttgtattagtgtccaatatcatcttatgttattatatcagtgtaattatgtattgagttatgtatattttagtttgataattattaatacatatataaaataaaaaaataataatatctgcacacataaattacacttatatattaagccatttttaacaagtattcttaaataattattattagttaaaattattaggtgattcaacaatgcacccttttaaaatgaatgtactgatgcaccctctatttattttggcatccagcaaaatttgttagtctaatttttttcatattca

SEQ ID NO: 64826 - DNA, 844 bp, Cannabis sativa
acatatcaaaccagtcttcaggatctttaaaccttggtcgctttgatatcatgttgtaacgccctaattcacaggaacgccatgtgtgtgcttttacaaagtaattcttagttgatctattagtttaggaaaagtgtgatttaattaaaaactttcaaaataaactaaaatgtgatttttattcaaaagattattaagtttggggatctcctgttcaaaaagctttacagtttagttcaaatccagatttacaaaatagggttacatttccataaaatagtcaaaaggatggatcctatccactcgcagttgaaacaccgcgattgatatgtacatcgttgggagacctctgactcatggttgaaccacttttcttaataagtgtcatcaccatattacttgctcaaaatatcagtataacaaaaatgaataacatctactaattcagaccatgaaacagagcacaaaatgaatgtagtaaattggaatatgttgtttgtctattgagaaggtgaacaaataattaataaattatatatattatttactaaaatgaatataatgatgcttaaaaaaaatgaatatgatgatgctaagaggcaacgaggcagcatcaacgtcagtgatcgcaaaattggagatgtacgttcaaggaataaatatactaattttagtgtttatagattattgagaaaaaatacaaaaaaaaaaaaaaatattctaaaacaaatgtcaattttagagaaaaagaaaacctaataatacaatgctacaaaatctaccataagcctatgcagtgacgaagccagaaatttagttgagtgagggcttgaataaatattaa

SEQ ID NO: 64827 - DNA, 1860 bp, Cannabis sativa
gtgttatttttaattaaaaaaaaaatcaacttatgaaaggcgtcatgaaagcataaaaggtattagcatttcctaatgatcacagagcctcatgcttcaaagggtcaatgagcaaagcctccacaataatagaagtaaaaggaaacaaatgtctctacactaatagagagcttaagagatgctgagaattttctagttctagcataaccactctatatatagtatactcataagagcagctcaccctacagcaagaaatgacagaaaagctcctccactcactttaaaaaccagcttaccaaagtctattgtctattacattttctagcataaataaaacgtagcaatggcctctcattcttatcaaaatcccaaattttaaaacttgcaacatgacctcatattttcatagataacaatccaaaactactaaacaagaaaaaattaatataatttaagaaagctttatatatatatatatattttcaaaaagtctggtttaaattaagtcagaaaagaaagaaagaaaagacaaattggagataacatcacgagggcaaagggttcgttcaccactatctcaggcgcccaaatttcaaccttacattttggttcaatttgttaatgaaggacttcattatattttctaggcatataataaagatatgatgaacctaaggaggagactttggtatgctttattttctttaattttaaatctatgtcagaccttaaatgagcatttgtagtcacaagagaatgcacaacttttaaaaagatgccatcggatgctagagagctggttctcgtactctggcaatgagtcttttggcctctcatcaataactccaaagaacattaacttttatgttccttgaaattttcttaaaagcttcatgaaagggtgggggtgatgcctcaacaagacagattctattattaccaaatagagaatattatgaataaaggtcggtacacatacccacaatagttatgttagccccatacttcttcaccaaagaagcagtgctcctatagcctgtaaaatgtacaaacaagggtgagcaagcacacagataaagaaacaatggtttgttaaagaatagttttttttatatacatactatgagaatctgaaactctttcccctcccacacaacatacctaatcacttgagttagccactgagttgtttgttcaagaatagtgcttaccattctcattaacctttcaccaaactttattctctaaaatttctaacaaggatattacaaatctaattaagcattcgttttctttttttaaaatattatgtttgaacgccagaaaaacattttgaatatcaatcgaattttccaggaaccatattcaatcccataaaataaggtacatctcagacattaatatataatcggacccaggctttctagcacgatccctgagtgaatatatgcgaatacattttttgcaaggtcaaatcgaataactacattgcactgctgaatatcaagaccttcctcaactacgctagtatatatataaatatataaacatcctccagaacaagattgctcacaatcaaaaactcaaaactgattaccgaagaaatgtattcgaaagaaggaagagaccaacctgcagtgtgaacagcctgtcttcaaactgaacctctttcgtcaaataatcaaccctaattgttgccttgtactgattactaaactcagtcggtgaggaccaagatggtgaatctcaatgctattcctcgctaaaacaagcatcgattgtcatgtcggctatgggcactgccgctgataatccaataagactgctcaaggctacgcctgccgtcaatttccctcc

SEQ ID NO: 64828 - DNA, 596 bp, Cannabis sativa
atatatgtaatcaatactaattattaattataatttattattgttaatagttttggttatttatatataatagtatgtaattgtataacaaaatttataataaggtaaaattaatttgtacaataaataatatttgtagaagaaatgagttataaaaaaataattcttaaagttttcaaagtatgtaacttatgtgtttaataatgattaataaactatattcaaaaataaactattttactgtttttagtgcattaaaataatcagagttataaatggaaagttaaaaaaatattttgaacaaaaaatgtgatattcatcgttcaattttttattttttttggtttatatttttctatattttcagtttatatattaacattcattctatgtcaataacaatttattttattatatttcaatttttataatattaataataataagtgtaattattaattaataaaaaatcaatcatcctatctaatttttttacacttataaacaaaacataatcattcaaattaaatttttaaatcaagatttgagaaatttaaatttatatattgtatatatatggggctaatacaataggt

SEQ ID NO: 64829 - DNA, 3036 bp, Cannabis sativa
aacaatctcaataattcaggaagaatttttaacggacagaaaagttcagggagtatgatttagtatatgttaaagtttagggagtaaaaatccttattagcctttctaaaacttttaactttgcgacttataagctaagggagcgtttgccaaaaatataattggcatggttgagctttcttctataaccaacaaccatcttatgaaatgactacgagctctaaggcttatgttattttgttttatcaatctataaacgtcttttctttttcaaaaataaaaaaaaccaatgtaaaaaaaatgatatttgtgtaaataacccatctaaaaaatcattttggttcatacaatatgggcctatataagcccattgggccaacaacaaacatcagaaccctataactaaaagctctctcaatcactatcgtttgacatttcactctgtgccgccgagtctcaacccctctctcctctctctgctgatctcttctcttcgccggacctccggacaaaggtaactaactattatatacatattattatttatgtatatgtatatatttgagtatatatttgtgaatctgtttatatatttctgtatcagtgctaatatggaggtttttgtatgtaactatggattctatgaatgtcatacagtatttgaaatattatttatatattgatagaatgaatggtacaagctttgttttgtgaaatttgtcaaactaagaatgagaaatactaaaatttacaaaacaaccttacttaatctactcaatgctgtgtaaatggttacacagtatacttcataattgtttctgccaccatacaagattattttaccaataaaaatgttcataatggttagtttggcaaaggactcaaatttaaagttgtgaaaatacatatgaaatgaattctgataatgagcaatcgatgaattgaaattgtttaggttccatttttgactcattgggttgggttgttttgcagttaaggtaagccatggtgaagcacaacaacgttatccctaatggccatttcaagaagcattggcagaactatgttaagacatggttcaaccaacctgcaaggaagaccagaagaaggatcggtgagtcagcatttatgaattgggtctataaatctaggacttatgttattgatacatttgtttgtgtttattataaaattatcatcagctcgccagaagaaggctgtgaagattttccccaggcctactgctggaccccttcgccctgttgttcatggacagactttgaagtacaacatgaaggttcgggctggcaggggtttctcattggaagaactcaaggtgagtagttttgggattgtgatattttcatatcaacaattactttctgtaatggctttccattgttctgtgaatttgaagttgtgcaaatatggaaaatgtgtcttgcgtgtcttgatatgtgtctgatcatatgcaaaatatcttgaggatggaaatgataattgttttgatttttacttaatgatttgaatgtgttttgcatggcttgatggatttcaatgttgtgtgccttgtgtgtaattatgaaacattttacaatatggatcattctccctgtctctataagtttctgatcatattttaagcaagatactgagaggtcaggacagtgttgatgtgtccatattcaggtgctatgatcacaagttcctgatgtatatttgtttggtactttttgtgttgtcttccaggctgctgggatccccaagaagcttgcacctaccattggtatatcggttgatcaccgccgcaggaacagatctttggagggtctccaatctaatgttcagaggctcaagacttacaaggctaaacttgtcgtcttcccaaggcgtgctcgcaagtttaaggtaaagttacagtctttttttgtattcattgggctgtaccagtgaccgtttttataattatgttatctcatctttactcgttttcttttaggctggagattctgccccagaggagttggccaatgctactcaggtccaaggcgagttcttgcctattgctcgagagaagccagcatttgaacttgttaagattaccgatgacatgaagtcattcaaggcttacaacaagctcaggttggagcgcacaaacgcacgccatcttggtgctcggttgaagagggctgccgaggccgagaaggaagagaagaaatagagtcatagagttattcccaggaattttgcattttgttttctgaactatgtagattttttgttgtattttgatgttagctaagctgaagatttttaaattaattttatggttgtattgctgattgtataattttttaagtttacccttttcgaaagtaatacaatcaataccattgatttggcataatatattcacattttcttcctgaaaatgaaacaaatgaaaatgttaaaagcactttgaacaaggcaaatagtaaaatttatgaaaattcttccctcttttttattctcatttgatgttttcttcatagttaccaaaagaaaatgatgaccagaaacattagaaaaaatttgtgacctctaatgtttttgctaattgcgtcagtaacttatgtatgtaaaattggttttgtttagcaaactgtagttcaaggatgaatggtgttgacatgacttaagtcaacatattacataagtcaacatattacataaatctttcaatctaagcatgttaattaagtgtaaaggtatcaatatcttacattaagatgttcaaacagatttgaggatttggattctggttcaaatttcctcacagatggacaatgagtagggatttcttttactattacttctttcacatctcttccataatcaaatctcaaatctcaatgatcatttaggaatgaaaagggaacaagcaatggaggaaaattttggttagttgttttagtggttttattgttaatagttgaaattccgtattttaatattcccagtttgattatttaattaaatgattaattaaatgcg

SEQ ID NO: 64830 - DNA, 806 bp, Cannabis sativa
tgacaatgaattgtcactcatctcaagtctaatccatagaaaagttatccttattttaaggtaacactagtactagaagctcaaactacacaaaggataaaagctacaagagatatccaattgtcatctaatattatgtatacatgtattgtagcacttacaaaagtttttttttctttcaaagtggcgctcatcccaatgaagtatacataatgtcctcacaaaaattatgagcaacaaaatctcatataaaacgtaatacgagatgatatatccctccaaatatatttatgatgtttgaccttacacatatgcctttatttaatataagggttacacttaattacaactcattcttatattactgatataagaactcagtttactgatataatatgtgcctcaattccttcgcctcatcagtagtattttgctcattgaaaaattatattcaattattcattccctcattcctttacttgaatttatcttcaactctaactagttagaatctcacattgaataagatgaggcgccaacaaatcaaagataaacaatacacttgtcttgaaaattactgatgcaataagccctcatcaagataaaattactcagatatattcattctaactacttcaacttataccggcaaaatcattttcaatctaaaatcacgctacaggcactttgagtcaatcatgcacacctaggagtaatgctctttaacttgagtataactcaacttaaagagcaaaggacaaactgcagtggccaaaaatagctctaagcccaacgaaaaggcccaa

SEQ ID NO: 64831 - DNA, 3885 bp, Cannabis sativa
tgtacgcaatgttgattacaatcctaagaagcagtacatacttgttacagcagaagacgaatctggagtgtgcttgtgggatctcaggaagccaaagactcccattgaggagctttctgggcacacacactggtcatgggctgtcaagtataatcctgagtacgaagggcttattctgagttctggtacaaactcaactgtcaatttgtggtgggctgatgagtttacatctgaaagagtagttgattcaccaactagagcaaatcatctaaacccattactacattcttatattgattatgaagacagtgtttatggccttgcttggagttgtcgcgagccttggatctttgcgtcattgtcttacgatggaagggtagttgtggaatcagtaaagccctttttatccagaaaatgagagttccatacaaatggcaccgatgcagttggtagtatttctcttttgtttttggtgataggtatatttgaggaaaattggaagaaattcaacccatttcttgttaggctgcgtcttattttgttagtctgttgattgggatttcatgttttaagcttccatgttcaatgtttttcgatttcaaaccgataaatgtaaccctatggccccatatttgataaggtgacaactaaattcgttctttggatttaaaatagagctgctctttttttttgcttttaaccagaaaattaacttttattgaatcaaattagctactaaagtagcttccaaaccagctaaaaaattagccgtctagttctcaccgtttaacaaaattaattaaaataagaaacaaatgagaggactgcataaaagcaacacagtccgtgattaaaagccccaccgccggggacagcaactgcttcttttgttgcacggcttgcaccagcatcaacgagtccgcctccataaccacaccagcagcagcaggcacaaccccctctacccacctccccttcacccaactgagcgcctctttcaatgtcatagcttcagccataaacggatcaggttgaccataaattttaaccgccaaggcatcaatgaataaaccattatgatcccgagcaatccaacccaaaccaagactattgtcatcctcaaagaaaatacaactactctttgatataaaaaataattattattatcattttgtaatatatattgataatatttaaaataaataaaaatctcttcataaaataaacttaaatttcataacaattttgtaacaaatatttgaaatattttttatctatcaaaatattgataatatcatgtgttgttaaaaaaacatttcaatgtttgtactgtaaatcgtaaattgtccataagtgaattgagttgtaagatccaatcaacttcttcgactattgatgtttcaatttaatttaattgtttataatatactaacaataataacatttgggtgtggaatccaaaatttaatatagaattgtttaaacttatgttcactgtttgtatttaactggtaagtggcatccatttaatttgtcaaaactctctatactgtctcagtgttataacctgtattaacaatatgaattatgaagtatacacacagttaataaatacatttctgcacccaaaataaagaagaaaaaaacacaaagaataaataatgccaaaggtggctatctcaaatcttcataattttacaaaccaaaaatttggatacaattggcatggtaatcaggacataataaacaaaataggttaaattcatgcaacaccaaacagattatgttcccggcacagcaagcaaactgccttgtcatttgctttttgaaaccaagaagaaaattttgaattccttcaattcaatctgcctcctattccaccacttcgaattcaggattgacagactcaatttaaagtcacaaataaacaacagatgagaaggaaattcagcactctgtcattcacctagttgatctagcagcaggcatgaacagagttggtctgaattgaaactatttcttctttaaaaaactgcagagttcatgggggagcacattgtatttgagcaaatatgcaatctcagttcatgcacctctaggcctgtaataaaaatggagactttatagaaattaatgtaggccaaactctagatgttttcgttttcttttccagttaccactggtggagaggaattaactttcttgttggaatatagaagttagataaaaaaaagtaaattaaaaaagaaatgttctcttgtttggtttactaagattgagacaaacttttctctctttatttttcagaaaaaatgataactcaatttagtgtcatatttttcatataaatatgattttttttttttttttttgaatatattcatacattttcctgtatcttattcttctttttatataaatataaaattttctttgataaaattcaagttccaaacaaaacctaaactgcaacagtatttatagcttcatgaaacaatagtgaagtgaaacataccaaattctttataggagaaactcaatcgccgcaatgtctttcttccggaaccatcatctcaagcaaatgcataaaatgatagattgactgaatccatattctctgtcaaaagcctatttctttcatctgtcagcatagttactgttgcattcattcatccaactaatccaagttcctttgtctacgcatattttcttgtgcctgaatcagagatttcagaatttcaacaacagaagaaccatacaagaatgaataagaatactagtgtaaatttgaggactcagaagtaataatttgacataaattatggtgtgcaaacataccaataatctgaaaatatatcctctacacaaaaaaagaacatctacactttacgagccagggtcctctgctttgttgcatgttgtactactttttcctcaactggaaggcccttccgtcttcttacattatcgatgagctttctagcagtgttagggagcacactagagccatcaccaaactcttcaatttcctcctctgttttggggacaaagaaaggatcctcaggaagtgcttcccagtggctaagcacaaggagagcacttgcagccccggaagtccacctcctaagctcatctgcaaaaccgaagctttcagatacaggaacatatgcgtgcaccgtgaacaatggagaaccttcctgcatttcttctttcaaaacccgcgccctccttcgtgaaaggacagcatacataggacccagatattctgtcgatgtgtttagctcgcaaaagtacattgcttccacaagtcgtggtttcttttctaacacagctgctctacaagcatctttaacagctgtcataacctgaccactaaagataccatattgttcagactgcagttgagaggtttcagattcatcaggagctgtcattggagaaataaaagcttcaacaacaaatgccaaaccccacatgggttcgtcacataacgggccagctgctgtagctagctgaaaaccagacactatgctactctcaagacgctctgcctcaacatacagtgcttgagttgattctgaggatgtcttgtctgctatgtcagagagaccggaaccatctacgaatcctagtttgttggatacatgagaggaaccgcgaatgagaacagaggagtcagtacttttttcttcagagtctggagtaaagagaatgttaggaccaatctgccgaggtccaagtgaccagattctcttcagaagctttagccattttccttttagtttttctacccggtccttatcattctcgttccttgacaaaatatcactctccacagcatctatcatgcgttttcttaaggtttctattggagtatcagtgtcc

SEQ ID NO: 64832 - DNA, 1802 bp, Cannabis sativa
taaggcataacctaagaaaattcctttcacggatctgggttttagcttgtcaatggattggtgtacatatgcagtacacccaaatgttcataaatgcattaggttggaggttctgttgtagaacatttcataaggtgtcttaaggtctataactctatttatgctcctcttaacaaggtaggttgcagttgctaaggcttccccacaaaatggttttcttaacccaaaacttaatagtaaacatctaactttgttcaacaaggtttggttcatccttttagcaacaccatttttctttggggtcttcactacggttctatgcctagtgattctaaactcttgacacatcagtcctaaggttcttaattttaagatcagttcggttttccacctgagtttcccaatttctaaactattctagacactcatccttcgtggttagcaagtaggtccaaacacaccgactataataatcaactattgaaagaaagtatttcttaccagagtgagtaagaaccttgtatggtccccaaagatcagtgtgcacatattcaagtatctttttagttgtgtgccttgccggagtgaacttcagcttatgttgtttccctagaacacaagctccacaaaatttttaaggcacaagaatttaaattttcaattataccttgcttgtgcagttctttgaggccttgttcactgatctgtccatgtctgtgatgccacacctttatgtcagattctagtcctttcatcatacttgcttctccagctgggacagtttctccttggagaacatataaatcattgatttgttcacctttcatcactaacaaagaacctttagtgatcctcaagcttccgtccatggacttgtatctgtatccttcgtcctcaagcgcacttagggatatgaagttttgtctaagatccagaatgtgtcttacattcgtcagcactttgattccgccatcatactatttgatgaccacctttccggttccaatgaccctgcatgaatgatcattgcccattaggtctttacctccatcaactgaattataataaaaaaaatgactcttgattaggacacaaatgataagtgctttcggaatcgagaatccactccctattcattcaggattttaagatagataacaactctccgttcgtggagtagtcgtcactatctttagtgattgcaacagaatccttcccatggtgatggtgtcggaagtccttcctatctccattgtgagatttgttgaagccttgttgctccttgtacttcttacaaaatctttgaaagtgtccagactttccactaaagtaacacttccttgtgtccttctctttggaattagatcttgattgagaatgatggtgtttactctttgaacttgctttcttaggtgatcttcctcttgccaaatacacttcttctttcttggattccttctccaactgtaattcaaaatctttcgacttaagtgtggcaagaacatcttcgaatgcaattacgtctctgccatacttgatggctgccttaacttcttaatatacgattggaagtgatgtcaacaggatgatggtctcgctttcttcatcaaccttgtaatttatgttagccaaacctacaataatctcattaaatctatcaatattctcatctaaaaaaagggaagaaatcattataaaactgtataacctttctagcaaattaatcttgctagtaatcgatggttttaagtataattcttccaattcaccccaaactcctttcgacatcttctctgtgatga

SEQ ID NO: 64833 - DNA, 1052 bp, Cannabis sativa
gtatcatggttaacccaaatgaaattgtgaccacatataatataaactatagaataatgaatggttgaattttgaggcattttataaatattttatatttaattaagctttcaagctggacaatattcatcaaattctaaagtcctgtgactgctatgtgaacttaatttcgatttaatataagacttacttaaaaaataataataaataaaaatctaaagctatttacaaatatagtatacttatgaattgactttttgatcatattggattgttattgaattaaatgagaattttcctttataagaactcttaagagttttgaaaatggcatgactatgatacaaatgtgacactagaaaataaatattataatgcatcaaattattttcctattgaataccagcaatacaaacaatcaaataaattagtattagttaaatattgcagactaattccaaaaaaaaaaaaaaaaaccaaatttttggcttttcaaaaattggcttctacagctccttgattaataaccctttgatgttacttataattaagtttaattaagtgatattaaatgtaatacatgtatatttaatttttttaatttagtaatgtattttattttttttaattttgaaataaggtttgagattttgatctttgataaactttttttaactattacggctaaattagtgtgctctttaaatataattatatatatataaaaagaatgaataattgcgtattttatattaatctctatataaagggattatattagaaaatatttaacaaaatttaagtttgattagagaattaatcacttttaaaatacattttatatattatgtccaaatatatatatttttaaaaaataataatagtgatagatacaaattacaatattcttagtttgtagttaggatagtgtgactataataaagtgtacaaattattagaagcatatacatatcattaattatttttaaattaaacaaaaggttgtcgtgaaattaaggtttaaatatatattttatatatagatgtgatta

SEQ ID NO: 64834 - DNA, 847 bp, Cannabis sativa
ggggtgggtggagatcgatggatgagagagatgagaagaaagggagatcgagagagggaggaagatggtgagagaggagggcgatgctgcggatgcgtggggtggggttttggagagttaagattttcgttttaaggtatgggaaatggagaagaaataagtgggcatgtgggaaatagaaaagaagtaagtggacacgtgggaaatgtggcgagaagtaggtaacgattttttattgggctcttatacccgacagtttaaaactgtctcctatactataggtgatagttttaaaccgtcacctatactataggcgacatttttaaacagttgcctataaggaccaaacaaattttatgaattccaattaaaatcgtcgcctattcctgtaattactgttataaatcaccaggaatactaattttttccaacggttttaatcagttacttaatttttttagcgacggtctcccaaaaaaagcatttttagaccgtcgcgatttctagtgctggattgacaatcaatgtgctgcctcgcttgcagccaaccctattttccatgctcgatgcaaacacattgaaatagacatgcactttgttaaagattagatcattgctcagacactatcagttcgctatgtcccctctctcgatcaagtggcggatatccaccaaacctctttctactaaccggtttcactacctcaaatataaactcaactgttctcaacacctttttgtttgaggaggactcataactaacacatacagttagtttttcgttttaatttgttagttatgttacatgtatagtgtctctcttaatgtgtgtaacaaattattgtat

SEQ ID NO: 64835 - DNA, 1251 bp, Cannabis sativa
cgttatattgagttatttaatttaaacattctatacaattttaaaagattcgaaaaaatttaatttgttgaaaatagggttcaaataaaatttattgtacgtatgagactcttttatttatacgcgtgtaaaatagactatttgaactgtatttttgacgtgttatttttttaaaaaaaaataataaaattttacaaatctcttaaataaatacagtgttgacaactataaaaaaaattaaactaaaaatttttaaatgtcaaaatatataggaatgcatcactaaactactaaaagggcacatattgtcgaattttttttataattatatatattaattaaaagaataagagtaggtttttactgtcttaattaattttgatacaaagattaattgatggacccaaaagcaacctagagcaaagtgtctcttcgagattgattaagtcctttcttaatattcttaatcaatttattaaggtgaattaattaataatatatatacatattgttgtacgtcactcatacaaaacattccctcatagaaaataaaataatattatatacaaattacttattagtgggaaacaataataattattataataaagaaagccttaaatccatactcaaaaagaaagattgattggatatgttttggcaaatttcactattaatatataaaccatttatatatcgctatctctagtgcttatgccatataatatttatatataaatatatattattcgaaataaaaggaaaaaaaaaatagctttacatgaataaatatatattcctcgtgatattatgttttttacatgagttaataaataaaaaaaaaaaattataacttgaattatattcttcatctactactaattatgttataaaattaaacttacatctaaaatcattggaaaattcaatacatctcttatttataattttcaatgtcatatacacttttataaattttacctaatcataatgatttatttttacatgtaattatttagttttatttgtctatgttacatataatacacaaaattatttaacttatctcccactaaaaaacttagtgaaaaaaaaaatctaaaatattgttaaattaattaaacccttttttctatattgagaaaattaaaacaaaaaccattaattgtagctttaccaagttcctatccttcttcataaattttaattatatttttaaagcatattttcttttggtataaattcttacta

SEQ ID NO: 64836 - DNA, 1384 bp, Cannabis sativa
tactctgcaaattgtgtttttaacgagttatcccatgccaagtgtacttacgattgcgtctttgagtgcttcgttcttcttggctcgacaagtgtcttcctttgatgtgcttaccgaattttgagtataacacctataattatgatagcaacgtttaagcgcttataaggttacacactataagaaaacatatgtagcccaagtgggagattgttggattaaaatctctaatgtgggctcatatgtatttatgtgtattgctatataaagtttgaaccaaataaaatgattattttagtaattgtgggtcattaggtatcaaagtgtcatgggctaaatgtgtagataccctaaacaatatttctaatttatcgagaggctaaattagaaatacttaaaattaataacctagctatgaagttataaattggtagtggtccccaagaaacaagagctaatttttattctcatcttcccccatcaagagagaaaattagaaaacccaagtattgttttcttgaaagatcattatccaaaatcaccacaaagattatctctacaacatggattaagatcatcactatctatagattaaggtacgcttccgctatttgagttcttatcttgaaattaacaaatgtattctttagatctatagttatatacttatgattatatgtaatatatttatttataaaattaaatactgttattgcatattttatgagtgataaaaatttatttcaatttgctataatctagttagagatgctaaatctttattgtcccttttaagtgatgttaaggtttagaaatgataatactattgctattggtaagaagtactacgggtagacaatgaaatagtgttcggaatatggtaataattttccatcttgcattttttttttagatatcaatcacactaatccaaattttgtaactaaattaggatcttaaattttgtaagtaagttaatggatgagatgcatacacgtgtatacataaagtaaatagagaatcatcgtatgaaagaaagaagaggggatagagagagaaaatccagcctcacccagtggtaaccaatcagaatccagcattgtatttcagctgttgattcccccttctttacttcctatcttatctctctcactctcttaaatgttaacttaagagtaacaacaaacaccatctcctctcttcactcctctctctcttctcttttcttctcatggcaacgaatacagctctccagtactccataccacccaacaaccactctcttctcaagcacacccctcctcctcaccctccttcatctcttaccttcctcaaacccaccaccaccaacaccactgcaacaacaccaccttcactctctctc

SEQ ID NO: 64837 - DNA, 890 bp, Cannabis sativa
actctcaaatcactaaacaaggttgctactaattaaaagagagtcaaaataacatattacatatatcaacatctaacaataaacgcccaaaatcagattgcaatatcaacacaaagacatgctcaaacacacaactcttcaagctcaagaacttgagcttaagtccaataatctcatacaattttccagcagcatatcactaattgaaacccaacaatttaacccacaacaataactagcaaactcacacaacaattttccagcagcatatcgctatagctggtgcatccgtccaaaattcacaacattcgagcagttcaaatctaaatggaaaaaggtctaacaacgataatagacaaggtaatggaaagaaaggcaagttcactggtaactccgaataacattctagaaagaatgcctctaaatttactgctttctcagtcctaacagatgatatagaaacaatctattgcaaccacccaattctatggtgtcgtacaagaaaccctctcccatgaaaaaggatatgagtaaaagagatacatctaagttctgtcattttcatgcagtttatggctatggcatgaatgaatgtaacaatttaaagcaggagattgaattttaattacaaaaaaacaactcgcacttacaaaaatatgtcaagaccaatcacgaataaatagccagccatgcagatcataaccaaatgatgcctccataagtggatgggcatctacaggtaatcattgggggcccgcacctcactggagactagggcaaagctagagaaaattatgctcaagcctttcagcatgaacaaaatgatacaattctagccgtggaagaaaggaaaccttaaataccacgtgtaggggaaccaacaataacat

SEQ ID NO: 64838 - DNA, 703 bp, Cannabis sativa
tggttgatatttaataattgcttgttgtggtgtttgataagtatcccacttttgacatacaaagagggaaaatattgtggttaattgcaataggttttcccaacaatatggcacacaagaaataatgttttatggcagaattctaatacaagtgtagaaattgtaattgctaaagtgaaaaacatagtaaaaaaaagaattacatgtatatggccaaaaaaagcaactagaagtgagaaagaatggtttgatgcctgccttgtaaagttttatagatatttagattctccttactttgagaatgctactaggttgtataaactgttttgagtaatacacatacttgattcataaaaaaaaaaaataaacaacttcatgctacttgttgtaacacaaaagaatgagctttaaaaatattagtaatgttctttttttttttgctgtagatttgatttattggcctactgtgcttattatgaatgaaatcattttaatagctaaagtctactattgattaaataatctatatgatatttgttggtcaaaccatgtgcatgttcgtattgtgatatttaagtttggagaaatgttaaaagatattagtggtatctagtattctcctacatgtcaatatcgagattggttcaattaagtatatatcgaatctcacatagtctaattaatataataatttttaaagagt

SEQ ID NO: 64839 - DNA, 1148 bp, Cannabis sativa
aataggagtagctcattcatcttatatattcaattatcttttcacttattagtaatgtaagactctctataatttttaaatgaaaataaaaatttaataaccatgactagtcagggactatcatgtggctattgacttgttctgaaaatataacttaaatattattaccatcagaagttaaacgtaaatatttatttataataaaaaattaaatttaaatatttatactacaaattacctataacagcttgtggaaggacatctttggtcattttgatcaaataagactacaaaataaatatctaggtagaggatctaaggcgtaataatagtagagacttatataagactagatttgttttccaaaaataccttatacatatttttgtatagctaataagtgtgaaaggtaataatgaaacaatagaaaagtccagtagtatcatggacagaattgaaaaggacaatatatccattccatatttccattattaattattttatttatgttttgcacatgttatcgtctaagtatttattaaaactcttgttatcccatgagaagcgacactacctctatgtttatatagttaaaatttttgcagcatctttgccacttttgaaatgcttgtttctcataaactgaatatcattaaaacaatttggttaattttctagtctgcagcaaccaacattaaccatcattagatgcgatctatgtatttgttaatgttgaaactatcaatgacttgttcttatccattgaatttcttacccgataggataacaaattaggttaccatcattggtgaatctattaagcaataagttttagtctaatctctctagatgtctctagttctctctaataattggtctaagtggtgtcaaactatcacttagacacctcaaaggacatcccttgaacgtttctacacttatacaacgtccaggttgacgtcagatgtcaacttgggcgctgggatgtcaactagggcactagaacctaaaacgtcttcaataaaatggtcataactcctcaattttattccgattgacgcaattcaacttttttttgaagatatttaaatgctttatcaagtcatgtctcacaccccagtcgcaattctaaagctatcatcatcaaa

SEQ ID NO: 64840 - DNA, 990 bp, Cannabis sativa
gctgggacctagaaccgtacccctttctcggtcccgaatctaaactcagacctgggacccaggaccttaacatgaaccagactgggacccgtgataaagatctagatcttgacttgacatataggaaaccgagcttggaacagacccgtagtcagtgtctagatttgggactcagactaggacccgaagtcggaccaggactcaaacccaaatccagacctagacccaggacctgaaactagaacttgaacaagaaccgctggactaggacattagaacaagacaaggactgtgaccaggacccggacccagacgtataattgaacgcgaacctagccctagactaaaattgagaccagaactcgggcctagacccagacctaagtctagtacccgatccaatacaaactcaaacctagattgggatccagatacagacgcttactcggacccagacccagactgggatggaaaccataactcgaacatggacccgaacctagacctagatcgggatccagacctggacccagacccagactcgaccaggactcagaccccgacccacacgctaacccaaatttgaacccagacacaaaatccgagtgtgggtctgtgtctgaatccaggtcctggtccgattacaattttgggtttgggtcctggtcctagagtcatgtgtgttcttgtgggggtctcgatccgcttctagtttcggttccaatttcaagtcatcgtgtacgtgtcgaatcgaagcatcgagtctcagatcccaaatcccgaggtgggtcttaggtccaggtttgggtctggggtcgggtcccgaatcccgattcttgtttcgaggcccaagttctggtcccagtttgggggcgcaattctcaggtctgggtcccccatctatgttcaggtcttaggtcccggtctcagtccaagtttgtgttggggttttgctttgggtctcatgtcctgatccgagtccaggtccta

SEQ ID NO: 64841 - DNA, 2132 bp, Cannabis sativa
  modified_base (2079)..(2096): a, c, t, g, unknown or other
tcttgatatttgcagatttgttcttccagttgtatgaccctcaattggattgggtcttttattggtcggttctttaaatgttctcatgtctattgcattttgattcaactactcactaagatctggcgtgttgcaatttatctactcgcgcatgataggttgtctcaggtttagttgctcttggaggtctaagttattctgatgaccacgacgtcactcttgcttcctgttatagttacttactgaccttgttggcaagacactctctgattgataacattgcaagttacttacactaacttaatcatcatgagaactgtgttgtgggttatttttcctttgacgagaaactccccttgtatgtgaccttcaagattggatgtgttcttggcttctcctcgacccactcatcatagtatttgactctatcctccgagaagtagatccctttgttagttgatgtcgctcaaatagatatgacatataacttcttccaaccctttgtgggtctcgtggtggtcgagagtgcctcagagatttagtagtgggttgtccttgtggaggtctcatatttctaagagaaggctctggggcatcaggtcgtgtctaccttgcatcagaaccgtttggattttgtggatttttcctgtcaatattccctagtcctcgctagttgttgttcctaagaacgtgacaatttatctatattgttctcttcgatagggacattatgtgccctccgtgttcttgacccacgaggccttcctcatagacgcctcatgggaggtttagcctgtgtttatggtgtatcattctaggtcactcgtgatgcagcagcctcacgttccaactctgcatttcttctcggtttgactcagtaagtctttgccaaagttgataattttccatttatacaattggaacgtacctattgggatcatatgcctcttggttctttctttttggaataccctcttcatttctatttctctcaaaatcccatacactcagacctattcctgtgttatgatccttatttggataagtttgttagggctcctttccagggtgatgcctcgtgtctgtttgttcagtatgaacattaggggtagtattcaccatggagagagaccttttaatatgtagaatatttgattaggtgtttcttcaaagtctaattaccaaagactctcaataaaactaccaaattaataacttagaatttcattaacattaaatgagactttgacaattaatactttgaatatcaaattaatataaataatatattcaatcacaaaaaataaatagaagataaggaatttcttaacgtgattttatagttaattctatatactccacgagactattttatttatgagaatattgagaaaattcttcaatcaaaatacaagattgacaatcttctttttttgtaaggaatttttgtcgtcccttattctctctatttataggctcaacaaatggtagttattaaattctatccttacaaccggttagtaaaacgtggacaatccccacgttttgtttatcatgtcttataggtgggaaagtatatgcataactacccatatttgaattataggattgtggcaattacatttgatcttatccagaatgtgctacgttcgacccgtgttttttttttagtgatgaaattttaatcctcgggttaaactattctatctgtgacttccttcaaagaatggcttggtctgggaaatgaactatcaaaaatccttataacaaggttttgtataattttttacaatcttactcaaattgtatctcttgtgctttatgaatgcaggtcattcaatctcgcaactagcttgacctttatctccttgttcatagcatgttcacgtcatataatttttggtgacgtattatttgttgctaatttacccgaggcactattcattccttcatcatgctaactgttgtattgccaggaagtatgattccttttcttcccaatgtgtatatgttgaatatcaggtcatttaatatgcgggtcaagttgataaatatttaagagattatttcacaaatacnnnnnnnnnnnnnnnnnnttataaaaatacggttttacggaattttaaacattt

SEQ ID NO: 64842 - DNA, 702 bp, Cannabis sativa
tcttctatagctacagaaaaactactacagtttcattattctgcatttaattgaacatttaattaaataataaaactgggaatattgaaatccaaaatttcaattcgtatcagagcgggtcactaaactcttagtgatatattatatttttatttcgttattattatttaactttgtgtgatgttgccttatgtagaaggaagatctacaggtggtctaccgttgctaaatgattctaactacccttattggaaagttaggataaagaccttcatcgaatctcaaaatgaaaaagcctggaaatgtattttaactggttggtcaccaccatttgaagaagataatgaaggtaatagtaaggtaaaatctgaattagagtggtcaaatgaggaaaaaagattgtctagtaataataataaagctttgcatgctatttttaatggtgttggtgaaggttttattaaattaatatcctcatgtgaagcttggctaatccttggaactcaatttgaaggaacttcagatgtcaagtgttctcgtctcattatgttacaaagtagatttgatgatcttagaatgtctgattctgaaactctctctgaattgtatgaaagattatctgacatttctaatgaattttttccttgggtgaaaaacttgatgaatctgttttagttagaaaaattgttcgagttcttcctg

SEQ ID NO: 64843 - DNA, 703 bp, Cannabis sativa
aatataaaattattttgaaaaaagttagaaattaaactagaaaaaagttatgtttacttaaaaaatttacatttttagagaaaaaaaaaatagactcaagcttgttctcgtaaaatttagtttttacaaaaattaaaattttaatattgttttatatctaaatgaatttttttaataacttagttatatttaaaattttaattttgtgtttaattttcttaatcatttaaaattttgtgcttaataacttagccaccatggtttgagcaacatcgtggctttgatctttcttatgctctcaatgaaagcactaaaatatttactgagattttcataaactaattaataaagaaattaagaaataataaatacaataagtaaaatagatggagagttttacgtggttcaggtgttaataagccttagtccacgagtcagtatattggcctaaaaaaggcttgtatgatattttacagtggtgtttacaagaaaaccctagctctgctctcttggtttctcttaaagaagaagaaagcttagaataattttagcagagctcaggctatctttttttttaatcccccctctatgtgaaaataaagaggtatttataggttaaagtacgggtatgggtgtacccatgactcgtttagagtttatgcaaaagagcccactattgtggtgatatatatatatatatact

SEQ ID NO: 64844 - DNA, 1292 bp, Cannabis sativa
cccatccctggcccgaaccctagcgccttaaaagaaatatgttcgggttcccactcagaggtatccaagtgacaaacgacgatggtttcgactatgtctcccctttcaccacgcaacgacatcttaaagagcctcctatcaccaaccatgctatgacatccataaacagcataaggaaattccataagatggcatgccaccatcttaggaatagggatctccctgagatcatccaaaaccgtgtagttttggaatatggcggtattcgagtcattgtaaaaggttgttgtgagaaaagtgaacccgtggccgaatccatccaatccaaagatgccacgtacaaaatcaagcatagagtcaaaagaagtaacacacttcctaatctctcctttgatgggattaaaatcatcacacatttggagagtggattccatggatttggcttgtggtgagccttgagggactgagaatagcctaagaaggtttggaagttgttttaaggagaaaggaaccgaatttggagctcctaataattgttgctcatgttgaaaaggaggagatttatgaggttttttcatctttggaaaatatataggttttgtgaaccccttttttatgtcattcaggttgataaaaagtgactgtgcttgtatagttgaacggtcaagatcatgatcatcatgagagccatgatgatgatgatgatgaggatcttgatgattctcactaggaagacttataatattgtcattgcttttcacatcattattccttgtctcttgatcacattcactactccaaaaaaagtactacaaaaataatcaaacaaaaacattaattatatttaagaaatttctaatattagatttcatcatgttataggaattaatacaaggttcaattaaggatgaatataaatcagatgattattaattagaattagttaagaataaattaccaggaggacaagaaggagacaccaaaaattcaatctcatatctttttaagtatatatatcttatatcacttcttcttctgctcttcaatcattcaccatataattattatataggaagaagaaagatataggttgacattataatatctgtcacactggtcattatttattaatttattttatgttattggaaatgatatatatccatcgattgtgacccttcctataatttttaataaatttctctattttatataagggagctaatgtacaattggtatttataacactccaatatttttccttattttacaaaatactaattttgatgcat

SEQ ID NO: 64845 - DNA, 1036 bp, Cannabis sativa
gcaagtctttgttgaaatcagcaagtggctaggagtttttgagtagtcgaagagttacaaagattggattgacttgttttcgaaccccctcacatcgatacaagataaagtcatgaatgcagtagtctcgacaactatttataacagctggatgaatagaaattactgtgtccttgattgtaattataaaacagcgtgttatatcagtaaaaaatattaaaaatggtgtgaagtatataatcatgagttgtatgggtgttagtaagaacagtcttgagactcaaatttgtaatgtatatccaggtagtagagtttttaagcccctgttgggttgagaagcggttgcttgtattggattcttgtaggttgctttcattggttttttgaataaagtttctctttttcaaaaaaaaaaaaaaaagaaattattaaagtctaaacatcataacatatatattaatcatcaaatcattatatttgcttatctctaaaaattaatgtaatatacacatacattacatatatttgttcttatattaaagaaagaataaaaatcctattgaaaaaatagtaactttgtaatatatagtgcaatgttgtttaaaccgcaattattaaatttgacactgccaactgcaccgcaccgtgcggtttggcaaaaatgcaaactacaaccgcaccgcaaaagatttcaaaccgcatttttaagcggtgtggacagtttgatgaacacctctaatgcacacatcacatagtgactatattgggcaaataccaaagtgaccctagtatggatacttaggcaaccaaatgggtcatgaagtaattataaagaataaatgattatatgctcacttatcggaggtcagaaaatttgaagatcatttagtattctgacactaatgttgtgggttgccaaaaaaactaagagatccacttctggttatgtctacttgttgtctggaggagctatatcatgaaaaagtactaagtagacattcatagctcatccatcatggcaacataattcatagct

SEQ ID NO: 64846 - DNA, 958 bp, Cannabis sativa
tcaagaatcagagctgcaatggtggaaactcgaaacaacacatgccaaccttgctcccccaggatcctcaaaacccataaggtgaagaggctgcttcgagggtaaacgtgggctctgaggaatgaaatgagacgaatgacaaggaatatgaagaaaacttcgaaggatacgatgcttacaacaaaggcagctacactgagttgctggtcctaaggcaaaaagtagctgatcacgatgccgaactggccgcccaaaaagaacagaataagaggatgcaaaagataatggtcgccatgcaaaaagctatggaaacggctggaatacatgtgcaccctaaagccatgcttgtggaactagaggaaacacaagaggaatcctcgccaagcactcaaaggcccaaaaccaaggagccaaaccctatacggtatccttctgaggaagacccttagaaaaatcctacttcgatccccgagagaaataagaaggcacaggattcgcgaaaggtccgctctaatttcccaaaagggaaaggtccacaaggggggcaagctccctcgagagatccttgacccttaggatcgagaggaccaaaaaagcgtattcgtgcaccaagaacttggggaaagggggaggaaaagtcggaggtatcctcctgttgatctaaggcaaaaaaatcaacgagaagcatggttacttaagaaaccatcttgagaagaagaaacacgcattaccattctctggaggcaccttgaacgaaggaatcttggctgagttggcaatacttcgcaaagacatcgctagagtttcccggagacagaaaggggatgactccgactctaattgcgaggactgggaaccatgcgaccaaaatatattagaagcggaactccccaaaaatttcaagatgcttgaaatgttaacttacataagagattcagaccccagtgaccatctgtcc

SEQ ID NO: 64847 - DNA, 805 bp, Cannabis sativa
  modified_base (42)..(44): a, c, t, g, unknown or other
tcataagccgagttatagtattgtgtttctttctagaagtannnttagcatgaaagtacttactgttactatcaccttcttgaagccacaatcgtttcgagcgttgacgccaaaacacttctcgttggttcataacttcactaagattcaattcagcctcccgaaacttatgaatggatatagcatcacgcccctttttctaatactgaatttcccgcttgcaatggctaattctttgctgaaaattacttgtataatcttgcccccacgcttgaagagattccccacaatatgaaattttcttcataacatgctgaccttcacaaaggtcccaactatctttaacaacttggcggcacaacggttcacggagccaggcattttcaaaacggaattgacgaaatggcaccgtcacagaacgtaccgtcggctcaagaagcagtggacaatgatccaaagcagagacttccaagttatgtagctgagccatacgaaacctctggaaccagttagaacaaacaagagcacgatcaagacgaatttcaatccatgaatcagtgcctctcccacactcccaagtgtaaagatacccgattaactccatatcaacaagatcacagtcggacaaagcttgattaaaactatccaccaacatctgtggatatctatttcctcctcttttatctacatgactagtagtattgttttaatctccaatgatgcaccaaggaagagaagattccgactttaacgatctcaataaatcccatgttttataccgaacagctctattaggttctccata

SEQ ID NO: 64848 - DNA, 612 bp, Cannabis sativa
taaaactcttcagttaacgtcgtcgaccaccaattcagttatttaaaataaatgaaatctaatagataaagtaccggccaccaattaagatatttaaaataaataaaatctaatagacaaagtactggtgcagaatgaaactaatgcaaatgagatgagggagaaagatgcatttatgggggtatttttttttttttatttgggctcatagattctatttaatctgatggtctaaaactaatatcataaaatatgtttattgaatccattccttttatatattaatataaaactaggtatttgggaagaagaagagtagtttttctgggaaagagaggatcgttagaatggttaggttattaaatctttgatttaaaattatcaaaggttgtttgggatatttttttttctttgagatattttcttttattattattattattattattatatttttctcataaataaatgaattaataaataataattaaatatataaataataattaaatgtatcgaagatggtgcactgtattttgtccttgcaattaaaagaataaaataaattgaaaaaaacgtttaaatttgtcaagttttatttatttatttatt

SEQ ID NO: 64849 - DNA, 957 bp, Cannabis sativa
ttttattttttgtgaaatttaatttatttttagtgatattgtagtatgcattgcttaaaagttttagaagatgtacttagtacattttgatttaaaaatattcataaatttttttctagtattttaattttaatgttaatgtttagtttgttatgaaaaaaatatatgtatgtagtttaggtaaacaaaactttaagtgtaagtttaatagtttagaaaaacaaaagtttagtataatttattataactgtagtatagtttaggtaatgtttaattttaaatttaattttataaaatttatttgatatttgaataattaaaaacttgattttttttttttgatgtgtttgcaatatggtaggttattctttacaagtctaacgtgcttattcattaatgattttttttgaatgtgcaggtatattgttaagtctttttttagaacaatactagacgatatttgaagttgagatcttaggatttaaagagtgtatttcactttgtaaacacatttttactttatgttgatgatgatagaattggaattgagaagacgatggccggagatgggaagaagaaagaaaaaaggggaaagatggtggtgcatgtggaggttgtagagagagaaagaaggagagatttggttaggaaattagggtttttaaaagaaagaaaagggaaaaaaaaaaaagataaaaagacaaaaaaaaatatttttattttttactttaaagtaataattttaaattttagttttatttataaataatttatttacatgactcaattaaattatgtcatgtatacattatatttatgtgaacaatatcttatatctatgtaaatagcctaatatgaatattaacaactaaatgagcaaaaatgacaaattactaacctaatgtaaatttagggagttttgggttaacttattcttttttatatgtattagcccca

SEQ ID NO: 64850 - DNA, 748 bp, Cannabis sativa
ttattcatgtgagatgtcactactaatattaatggctatatatgcaattcaacattcataagatagttaactttatatataaaagtgattgtggtgtgggaatcatatggctataatttcctatttccattaaatctcttgtttattaattaacgttgtcaggaaaaagaatagtatgcagatttagatgtcaataactttaggtagatatttacacaaaactagaaataagtaccagacaataattaatttctccaatggtggcatggttttgactttgatatacaactgcatttaattaatttcctatatatactattactcttttttttttcttaattaatttatatactattactcttatgacttttctaattcatacacacacgtagtcattttaaatcttctaatgcattttataaagtttatttagggaataaatatttaagtttaatttttaattacaaataaatatttaagtttaatttttggtagtaaaaatacttaagttatatttctagaattccgtagatatctaatcgttaaatatcaactcattattcacgtgttatttttttattagtatatttaaattaatttttttaataaaataaaaatttaataatgaccttgatcaataaagattgtcgcgtaacaatttactaacacttaacaacgaaatatctgtagaagttccagaattttaacttaagtattataaccaccaaaaaattaaacttaggtattt

SEQ ID NO: 64851 - DNA, 721 bp, Cannabis sativa
ttgattctcactttagcagtcacatatcaatgggaggtaagacaacttgatgtttctaatgcatttctatatggagaacttagtgagacagtatatatgactcagcctaaaggttttgaagatccactttatcctaatcatgtatgtaaattgcataaagcaatttatggattgaagcaggcaccacgggcatggaatgataaactcaaaaccaccttatttaattggggttttaaggcatcaagggctgacacatctttgtttctctatggctcgggcacaactcagattatcctacttgtctatgttgatgatattctcatcacatggcctaatactactcttattcagcaacttattactcatctaaatgcaatcttttctctcaaggacatgggggcagtccattacttcctaggggtggaaattcatcgtgactcaactggaatgtatttgtctcaaagcaaatacatcactgatttgcttgttaaggttcatttagatggtgcaaaagtttgctcgagtcccactagtagtgcacacaaattggctttaaccgagggccttccttttgaggacaaaactctatgccgtagtactcttggggcattacaatatttgacactcacaaggcccgatgttgcttttattataaacaagctatcccaattcattcatgctcctacggtagttcatggggaagcttgtaaaaggctgctga

SEQ ID NO: 64852 - DNA, 942 bp, Cannabis sativa
  modified_base (904)..(908): a, c, t, g, unknown or other
aaccagaattctggttctgtgaggtttcttggggaccaaccggaattctagttcctacaggtccccctgaactggaattccggttcagagcatgaaaaattcaaaatttcatatttctttcaaatcaaccccaagctctaccaaactctccagacctgctatttatacccccaaagaacatatctaaagcaataaaacctcactacgtgctcagaaacaaaaaccaccattaaagctccaagtttgagttccaaacctcaaagcttggttaaatcttctatcagccactaacacaagctcaaataaacaaataacaacatatttaacttccagaaaacaacatcaaaccctaacaacagctatagcaacataaaccacaaagcatgcataattccataacttaaaatccaagaaatcaaagaagagattgttagagactataccttaacttggattcactagaaacttacttaaaatcactttgaattgctgaagaaaaatcaaaacttagctgggttctaagagagttcgaaagagagagaactttgagagaaaaagtgatttttgattaacttttctaatttttgtaaaatgaagaaatagccgagattttattaaatcaacctcagccaaaaacatttaaaaatctgattgcatttatttaattagcttcaaataaagacaaaatagaaaatgggcaaatagaccaaaatgcccttgcccacactaactatcttaaaatcacttaggggtattttggaaaattctaaaatcccgaccatccctgacattcccaatgtctaaactatatcgccttgctattctaaaaatactaagatgtgatcctaatagccaaacaccacattccaatgttgtcgggcactgaatatgcaaaattatgaannnnntatatgtgacataaaaatgcattcggaattcaaa

SEQ ID NO: 64853 - DNA, 894 bp, Cannabis sativa
atatggactgaagaataattaattaatagagaaagtatgaaatgagacaaacagtttttaacgtggttaggacgttaattagccttagtccacgagttaatcttattgagtaagcttgtacttgtaaatgccttaagaaatatacagaatgtatgttctcaagtttgcttgagcaaagtatgcaagagagttcaacccttaatctatgagattaatggagtatttatagtaatttgagaattacattaagtttcccttctctctctattgcaaagttcagtaaagaatatctgtgggctttctcatgaagtccagcctgtggagaagacgatatgctgactagacagattgtattagagttgatttggttaacacagcgtacactaattgtgggtaattattttgaattaattgcacaatatttgttgtaggaagttttccctttaatcttgattcgatgctttgttgtgatcgacaactaaaatttccttatttatgtgcaagattataaagagaaactgaagggtcttctgggaacgtggtgtctcatctctctggtctcgtggtgctagacatgtattccaggctcagtttgctgaaggtggaagactttgcaagtgcagaaccacaacctgttcctggaaggtaatacccagttaggcttgactcattttgtctttaatgaggttcccactgatgggtcttgaatgttgatctggagtccacatgtccaatgccaaaaacgtagataacatttacccctaagcttccaaaatattgtgtatagtggaagcttgcatcgctctcttaatttggaaatgtgaagattgttcttacatatattttcagacataaaaaaaaattaactaagagattataataaaaaattgactt

SEQ ID NO: 64854 - DNA, 582 bp, Cannabis sativa
agttgagcaaactcgagaaaaaatcatgcaataaggttaattaaataaagtcttgtagctaaagcatcatgaaattaatccaagaaaaaaatccaataagtccggtgcaattggagcttctaatgctaaggaatttaaaaatacggagtagtgcctcaacatgagaattcaatgtcatggcactaaaaggcgaaaatttggcagcaatatcatatttagcaagtttataggcgtacctcaaaattgggatccaatgttaaggctttgaaacccttaattcttatatgccaaaaattatgcttcaagcactgcgacactaccttggcgcgcctcaaaaatcctaaaattcttgggcatgcttaaaagacactggtcgtgacactcaatgagtaatatcgcggtcgacctgttttaagctgcgaaaattagggtttttatcttttctggcacctttggaggaagcaattagagaggacgaaattacagagcaaaagcgacctagaagactttccaacaacgttttttcaacgatttcttttcttctactttcttcttatgttcttatttaatttgtgtcaatcg

SEQ ID NO: 64855 - DNA, 1270 bp, Cannabis sativa
ctcgcatttgtctttccacataaatttcttcttgttactaataatattatataatttggtgttgcgaaattcactcgacaacaccaaccacccgacatatccaactaaaacaacttatattggaatagggctcactagagaaggaaaggaccagattttgaaactgttgaaagactgtttccaagtttttgcatgggatctttctgacatgccaagtgtagaccccgcgataattacccacaagctaaacgttaatcaaaattatatcccagttacacaaaagagaaggaaaatgggggtagatagaaacaatgtcgtaaacgatgaggttaaaagaatgttaaaaaatgataccatcatgaggtacaatacccgccacggctttaaaaccaagtagtggtcccaaaaaataatgggaaattgagagtctgcatagactttactgatctgaataaagcctgccccaaggatactttcccattaccccatatcgacattataattgatgccaccgccagacatgagttaatgagcttcatggatgcattttcagggtataaccaaataatgatgcactcacccgactgagaaaaaacatcttttgtcaccaaaagagggacgtactgctataaggtaatgccctttgggctcaaaaatgctagagtgacttataagcacatgattaacaaaatgttctcccaacagctagggttgacaatggaggcctatatcgatgatatgttggtaaagaccaaggaaggttttaaccacattgatcatctccgggaatgttctcaaatccttctagtccactccatgagactcgatccatcaatgtgcacttttgtagtcggctcagggaagtttttgggtcacctagtaactcggagaggagtagaggtgagcccagaacaaatagaggctattcaaaagctgagggggaagatcaccccccttaaccgtttcatttcaaaactatatgataaaaacctatcattttacaacctactcaacggaaattgcaagttcaattggtattcaaagtgtcaacaagtgttcgaggctctaaaaagatacttaagctctccactgatcttgtcaaaggctaaacttggagagacgttacttcttcacctatctctgtcaaaacacgctgccagcttgtaatgccctaaataattaggcacgctacccaagttatttatgaaaccctaatcccctaaatgggattactaatcaaaatagcgcagaatttaaacttttgcaataa

SEQ ID NO: 64856 - DNA, 927 bp, Cannabis sativa
tatagaaacctctatagcaactaacggaacaacttaaatcgtaactaaaatctacatagcaacctacatagaaattactggagtaacccaaaccgtaaatttagaaaataatatacaaaataattatttataaaaataacattttttttaggactcctttttcttattactacaaaattagaggcccttgttatgatgcggcagggtagaattactgggtgggtgccttaacgtaggcaacgcttaactcacacttaaccgcaccgcaggtctggttaagcgcggaggttccgaaaactgagcttggagttggaggggcccctaactgaagacgctgctcagttttcctctgatttttttctttcttcttattcgcccgtacggactactgaccacaccacctgattttgcatatttgatttgctctactgtttaaaactctaagttttgtactattattaaactccagtcctggagctttcttctgtactttcttgctttcaacatttctctctataattttataatctctatttagaggacttaccctaccttatcatttgcattaaaagacacttactactactgagaaataaatttacagcttcgtagaattacacaagtcaaacacatgtgccgaattttagtaggaacattttacctaatgtttggttcattctaaatttgtaatgtaaacaggaatgataatcagaatagtaatggaatattgtcaaaagaatatgtagtaaagtattcagctatatataagaacatgaactactccactcatcactaattagttttgagatgaaatcccataattctcatcatgatatcaaagcttaaaatataatcataattttgagatggaaccccataattcttattatgggaaaagtattgtttggtttatttatgtaattaaca

SEQ ID NO: 64857 - DNA, 1338 bp, Cannabis sativa
  modified_base (46)..(55): a, c, t, g, unknown or other
tttttaaaaaaaaataaataatatttagttttttatattaagaatnnnnnnnnnnaaaataaaataaataaatgtaatatatttgggccttttacgtgtctatatttatgagttaataacggaagtggtagtaacggtgtaagagaattgtaacattggataattttgctgccaaaaataaacattaggcatttaagtgtataaaatcggaaacattagttatttatgtcgcaatttaccctattaattttgtatataaaaaaaatattaagtatatataaaagaattaagtaaattgatttagttttaaccaaattctaaaatcgtgaccaaattagaaaaatataaattatttaatttgacaccaaatgtaaatagttagtgcgaattagttaaggtttagaactatacaccaaactaaacacttaattttttattataatgttcaatgcaacaacaactaaacatgtaatcaaattcatatttattctcatttattaaattattatattactattaccatttatgacattaaaccaatcaccaccaacctctctttaagggataccctaaaaagaatgacagacaaaacagacaaagaaaatggaaagaaaaagtacagaaaaacagaacatgttaaaaaagacatgcaagcacccaaacattatctccctcgtaccgcgtaaatctttaagacagcccaacacaattaacaagattccacttttggatttacatacttagattctctcattctcgtttctactacttttgggcctttaactctgcctttcctttcccctcatcgaatctgatcaccacccattgcatttccagatcgagaaaacgaagacccaactcccatttcaataatggcgacaacccctgttatcttcagagtctcacaagacggttccggtgacttccgtacagttcaggaggcaattgactctgttcctctttcgaatactcgtcgaactctgattcgtctttcaccggggatttatcgacagcctgtgtacgtacccaagaccaagaacttcatcaccatcgctggtctctgcccggaggacactgttctgacttggaataacaccgccaccaaaatcgaacaccaccaggtaagaagaaaaaaaaaaatctgatctttggcttcttactcacatgggttcttcttgggtgggatttaatctttttttcttggtagggttctcgtgtgattggtactgggacttttgggtgtggcagcattattgttgaaggcgaggactttattgctgaaaatgtcacttttgagaactcttctcctgaggtgaagtttgtgtttttttttttttt

SEQ ID NO: 64858 - DNA, 1744 bp, Cannabis sativa
tatccttaaatattcaaaatattatattatttgtctatgtgattaagaatgtttttaaaatagtaaaggtatttgggggttaacggttttcgaagtataacttgtctattattttaagagaatcatataatttaagaaaataatttttaaaaaatatcagtaactaatcatgaaactcctttataaaagatgttgagcatcactcttacccaataataatgctcttattttaatttaaacatatatgcttcttttgacaaaaaaaaaaaaatgctaaaggagtgtatagatgccattcaataactaattataaaaaaatcattaactaattacaaaatgtaattctgagatgcaatgtgtcattttctctctctgttttttttttctttttttttttccatccactgttgttgacttttatataaaaaacaacaaacaataaatcacacaaatattatatatatatacatacatatatcttattataagagagagagaaaggtgagaagagaaaaaatggaaaataataatgatgaaaaaatgtcattatttgagagcaaaaaaggtagaggaagaatgatatacagagtatttggttcatctatatttgttggtatttgtgtaatttggttttacagattgagttttataccaaaacaaggccaaattggaagatgggcttggattggtttacttgcagctgaactctggtttggtttctactggattttaactcaatctcatcgttggaatcaactctatagaaatacttttaaggataagctttctcaaaggtaaatataaataatataattaatctctcttcaaatatatatatataatatgtttaaaataataataataataaaaaaaaaagttgtaactctagttcttttgaaaatggtaagatcttcggtgcaagaagaggaagaagttgattcgaattatcgaagaacaaaaattaaaaataatgaatcggggtcttctcttacttgtatcgaatagaacatgttgagctagtaactacgattacgaaattagaatttaattttgtattttttaatttttagtggaatttatattatttcaattttcatctatcttaaatttttaccgtataataatatgttttttagctcaatttatgtaaccaaaaaaaaacatataaaagagaaattattattgttagtatctcaaactatttttctcgacaattgaaaactgtcgagataggggcatcctaccctatctcgagagcttgtactccaaagataggttaaattaattgagtagttattaatcgttgagtaagatttatttgtttttttggtgtagtgcttgtttgtttggcttattagaaaatgtggtccaacaattatacacttgctagtaaaaaaaaagtaagaaaataactaaaaaaaattaaaaaaataacttctcaacaattagaaaattggtttattattttttactgaagatgtattttgataaataaaaaaattcaaaaagtaaaaataaaaaattttcatattgaaatatttttgtaattttttttttcaaatttttaatctatattgtaaaaaaattttaagttaattaagcagttattaatcgttgaataagatttattatttattttacagtgattgattgtttagcttgttagaaaatgtggtccaataatattaatattatgttactatattttatgtgacagatatgatgatagtgaattaccatgtgt

SEQ ID NO: 64859 - DNA, 1243 bp, Cannabis sativa
tctatgaatcttctacagcaagtcaggaacaaatgcattttctacaatggaaacccaaaaattaaacatgcaaagttaaaagaagagaagattgaaaacttactcacttcttaaagcctaaacaaagtccagacgaagctgctcgggtgtttttggtgggaatctcacgatagacttggagtaaaaatccttttttgctctgagtttgtttagtagagaaatcagtaaaagtaaattatgaaaaaattccagccttatttataggcaatttggtgaaaatgggtaatcattttgaaatatcctcaaaagcttcgatttccccccaaaaataaatattgggaaattaaaaaccatcaattgtaaccgtcaaagcatgcaaaagaaaccgggtttcgaggcactaattaagactgagcattaattaactgaaaactgaagagacacctggtcagactcacatcgaatcacgaacagacacccctaacacgtgtcacccattcaaaagcaaaggcagctcggatgaagtctacacgcagcttcataagtcccgtacaaacttggagtgcaaatgttatcccaattttggcactctaatgtggcatcacacgctggtgacacgtggaaccaattctccatatctgcccgaaaaaggtgttccgagcagagcaccacatatacctgcacggacaaggtcctcctagctgagcagtggacagtccgaacagcatatcaacacttagcatctttagcatttacatcgtgaaggataagaacaatccctataagtctggattgcatcatagagatatggaaagctatccaaatccctcaataagtgtattctatacatttaatgtgtaatcttaccgtttatagacattgtaaacaaatgggaaacaatccctcaagcataaagccctataaatagtaatctattctcactcggcaaagggtggaaaaaagttatctaagaaagcatattcagagatattattgtaaaagctctaagagaagaataactatattctttgttctaagtcaatcgcggtatattggtcagtggtgagttggacgattccctcggatactaccgccagagtgacaggtggaaagtgccccattgtggctagtggtgtggaggtttcatggaatagattgagaggtctaatattacctctccctactccgccattaacgacatccacaggtggcgtcctaactccagataacggcacgttcatca

SEQ ID NO: 64860 - DNA, 850 bp, Cannabis sativa
cgacacatcgagtttcaccggagagaaaaacgcagggccaaatgctaattctgtgaggggatttgatgtcgttgacaacattaagacaaaagtcgaggcttcgtgccctggcgtggtttcttgtgctgacatcttagctgttgctgctagagattctgttgttgcggtaaataaatttatattatatatttaaatagtagatttcatattgtaagaaatatattttgattatctccatgactattagattacgattaggttaatctaacaattatatcaactaccaaatactaaagtacttcaaatcaagcctaaccaatttttgagatattttattagtatagtacgatcttgacctattattaattattaatagtgttgattgcaaccttaattataagatactattttgttttttggactcaaataattgatttgttttaggaaatttatatatttttggattgtgtaattttcaagacatgacattcgaaaacccgaacctcaccacccaaaaacccgatccgtgtgcagctctattgtgtattattattaagcaggttcctggtaggaaattcattcttgttcctgctccatttaatatttaggataataaataatctccattctcatcccgtttttcatatagacggggaatttctactccattaggagtgggttcccgagcagccatccccataaaaaaagtgtgcatccctacaacattcaccgtgactgtagcctatttataatttataagataataatttttttgagttaagtaattgatttattttaagaaatttatatacttttggagtgcattaatattattaaaatgattcgtgtt

SEQ ID NO: 64861 - DNA, 2414 bp, Cannabis sativa
taactaaaaatagtatttaccctaaaaattatgaaggaaatgaaagagtccaattgatgatcatatccaaaatcttcttcagctcgacttagaaagtcttggaatgagagcaaaaatttgtaatcgaaaaagtcctttgcttggcttgaactaagatagcaaagcaaaatcccattactgtaaaattttgtaaggaaagaaagagtacaaacaaagacatctcagaaagacattgaagtgatccctttgtttgaaaactgtgagatacaaaaggacctctagcacactatagttgctgattagcacagtcagtatcatgaagcacttcctatcggcggagaaactgtcatgtatttgatgcgtcgttggctgcttcatcaaaagaggcagccaaatactctgctaggcttggctgagaacttacattctttggagtattgtcaactttagttttgtgcatctcaaaagaggatctcgaggtttcagaagtgtacaacctactcaatggagcatccacccctttccaagtaataggtgtcaaaaacttccatggatcttcgatcatggaactatgagaaaacctctcgggccccaatggtctctccattgtagagaaacgaccacccatgcctcgtcctcctcctcttcgacctgaactatgactcaggctgttaccctgccagcgatttccactcccacctcttcctgtattaaaaggactacccattggaccaaatctaggactctgaaaattatgccctcttggttgaacaccaggaaaattataacccattgtactacctggtccatttgagggacctagatttccttgatcaagaaagtaacttccttgaaactgatgagctataggggtcatttcagcacggggtcctggaacaggatatggagctcttagcatgggtgaaccactgttgattggaggtgtgtgagtataatgatctaaggaaacatggtgactttctgtattccttttcttgttggcagtaaatgctgccataggatctgtataaaaatcaaacctagatggttcttgcggtggtgtagcagcggaggtctcgatcagtggattcgataggtgaaaaggcattgcaagagttgtttcactgtctttagaattttcagcctgatcagcttttgcacgcattaatctcaatctttccttcctttcttttgattcctccatgtaaaaagtgatgccttctttgctgagataggtggtggaggtttggatttggcccggggaaagtggactgaagctaagattcgattgttaatagcttggtcgcgtcgttgtcagcttcttggatggaaatggctctgcagttgaccgtgtggttgctttaaagaatggatcccgtcgtgggacagagcagcaggtcagggaggttctgtgttatcagggtcagtttgataatgttgaattcattcctgttttcggcaaactactggattgagtactgagaaaacaatccaatgattggtacatgaggggattggatttcataactagagtactttcatcatttaatttctcctctccaggttaatttttgttcctggaaaaaacacaatcatcaattatgttcattccaacccataacttttcaaccattaagataagtacatggcaactcaaaggtgcttccctcataatcatactaaaactaaaaacaaaaaacctcctcatgtaaaccccttttatgagaaagtaccctatttacaatcaaatttatcacaatcatcaatcaatttcgaacccttaaattataaatcaggaaaacatgtgataatgataacttagcaaacttattaagaatgccacacacctgctaaatttcatttaatcttaaaaatagagcacaaactcaacaattcaaaatctattattgagaacaattaatatcacaaagtgtatcagaattccagcttttcccttgggtaaatatgaaattattctcatctcaatggttatatggattatgaaaaatggagtaccatgtcacaatctgaagtctttatgatataagaaaagagaggaaatttacctcggatggtggcggagggatctgcccgtcgggaagggtctcggcgtcgcaagaagtcggagtcggagtcggagccggagctgtctagtgcaggcaggctgtcgcgtgtctggggtcagaagagaagctgaacacgggaagggaaagagagttgaaatgagattttagggcttcaattttttaatttttttttttctatttttaagttaaataaatggaaattatataatatggtgattttacaatgcaccttcttaaaaaaatatgtactgatgtaccttttatttattccgacatctaaaagaattttttagtctaatttttttttttcattttcatgtacgttat

SEQ ID NO: 64862 - DNA, 2155 bp, Cannabis sativa
  modified_base (47)..(47): a, c, t, g, unknown or other
  modified_base (280)..(284): a, c, t, g, unknown or other
ttttttgtaatttcataattaataaaggttattttggtaattcaatnaggagaagcccataaacattctcacttttattatagttatagattatttataatttgttaattttatagcccaatctaaaataaattaggcaatttaaggtaaaattgattaataatgggagatataaaaattatgctatatttagtacaaaaagtagttttgtggtaaatttatatcaaattttagctttgtgctccaatgcacaattgcaaaattttgatgtaaaatttannnnntaattaatgttttattaaaaaaattaaatctaataactttattaagttactggttctggttcatatatattgtcctatttactgtcccatgtatgttattggtgtctataggttgttatattatttttggtgtttctgttacaattgtcatgtgtgtcagcatagaagtcggttagtcggtttattcagttatgtctgttatgttcttttttcttgagtcggtttgtaatgaggtccagggtatatcaagctggcctctcctctgtttcaattcaattgaatctcttttactttctgtttgaacttcatcaattcctttttctcaatatggtatcaaagcgggaaagataggctttcccgtccgatcctaccagatgtcgtgtctcatttctccggcgttgctgtgtgtttctcggtcttcttctccgatcttcttccttctctatacattgattccgcgcaatggctacagatgaaaatcaaactagaattccttctgatgtcacagatcttggaaatccctcaaatcaagctaattaaggtcttcaaatcacttccatcaagaatccattggaggatccaaccagtcctttctttcttcaccatggtgacaacccagggaatgctttggtgtctcaaccccttactggacaagacaactatgtctcatggagcagggcgatgcagcttgccatttcagtcaaaaacaaaatcgaatttctcgacggttcaattcctaaaccttctatttctgatcaaagtctttataatgcttggtatcgtaataataacattgtaatctcttggatcttgaaatccgtttccaaagaaatctcatcaagtattctttatgatgaatgtgcctcgggtatttggaatgatctaaagactcgttttcatcaaaaaaatggtcctcatatatacaatttgagaaaagatctcatgaatcttaaacaagaaaattagaccataagcatatacaatactaggcttaaaactatatgggaagaactaactaattacaggccttcatgcacttgtaatgggtgcacttgtggaggagtcaagagacttcaagaacattatcacatggagtacatcatgtcattcttgatgggactctcggattctttctctcaagttaggggtagcatccttctcatggatcctttgcccgaagtgaatcgtgtgtttcatcttgttactcaagaagaacatcaaagaggaactgcctcaaatatcaacaacaacaactctgccatggcgtttgcattccaacgggacaaaagagggaaccaaaaggatgatattcaataaggaaactcccatccaccttaaagaaatcgtccctactatactcactgcaacatccatggtcataccatcataaagtgctataaaatccatggatatcccccgttttttaataggcaaaacaaatctaaggaggctgctgcaaaccaggtacaaactggggaagaaaacaactctgctgcgattgaaaataatgctattctccctcagctttcctcggctcagtaccagcaactactgaacttactcgcttctcaaacaaatggtatgaatggcagtgatcctagtacttcgacaggtgatacaggtatcattctgtcacaccattcagtttctccttttctcaattcctggatagtagacacgggagccactagacacatatgttctgatatcaaaatgtttcaatgtatatgtaagacaacaccaaataaattaattcttccaaataatgatagtcttactgtgaatcaaagtggatctgttattctaggaaacaacattgtcttgaccaatgttttatatgccccacttttcaaatacaatatcatctctgt

SEQ ID NO: 64863 - DNA, 633 bp, Cannabis sativa
ccataaattcatttctttctttatgtaaatacaataattccttttgaatcaagatctccggttaaaaaatagtgtcatagtgtcttatattgtgttaaatcaattaaaatttgacatgtcaattaatttttatttaaatagttaatatatgtaatataatttagattagttgatgtgtcaaattttaacaggtttaacacagtatgagacactaatttttaaccgaagatcttgattcattcatttttcccttttataaaaccacttataaataacaaataattccatcttttaatttgacgtcgcctgattttttgtgcttccttctaaaccttttttttttagtgtaactctataattataatctcttaatttaaatattttgcttaatactaaatgtattcttaaataaaaatttaatatatataaatgagtgtgcgcgctatttttgtaaataataatttgcctacttctgcttataagaaaaaaaaaacccggtatatacttataaagtagggttgagttcactaaaattatatgtacagatatatattgaggtttttttatttttacacttcagaatagtttttttttgcatttttacggaaatctacatagaaacttctattgcaa

SEQ ID NO: 64864 - DNA, 4898 bp, Cannabis sativa
agtaaaattctggaacgccataaggttctttggtggtcaattctttccaatgctctacttgttcgatctgtgatccgaaaacggtttcatattgaagatgcaagttgccgtgtgggatgggggaggaaactttagaacacttatttctctcttgtgatgtggcacttcatgtttggagggcctccccttggggtatttatcctgcttgtgataccggtatccatatgtgggattaggtcaaattcatctgggatctcaaacacaagggaattgatactcatgaggtcttcctctatgcttcgattgttgttgactctctatggcgtacccgaaatgataaggttcataataattatcctactgacatgcaaaagtgtattgataatatttgtaattctttttacagatttacatgtttctctttttgcttcccttgctttatgtcggaaggatgtctggtctcttcctcttatggattggatcaaattgaattgcgatgttaaagtgggcttcaaagcatgtgtatagctgtagttgatagagaccaccttagtagggtggtcgcgcggggttcacacttctcttttggatttctctgatgcactttgcggagaagtgacgacttgctgtttgacggttttggttgccatggacttgggctacaagtttgctattgtagagagcgactcgatgatagttatcaatgctctcaatgggatggagtctcaatgggctttagaaaactatgtctcattttgtaatagttactcttctcggtattctggttgtactttttctcatataaggagaacttgtaattttattgcccataatgtagcgatttggagttgttccggttgtaactattcctaataaactattttgtaatgaccaggagatctaatgtcgttttattatttaatcaaataacgctttttattaaaaaaaaattataacaatattaaaatgtaatattttttaatatataacataataataatgtaattaaaaattatacgtgcgattacattttaaaaatattattaaatgaatatatataacataagaggaataataacattaaaaaatagttattattaagaaattataacaacattaaaatgtaatatttctatatatatatatatatataacataattataatgttagtaaaatctatgcaattacattttgaaaatattattaataaatgtaacataatgaattatagcattaaattaatgttaaattaatgttaactattttaaatatataacactaaaataatgttataatatgctatttaataacatgtaaaaaatataattaaatttcaatattttgtaattacatgaactatcttaacagttgctaaaaatgttataaaatatatttaattatattttttcagtgttatcgtaaatatttttactacaaaaaattgttacttttggtgacaactgtttagtcacaacataatttttttttgactaaatgtgacttttaattagttacaacaaaaatgttccttgtgactaaaatacataatatttaaatacaagttgtctctaatttagttttagtcacaacaagtattgtcactaaaactatatttagtcacaatatgactaatacttttagccacagaccttttagtcacattaacataggaatggtgatttataattagttacaactttttcacttttaatcacaagttttgttgtggctattataaattaatctacaccaaatcgatatataatttctttttttcattctaacttttcttttattttaattataaaataatcataaattagttattgacaatataataattatttcacaaatacattattgactattaatgtaaataatatcaagtaataaaatatttttattaaatatcatatttgatatatttgatgtaatatttttgttgaatcattggagttgttagtacaactattagctagctagagatggttttagttggaatttttattttaaaaacttacacacagactagtgggatgaggaagttacagaaagatagatccatttataatatatatattaattagaaagaaatggagaaataaagggtttggtacgtagtaatccaatttgtttgaagccgtgcaagttgacacatataagtattatcttaattagaatgtaattgtaaatatatatatatatataaatgtacgtacaatgagaatgagatgcttaagttctgtcaagtcttagggaatacaaattgttgagataatcgatcgattcgttgcattttgctatatatacatatatgtatatccacgtaaatacaacacttgatttttttagattatttgcatatatggagattgttttatattggcactaggtataggtaggtaccaaaccttaaatatcagcattacaatattatatgtatataattaatatatatttctagagagagagacgtacgccaacttattaattataataaccctaaaattgcatgtgttttcccatgcactaataaagggcaacttgattttcacgtgtgcctttaatcgaagggaactaaaattaactaccattgatcaagaaaacagtgaccaccttaatacacaaagttatgtcttttaattaattagggtgaagtcaaactaaagaaaagtagtgtatgtatatctcttcgaagaaaacactcgacactattatctaaaacatttattataactactacgtacgttgaattttatggctctatatatatagtagttttatttagacaacgtgggattattagtgtcaatttatatgtatacatgtttttatatactttttgacacataatataatctcaagttgacaaaaattagcttacttgaattatatattcatttgttattgtttctatgctattaacttattatatattatgaatttctcaaaatttagtttaagaaaattgaaaatataattaagccatatttttatgtattaattaactattaaaagctcatatttttatagaacaatataaaaaattatgtggttgcctatttgtgttttagttaaatatgctctttggccttctaccagtactgtttggtatcttttgtatatcagaaacattattatggctaatactatttgattaatgtaggtggtattttgcagaggctatttcctggctatttcctttttttccttttttttttttttaaaaaaaaaagaagttcatattgttaaaaatgatatatataaccgtcttattctgattagcaaaaatatttaaaactagaattgaactaaaagtatgtgaaaatgaaaaatgtaaaaacatacttaaaagaaatgtcattgtcaattatttcggacagtattatacaagcaaaacaagtaactactaatctaaggtggtaaaaggaaaaacacatttttaatttaattttctttttttaatcaagttgaatctgcctttgtgtccccaccaaaaataaactgtgagctaccttgaatatccacaagaaattgattttaaggtattatgaagcctaggaataggacattaatggaccccacatatgtatattatcatcttcattaattatgatgtccttggttttggtttatttttttttagatctataaatatataaattgatacaaatgtgaaatcatataaaataaaccaattattgtatgcttgagaaaaaaccaaaaaacaaaaaataaaaaatcttaccccacctcaaaacaaaaaaggaaaatgaaaaggaaaataggaagtaaaaagaagcatctaggctctaaatataactgaaaatgccaatagggcattacatctacatcttagctccacaagtgtgtttgccttttcctccacaaaaaagcatttgaataaagattatttagagatgccaaccttttccatataaataactttatttatttttttttaaaaaaaaatttatatataaataagatgccaactattttgtatgtatacatggtccccccacattcacttttctaagttgacaaaacaagaatataattttgcaaggaaatacacaacaaaacaagacctatggcttttatctctggccttttcctaattgggacattgggatgttgctcttctatgatttgtgtttattaagtaatttttccctgcaaaaatcttagccctatgatttagtgtgttttaagatacaaaaatatacataaatgagtaatggtatgtgcatgtactataattatactcaaatatattacatgtttattagaaaaagtaagtaacaattaaagaaaaattatgattgaaacagaaaatttatcacataagtaacattactctaatttaatacactcgagaattaattagtaaaaatagtatttttttttaaaaacgaatttcctcgataaagtatggagtatgtaagaaagactgtataaaaataatacatatatatttcttttaaaaaaaaaaaattaatacatacatataagattattattattataatttttaaaatatctattttactaaaccctcaaacaccgacgcatattataagggaagaaaaaattgtcacagtcagagataaagttttccttagccaaatttaaatgaatggaaaatccaaaagaggtgggttgttgctttcaaggtttttgggaccatatgttactttgatgaatttagggggttgtgtgtgggggaccatatatacatgtataaatatgtgtatataatatatatatatatatatatatatatgatatagggtgttgtacttttaaaatggatctaccatttgttttggcatctgagattattttttaatttatttttttttatagttgtctaagttattttattttttatttt

SEQ ID NO: 64865 - DNA, 981 bp, Cannabis sativa
taatttactctacaatccattatattagacgatagacactaatttagtgggatgatgcagatgcactattataaatgctattaataaaatacaatttaagtaacgtttggttggaagtaatgaaatggaatagaaagaaaataatttttatttcatttcaatggaatgacctttctactattgttgttggaaagatttatgctattttgaaatggaaggaaagaccatttcaatacatgataagattaaatttaataattttttattaatttttttatacattttaaattttattctattctatatatattccgattctcattcttatttttatttcttccaaccaaacggcaccttagtatcttggtttgtatgttcaatagtttaacatgctaagtaggggctacttatgtataaaaaatgttaatgggctcttaaagtgttaagcaccacaagacgtgatcaattgctattaatgtattttgatattggatccacacatattttaatttaataaataatataagaaatcgcttaccaattatagctagcataagtgtagctttggcaccttaagatgccaaataacaatattccttcttaattctttttttttttaataaaattccttcttaattctttttaaaaaatgattattgttaaaaaaaaaaatcgacgaaaatcaacaaggataacgaattcaacaaatttatgaacagagtgtattggaatcctgatgtcatagttgcatcttcgagaaagaaaaaaaaaaaagtcgtcgcgtgattaaccttgtgtagttttttcaggaaaattgttgttttcatatcaaaacgacgtttcaaccagatactaatttagtctggattgattcggaaaaagatctacaaaaattgaattggaagtggaacccatttaaattgatgatatataatagaaaaaagttgaaaccggttgttaaatagaaatataaatatgaat

SEQ ID NO: 64866 - DNA, 1036 bp, Cannabis sativa
gaggataatgaaaacaaaggaaaaaatatagcttagcttaaatgaatcactaagccaaatattaacaaccatacatgaggggaatacataaatctaacatttgttaattaagaaacaaacacaaatgacttgagcagagaacatatcatattttataaaccaaacatatataacattgatgaattaacgttatgacttacttgcggcaaatcatctttttctgtttgtatttcctggccaataccattagagatggctcgatgattccaccactaagcctcataaccaaatgcaatgtggactttgtggaaatgaccaaaggaaattcacacaattttgttaaattttcattacaaacagtacaatattcataattgtagctaacgtatttcaatctcaaaccctctaaaaaattctcaaattttctcaaatttatatagataaactctgattcgataatctcactttgtattgactgttgggtagtaaccaaaatctcgtattgactaaaaatgaaaaacactatgagcatataaggataaacatatctctattagtatgatgtcttattaaaaagtatttaaaaataatttcataaacacttacactaaaagtgaagaagataaaaatgagcttgagagtaaacttataattatataaatttaattattttacttagctacattttacaaatattattattgattacttatttttttttttatatataattattagatattaaattatgccatagtaaaaatgattgaggatattggagatagtaaagcttttggattttagttatggtataacttgcattcacttttttttcctcatttacacccttatgtgcaaataatattaatagagttgtaaattgtaataagcaaactttagggactaaagtgtaacattttctataaaattgggtaactaatataaattgtggagctttatatatgatagtccaactccttacagagccaaaaaccctagacgagtcggctaaagatgcagatcttcgtgaaaaccc

SEQ ID NO: 64867 - DNA, 554 bp, Cannabis sativa
atctttgagttcgagagtagatggtaagaaaatggagctttggttctttctttatatggttttttcgcttcaactgtccaagcagttgatacaaaaggttgttctacgcgggaaacataacggtcatctcttgggcctgtaaatgggttcgaacgtaatgggtcgaaggcctggattcgatgagtgaaatttaaaatttatttgaataatttataaggataattacataaagcatgtttttaacaaaaattagatttttatgtttaaagattttttttttatattttattatttttcataaaaataacatgaaaataataaaaaaattatataaaagtaacatgaaaataacataaagattataataaaaaataacataaaaataacaataaattaacaagaatacaacataaaaaaaaaatcgtattttctgtaaataaaataaaaaaaattgtaaaaatatttaaaatgctctgaaaccgaatttttgtaatatttttattatttttgtgtatttaagaaataattcgtaatttatatttataaacgttttc

SEQ ID NO: 64868 - DNA, 2083 bp, Cannabis sativa
tagtaaatgtgttgtacttagggatgcacacggggtgggcgagaaattagcgtggagtgttcctccgttcttattcccgttaaaaattttaattcccatcccagcttatttcgtattggggatggggtagggattcttctaataggaacggggaatcccctaataaaaaaataaaatttataataaacattcaatatataaaaattaaaatattagacattagttattattcaataaactaatttttatccaaaacacaatttaaaattcaaaggatactaatacactaaaaaaaatacaaacataaattataaaatattattagaaatataaaataaaatattaaatgggtccctgttgtagcgggcagtatcatccccaccccattaagggcgagtccccgcaggacctatccccatagagaaaatatctgtccctagttgtacttgttcctgaaactatcttcacaccagagattttaaaaacgttccataattgtgggagcctttttcattcgatagtggcttaaaggactttctatcacttttaagatttcatttcaaaaaaaccgtaacaatttagataagttaaggaatacatcttttttgtatccattaatcaaaaataccctcatattatatttcattaaaatatactcacttttgtgagttagttacccaacataccctaaccccccacttaaatttagcacataatttaccttaacataagaggtataatgggaacaccatttattaaagtggatatatcttaaagaatattaaaataaaagtaaaaattaaaagagataaagtaaaatggatatacaatatacaagttcctctttctaaatcatcactccaccaccctttgaaagtaatctttttttatatacattgcttattgaacatttgagggatcccattataatttcgcaaggattgttgtgatttaagcattgtttttgggtccgtcttagtgcaaataattcaaactctgtacttagacatgaataagacctatcccaaatatgttagagccatcaaaattaaaatcaaaacacttatcgtttagagcaccctaacaccctcgggccacctggtgatgcacccagcgctcattgtcaacctagggcacttccatccacaatattgaagaagtaacatgagcattttctttgagtccctccaaaacgaggagtcaagtgttttaaccaaagaaatagatcaacctaaaggccaaaactgagattcggtgcctaagttaatgttgacggtgagaacttgtcaactaacttatggccaaaaaactaacttgagcttcaagttcaaaaatgggatggagaagaagatgaaacacaaacttagattactaccttgaaatggagagaatagcggagtaaattcttattgctttctatataattttacaagtatgatttttcaacccccctccacatctgagatgggggcatatacaggctctaatggctttgtttacaaaatggtcccatggggacaaaatgtcgctttcccagtgcatgctctaggtgttggaggtagtctggcacctcgcactcttgtctggtgtcaggtggtccccagttccaggttgcaggagggtggttgcagtgtggggtctccaagtacacgcgcatggtccccggtcgcatgcagggtggtccccgggtacatgcgcatggtccttggttgcatgcgtggtggtccctagttgcatgcgtggtggtccctgggtacatgcttggtggtgtctgggtgcaggctgtaggagagtggttgcagcgtacccttggtttggtcttcaggcctcgcagatccgttgtcgccgctatttgtacctccttggtcttagtcttcagaaggcttagttgtaagctcttcccttgcacgtcttgtcttttaattcctctcctaatgtcattcttgttgtcatgcattcacctctcttcttatcttcacaccccaaagcacctccacacaattcacacaatggctcacatgcgaggccccatatgggctcgcatacgagcccttaaccttcgacacacacacacacacacaca

SEQ ID NO: 64869 - DNA, 746 bp, Cannabis sativa
ttataaaagaaggtatttattaatgaaaattatttctcatttatatttagttaatgtgtaataagaagggatagttttcaacttatcccaaaatacttccaagtgtaggcaacaattttgcctttaatggacttttatttaacaaaatatcacttacacacactccatgccacctcaaattgcatcagcttttctctaattttttttttaatttttattttcagtttcgaatttagttttaagtttctctttccattttgttatacccaaaattcagctagcacatcagagaaagacgcttgtcaagctgggtagaataagaactcagacatgtaatcataattacacttgatatggaaaaactccttaaaagcataattaatagagtatgtttataactcgcctgactgattagtcttatgcgagataaaaatatacaaactgttaccttatgtctcgatgacaaaccatgtaacttcaggtgtacaagatgaggcactaacctcgttacttggaggagatataatgacaatggagacacttagcgtataatgtacaatatacaaactaagtacaatagatgggtgaaccaaggcgagaggtggcgaggcgtccaccttgctgtaggaaggcgtgcatgcgaaaaagatcatcttgtcacccgaaacagcggttgtcagatttaaggtaaaagcattatccaccttggaaaaacatatgacgagctccagctcgctatcaagatt

SEQ ID NO: 64870 - DNA, 608 bp, Cannabis sativa
ttcttaaattaggaggacgcaagtaaaaaatttatggggatccaatgcatataaaaaaaaataaaaaaatatttattattattttttttttgagcaaatttattattattttttattatattttacatgtaatatttttttgataaatcagaaaattatattacatcaaatcatgcttttatcttcaattgaaagttctttaagtctacaattaattctattcttgacattatgcttaagtatgaatagtttgtaatttttgtttcccattcatccatatttaatataagtcaaacttgttatagttgctagtaccatttttttcttcactttggacatcttggatcttgaaatggtttggaatagtacccaagagtgttcataactctctaattcagccaacattttaccttttcaaaacatttaaaactattttcacattcgaaaaggagatgatagcgattccaaatctctctatgccataaatgtaatttttttttttaaaaaaaaaagtaaaaaatgaaaaaatttgggggaaccacgacaccctccgccccttaactccgccatttagatatttaagcatgcatttagtctagactaatgtg

SEQ ID NO: 64871 - DNA, 1233 bp, Cannabis sativa
tcgctattataatgtaatataataagcttaactaatatgcgcgctaaacatgtaaatacatatgcatattattatactaatcttaccttatttttgaattcaggtgcgtcggccaatctgagtggagtagctgctcgacgaattactggcccctaaatcacattattcgtaaaactggcgagtgacatgctaactaactttttggggacttaaaattgaaactaaaagtttccctatcgttaaataacttgtcaataccctaaatattgcaaaaatgggaaaaactagggttcccaaaactgccccaaccgatagaccggttcctcaacgagaattcttgttatgtagggtttcctggggtccaatcggtcgaccggtccctacaagtccccctgaaccagtcgaccgattcagtgcaggaaaagttcaaaattacactactcactcaatttaacttattattcaagcaacaaaacaactaaacaagctcagaatcaaaatccaccattaaagaccaaaatttcagttctaaaactcaaactttgtctaacaaccaaattaagcaaccaactagcttcaaatcagcttaaaaagtataattccaagttcagaacaccaatgaaagcaaaacacaacaacataaaccttaaccccaaaatcatgcataagccttgcttgaaacctaagaaactacaaagaaaaagctactaggatattaccttggattaattcacaaagaaataacctaaacttccaaaattaggctgaaaaatcacaagccctagttggcttctatggagctcgagagagagaaagagagttgagagaaagagaagttattctctttaattttttctatttttgaataaaaaataaatctattttatttttttaatttatcttgactcatagtcagatttaataacttaaattaatccactaaagacaaaattccaattgggcaaaaagaccatttgcccttcacttaaccaaaaagtcactaaaccagtcaagggtattttggtcaattctaaaatctcgactactcccaacattcccaatgtctaactatattgtcccgctataacaaaaatacaaaaatgtgattcgaatagccaaacgtcgcgttctgatgttgccgaacacaaagtatgtagcaatataaaatttcatatctgacatatataatgcattctgaattcaaaataaatctccataaaatgataattcata

SEQ ID NO: 64872 - DNA, 1975 bp, Cannabis sativa
  modified_base (268)..(271): a, c, t, g, unknown or other
  modified_base (404)..(418): a, c, t, g, unknown or other
gtaacaaaatattaacttttacatatttttaatataaaataagaaattgccaaaacaatcctattaatttaatatcacacattcttatatattttaaaggggaatgacctcacatactattttttaactttttttttttttttttcaaatttgcggtttatgtttctaaagtggttgcaacgctagttgcaatagggtttctatacaattttttattgcaattttaggttgcagcgctagttgtaataggagtttctatgtagaattnnnnaaaaatacaaaaaaaaattgttttgaagtgtaaaaatgaaaaagtgcctatcttaaactaggcaatatagtcgctcttcgcgcggctaatttaattttttattattatgggcacagtttaaaaccgtcgcctnnnnnnnnnnnnnnncgacggttttaaaccatcgggaagcccacattaatgacggtttttaactgtcgcctattttgcccgttttacgacggccgtataggcgacagttatagaaaccgacgagagtactttaaacgactatttataaacgtcgagaaaaactatttttgtaatagtgtttataagttacatacttaaaaaaaaaaatagaaaaataagtattagaaaaaattagaaggttaagcatgccttatcaactctttaaaaccaacctttatacagatactgattaatttaataacgtacacttaaacaatttgaaaaagcttcaaaaagtgtgtcgtcttcaaaaagcttgtatttcacattttctaagcttctagaatggattgtgaggttgtgatcactcatatagaagagtagggcttgctttgttaattgttgctccaaaatttcactctcctagacatagcaatagggctgtcgttggttttgctctttctcatctttgtaatcaaacatatggcttcgaaattttttcctcttgtgcatatactcttttagcatattggcttgtgttggtgtacgtagttaatttttgtattattactggtttacttttaaaaaaaataataaaagaaagaagtgaaaatttagtagtaatattaaactacactaaaatttttactctttgttgttctaaaataataattgtagaccttgtttttatatataaaacaaaaattatttaaatatgtagattttgtaaaaataaaattgcatagtaaattgaaatattgtatattttcataaaatttaataaaatatttatatgaaaagggtatctatgtgcaatttttttttctgaatatatgggtgtgcatacattaatttaaacaaataaccgtaagtacaaaatcttttttataagaaaaagttatataaaataatgtataaaaaagtgtactatcctaaagctgaacaaaaaataaagaaaaaaattagcaatacaggtggtatttagtaacacttttatattttttttttaattttaaaaacagaaatgaaagtagatttttatttttaaaagtttatttttcataaaaataaaaatatgttctataatcacttttgtttttaaattttaaaaataggaaataaaagtgtgtttaaaataggaaataaaagtgtgttctgtaaccacagtacaagaaaaggcctttttaccggcccagttcgttaattgcgccggtaaaagttgtcgacataaagcaaaaactgaaatcccattgcatttatgctttacttttgccggcgcaataatgcgtcggtattactacgttttgccggcgcaataatggatatgcgccggtaaaagtaaggaaatgaagcgccaacaggcgcgaaaagtctggcgcttagatacttttacaggggcatctatgcgccggtaaaagtcctaaaaaaaaagatagggaaacttcccgcgtggatttccttggtaggtggggatacttttaccggcgcacatttgcaccggcaaaagtattaaataaaacgcgtggattttga

SEQ ID NO: 64873 - DNA, 830 bp, Cannabis sativa
atataaaagaaattaattaattattgatataaaataataaattgaaacataatgaaaaaaaaatatctgtatatacagatgtttttcgtgcctttacctaagcattatcctatattattatatatttttttatttatttttaatttatagttgttcttttatattcttttttacaataagattcatttttttttcttctctaaacttacatctgataccattgagaccaccattgctctgccatcgaaaatcaccattaaagaccactattggagaactactattggagtgttatattatttaaaaatataatgtgtacattaaaatgttataatatatattattatgtgagtaatatatattaagtatatagtaaataaattatgtaacatgtgtatttaacctacatattgtaacttgtaaaggagttacaatttgttatcacttgtaactcttttgttcatcacacataattagtgtaataaaagaattattatacaatttgatttaaataattcaaaactatgatgatatatttgttaaaaaatagattaatattcatttatgtgaaagaaataaggtgaacaatgtttggaatggatttggtccgagtgggagttatgaaactcaaaagcacaacctgaaacatacaccaggcgacatgttgcctagtgccaggcgacatgtcgccaggtacaacagttttaagaaaaatattttgaccgttgtaaatctgttccagctcgtgtaatagtcaaattaccttcttcaatctattttacactcatttaagtgcctattgcagctatgagatatggtgtgtttgaatt

SEQ ID NO: 64874 - DNA, 1174 bp, Cannabis sativa
cagtacattattattaatgcgaaacttaatatttataaaaattttattactaattagttttgaaataaaatgaattaataaattttcattactaattaattttgaaataaaacccaatacactttaatcacatcttaatctcaaattcacacttcaccctattgatatagttctttcatttattttatttgaataatgattataaaaaattgctattcaatggggtacttaataacaaatatgtacacatgtgaatcatcaataataattttcattcataaattagtgacccattaaatcaaatatgaacatttcaaggttttattatgcgtgattgctattttccactaaagtatacttatatatagtttgagaaagctactagatatattaatgcttttatccaataaggcaccaaaccaataatttatgtatagttctatatgactcccttaagatagctaggcaaaattttcatttgaaatatagatcactaaaaagggaaattttattattgatgaaaaaataaacttccattaatgtttcgaataagaaattataaagacttcttcccatgtgccaagttatattagtcatagtttgaaaacgataagacccccattttattaaagaggaaatttttatcaatttttctccactatatggcccaattagaaatcattattattccctgcttttcatataacacaaccaataagagtgactaaatcaagtgacaacagagagaaaatcatttatgaagttgaactaattaattacaaaaatataaattctaataataaatggataattaagagaagaagaagaaaaaataaacattaggatagtgggcccactacatgtgatatgcacttgatttttcaatctcaatcacttgtgtggatttggctttggatttgggttaggatttggcttagctaggctggctacacatacatacgtacctcactctctctttaaaaatttcctctataaatagaggcttccctagttttacttctaaatatcttaaaacagaaaaaaaaaaaacagcaaaagaaaactctcttctctcaacaatggcaattactcaagcattttattccatggccttattgactactcttcttttaatcacactacacattcaagccaccgccgccgattacggcgg

SEQ ID NO: 64875 - DNA, 749 bp, Cannabis sativa
gtcacgttaggatctctttgagttggatcctggatgcggatgcctaattggacagctagtgtgacatactgttcgtccaggccccttcttctattcaggttagtcctgaggtcatttgcagcacccaacctattaaatactaaggtaccaggcggtctcaacatctgacttgtttggctagtaggttaactagagatttcagttgggatgaagttgttaggtggaactccatccaaagggtggtcaggaaggatctggccgtctaccgtttggcccatagattagacctatggtcgtggattggacggctaaccattgtgagtttgggaagaatgcctagtagcatactcttttgtaccacccagagggatactagacacggtagttggctattgattgggaacttggtaggccctccttatcagtatagtggcctgcctcgtgtgatcatcaatggctgcttgctgagcccttaaagtttccatttccctatcccttcattctataaaccaacgtctctgctcgtcgaatgcaaggtttatagtggcacggagatcctcctgatcatagtgcaaagcattattatgaccttgcatgagtccaagggctatttggaggttttggatttcagtattgtctccgactgttctctgtgcattattggtggacgggacttcagtgttgggaatgaattgatcggctgctgaactggtgttcccagtctcttgcactcctggtgtgatcccagc

SEQ ID NO: 64876 - DNA, 604 bp, Cannabis sativa
tgacttgaatatatttgtagctttgtcaggttgctcacctcctcttatttcttccatgcaagtagtgttgggtgttgaattggggaggtgatagctatgtaggtctcttgtttacctcatacttatggcaagaacgaaacagactatgcataaggtgcccccgtattatcctcatgtggccatggtggccacaaggggttgagttaaagtggagggggagactgcccagccccttgtcgaggctgagccagagatggattcagagtctgggagttccgatgcagaatttgagttggaggaggttctctagtcaggaagaggaagtataggacttgttctgtcctccttggccatactttaggccattatgacgcccaaggtaatccactaaatgggctcggcggacctttagagctaggattggaccatgtcctagagaaatctcttgagctggagatactggatgcaaaactgcctaaagcaaggtgggtttcgcctacttatgctctcttcgatgaggcatttcataagatccttactagtggcctaatatggggtgccattgtgagattcctggagaaactgtagggcgcacaggccccct

SEQ ID NO: 64877 - DNA, 618 bp, Cannabis sativa
  modified_base (517)..(518): a, c, t, g, unknown or other
cgccggcggtggaggtggtggaacaggaggagttgagaagaattgctgcgtgtgcatggtaaggcataagggcgcggcttttatcccctgcggtcatactttctgtagactctgttctagggagctttgggttagtagagggaattgtcctctttgcaatggtttcattttggaaattcttgatattttctgataattaatccaaaataatttgtgggtttaattttattttttttattaaacatttttgtaattttattttggggggttggaatttaatctattcattctttagagtatatattataaaagattgtaataggttaaattttcaacttgcaatgtatttcacaagcattatcaatgccaaaatttctttcttctttgttacttttttctttgataaatatttgaatttgaataattgacattttagaaaatgaatcaccatatagttgatgagttagttatggctttgtggatgaaataaataaatacattttatcaaaaaaaaaannaataataataataaataaatacatagttatattggtatgggtatttaaagctagttgcatgggtttgaaagtaaaagttacttgatatgttttctccttc

SEQ ID NO: 64878 - DNA, 1120 bp, Cannabis sativa
gccgattttagtgttggccaatcctgaacaacttcgatcttggccgaatcaaccatgatcccatctttatccactatgtgccctagggaagaaacacgtgatagccataactcacactttttaaatttaggatacagcttgtgatctcgtaacatttacaatactgatttgagatgtagttcatgttcttcttttcactcagaatagaccaaaatatcatcaataaacactatcactcacttgtccaggtaattcttgaatacccgattcataagatccataaatgtcgctggggcattggtgagtccgaaagacatcactagaaagtcataatgtccataccgagtacgaaatacagtcttcgggatatcctcttcccaaatctccagttgattgtaacctgagcgaaggtcaatctttgaaaagactatcttaccctttagttgaccaaatatgtcatccattcggggtagaggatacttgttcttaatacatagcttgttcaattctcgatagtcgatacacgtccgcaacgacccatctttctttttcacgaacaacactagagcaccccagggagaataactcgatcttatgaattccaagttaagtaactcttggagttggatctttaattctttcaattctactggagccatttgatacggtgccttcgatactggttctgcccccgaaactaattctatcaaaaattcaatttcacaggaaggtggtaatccaagtaaatcctcaggaattcgtacaccaatctcatattttcaggtccatatgacacagattggctagtatccaccataatgactaagaatcctaggcaatatttgcgcatcagatcttagcttttaagagtgttataattttaggtatgcgcgatccttgtactttacccacaaacactgtcgggttagcactgtaaggctcaaacactaccatcttccgcttgcagtcgatcgttgccccatacttagacaagaaatctattcccaggattatgtcaaaatcagacaattataactcaattagatcggcggccaactcataacggtcaacccaaaaggaccaagattgaatccaccgagtggatactattaggtctccc

SEQ ID NO: 64879 - DNA, 532 bp, Cannabis sativa
cattactttgactccactaattaatattgccttaaccaaccagcttcgaagtttctttttacgtgctgtgttttatttatttattttttaattagttgggattgagaatatataagcataaaattaagaattttattttttgaagattttgaaatatatcattgacttattaataggcacattaataatgttgacaggatggataaaaaaaattaaagttgggtatacactataaatacagtttacactgtttttgtcgcacgagtcagatacgtttataaatgaaatttgtaacattatttatttttaaatcttatttttggtactgatcacgcccctcaacgagtacgttaccaaattgcacgagctatattattcaactagtaaacaaatcctaattcgctttaaattacatatgagataaattattgagaaataataagaattgataaacatcttttctcataaaattatttttatattttattcatttaaatttattgttatcattgtatctctcgtaagttgttat

SEQ ID NO: 64880 - DNA, 1029 bp, Cannabis sativa
  modified_base (35)..(45): a, c, t, g, unknown or other
aaaagttcagggggtatgatttgatacatgtcaannnnnnnnnnncaaaaatcctaattagcctattagaaatatctcaattttaaaattaagagattatattatattatctttattatcctaatttttgtcctctggcttggcagtccttatgtggataaaatcagtaccacgtggtagtacaactcaccaataagaatgctaggttagtacctcaacaaacggagaccccaacactcaaacgggcatcaagtgataaaccagcttcctcatagaagctggccgaccctacggccgatcaacctctggatagcaccatggtcggccatcctgcaacctacaagggtctggccagccagggaaaagcctgcagggttatccatgcaattctacacgtggacacatgatttgggcttcgaattgggccctaaaagcccaatagaatagctgagtaatatctatgttcatgggcattttggtcttttgtaattaactaatttaatatgcaagtatcttagggtttcaactgtaaattagggttttaggcttcctatataaaggcctttaatctaacctagaaaacttaagttcagtttaagcctgataccagcctccaagctctaagcctaagtctaataactcacctcttcttcactctctctcacacgcccatacaagctatctctacacttgagattttctattcccaattcctactttgtatcctcaagggtgctatataagatcccacttatagtgatcaaaatagtattaaccctaggtattaatacaactaaaaggggagtaggtcattacccgctatcaaaggggggcaaacctctataacaaatctgtgtgttctttactttttcattctatttgtgtaacacgtggcaagcatcagatccatacgaccccctatcgattgataactttttgaggtcaatagtttggtactttcattgagagtgtgaatatcgtatctgatcaaatgcctaggttaatacaagaagaaccccagtcgcacaa

SEQ ID NO: 64881 - DNA, 864 bp, Cannabis sativa
ttttttaaaacttttttatggcagtttttgtaaattttaaaaaattcaaatattttatagagccaaaaatacatttgaagtttttgaatacgcgtagtaaactgaattatcaagaactctattttttgtactataaactattcgaaattttttaaaatttacagggatgatactgtaattataacgaatatcgctatgaaaaaaaaaattaaaaaatattttagtatgtgattttagacgtagatgttaactaaaagattgtaataaaaagttgtaagttgcactcgtctatattaaaatataaattataaaattcgtaatatttattaaaatccacaacatggttctatgtccatccataactccctactttctttatccttggtaacatatttattaaagtgtatttgaaattagaataatcaattaaagaaatgaatcgaattaaaatataaaataattgaaaaaaatattttattgtgttgtttactaaactgatcggtaaagaaatcgtaatcattttattatatttatataactaaaaaagataatcataatactttaatttgataaaattatcactgttaaaatatataattatttttttatttatatatttttaaatgacatatttgttttttttattttctttcttctatgagataattacacgattaattttagaaagtagacataaaaataaaataataaagagtgtcataaagtgcctaaaaacatgatatatattattgatgaaattgtagtagtagaatttatatattttaatttaactagatcatgttatagtattgacactataattaagtagtttttttaaaatttttcttaatgatctttttaagt

SEQ ID NO: 64882 - DNA, 660 bp, Cannabis sativa
gttctatccattggatgcatttcttatacatatttgttggattgattcagatttatctaatattttagacctagtattttttggatcgaattggatccatccaatgtttcagatctaatatttataggattgaattggatccatcaaatctaataaaaaaaggtaaaatttttatattttaattttcatatatacatacatatattttaagtatatgacaacatataatttaattattcatctaaattaaatcaaaatactaattaatttgattaaatgttggatgtattagatttttggacacttcatccaacatctgattcgatccaattggatattcaaaaataacatctaatataatttgatcacaattggatattcaatatttggcggttggttgtgatgggatggtcggttgcaattggattaggtgtatttttatgcacacccctacctaaaattaaataaaatctctctaattgaagaattataactcaaatgcccattttttaaaaataaggcccacattacatattatacatgtttatcaagtttttcaaaaaactgattattttaatgtaagaagtaaagaaaatataatttaaagagacatatatgaagaagacactcatatattttacatgattgggacattaatga

SEQ ID NO: 64883 - DNA, 818 bp, Cannabis sativa
aattaagttcggttagaagataaagccttaatgtatagtatttgtatagaatgtatgaatgacgaattagtttgattagaagaaaataaacattaatgtatattattaatttaaagaatgtatgagagtaagatccaaataaatattaatataaaattgaaatatagttcacttagaaaaaaaaatatgagctccgattgtcaaaaattaatataaatttgacacaatctttttataatacaaaatttgcatcaccaaataaataaattattattttttttataattacattatttgattatttaattattacatttagttataatatattgaattatatattttttcatttattttcttatatttttaataaaattattaattatattattaaaattttaaattaagtttataattatgcattatcataaaataattttttatgctaaataataatttttaagtggtatgattttataatatcactacaataaatgtcacttttgccaacatatttttgtgctggtaaaaatttagtattgcgctaataaaatagaatttacttttaatgtgtcgggaaaatagattggcaaatcaacgttggtattagaacttttgccagcacttaacgctggcaaaaatgactttttccactgtgtaaatactggtaaaatttagattttacttttaccagcgcaataaaaaacggtgctggtaaaagtgacatttttttttttttaaatatttcaattatcatgtatagctgccaaaaattaaaattagatgctactaagaaaaatagtgataactacttacaa

SEQ ID NO: 64884 - DNA, 1039 bp, Cannabis sativa
  modified_base (54)..(61): a, c, t, g, unknown or other
ttagaaccataaaaaccgaaaaccgaattttggatttttttttgtgtaaaaaannnnnnnnaccgaccgttgctcacccctatttgaagaaaagttcgggtacctctttgctgttttctcgggtgtggagaaaagaagcctgaaactcctgagcatgctctattttctgtgctggttttattctagcgtgacatcgtttggggtgtggtcgatgctccgttgatgtgcatatgggccaatgtagggaattctcctattactctttgacagactatcccgtgaggcttttaaagtgatgatgacaatcctttggtggctgtggaatgatgggaactcagtattatttggcaacaagcagtcaagattagatattattccaaacctagtcaataattatctcgtagagtttaaggagtatgatcgacaaggctttcatttgggcttgggtcttgcgaacccaggggtaaatcgagatacgcgatggatgccacctcctcctggatcctttgctctagcgacggatgcttcggtgatttcacggagaggctttgttgaattgggggagtgatacaggatgcagagggtgttgtttggttggcatggtcatcaggtgtgttaggcgatttctcaactaatgtagcggagctactagccattcgtctgagcttggttcttgcacatcagtttagtttcaatatctccattattaatagtgattccattgttgcaattagttggattaataagttttacattaattttaattttttcagtctattttattagatatttattatttattagctgttgttgacggtggttcttgcagtgccatttcgcgatcagcgaatggtgttgcccatacactgacaatctctgttactaatttaggagagtgtatttagacaaatactagtccttgatttttgagtagatttttcttaataaaatttttattttttttaaaaaaaaaaatcaatttgttgggttaagtgtcacaaatcatattgaaccaaatcttatattattttggtgtaaa

SEQ ID NO: 64885 - DNA, 1088 bp, Cannabis sativa
tttttcaataaaaagtaactaattgatatattatttacatcaaaaacaactaaaatgttattttttaaaactttcaaaagactgaaatttttggaagcgagatttttttcaagtttttttttttttttattttcaataattatttcagatttgagtattcatgctaacgtgacatactttagtatttgtgtttataattttatttaaagtatttttataaataaattcaattttaagtataatattgaaaaaaattttaaaaaatattcttttcaagtccataaatatcatatccagcataaaatagatagcaaaaacttatgattatgttcaactttaatggacatccaaagaagtttttatagtaatgactagtagaaataataataaaataggtcgggagtatatatattacaacaaatacttcactcaaaaatcatcttggtaaaataattttcttattaatatttgaaaatatattttctaaaattaaatcatcaataaggttcactatagttacttatgaggtacagtggattgttgtttttcagtccataggagcatgtgggcttcatccatggaaagagacacacttctcctccttccaaaataaaggccaatctttttatgctttgggtggagaaaactaatcgaaagtcatgataaagctcatgtgcattagatatattattattgattatgctaattaaaacacaatattaaagaagcaaaactgttccattggtgggatcataaactaatgccaaaaaatgctcacctgaatcactttttgtttggtccacttctcctatgatttgttgatgattgacacctggccaagctcgaatacatatagccatttaataatatactagtttaatctaatctttaatttgggtgcccttaatccaagggacccgcctctgaggaaatagaatcttattggtctaacaaatccatccccacatgggttgtagccaatgaaaagtttagtttggagaaagtcaccaaaccttttatgatgttggcatccaccaatttttcttaattatatattattagatcaaagttggtatatatatatatat

SEQ ID NO: 64886 - DNA, 579 bp, Cannabis sativa
aaatgatacaataaattatatatttttttgtagaatagtacaaataagactttaagttcaatttttcacaattttttttaatataataacttaaagataattcctgtcataaacagatatagaaaatgtaactagttttttcacaatacctctaaatcgagttattattaaattttattttgataaaaaatcaactcaaagtaatattttagaaaatacaaaatcaaatttatgatttaataaaataaataataaaaccaataatttttacataataataatcataatatttaccttaaaactataactttgactttgaagttaccagaaggccttgcttgcgcccttttttcttctgggcttcatgtttggtaaacatgggccgggttggacagatttggtgtcacaagggttatttggtgtcactgtttaaagaagtgaactataattagttgtgccataaaattagctttagatgtagttcatctgtttcttattaaaataaagcaaacatatgtacataaatatatattcctagtataggattggagcacggataaaatgcctcttctgttctgt

SEQ ID NO: 64887 - DNA, 674 bp, Cannabis sativa
tttactggatatcaaactttttttagaaaattaccaactttatattttgttttccaataaattatcttattgttcataagcatgatataattaatagttaattatgaattttgttattatagtaatttttacagtatatcttggttagaagaaaggaaatttagacaaagtaattaaaatcgaactatttttatatttttatggattcattattttttcacacttacacagattctgtttttttttttagaaattttttacttttttttttaaatagaaaaacaaatttcgtatttttgtaaagaaataaaataatgtaaaagaaatgtaaattcttaaaatatgtctttttttaaagtatttatgaaatagttcctgaaacaaatatagttggttacaattcaaagaaaaaagtttacaattttgcaaaattacattatgtatttatatatttgtatataaagtaggggtgaattcgtgcataaatgtcacattcgtgtcgtattgaagttttagtttattgaaaaactgtcaatacaaacaccgaaacacgtcccatgacatgaaaatattataaaatactcacatgaacgcgacttaattaaatttcgtgtcatatcgaactcacaaaagtttatgtcgtgttaacaggttgtaagctaaattgttatttt

SEQ ID NO: 64888 - DNA, 1314 bp, Cannabis sativa
atgtgaggctgaccaggcgtctctttagttttcagctaattaatgctctgacgcaattaatgcttcgaaactcggttttctaagaccatgttttgacggttacacttgattatgtttgattcccgatatttgcttttggggggaacctaggcctctaaggtgtttgaaatgattaccctttttcattttttgcttataaatagggatgtacatccttcacaaattcacttttaccaacttctctatttagcaatctcagagcaaaaaaggaagttttcgttttaagtctgtcgtgagatttccacccaaagtatccgagcagcttcatttggaccaaactcagacgtcgaacagcgagtaagttttcaattctttcctcttttattttgcatgcttaatttctgggttccatacacacgttcttgactttgttgtagaggataagtagaaaatctaggtttaaaactttgcgattttctttgtaatgatctgtgaagcttcgtgattgatgacgtttagccttttattgcacattgtctgcctttcaccttgcttgttcaaagcttcgtgaaacttggccctaaacccaaaaacttcaaacttctgggttttgacttatttttgaacactttcattcttttaatctgttgagtactcttggttggcatatttgcctgtttattgttcgatatcccgaccaaacactcatctcgcgtgttgtcttttgtagatgaaccctggtgagttttgaggaagcgaacaccaaattgaccaggatttgattcaactcctctacgaggattatcctcatctttgtgccagtccgtcctcttcaagtgacaggctctccacttcaaatttttggtctaggcataggatgatgactcgaacaaagcaaacgatgcgtaaggttaatgcgtccgaccctcatgtggcccagcacgccactttacccagtaccgaacaggatctgcccattcaggaagagggggatcatgaaggggacgctgaagtccaggagatagaggaacaggacgatgttcttcctggcagccctttcgaggcggaggaagaggaggaggctgcacctctaaaatttgggggatacaatgaggctggggagccagtaaatgcagacagcgatgtcctggttgaaagagtggactacgtcaccgaggagcttactgctacagtccctcacaggaggcaaggttccttaggtgccaggtgggtgagccctccgtccaaagtcactgcggcacacttaagtgacttggaccaatctggctatctgggcgaactggaatgttatgt

SEQ ID NO: 64889 - DNA, 871 bp, Cannabis sativa
attctcattcttatatttttattcctcccaaccaaacgcctcctaaattgtttccttgtatttgtattgataagctttgtttgattcaattatgtgataccgttcttccactataacacaaaaaatatatatttcatcatatgaattcattttttttttcaaattcaatcacacataacattaattcaattattaaaactcattaaagtttgataagtaatataaatttcacaacttacatactgatcactcatgagcaatgtgaaactaatatgtgaaactaatatatgctacataaccacataactatacgtatatataaaaaaaatgatgaattatataagagatttataaagtcaataaacaatatttttaatattaattaactattgtgtgaataagttatactacattttcaatatcaatattttagagacatttgatataattttttttttttcaaaatttgttgtatattctgatctcttagcttgtatttatttttattaggagatattcttttttagttatttaggatcattattagaagatataacaagtatgttatctaaattttaagaaatgttcatggtctatgtacattgaacgactaatatggttgtattaattgtgcataaaattaatgttgtgtgatgtgacaggtctcttcaaaaaaacacactatttcatttaaagggaagcaaaacagaagacataacaaaaggagaagaaaaactcaaagaagaaatgattcgtagcagttttggaaaaagaaaaaacaaatacttaagcagctctaaaagcaagaagaggaaagcgtgttaaagagcatatgagaaatctatgttacttaagcagctctaaaagcaag

SEQ ID NO: 64890 - DNA, 1135 bp, Cannabis sativa
caactttccaaataggaatgaatataactgaaattaacaaattttccaactgatttagatatcaaaataggtttagtttagagtggattatttaccacatcacttttattatgatttattaatgtctttaaactaaaagtcaccgaaattattgaaaaaatgcacatttcataaagtaaagtaactaagaatgagtcgcattttaaatactgaccaaaataatatgttaccaaaaataaatatattattattatgtaaccaaaataataagttacatcataaatgttgtataccaaaataataagttacaaaaaggtaactaagttgataaattatgttatatatgaaatgaaagtcgacccaacctgaccttatgttgcctctgccttattcttttcaaattaatatagatcaagtgcataatttaggtttaggtttcatctaaaaaatgaaaatatttttgacaaagattttggtcaactaataaagtattgatcattgaagaaataggaatttttttttttttttaacatagaacaaatagaatttgttcctctcaaaatatatacttgtagaattttaccatttatttggaccaatataattataacctgtgtacatgtagttaaagttggcaaataagaaagaattttcaagggaaccttatatttgtaaatggaagtagaattcaatagtattttgaataaattttgtattaaatttggctaaaaaagatgaatgatgaatggtatatttagcttaaataatactaaaattggctccaatacattatgggcaaaaaaaaatttattttaataaaaaagatgtaaaaaaagtcaataaaatatgatattttttttattgaaagtatataaaaattatattaaatatataaataaaaatataaaaaattattgattgcattaatgagtggtaaacgagtaaatgaaaatgtgatatttattgtggtattaatttaattcatattatattttatgttaaatttagcacaatttttagcttgtgttaaattttaactaaattataaatcattattgaagtttaattttatgaacataaattaaaaatggatatatttttagcactccattaaaaatactcaaaaaaaaaaaaa

SEQ ID NO: 64891 - DNA, 1075 bp, Cannabis sativa
gcaattgtactcaacatcattgactattcccgcgaaaatacccttaaaatactcgatgaattcacacccaatagcccctcggccagtaatccaaacattatccttattcaagatactctctatggcatttcttctgcctttaatggcagccgagaggaagaaaaatttagaacacttatctccatcctttagccacgacactctggctctttgcttccaatatatcgcctttctttctagagattcattcaacgctcgacgaatgtctcgttcctgattccagtcccgggaaccagccgggaggctttgaagagagttgagcttttgttcaagctcttttatggtcacatccatctttccaaattgggaacgattccagttcaggagggccaccctggtagcaccaaccttcttaaaaaggcgagagggagcccaattatgattgaccgaattccaagcatgggctactacaagattgcttctaacgtcacgagtccatccttcctcaaatttaaagcatctcttgaatttgggctccaagcccgtagagaagagacaaagaggtctgtggtctgaattactcgtatgagcagagaaaagaatagcctttggaaataacttgatccaggccccattcacaaggcctttgtccagagcagatttcacgtggtgtgtcccagaccgatggttatcccaagtcaaagagtccccttggatgggcatgttgataagtcctctaccctcaatcagagtagaaatgatcggaataaagggatcacggccagaggaaccttccctttcagatcttctaagaacaaaatttgtatctcccaaaattaaccatggcccgccgaacctatcccctagtttcaataactcaggccagaatttcttcttggcattcatgtaaggaggaccatacacacacgaaagaagccacggggaagacggggggtccgagtacactagacccgagatatgattacgcgagcaagagatacattcaaaactaaagcccgccttccaagccaaaataattcctcccgcattaccaatagacggaacacaaatatta

SEQ ID NO: 64892 - DNA, 1237 bp, Cannabis sativa
attaataaattaaattgtatatattaaagtccaagagacatgattggattatgttgaaaaatcattcatgcaatttcatctcaaaactaattagtgatggctccctcaaaatggtggctatttttttgtgctcgtcaatcttgaatcgtatcagagtgaacatggtcattgtctgtataggtgatcacgtttaatattcaaccacaccaacaaattcaggtaagattccgaccaaatagcattatcaagccaaaacttaattaatatattaaactttattgtataattaaaattaataatgtagtttctacataaaattatctgtaactgattttttttttccgtaaaattagatccacattattatatgtaaaaaaaacatatgtatctagcattttatttagagtttaaaagaataccttttttaatgaaaaacgcatacttgatacaactagtaaagaggcaaatgactagttaattttcattgaaaataggctatttatgatatgttaatttgtaatagtaaatcataagtaaagtaattatattgttataagcaatttcaagattaaaaatttagaaataaaaaacagtaaattctttaaaaattaataatataggacaccaacaaatgagttggagtcaacttggcattttatgtttgttttacatatttaatattacttatacatcaaattataataaatgagactcatgagtttaaaatttttatcatacataaaatatttcttcacttattagaattcgatcacttagcctggctaggccggctaatgacttaagttagagatgtatactttggtcatttaggttatataaatgtgcactgtgtgaagaacataattatagtatatatatatatgtatactaattacattccattatattaattatatatatcataggtcacatctagtgctatatatgggaattatttttccttaattatatacactctgatctgattaagaaagccacccaaagagaactttatggggaaaaaaatattaattattaaatagcctagaagaagagaagaccaaaataaaataatagcattaattatctaaaaaaaataaatcagatattacctccctttgtttgttgaggttattttattggcatgtatagctagttataggacttgtgattgcattaatttatggattaattggatgcacaattagaaaaattatattgcgtatacatatatata

SEQ ID NO: 64893 - DNA, 1207 bp, Cannabis sativa
  modified_base (1155)..(1155): a, c, t, g, unknown or other
ttaccgagattttaagaaactaaaaatttataaaaataaagctaaagacgaaataattagaagatgaagaacaaatgtatttttacatggttcatgcgttaatgaaccttagtccacgagacagttttaaaagcttttagctatgcagtttttacaggttcatatgcttttttcagtttgtgaaccctttgcatggatgagataataccatatttattggtagccatgcttattggtatagatacgagtcgtactagggtttattgtagagaaaagtccattgatggggtaaaagacattaatttaacattcttgtaagttatcagcctgggtaggtgaagcccaattgtaaaaagcagtctgtcgtaccatgcatggtactattgacaatgacaataggtgttatgcaccgttgttgggaaagaaaatgtcaaagtagtggtgcgttccacaaaaggtaaccatctttttattgtgagcctttctaaaatatggcagagggggacaagtctctagattccttgggatcccctcagagaggcaccatgtaagcatcattcaggactatatgctgtctcgggtcctctttccacttccatttttggatgacccttggtggtgtctcggtatgctttgagaaattaccgtacatttcattggtcaatagtggcataatcgttgtctttgagaagctcatgaatctagagtattacgtggaatctggacttatttttgccaaggaaaaagaatacttggtaaatcttcttggaccaaatgacaggcccaaaactcattaaaccttggatatatgccacatgtcttccatttggaattttgaataatatttaaccctaagccttcattttctcgagagttgtggaggctgtccgcattgatctatgttttccatgcaatctgaatctagccacccgactagaattttcgtattctggtgtcactggacatgtgacaccatatggctgatgtgtggtgattacttgagtctcgtgggtgtgtgattcttaggatattgcactgatagtaggtgcatgtcagtgccctcatcgaggcaaattttgtcactatgagaaaacccttcgattttaccgtctgcctttgatgcaactgttggtatttctgttgggttttgtgccntaaataaaacccatttcaatatataatcagatttaattaataaagatcagaa

SEQ ID NO: 64894 - DNA, 697 bp, Cannabis sativa
gaaccgctcttccgatcaaacaccttgtaccaaacgccccttatactctattaaaaatgtaaagttattttggtaaataagaaagattaaatatactttaaattaaattatttatttaattatttatatttgtaaagttataactttcttttggtaattattaattatgtgaaaagaaaagttttgatgactaagtttcgaagagtcttctaaagaaagttttggattgtcttggtcctcaagttatcttggtgcccaagtttgtttttcatataaatatgtgttttgtgtgtgggtgaggtgtatgtggaaaaaaattgtaagttatgaaaagagaattgtgtgtaagtttgttgtgtggttagagtgagggagaagaacatgatgtactgagatatagatggagagattgagatagaaagtgtgtgtaattttgaaaagataagtgaaatatagagtaaattgctttgattcatttctttatcattttgttgcgcttgaagtttattacttctcctattatccaaatttttgtaagttagacacgtggaaactaaccgaggaagtcatgataatcatcaagctgattaatgccatcggccccagctcccgcaagaggcttatatcttcatcacaaggcggggaggcatggagcattaacaatcatggcatctcttattctaatgagtggaggcgg

SEQ ID NO: 64895 - DNA, 932 bp, Cannabis sativa
ataacataagtgaaagtctcaagccttgaatccctatttatacttcttttcttttttcttttttttttttgtaaggaaaaggttttcgtacatcgtttcatggatttcaaatccttgattgatatatgcaggttttaagcttgttttctaattaacaaaaatgaaatttgcgtactttgtttcactttggaattgttttaaagttgtttggcatttggtggatattaggtttatgcataaataattgagaggcatagtattagtgcattgacctcttgtgcggggcttatgtattaaatgtatcctcctgggccggagcaaaagagtctcaaaagcctatgtatgaacaaggcttaattttacttccccacttatgcattgtattatttggtctaggtactcgaactgataatattcgagattatgcaggattatataagaaagaattttttttggctctctcttagctctttgtctcttatccttaggaagcattatgatcgtatagagtaaattaagtgaagttattttataaattttagtttttcacattgttagcttgacaaatttgacttgtgtgaccaattttctttttataaatcatcgaactaagtttcataatcttattaattatgtttcttactatagattatatgggtgtaggcaaaaattgtaacttctcatattgtacctcatccaaaaaagtaatccataggctatcagtgtattaagttttcatgttttgtcatatcactgtactgatcttgtcttctattttccaatcattaagacaagatcttagggcctcaagtagtgatggagcatcgtgaggacacggaacatacttaaaactcaatatatgattgtgtaagttctaagaatcatcaataaaatgagctgttacagccatatatcccctcttctaatgattt

SEQ ID NO: 64896 - DNA, 1277 bp, Cannabis sativa
tgagattaatgagcttccaagtttaaaatccaacaaacacttttcacacactttgagccaaaatttgtgtttattcatcttgggtgtacttgctgtgataatcaactaaatatatatatatttaaaattttaatagtggttgtatgacaataattattggaagtagatgattaccttaaggaatgagaaatttgttagttagtgctttgaggtgtgagattaactctaaggcctattgtgttgttgggtccaagtaagttatattaaaatcgttggtgccaattctttttattataggcataggtcagatgtatgaaataaggtgattacatgataagattatttaattattagcccattataagtttaagcttaattattttattataattatgtgagtaagctagtacgggttagaatattctttcagtttgattgtgtacttcagccgttgagatatagcaagaaagtgtcacaagaaatttaaattataatagagaaagatcttatagttgttaatataaaaatatatgtacttagttaacataattataatttaattttctctaagtgtttagagaaaagaaatagagtacaagtaaagggataagctattaaatgcatgcaaattttgagataatcttatgatattaagatgatttaaatttatttagttagtttggtttatggtacacatgtagaatagggattacggatgagaatttgtgtagttatatgaaatatataatggatgttgcattgattttctgtgtgtgtgacgtgttaataggttttaaaagtagaagtttaggtaggatttgaaatttaaataaagatagaaaagagatttttattattattatcattagttaaatatttaataaatgtttgttccactttttgaggatttaggagtagctgaacctagggtctgtttgagtgatatgaattggcgtagcatatatgtatatatatatatacatgaattcataggataaagggaggagcagtgtgtcaatttaattatatcaataatcttgactgaatgtatgctttggtgactttcgtaaaagcgagagggagaatcatgaagtcttggtgtttatctaaataggtttatgataacacattctactggggttattaataaggttcagctaggtaatattcaagagacgactaaggaaaaatactctgctatctatactccttcaccataagttttcaaggatcaaagttgcaatcatactctttttcgagatttattaagagactag

SEQ ID NO: 64897 - DNA, 954 bp, Cannabis sativa
  modified_base (83)..(84): a, c, t, g, unknown or other
atccatgaatgccgccggggcattagtgagtccaaaagacatcacaagaaattcatagtgtccataccgagtacgaaacacanntgtcgggatatcttcctctcgaatgctccgctgatgatagcctgagcgaagatcgatcttggagaagaccgtcttccccttcagttgatcaaacagatcattaattcgaggtaaaggatatttgttcttaatggtaaccttgctcaactctcggtaatcaatacacattcgcagggtcccctctttcttctacaaacaatactagagcaccccaaggtgagtagctcggtctgatgaatcccaaattcagtaactcttgcaattgtatcttcagttctttcaactcagcgagagccattccgtacagtgccttagataccgaatccgttccctgaacaaattcaatttctcgggtaggtggcaatcccagtaagtcttcaggaaagacatcgaggaacttgcataccaatctcgtactctcaggccctgatgtcacaggttggctggtatccactacggtgactatgaacccccgacaacctctgctcatcaggtctttagctttcaataatgttattctcggtattcttgccccctgaatcttacccacgaacaccgctgggttagcactatcaggctcaaacaccactatcttttgcttactatcaattgtcactccatatttagacaagaaatccattcccaggattatatcaaaataagatagttgtaattcaattaaattgacggtcaactcacaactgtcaatccaaaaaagacaaagaccgaatccacctggtggatactaaaaggtataccgagggtaacagggttccaaacctcgaagcataaatatcacatggcttgtgaaaactttctatcactctacttgacacataagagtgagtagctcccgagtcaaacaacaca

SEQ ID NO: 64898 - DNA, 589 bp, Cannabis sativa
ccagagggaggagagacctttcctcaaaggttaaatagcgacaacaatcagatcccagcaatcaccggcatggggggccggccagggatctttggctcagcaacaccccctattgtgcagccattggtcggccagccaccaacaagagtacccatggccggctagagtacatcacttcctccccaaggggagcgaggtgcatagaggtcaatctttgattggcgaggacgtggaaacacccaaaataacaattcagaagtgaaactaatcacttcaggcatctaaatccaccaaattctagcaattggtgtgatctacccctaattaacacacagctagcaccagtcgatcgtggaatcacaagcggcctaaccctgcccaatgcaggtctggacagccaaggaggcatcacgggcagccagaccctgccctttgcagatctggccagccatgaaggagtactgggcagccaaaccctacccaatgcaggtctggtcggccaagcacagtaactgggtgtaagcctggctggcctaggccaactcccatacttgggaatggttggccaaggtctgcagggcctgcctgg

SEQ ID NO: 64899 - DNA, 576 bp, Cannabis sativa
tgaagatgaagcataacatcatgcgtgacaaagtgagggtaagtattgttaatcatttttctccttcaaaagtgaaaacacaattcttgaatggagaattacatgctttctgtgaagatatcaatggtcgactcattcaaactcaatatgaaagacagacgttaagaatgagctttgtagaccataacactcgaccctacaaggaaacatcacggtatcttgctgacttgttacaagttcaaggtgatttatgcaaaacatttatcaaatattcggaggaggaagacttaatgtcgaggaaaaaattattccatgtagatagtgaaatcaattatcatgagacgttacttttcgttcacacgaacaggtagttggttataaagctttcatctaaatgtttatggtacaacattgtatgtctttgttaatgtttttttgaaagtcggctactttgtcttaaaaacatttgtctaaaaagcttgtgcgtgatattgtatttatttaacatataaatcttattaaatgatccttgagcttgtaacttcttccaatattatgttcttctaacttaaattc

SEQ ID NO: 64900 - DNA, 2034 bp, Cannabis sativa
acacaaacactaagaaatatctttattaaacactaagtggattaacagttcaagctcagtacaatgctttacttctcggttggagcaacaaccattaatatttttattaaacaccaagtgtgttatagagttacacagttcttgatcaagaacaatagataattacaagccttactagtatttataggcattagatatcctaacagaattaactaactctccctgtcgagctacatttgtgcagttgtcactaacaactaactgtgagttgaaaacaatgactagtaacttgtaaccatcatagcaaatccccaccctagtttcaagttgctattgcttgtaattacttcaagcagtgctgctattcctcagccctttagggctcaaatgactccaattccaatcagctttaggtaatgctcaaatttactgcttgacactactttagtaatcgtgtctgaaggattgtcctctgttggaaccttggcaattttcacagcttccttctccataattgcccttatgaaatgaagcttttatgtctatatgtttagtacgttcatggtgcacacaattcttgatgagttgaattacactctgattatcacaacgcacagtgataactttctgtttaaacctcaattcttccatcaaaccagtcaaccatagtgcctttttgatagcttttgtcaaggccatgtattcagcctaagttgtagacaaagtcactactttttgaaggtttgttttccaactgattgcagtaccaaacatgttgaaaacatatctagtaaaagacttcctagtatcaatgcaccatgcataattagaatgcacatatccattgatcacattcaagtacctcaaaatctatttcagtgcttctcaatgttcttttcaagggtttcccatgaatctacttaccatgcttagagcatgtgctatgtcaggtctagtgtggaccatgacatacataattgatccaactgcactagtatatggaatctttgacatctctgccctctctgtttcttctttaggcatatgagttgcacttaatttgaactattgtgcaagttgagcggttactacctttgagttacccatttcaaaagtttctagaaatttttggatggaacttttctagttcaagtacagaaacctctttcttctttctcttttgatgtccatgcctaaatttctgcttgcagggcacatatccttcatttcaaactcctttttaagttggagtttcaagtgtttaatctcttgcatactcttacttgctatcaaaacgtcatctacatatagaaacagattcaatctatctcaatttatttatctgaaatatattcaaggatcaaacttgcttcttttcaaacgtatcttagtcacatactcatcaaatctcctattccattgcctaggagattgcttcaaaccatatagggacttcctggcacaccatgtgctcctttccaacccgttcaaatccttcaggttgtttcattagttttctttcatccaagtttccatacataaagacagtcttgacatctagttgctctaattctagattttgacaagcaactagtatcaacagaattctaattgatttgtgctcaacaacaagagaaaatacctcatagtagtcaaccctttcagtttgagaaaatccttgagcaaccaaccttgctttataccttgcctcttatacaccaagaatgcattccttccatctgtacacccatttgcagcctattatctttgcatctttaggcattagtatcaagtctcaggtgtgattcttcttcaatgagtgcatctctttagacatagctccattccatttccttctgtccttctcattgcttgtgcgtagctaataggctcttactgcacaatctgattagcaacatgaaatgcaaatgcaattaaatcagcatgcacatacatggcaggtgtgtttacctctctccttattctatccctagctgtgtttcagatcatcttgttcaaaattgtcttatgaat

SEQ ID NO: 64901 - DNA, 893 bp, Cannabis sativa
tactacttgtgctggtaacaccgtaatgtactttttaaaccacatacactataccaatgcactatgtaccatttttccgtacaagtgttagcatgcatatacattaacacatacatacattcgcatattcatatcacatattatacgttgttcttacctctttgccgaattcaagtgagttggccgacctgaatggaaagtctcgtgctggatggatgccctaatcacataacataaccaggtaaatcacatgtcaaaaccctaatatggtaaccctaaacctacaacttaaggttctgatattactaaaaggaatcccaataccctaggaaacaggaaatcacccaactaagacaccgaagtggacatgaatcgagaaaacgagttatttaaggaatctgccaaaatcggttaactggttttacaagtcctggcaaacaggttaaccggtttgcaccaagtttccccaaacaactccaaacttgctcaaaatttgtccaaatgccaccaaactttccagagtacctaaactgagcttacacaacatattccaactaatagaactcaaaaaacactcagaatcaaaatatgccattaaagacctaagtttgagtttccaaacctaaacttgtccaatttctacacaatacaacaaaatcagcaaccgaaactcaatatcaacttaaaatgaacctaaaaatcgaatcccaaacacttgtaaccctaatagccacaaaaactcaaagttgcatgctataaccaaatagaacttaaagaaatcacgaaataagagctttatagggcttaccttggttagaaccacctcaaatccttgctgaaaacacaaaaagcatcagaaaatcctaagtgtttcccctggttttgctttagct

SEQ ID NO: 64902 - DNA, 1215 bp, Cannabis sativa
  modified_base (1186)..(1189): a, c, t, g, unknown or other
taattatttgcaacataagtgtgagagagttatatcttaggtacatttttcatacaattataaaataaagttttaatacaaaattatattagataattgaaaaaaaaaatacttacaaatttaataccatacacacaacgaatgataataatatatcgtaataaaaatatatttttttgagtacataataaaaatatcttaaaatcttaatttttgagtatcaaagccacaaactctaatatacataataacctaaagaaagatgataagttattttcttttcttttcatatgaaggaatatatataataaaacattgaaattaattttagatcaattattctaaaataaataattttgttttatttaatgaaaacattaaaaggaaagtgaacctcaacacaaaataattactaaataataagtatatagttagaaattagaaaaatccagtaatacacaagtattaaaaaaactgagttaaaaagtcaaaatataataaatatttatatagaggaatgaaaacgagtatattattattgtgtaaaaaactattgtaatagtagcattgtataaaaaaaaagttgagggggccaccacagtcaataacatggctccactcctgctcatagtgttgtagagggaatagtttgttgttgggcaaagtcctttgagacttgtctgggcctagagttgtccgacaaaattctttgagaattgaagcctttacgcatatattctgcttggaaaaagtcaaccacaacttcacaaaagttttaccccaaaatatgtcagtaagtagtatttaaaaaaataactaacaaactttttgacaaggtgcaaatcttaaatcaaatcaagtacactatattgagaaaatgtatttatagtaaaattatgtatttcaatatatatttgagttaatcttaaagttagcataaagcatgaagaaaataatgtgagagtgatggttcaactacattgtgcttagaagagattttgtcgagccatatgatatgagaaagaaaaatactcaacaatctttaaataaataaataaattcaaaataatatcatttcaaacttttgtaaattatgatcaagtgaaaacttgacaaatcttttaaattgtaaaagatttagaaagaataacatgtagctagggagataatgttgggttttatgccnnnnataaaactctttacaatctgattagt

SEQ ID NO: 64903 - DNA, 810 bp, Cannabis sativa
  modified_base (347)..(360): a, c, t, g, unknown or other
gccaaaaatggaattaacaatatactttatataattattaatttttttgataaaaaataacttttttgaacaaaaccaaaaaaaaaaaaaagagagaaaataacatgtagccatgatccatattaaataatatttcacataaaatcttcaaaattaaatcacattgcatatgagtgtaagcctatctttttctctgttctgtaattgaacacgtgccatctctccattcgaaccttctctcactctacactctacaatctttcaaattccctgcttaatttgtcctcttcctaccaaaacctgacacatgtttagctctctctcattttataataataataataatnnnnnnnnnnnnnntaataataataatggttttttttttttatttttttttaatttttacactcctaaatattttttttttttgtatttttagagaattatatttagaaacttctattgtaactagcactgtaacttaaatcgcaacaaaaaattgtatagaaactcctgttgcaactagcgctgcaaccactttagaaacccaaaacgtaaatttgaaaaggaaaaaaattaaaaaaaacagtacataggataattccccttaaaataatttttttttttcagaaaataataataaattttgaaaactttatgatacacctatgtattttgacattttagaaaaaaaatttactacttttttttttcataatagtatacagtgtaattagcagtaaataccattttaaatcttgtattttataaaagttaccaattagaccctttgttttgttaaatgacaaa

SEQ ID NO: 64904 - DNA, 570 bp, Cannabis sativa
tgatgaaaaaaaaaatatatttttatctgtttgtactttaacacatttcatgatgctatttgttttgtgtttgattttaccattatttatgattatatataagaaaattttacacaatgccccctttggatacacccttatttgtttaggtatctagaaaagaaatttaatctaaatttttttatagttatatacgttatagttatttaagacattttataaaaatttgagaaattcaaaaaaatttaacataccaaaaataagattcaaagaatttattgcacacatcttttttattttatacacatgtaaaatagatagtttggacattaaatttttatattgtgaatcatgtaacactcactcttggttgttccctagactgacaactggtcctacagaccaacacaagtatttccaatatgctttgttcgcactcgcacgctttctaagaaaacttcccaagagttacctattttaaaattatcctaggtcaagcacgcttaattatggaattctttcgtgatgggacaagaaaacaagacgcgctttgttgatataggcaatacc

SEQ ID NO: 64905 - DNA, 905 bp, Cannabis sativa
cacttagtgtgattttttagtgtgatttttgcgtgtgatttttgcccattattttattcttttttaattaatccatataattaaatcctgcaccctagttgaaatgctataaaaggaacatgaggctctcattctcatccaactcaatccaaccaaaaagctagttttctaactctattagacaactagtagatgatagactccttcatagagattttgaactcctcttgctgttcttccatcaaattcaaacctttagtgatagagtaccatgaccacacatagaaattcaagtacttaatcatagtgcggaagacgatggttaacaaaaccaaaggagagaatgagatccaagctcagatcttgttattactctacgacataaaggaaaaagggttcgagatctgagcagaaggatctgccattagtgtaagattttctaaactcatcgtattagagaattcatattttgtgtgttaattaaacatacatgttagtaaatctagatcttggtaaaatacgttccaacatgaagacgtatcgaacccccagtgatctttcatgtacggaaaaacttacgtgcctcatgagaaccatgttaattcttatggtagacttttgcttccgtgaaaaaaggctaaagttgcactaaaattcaagtgatggtttcatgttaaagaccaaaaggtggtgaaaccccacgtggcgtgtgatagacttcaagcagtccttctcttccaaaaaggagggttgaagatgtattgaacccccagtgatcttttaactaaaagtttggcaaggccaaaaaattatcctccataaccgactaatccttgcacccaaaagcattagggaacatatataatttgcgtagttccactttgagctagtgaatctaggagtac

SEQ ID NO: 64906 - DNA, 926 bp, Cannabis sativa
accaacaagattttcttgaaggaatctttatattcaagatgagtgcggaacaaaacttagatgagttcttaaggatgcacatagagttggaaaactcaggggaatttgaagctttgagtgatgagaatcaagctataattattctcaattcactgctagagtcttacagggaagtgaagactgcaataaagtatgggagaatcgagattactcttgaagaagtaatctgagctctgaagtctaaagatttagagatgaaggtgaagaaacctgtcaactttaatggagatctaaatctaagcagagggagacaaaatcagaagaaaccatggcaaaatcgaggaagaagtaaagggaaataatcataatagaggaagattaaactcaataggacctaaacaccctaatggaagctatcattgtggaaagtgacacacttcaaacgagaatgttatttctacaagagaagtggtagaaaacctaattcagatcatcaagaagatttaaataaacaaaacaagaacaataataattatcataatgccaatctcaatggtagttataatagtggggatgtctatgtggctgcatcacaccatccacctctttaagttcacatttgaccatccacctcttcatcgactaagttcttggatggatactgcttctgaatccaagagatcctatcttcgagattatggatcacaccatccacctctccaaaaaatattctttttccatttgcaaagaaaagtaaacttaaagaggttttgctaccaaaaagaaaaaataaggaggttaaatgtataaaaattaaaacataaagagctttcgccgcaaattccacttaaaaatattatataattgcattagtattctattttttttctttccagattactccaaattcccaaaatttctctgta

SEQ ID NO: 64907 - DNA, 1376 bp, Cannabis sativa
attagaattctaaataagactatatcttatttatgagttttcactaagcaatgacttatttgagaagaaaagagatcttagggattgattattagaaaagagactttgaaaggcctaattaataaataagttaagtggtaattttatttgataaattattataattatggaattgatagaattgacatttatagatgtacaattaaaagatgtcatttgagaaaagaaagataagtttcaaataaaatgacaaaattgaaactcaataggcccatgaggaattcaaccataagggtttaataaagacatttatttatatttttttattttatttaaattctaaacataaccctaatagatatcctataaatagaatatgttggcttttattttcaaacctgataacataacctaattaactctttatgagacaaaatagaaaataaagagagccagaatctattttgaatttctcttcttctcttattgaaattttcaaacccttctagtgattgaggagttgcccacacaattcaagttaatgctcaagatagtgtggaagactgtgtagatctatcaactgaaggagaatccaagttcagatcttgatcatactctacaatagaaagaatcaagggttagagatctaaatggaaggagtcatattattctgctaccaccattataaagtttcttatagctttatatgtgtttatttaattatattagaaaacttatattcatgttgttagattatagtttacaatcaaacatacttgttagtcaatctagatcctggtaaaataagtttcaacaactagtatcaaagccatggtaataatttattttcatgaaatatgaatttaaaacgatatttggttatttggatgtgttcatgatggtttatgtgtgtttaatgattgattgtgatattacaaaattttctataataaaataatttttaattttttatctggaattattttgattgaaaagaattaaaaaaaaaaaaaattatccttttatggaacttaatttggattaaaattgaaaatgatataatttttttaagtatttaaaatttgactaggatgaacaagcgcggaaaagggcattgtcttttgccattttttaatatttttcatgttttaattttttttaatgaaataaaagtcaaatttcggtagatttttatgtagaatcttattttttaaatataaatctaattatcagattaaaagtaatttttattaattgaaattgattttagatatttggagactttaaatttaaaaaattaatttttctacaaactttctattatggttattttaaaatttgattatttattgattttacttattgtttaaattata

SEQ ID NO: 64908 - DNA, 671 bp, Cannabis sativa
cacctgaatttcaataaccatgtcccctttagcagatcgtagctccccattctcaagacccaatccagtagccacgtccgagagttcgaccccagaggagggactcactctagtcgatcgcctttgatgaatcctaggatacgactgcccctttttcctccctctcttcttcttctccgagctagcgttcctaggggttaaagtctgttttccttcagtaaacaccatagatcccccgtccaaggaagaggaagaagtcaaagattccacttgggccgagaaaagaacaggtgtcacactcccacaagccttcctctttttattattactacacggcccaacatcaataccagcaggtgaaatcaaagtctcaggttttccattagattgggccagcccagtggaaatggaagagcccagtaaaagctcagccaatttctctaccttatctgagttgggcctaggaaggataacatgctcaggatgttgatgaggtgtcctggacttgcaaatagctgcatggggcaaatcaaccatttgggccgcagttgggcccacattgggcattaaagaaaggataacatattcatcatcagggtttttttccaattgagtaataggatggttagagactacctcaaggggattaaaacgtgtggatttaaattttt

SEQ ID NO: 64909 - DNA, 1616 bp, Cannabis sativa
agcttggacatactattgttgattgtttttgtcgatttgataagagctttactcgagctgttccacctgcagaaactcctcaatgcaagctaatttagcacataccatacctgctgatgatggaaattggtatccagactcgggtgctacaaatgactgtacaccttatctacaaaacttgatgaccaatgcagactatactggttcagatcagatctatgtgggcaatggaataggtctgtcgattaaacattgtggtcaaactcttattgcctctaataatcatgctaagcctttatttcttaaaaatttactgcatgtacttgagataactaagaacttgctaagtgtttccaaatttgctcttgacaacaatgttttgtttgaatttcacgctgatgcttgttatgtcaagcaccaggttaccaaggaaatcttgttgactgagatcttccacaatggccagtatacttttgatccaggtcatttgaagatgttgcctccttcccactcctctgtcactcaagatgttcatttctccagtccaaagtctgcccttgttgtaaccagtgaccctgttgtctcagattccagctcacagatttgctctcattgcactctgtcccttgtctcagattttgacttgtggcacaagagacttggccacccttctcacaaggtggtcaaatctgttttacaatcctgcaatatttcttgtaataaagcttcaactagtgtttacaagcttgttgcttaggcaagatacacaaaatgccctttcccaaattttctaatgcaatgtactcaaaatctttacaactgattgtgtctaatttatggggcccttcccacaatttgtcatataatgggtaaaaatattacatgagctttgttgatgcttttagtaggtttatttggatttatttgctcaaaaacaaatttgaggctttaaagacatttcttgctttcaaaacagaaactgagttgcaattgggtaagaaaataaatgtgtttcaatcagattggggtggtgaatatagaaattattctaaaccacttagacaagcaggtattattcataggcacccttgtccaaccactcatgaacaaaatggcttaattgagagaaaacataggcaaatagttgaacatgggctaagtttacttgctcaagcttctatgcccttaaaattttgggatgaggcttttaggtgtgctgtatatttacataatggattgcctacccctgtcctcaatcaactttcacccattgaaatcttgttcaaaacaaaacctgtctacactaatctcaaagtgttttggttgcctatgctatccaaatattaggccttataatcgacataagttagactttagatcctctccttgcacattttttggatatagtcttaaccataagggttataagtgccttgattcaaatggtaggttgtacatctctagatatgttatttttgatgaattcaagtttccttatgctaccatctttagagataccaaaccttctcaatctgagttttctacatccagtgttattcctattgctcccattaattacactgttgagtctctttttaccacttcatctccaccta

SEQ ID NO: 64910 - DNA, 2167 bp, Cannabis sativa
caccacatattttcatctacatatcttttgtttatgaaactatcagagtttgtaatgatggactgactatttactataattgaatatttatgacactaaaaaaattattgggtctatactactacttacaaacttaaaattttaaatacagtaatatgatgaatatatacaatatggtacctttcatcttcatccttgaacttgaaggagcgcaattccctcccatcttctgacttcaccaccatcctgcacagctgataccatgtacaagttcaagtaaaacaaaccagtggcacccaatactaaggtgatcactgatttacatatttttagcttaagatatgccaaattaggccattttcaatggcgagtcataaattcaaaattggtaaagtaatctaaccgaatttcaaaagttattctatttatgttgatgtctaccgtgttccactaataatactatttttctattaaatttttatatttaaataatataataaaataatataataataaagaacataatataagtgtaatttttagtgttatctaacatagagtttgccataaaaaagagaactttgtcaatatcaatgaaaaaaatagagatgtgtaaatatagtgtacccttgaatttcaaggaattgggttctgagatcattgccaactccaattgcatccaatactctccaaccattcttgaaaagggttagtgaagttccaccagtccttagtgactcagcttgctcaagcaccaatgatcgaacccctagcctaaacaatctcaagaacacatttttatataaatacaattgacaattcacaatccagacaatttaattctgacattataaaccatggaacctgtggagggagactgcggtggcgaggccagcgattccggcgcccactatgacaacatcctccttttgagctttgattattggtttgagtttggaacgattgagtgagagaggtgggttcattgagagtgaggagaatgaagctgaagccatggaaagagtttgttgtagtaatgactgagtggctctaagccatgtccacatatatatatgagataaggattggatcccccaacaagtgggagggagagtagtgaaactaataatattttagggaaagagttatttgcaccataaatagttaagtttaattaagatggtaaataaatatgtaagtttaatttttggcagcaataataactaacttatatttctgtaactctgtaggtaccgagttgttaaatattaagtaaattgtcacgtaacaatatttgattggtccaagttataaatttttaattttttttttaaaaaaaaaaaattatttgtactaataagaaaatgatacgtggctaatgacttgaccatcaacagatatttacaaaattttagaaatataacttagatattattactgctaaaaattaacttaagtatttatttataactgggagttaaacttaggtatttatgttacaaatacttaaatatattatttttaaattaaataaataaatatataaaaaagactattttcttagttacattaggtttatacatttttgtaacattctcaacataaagaaaaagagttacatagataggactacattaattagaagtattttccaaaataaaaattaaaatttgaaaacacttttgggccctaaataagtctacatgggcccaatatatagcccaaaaggcattgatatgagtgaactgacatccaatcaatcaccaaagctcaccgccatttttgctttctttctctttacttttctcacttaaatttctccggtcacctttctcctcctcttccgatcatccactccaacattttccctacccagtaagttatacttcaatctcctttaaccattcttttgcttttgcttttgcttatctcaagtttcgttttttttcttgttatttttcatctctgcttaaacgaatgacaatgtacccatttattttttatgctttcttttttgtgtgatttttaatgaagaaatcatttttgggttactctgtgcaaagactacgatcaatttcacatgcattgactggaattgaaagaacaaagtttagtttacaaaccaagttagtacatggtatttgtgtcaccttcatggggttttctt

SEQ ID NO: 64911 - DNA, 724 bp, Cannabis sativa
atggattaactgcaaaaccacgttaaaaaccctatgttcatacattatttttatatagcttttttttctgtgtgaaattattatcgtgaggctcaaatttggttaacgaaatctgcgttaatagtttggtgctttcattgatagcctctgtgaaaaagctcaaaaaaaccctcatttcattcgaagaaaaacaacctcctatatggctgaaaatccaaaaaaatgttaacaccccacctgaggaagccaaccattgttttggaaaagagcccatgggttccagaagatgtaccgatccgccatccagaaggaccacccgttctaggagggcccaacctgagggtggccccagtgcgcgaaccacacgttcctagagaactcaatccgacattggtcctagtacgcggacaacacgcttgaggagaactcagtgggggaatggtcagaaccccgatgagggatgaagagctcaatcatggatgtgcccaatctgtgggtgaaagaacttatgaaacggaaagtagtcacctgagacgcagtttggaagaggtgtagcgtaggaacgctgagttagaacgtgaggcagtcttggccagggtggcgctggggacgaacgctcaaaatcaacatgaacttggagtgagaagaccacgaggcagtcctcgtgggtcataaatcaggagacaggaaaaggctcgggaagaacaacccggggaaaatgaga

SEQ ID NO: 64912 - DNA, 1096 bp, Cannabis sativa
  modified_base (370)..(397): a, c, t, g, unknown or other
aaatatacattatcaacctcgaaaagatgtggaaaaagctctagctcgctatcagagttaatgttgctatgttcccaccgagacgtcccataacgctacgggttgcaacgtatttaatacacgtttacattgacccagtaaaagtggaccaatcaaagctaagtgatattcaaatattaacctcatttattttacgtggtatgtaatcaaatcccataatttcaggggataattgttgtaagacatcagtctactatgtagttaagtgcctaactatgtaattataaatagaggcaagtgagactgaaaaagggactaaaaattcataagaaaaaatgccctagaattgtatcaaaaatctaataagatnnnnnnnnnnnnnnnnnnnnnnnnnnnntgcaaaaccacgtaaaaaaaccttcgtgttcatacttttttctttactatattttatttttctgtgtaagtttatcaccgtttaggctcaaatctagttaacaaaaatttgcgttaacagttaggtgctttcattgagagccttcgtgaaaaagctcagaaaaaccctatttacatacaaaaaacaatcttcttcatggctgacaacacaaagaacatggatgcaccccatgaaggaattcctcatcgttctggaaaagagccaatgggctacaagaggccttctaactcacagtctaaacggaccactcgctccagaaggacccaacctgagggtggcccaagcacacggaccaatcgctccaggaggacccaacctgagagtggctcaagtactcggagcactcgttccaagaggacccaacctgagggcggtcccaggacacgaacaacacgttcgaggaagactcaacatgggaatggccaaaatcttggagtaagagatgaaggacccagtcatggaggtgttgagcccatggatgagggtgcttatgaccctacaagacacatccctaccatagaaatgggaaactgccaccttaggtgccgcctggaggaggcaaactgccagaacgctaaattagagcatgatgcaactgtagctagggcggcacaggggaataacactcaaaattaacct

SEQ ID NO: 64913 - DNA, 698 bp, Cannabis sativa
tatataaattatatttgatgttactattgaaagtataaaatgattgtttatgaatcccttacattttatcttttcttttctaatctcttcttgtgtttgaaaaatacagaattgagattgaatatgttgaaggtcatgagaaatttgaagaggatgatagtatcaagattttgatgatggtaaagttaattccatctatatattatttttattctacatttgttctttgttcaacggttatatacctcctatatactatgtatatttgcataggatgtaatgtatctcaatttcctctttattatatatgcttacgattatgaagaattgttcaaatttatctataagatgtactcatataaagctaaatgatgcactaactggaagaagataatgaatatgcgtagaaccacagagtttgttgtggctacatttttaagtattattgtttttctttgttaaattcaaatattttttgaaattttcttatataattttatttttatttaattactattttatattaacttcataatttatatcttttgtatttttatatttacataatttatgtaaatatattttatattatgtttatttactcccttctttcaattcttttatattattcctacattttatattggataaataccattttggatcctgtattttgcaaaagttacaaattggacctt

SEQ ID NO: 64914 - DNA, 787 bp, Cannabis sativa
cggtctgggtgcatgaccgtgtctaggctcgagttccggctcggtttgtgtttggggctaggtctgagttcgtttctaggaatgggtatgggtcctcttcacggtcctagtcttgttcaagggtcctagtctggcggttcttgttcaggttccagtttcgggtctcaggtttagatcagggtccaggttttagtcatggtctgagtcccagatctggatccctgtcacttgtcccgttctggttccgattcaggtcatgggacccagttcaaagtttggcttcgggaccgagactggggtgcggttctaggtcccgaccccaattatgtgtcccgagtcaggttccatgtttgggtcttagttcgggtccaggttcggcaccgagtcgaggtatgtttggttacagttcgaggtccaagtccttgttctggtttcgctcccgggtctcgatctacttgtggtttcaattccaattttgggtcacagtgtacgagttcgggtccatgttagtgtctaggaatgggtttgggtccgggtgtgagtttggttcctactctgggtctggggttgggtcctagatcctaacaccgactacgggttcagtccaagccccgggtcaagatctagatcccgatctttggtctcggtctggttccatttcgtgttccgggtcacgagctcggtcctatgttcaagttcgggtccggggtcggctcttggatcccggtcctagttttgttgcctaggtctctatcccgattcagggtccacgtctcggttctggtct

SEQ ID NO: 64915 - DNA, 731 bp, Cannabis sativa
atatttgcaacgattattatagttcgggatagatttttgcaacaaaaaaaaaattcaagggataaaactctacaaaactgatagttcaagggagataaatcctaattattcatttttaaaacatagtttcattttaaggtgtttaagacatcatgttcaaaatgtttatggaataaaaaatactaaaaatgacgaaaggaaagtttaatgatcaaatttttcatttcgatttcatgggttccttcaaaatgaaaatgatttttttttttcaagagaagggactaccaattttggacataaccatgaaagctccaataactccgtccatgaatattcatcaagaccatcatagtggctcgctcccacttacacgggtgcatcgcatgagccctaacaaatcactaggggcacgagtgctcttatgatagatgtcaaaagtggttaagctgacaaatattgtcgtcacatttaaaattttcaaataaatcacttaaattcgaactcatgatctctgtctcaaaagaattcttgagaataagcactttactgccactaaaccacacactaaatcgaattaatctttgatgaaaatttggattaattaactccttatttttgtttttatattggcctagtgtaattgtatattgctttgcttgaaatcgatttatgagtcgtatgtattttggtcatggcaaccttttcttcaacaagtaatcatttgcttattt

SEQ ID NO: 64916 - DNA, 633 bp, Cannabis sativa
accttaaagacaaataacatgatactgccctaaataccaggggaaacaccaaactaggctctaaaaataacacaaactggaaaattaggtttttaggagtcctacccgtgagccggtctaccagttccacaggtcctgtaggaaccagtcaactgattggcaccaagaaaccctgaaattccccaacttaagcaaaacttctccaatttcaatcatactttccaggatacttgtatacacattctaaaacaattcccaagcctcaacagtaagaaaagtaagcaatatcacaatattctattattgagttaagtttgagttcttagaactcaaacttgcttaacctcaaaattagccaacaataacaacccaattaaactttaagcatcaattctaacttgcaaaacataaccctaaattgaaacccaccccaaacagaaactaaatccccaattgtaaccataaacctagctaaatcgttaacaaaacaaaagaagggtctaggtttaccttagcttttccccttccaagacttccaattgcccttgaagttttcagcaagattcaacaaggaaaattgaggttgaatttctaattttggggcagcaagaaaaacgagagagagagagagag

SEQ ID NO: 64917 - DNA, 1114 bp, Cannabis sativa
  modified_base (894)..(898): a, c, t, g, unknown or other
ccatttcattgcaaacaaacaactttacatcctataagcacctccaaaaggcctttaatcttatctattcaatattatttacaacctttcaaaccactctctatctttttgcttaattttctttggcattacaagtgctatctattcttaacacaccatttaacttgctgaattatttctgggctgccacctactttgtattccaaacaagctcattccgagctatccaaatacaataaaccagagcagccataccagctgctagaaccttctttttgaagcttgaacaccttgcttttcgaacccatttcagcaaaccagtgagggcagcagctgtagtgtgccaacccaaccattccttcacttgcttaagacattctgtaccaaaataacattcaaagaagagatgatttgttgtttctgcaacattattgcagaaaatacattcagcaccatcaatgtaaccatgtttgaaaagcctatccctggttttgagtttgtttagcatagctaaccataaaaggaagctatgctttgggatattcaatcttgaccaaacttcattggaccaagaaaccttctcccaattcggattaaaccagttcagctcctctactattttatagttagtggtagagaaggtgttatgctgcacacaatctttaattctttctttgagatccaccattttcctccaataccaacttccactcataggagccttgtattcccaccaagcttgttgttttatgtacacactatgtacgtacccattgcacccacaaattatccttctttttttttcaattgcccatattcaaaaaattactcacaaggttagagcatttctctctagaaaccagagcttaagcacttaggtggcgtttggttggnnnnnatgaaaatataggaataggaatgataattggaattagaataggaatggaataaaattgaaaatgcacaaaaaattattaaattttttcaaatcttacattggaatggtctttccttccattttaaaatggaatagtcattccaccaaaatgatagaaaggtcatgccatcggaattgtaacgtcccggcttcaagtctccattgggtccttacacc

SEQ ID NO: 64918 - DNA, 616 bp, Cannabis sativa
tgatgaagattaagatggtgaccaacgagtaaaccaagaaaaacattggaatatagagagcaactgggttggtttggtagtttattataattaacttatatatatatattaattagttaaggaccatcacatctgtcctactcagagtgtactaatcgagaatattaaggagctaattaaaaattgtgatttgattagtaaaatatattcacacccaataactctaagatgccacacccctaaccctagaaagtcccataccattggttaaagtcttctttttcagactttcttttgtcccttaacatgttattctattacctttaatattcatgtttatatcttatcagtactgattactgattagtggtggtggatttgcctttaatttatatatatatatatacatattctttgatagcttttttctttttaagggtgacaattttctttataattaatcaattaatacatatattaaaattatgatcatgagaaagtcatgtatggtatttattaagtaccatatatgaaaaagtacatgttatatatatatggagtaaattttaattgcttcctgagagtagtaatgtcaaatcaaatttaaaacacattt

SEQ ID NO: 64919 - DNA, 1058 bp, Cannabis sativa
gtgaaatgaaatcaatgtatatctgtatttgattaagtggttctatatataacataaatggttttttttttttttatataaaaaaaaaaaaccattacaatttaaatatacaatttaagtggttctataaatttactacacatatctttctaaataacttaaagtgtgattcttcaaaaaaaaaataaataaataaataacttaagtgttttttttttaacatttaccaacaaaaatatctttctattaaagaaatgtatgatatttctaaaaattttaaaaatattatagttaaacttaaattataattaacattaattttgaatattatatattctttttataattatttcttaaattaaatatttttaataaaaaataatattatttatttataacatccatataaaataaataaaataaattaatcataaaattaaaaatatatataactaaaaatataataaagtattacattgtacataatactaacttagtattatcataattaagtactatcaattatcacgtacctaatgccacattatgagaaaaataatgataaatgccaccgtactaaaataaaaaatatatttatatttgcttataattagtttatgtgatattaaaaaataattaaaatttagttcacttgtacttacttaactacgaagacgtaaatttattcaattttctattgtaaaataataattaaaaaaaaattgagaaggttgtaaaataataaaatttgaaaaaatatataatacatgcatatgaatgattatgtatagagctttaattggtgagactataaataactaaaaagtatatatgaaaataaatagtgctccatcgttaattaacgataattttaacactaataatattttttaacaattgcatgctattttatttagacatggcctaccaatatatgtgacatgctggcctggcctgcagagcctaatatttatacagaaatatatataaagggtgttaaaaaaaatcaaagagaacagatatttggacctctcatcgtgagttgtttgttgtttttt

SEQ ID NO: 64920 - DNA, 1222 bp, Cannabis sativa
caaaaagaaagaaaaaactttaatagaaaaaaacaaacaaaacaaaaataaagcatattccttttcgaagtaatggaggggtttaattattctcagaatgtataacaacattgacgatcgataaggtctttcaagaaatattaatacataatcattatttcaaagactcaaaacaaactactttatattagtgaaacctgaaataataaggaacataccccacaaattaaagaataggatgataaaacactattaattattacaacaaattaaaaaaacaagacacaacaaaactaatggagtcgagttagaaagggaattaacacataataatcacagatttacgagaaaatcattatatgaaaaatgattctaaagtttctttttgataatcgtaacaataaatacatatctattcatctttattattatatgtactaaatatgattaattatacacatatattatatgtattattaattatacaaacatagctaaatttcaagggaaaatagattgagagagagagagagagttatattgagctgtttagaagaaaagagatgagttgcccttgagtgtttgtcatggtgtgatgcattgtttgtcatcatcaccacttgtaagtcgttcaattgcagaagcaaagcttctcaagttgtgtaataagaactgttgtaatttctcattaaagatcagttaataaagactctctaaggcccttgttgtggctattttctggccgggaatttaggcaaggtgattcaccattaccttattcgaaccttgttaagttcttgtgttctttgtgtgtgtttaatgattttctactggtttatgattgttgtcattatagtgcattgtcttgaattggtttcattgattattattgtgtttattgtgttgttaccgaggtgttctttcacaacaattgacatcagagctcaggtttcttgaagtaagaacagaatcaagaaagtgatctatggcttccgcacgctttgaagtagacaagttcaatggagcaaatgattttggattgtggaggattaaaatgaaagcaattttggttcatcagggagtataacaagccattgacaaggaagaattgaaagagttgggagataacaagaagaagattaaagaaattgaaataaaaacacatagtgccatcttgctgagcttgggagatgaagtgttgagagaagtttcaagtgaggag

SEQ ID NO: 64921 - DNA, 913 bp, Cannabis sativa
tagctaaactatcctctccaataaggtgataataataaaataccgatgtgttgggcaagcaaaatatgctctttagtctggggcatgggcccatcaggggcagatacaaccagaataccaccatccatctgtgctgctccagtaatcatattctgcacagtgattatgctttattaaatagtcccattggtgagcatgagaatgttcaggggtatgacattcacactgaattacaagtttaaacaactaatggaacttgtaagttgtaaaaacaaaaacacacataatatatatatgtgatttttgtcagaaagagtttatagtcatcgtatctcaatttttgatcctcgacatgagtaacagctgcattaaaaaaaaactaattgtaaaatcatatacatttcagttatttctagtattgagcttaccttgacataatcagcgtgtccagggcaatcaacatgtgcataatgtcgcttagaagtctcatactccacatgggcctgtaaaatggaggaacacacatgttgcaagagaaaatcaattacagaaaaataaaaatgtaaaaatataccctaatgtctagcctaaaaaaatggcagattcatatagatgatatcatcatcagcaaaacagcatgctatgctaaccgttgcaattgtaattcctctctttttctcctttggagccttgtcaatttcatcaaaagcaatagccttggctttgcattcttctgacagtacctaaggtaaatcacatacacatctcagctttttccatgaaagggtgaaaatttaaaactaaaaagacgactcacaaatgcaatccacctgttgatgatttacacaagtaacaacgcacatcacatacaatttgacagaccgacatagtgatactatcacaaacattaata

SEQ ID NO: 64922 - DNA, 826 bp, Cannabis sativa
gaatagttgaatatatacaagaatctagaacaactcatgtatatatgtatatgtatattaattgtgatgcaagatgagtaagagagagctagtcgaggtctgttttcgaaattaccaaagttgtatatataacaacgttaattaatactgttgcggaattaatgtctctgctctgtgtgtgtatatatatattatatatatatatgagtttaatttgaagaagcctcaattaattagggcaatgtcacttctagtgctagggttcaattatatatatatatattctcggtcatcatcatatgcatgcctcgtagatggcttgtaatgttggttgttggggtgacaagtgacaacaacattacaacaacgatagttagttgacgctgagaagccgaccacaattttactcactcagcaaaaaaataaaccaaaaatcattgtattagtgttagattgataattaagttaataaatcattctagcttattgaatttattagcaataaacgaataacgacatgcatatattttgtaattgtaacatattaataaggtaaaataatatatatcttgacgtctagaaatcgttaaccacatcagatagtttgagtctaaatagaattattaatatgataacttaactacctttcatagcggtttacaaatctaatatatagtggatgatactattgcataagtttttcttgaagagatattagtacatgattataatatttaatttggtaacatttttagtttattgatctaaatatttcattttgttaattctattataaaaaaatattgttttgaatataatacctttt

SEQ ID NO: 64923 - DNA, 1860 bp, Cannabis sativa
atttaataatttatttatttatttccgttgaggtgtgcatttgactttatcatttggtattatttgttttttatatggaaggaaagtcatctagtttttctacttatagaaactaaagtataaagagtaagttggatgacccatcatttttctacctgtccagatgtgttaatctgatcttgtatgagttttctaatatgtaagatcatatttcttgtgaagaaaaccgaagtaagactttccttttctataaaaaaatttgctcttactactcacaattttgtaggtacaatgatcatcctagagatatgaaattttatgataataagagttttactgtggagaaaaatttcaatgttattgctcataagccttttggggtgtataatttattgaaataaagacaatgggtggatacattgattgggtttgatggttatgtggatcgaattttaaaggagttttattctaatataacttatgagagtctcgatgaggacgatcctttatgtttgataaagtttttgtcaggggacaatagtattcctttactgtgaaggatgtagctgaagctctccagctgccttttcaaattgagcccaatgaagtggaatttgattttcaaaaggtgttcgggtttctcattggtgacaatgatttggaactcttcaacacaatgcacatgtctcaacttacctatcatcatgctgctcttatgaggtttgccctatccaactggtttccttgttccaatttggtaaagttttcaaatgaacttgctttctttttgtataaagtttctactagtgcaaaaattaatttggctgacatgatttgggagcaaattgtctctcttagaaagggcaagaaacctaggcttaatcttatttttcttgacttgatttataagattttgtctaaccaaaagtagttgattcttgagaatgaatccattgacatgcctgctattggtatcactttcaaagtcccaaagaaacctcttcaacgaaaatcttctaagaaaaaggctcggtctgcctcccctagtgctattgatgaacttgctggtgcatctccctccacttctgctcctacagaaatggctgaattcaacttgcatttgggaagaatggaggcaagtcaagccttacttctcaggaggatggacatcgtaatgaaatccttctgatccaatgatgatgcttaagtggttcctttttcatctttttccctcttatctatgattttttgaactattttgactttgtttatttggcttgttatctttggctccttgatagacaaaaaagtggagtagtatttattttttggattgttggttacaactctgaatccttattttagggagagttgttttgtttatgatttgtgaacttttccatttaaacagttatatattttatgtgttagtatgctttcatgcagggggagtattttctatactctattatttttgcttctaacacttgatgtaggttttcttctaataaaatattttgtcaatcaaaagtgctaaagggggagaatgttaattctattttttgcatctttcatttgacaaaaatattttataatatatttatttaattcggctgaggtgtgtatttaaatttaatatttttgtattaattgatttttatatggaatgaaagttgtctaatttttctatttatggaaaataagacataaaggataagttggatgactcatcctatttctatctatctagttatgctaatgatcttgtgtgagtttcctaatatgtttgatcagatttcttgtgaaaaaaattgaagcaagactttccttttctctaaaggaaaatcacacttactgctc

SEQ ID NO: 64924 - DNA, 1106 bp, Cannabis sativa
gggttttgaagatattatggaccagaaagggaagaaaaggggaaccaacccaggggttccgacaaatgccgaggtaataccctctaaaaggcaatagaaaaccaccgcctataggaagaagagattttccgagcccattgaccttgaggtctctaaaaccgagatccatgaacagactcctcctttggttgatgccaacacaagcgcacctcctcctgagacaactcatgcctatgatttctcaagccaggccattgaatctttgtcggtcacagcggggaaggttggctgtgaatttcgccaggtgtttgggtctgcctgctggtgccaacgcaaggctctttttcccaacgattgggatctaatcaatctctagaatccagaagagacgctttcgaggaacttgcaccataccctcatggtaagtttgttgtatttttttttgttcctcatattcatttcctcgtaattctccaagcttctttcctctcttttacctcccatcagcgaatcctggaccggcttaaatacctggaggtagaggtccaaaaatcactagctcaacgcgaggtcgtgattaaataatggaacgacactcagcaggaagtcacccatctcaaacaagaagccgagaagtccaagaaagactttgaagaagctaccaagaccaaaaccgatgaatgaaatgaactcaggaaggtgctcgcggagaaagaggctgagcttaaagggaaagaagccgaactcgaaagaaaagatgccaaaaccacagaaggatgcaataaggtcggtctccgtcccatttatcgagcctggatggcgaatcccaacacggacacgagcttcttggagaaggaggaagaggaaacattggcttactgtgaaaaggccaggaaggaggaagaagtggccgaggcagcggaagaagaagatctatccaagtctcccccaaggtcagcttggtttttatttatctccttttttttcgaaatttcctttgagccgacacaatggttttccccttgtggcccattttgtaaagacaaatttgcaaagttggatagctaactttgctttttctttattttatatttaaatgcctcgta

SEQ ID NO: 64925 - DNA, 675 bp, Cannabis sativa
tattttgctcttatttttgcaaataataagtgtaaagtactatgcatctttgggtttatgccgattacttaagattatgtgttttacacttatttcctcttatttttgctaataataagtgcatgcttatattatgcatccttattagtattgtgcatttttaacaacatgggaaatttgattaaatatgcctctattagattaaaattaaccacttaaattaaagttaatttgtataaattttgtgtgccaacttttcagtttactcctaaattattcctctcatttcaaagagtaaaatagaaactctctttctatactctctttccctctcgctctaacagtttctttctcacccaaccgaccaccacaaactacctcaaaattcaccaatcacaccaccgcaacaccacccacgaccctctctctctggttctctttggtgcgtggtcgatgacccacggcacgtagagtgagtgggtgaggtttttgatataagagggtaatttggaaatatatgaaaaatagatttacattgccccagtagtgatttaactttaatttaaattgttatttttctgattaatgtaagcatgtttaatcacatttctcgttggaagatgacaatctattaaaaattatacttgaataaaaataaactcatgaaaaatgaat

SEQ ID NO: 64926 - DNA, 1786 bp, Cannabis sativa
tggagagctcccactgctggaagttattgcattaattgtgatgcaagtgtgaagcatacagaggccaagatcggattgggagtgattataaggtcacatactggtgcggttatagcaacaaaaactcagcaattgaatgggattttttcggttgagttagcagagactcttgctcttcgaatggggattcagctggcagtaaaaacagatgcaataccatatactatccaaacagattgccttcggatagtaaatcacataacaagagcagctcaagccaaaacagattggggaatgatgcttgatgaggttcgagattcaaaggagttcattcactgctcagcagtaaatcacaccagaagacaggaaaatttagtggctcactctttggccaaattggcttgtaattcaaatgttaataagttgtggttggggagttaccccgattgtgcatctgcctatataatggcggatttgcctaacactttgtagtttctttgattgaatatacatctttcaaaaaaaaaaaagaaatggatggaaattaacatttagtatttaatccgctaaaaaaaaatgtggtattaagtgtataaaattgaaaacataaggtatttatgccgcaaatttcccttgtaatcattctgaatttcttaaaattttataagatatttttgctagatgccgaaatagataaaagtacatcaatacatgccttgtaattattttttgtttttagatattttattatttttaattcctttgaaagttaatttgaaggttttaagattcaacggttcatattggccaacgcatatatttatgtcgcactaaaactggacacgcgtagctcgtctctgcacccgctccagtctacccacaatccaacgagtggacattctgtcattacatgaaattagtaggggtattctagtcatttccaacaaccgtcagacatcttacgcgcgcaaaaattgcttccccctacatccacaagagaaaactgcctttttattttatataataaataaataaattaattaattaattaaagatcttttaatataaatattaatttttgttatatacaagtctctccgtcgtcttcggcctcctgtctgtctgtaccttcccccaatccatgaaaaagtaaaaaactatataaaaaaataacaaaaaaatgtcaataatagaaaaaccctaactaccactctccatactactaccacttctactctttcactctcactccactgaaaatccatttcaccatcactaaccacaacctccatcgccatatccagagctcgctccggcgatcgatctccctctctcgctgctcaatgtgagctgttagatctccatttcaggcaatgctgtttgcctttatgtgatcaaatcgttgctttccattttctgatcctgctctgttctgttctgctctgatctcccgttgacttaatcacctcgccttaccccacctccatgtgaatctaccttaacttatcttctacgtttcctttactggatctctgtgagtgtatttctttcttttttttctttgttgcaatatcttctttatttagctgattattctttgcttggatcgtttataaaagtgtttgctttttctttatcaatttattaaataacattgaatatatttggtttgagatttgttttttttttttcaataaaatttaaaattaattatgatttttcacatgcttttggtgggttggtggtttccaattgaagcatttgttgttattttgtcttttttttt

SEQ ID NO: 64927 - DNA, 1006 bp, Cannabis sativa
tgagtccaaaaatagttcatgtgttcgtcaatccagtcaaatggacattactcaactgttcctttggttagttcattttggtagtgaaaattgtcaccaccacctacactgatgggatacttaccaaaattcatatattgtctggttattagacacttaattgataactgtcactgccaaatcagggcagagttagttggggtatgttaagaatagaatagatagatacttgtctattttattggataaatttagttgtatttacaagcatgcatgctgtcagtcagtagagaatgtgaagagtattttcttggaaatcattgagatggataatgtgaatttcaattttactttttggagtctcttaactcctatctgctaagaatttgtgtatatgtatacatgtatgcttctgaattttattccttttatgatatctatcttatacttgtttgtggctatatttttgttcttattattcttcttatttttttaatgttcaattaacagctttgaaaatggatcaacactgaagcaatcaattgctgaactgcttaaatgattgaactaaacctcataagggaaaagaagtggagttgtctaaaggagtatggtttgtgttacttacagttacaatcaccataactatataacatgttcctagtttgtcttatttgatctcaaaaatcaaaagcagaccataaaccaaataattttatgtataacctttgaaccaggcactgggctctaaaatatcactgtaacttattctttattattctttcaaaaaaataattagtagctcaaactactcactactcactactgcatggtattattatattcttccactactaataatataatctgaaaaagcagaccatgtttcaaacattgaccacgcacagctaactatgcatgccaacctaacaacgtacagaaaatataataataaaattaaaaaggtgagaatttcaatgatatgtatgagttgtatcactatcag

SEQ ID NO: 64928 - DNA, 558 bp, Cannabis sativa
gatgccatctaaccatttaagttgttctttccctaccgctccattaaacatgaggaaccttctctcgaggccaaccagtccctcggggctattcttttccatatttggattcttctcctggagaaatttcacagcctccaatcttttgggatggtcttgaggccaaccaattgcacttatgtcatagccatccaagacaacgaatctgaactcaggcgttggagaaaaatcatagtaagcacaaccgtccttgcttggaatcttcaacatcggaagtaacttgtcacgaggaagattgtagaggcagtgattaccaatcatatgatagacaggaccatcaaatttctcaaattcttcaactactttttttactgtactaaaagattgatctttcgggcaaaaaccatcaacaatgtccccaaaattgatgacaaatttatgcttcttgtcctcattccatctctgcactgctctctgtaatataagaatactatgacgataataccgtggaacgccaataaaagagcggccatcaggaatatcagcatgctgaacatc

SEQ ID NO: 64929 - DNA, 826 bp, Cannabis sativa
aggtcgttatcagccccagccagctgctcattcacctcagggaccgaccgagtcatgtagtgagtgagcatatccttgcctcttttagtctctggatgcagcaccagaggtggggcaggggccctggtctgctcagatccgcttttaaccagctcggatctgcccttcgattgctctagtttgtccgagctccctcctcgggagtttttagacttagtcgcttttagggcaaaagggtctacgacggtttgttcctcggagagatcaataactacctcagccgatgctttctcttaggacggggttgtctcaccgcccttagatttcttggccagaggagataggcccgagcttcgtcccactctcttcttcaaggcttcaagcatttcttgagacatgtctgtacgaaatgaaagtaagatggttatgaaaaagcatgagaaatatgaaagcataataattaggagagttaaagtcaagatgaagtatcctgcacattgataggagcatctgcccgagcaagacctgatgggtcgtcgtcatccgacgagcctccctcctcctccaggagggctttccccttccttacgacaggggtgggcggccgagcaggtagactgggctccctgatctaaatcgtatgttcgataggcctgtgctcggatggaagtttcttcttccttttgagtggagtctccggctcttcctcaacctcatcttcctgctcagaatgctcctgagcatactgcttggctcccgcacctcaattcaacttagcttcacgcttgagttgaatgagttcattctcctgatgagctcccttagc

SEQ ID NO: 64930 - DNA, 1002 bp, Cannabis sativa
tatcatcttttaatacaaatatatgttgtaactaattaaaatacatatacattttttttctcgattttttttttcagggggcaatactacaatgtgtgtccgcccctgcccacaagtgagcgttcaatgaaatccggacgaacatcctcactctagcaatgtatctttaattaggacaatttttttctccatcaaaatattggcgtttaggtaacatttttttcaaaaaaaataaaaaaaagttatataacagcataattacaccgtataacataatacaatgaccaaaaaagtagaaaaactttcactctcatggccgtggaaaaattacagcctcataaataaaattaaaaaaatatacaataaacacacattacctctcgattatagagatgaactttacttctcatcactagttagttaaccatgccaaccagtgcaatgcaaccactacatacaaagttagcgccgcacaccccagcttaagctgccacgtgtccaaccactgtaattaaacatgacaatgattataagctatttgaattgacaaaactaccctccaacaaaacacgtggactgcaaatgaagcctctacgccacgtttgaccaagtaccagaaacatacttagttgggtgaggaaaccccaaaggcttttgtgttttaatctcttttgttttcaccgttgaagtgaagcattggcggctttcgtagtcttcttcgtctcttcttttttattaatattttttggtattataaataatgtatatgtaattataggcttataattaatttcattattaatattatgttatataagaaggtcccaacgagctcagttagctggccactcgtttttatattaatttccatttttcttcctctctcttatgtctccgtgtttttaagaacaggaattaagaaagagagagagacacacacacatacacatatacaccttttttttaatctttggtttctcatttttcattctacaggtttga

SEQ ID NO: 64931 - DNA, 1019 bp, Cannabis sativa
taaaacttttgtaacaaggatccctagaataaatttttactgtcgttatgttgttcattactagggttttattttagtgaatttttttttatattatcacgaattttaataactaattaatctataatactaaactagtttataaaatcacacatgtggattaaagcgatacaccatacctatgtgaaagaaatcttctccttgtcttttcaaattttatgtcatgatcatttcccttgaaaattgcacatttggagattgtgttcgacggttatacgtttcccaagtggttttttttagggaaaaatccaatcattttaaatttaattctcagaaaacaaatccccacattttcattttttttataaatactctaaaggaaacatcatttagaacatttgcatttatgaaatcccaaaacaaaaaaggggagtgttcttcgagttcttgagcttcttctctcaaattgatcattgcgcgaactaattcttcagggatctcttcttcaaacattaggttgaatagtgagtaagttctctattcctttctttacatgaaatttcgtataaaattgaatatgtgttctacaaaaatattttaatgttcttcgttcttgaattgttgaatctacattttccttggctatagtgttataacgatctgttagggaatagcccaacttggttcttgtttgcacttagtttctagaaaacgttttatcaatttgaaccactctaggaattttgagtttttaaaaaaaccctaaaatcctttttccattcgaagctttatcaagaagatgaagtcttcttgttttgatttgaatcgttacgctggtcggagtactagagatgttattccatgaaaggcactttcctgttgttcaatgcctcacctctctgtccttctttgttagatgaacccagatgatttttgaggaggtgatcaccttgtaaacaatgacctgctcgaatcgctttttgaggacaaccaaacactcagagcaagaagctcatctt

SEQ ID NO: 64932 - DNA, 619 bp, Cannabis sativa
tgttattatttgtacggtatagtaaaagctcatgcacctttctctcttaaaaaaaatattattggtgtttaccatttttcttcgtattatactattattggtgtaattaagtagcaggtctcttgaaacttaagaaaataatttttaggaaatatcgctaaccaatcgtatagcactacctatggaaagtgctcaacaccactaatacccaataacatttttctttataatcaatgcacatatttaattattttctcatttctgttcatacttaataaaacagtactaatcaataaagagggatgcttcacaaatacaataaaggaaattttaactacaaaattaaatgtgatgtactttactaaaaatatttacggttataatttaatgaaagtataccgcattattacccttttcataacaaaattagagttcaccacactattgtaagcgtgttattctcgtccagtttgtatttatttatgctttttaaaaaatggctgtgtcgtactaatattttcaaagggtaagcttagtacgacccatagacttaatatttttgtatcgtgctttgctcgtgctagcccgcatttcttaaacaggtcatcctatttttata

SEQ ID NO: 64933 - DNA, 979 bp, Cannabis sativa
gcaagtagcatctgttatgacttttcttcggacaagagaagtggctacaggtagcgcatcttgaagaactcgccaaacgaagatcttaatcttttgttgaagattcaaagaccagaaaaaattccattggctaggtgcggaggaggtagcagtaggttgtagacagtcctcaagttcagtggcaagatgataacccgactggacactataaattccggagttggtgtgatgccaaatcaaaacgtcagtactctgaaaatagctaatagggattgtaagaattttttccacatcaaccattgaaaagcagctttccaaaagaggaatattccattcacggttttctgaaataaaatcagcaaccacagctgatggaggtccagtgtaataggttggtttgaaattataacatcctggaatccatgggtccgaaccacagttaatttgtcttccatcgccaactttccaacgaagaccagctttgataagttctcagccatatagaattccttgccatgttaacgatggtgagtggccatgtgaagcctccaaaaaagatgtccgagggaagtatctgcctttgagaattttggacagcaatgatgtaggataattgagtattcgccaggcttgctttgcgagaagcgcttgattgaagtgaacaaaagaacgaaatcccatacctccttgtgtttttgttttgcacagcagcttccattttttccaatggattctgttgcccgattcagttttcccccaccaaaaattttccatcattgattcaagttgattgcatgtagtaattggaagttggaaacaactcatggcaaaagttggaattgattgaaccaccgcttttagcaagacttctttacccccagctgaattttttttttcactccaagtattcattaacctccacaccttatctttgatttccccgaaaatttgctgtttgttcctacccgaataagatgga

SEQ ID NO: 64934 - DNA, 1161 bp, Cannabis sativa
taatgtaaatctcgtcgcttctgcgctccatctgacaatcgcagttcttgatgacgaggtgaacttcaaaagccaatatcatttgaatgtcagcttttatttgagagaattggctcgacgaagctgtgaatctcattgaaagatgcctggggttgactagtgaaggtaccgcaagcatgccttcctatggcgagatggatacctcactattagttgtatatacttatacgactatcttaccatgtattatacgttaagcgtctcattagtcgttatatttcgtccgtctaacgaggttagtgcctcgtcttgtacacctgaaattacatggtttctcgttgatgcacaaagcaacagtttgtatatctttatctcgcataagaccttatagtcagcaagttgtaaatatactctgtcacgtccgcatttgatgagttattctattttcaaatataattatcgttacacgcattgatccatattcttcctactttgagacgtgtcttctattgaaatggtagtcgaatttcaagtataaaaattgccccttaaaaagttcttttttaataaaaaagtactttttaaatgatcacagagggtacatttatcataatccctttcttcaagaccacgcatgcccttaaactttacgacttcatggtttcgagggtcattattagcattaatgaactgccctttcatcttctacctcactcccaaccgttagatttcccaacttttggccttaccgttactgggttctaagtataaaatgatagctcaggctagccgtattccataaactcctagtttttggtgaatttcatccagaaattggggtgttattctcctatggagatgtcccatccaggctcgaaaacttatccctcaaaacttataatactggaatatatcaaccgcttttcctctccatatgttcctaaaaactttaaacctcagtttaaattggaaacaaaagattccaagacagaagaccatccgattaatccaaatcaagtagatactgccgattgttacaggggattcttacaaggaatttctgaaagtaagcatcattctttgtaaatgctggtctgatctgaattcgttttttttttttaccattgttgcttcatcgatcttttatctttgtctctacag

SEQ ID NO: 64935 - DNA, 768 bp, Cannabis sativa
gcattgatgcctttgcatcaatacttcaagaatgtggcagacttctttgctctctgcccaacccagttcactcctaagggcattaagtatttgtttgcccttttcgtcatctacgcctcccaaaagtggggtatgtctcctcacgaagtcagctggtttattgatttgaagtccatcgatgattcggccatcaacaaaattgggaatttagctaatgagtacttcatggtggatggcacgggcattacccgtacccagttccagcagattccgacatatcaccgccctcctctcactctaactcttcgggatagagctcagaagcttgttcgactgccgggggaagactggaatatcatcctgttgacctccgaagataattttgtgaagtacgggctctatccaaaggacttcattcccaaaccagtgaaggggaggaagaggaaatgtgatgctggatgggctgaacgaactcatcaagagaatgaactcattcaacttaagcgcgaagctaagttgaagggaggtgcaagggccaagcagtatgctgaggagcccttgaatccttaaaatgaggctgaggaagagcaggtgactccgctcaagagggggaagaaacttccagcccagcccaagcctattgaacatgctattcgcattaggcagcccatctcgcctgctcggtcgccttctctcgtgctcgaaaaagggaaagctattatgtctgaaataagaggcatgttaggtgatgatggactttcgagtctt

SEQ ID NO: 64936 - DNA, 6176 bp, Cannabis sativa
gggcactgtgtcacacgcgcatctgaccgcgcgtcatttggcgaacccgaacctgaaagagtcgtacgcatctgagatttaatatcattcatcgaactttagcaaatttcataaatattaaaagaaaagaaaaatctttgttatccaagcgaggaaagtgtattttttattatacaattattccattttttattaggtttttttttttttttttttttaagttgtcatgttagtgatagaagtagaacaaaggaggaaccaataaaggagagagagagagagagagctgcataagcaagaagagaaaagcatcgtcaacctcaaccacttggtcacacactcacagcttttagagagagagagagaaaagaaacccagctttttagagagagaaagaaaggaaacccagctttttcattttcaaaatttgtatgtttgaagagagagaaagaaaactcctctgcccctagaaaattgcattgagataaggacttatgctagtactggtagtaaatacacatactctctctcttattcgcagatatacaaaatgacctcttcatccttctcttcctccctcctctctgcattttcacagagcctctctttaattttccacaaactgttcgacctttaaggcccccccttctctgactctgaccccccctctctcctgcggcttctctaatagcccaattctcttttcttgattttagagagccatctctctctctagcgcagtgaaatcgttcgacgtttactcctcttgctgcaaagaaatatcgatttgataaatctctcatttttcacctctaatagaagacgggtctgagaaaaactgttcgacatttaactctggtcacgtatacgtcactcgggtctgtcatttcttttccttttttctgttttcttggtaccctttaatatgtcgtctgcattttcattttctgtggtgtcatacaagacttggttttgagtttattaaatggcattgacttagtcagtgtttctctgggttcattttaaattttgtttatttttcattctttttgggaaaaaagtggaacttgttagaagggtttgaagggttgagctgggttatgtgtgtatgagtgcgaaagtatccttagaagatgcttcgtgttaaaggatttataatgggttggtgacagtggacctgtttcagtctcttccgttcgttgtcttcaactccaagcctttttgttctttcttatttggtttggtaagctgtaaacaattagtttctagttttgtcttttctttatttctttattatgattatttgcattcaaactttgaacagttcttttttccatgcttattttgttccttagaagaaattattttgtgattctgctcaaactctttttcatttaatatgtttcgtttactgtttgtttttagaaactagggttattctaaatattgccagagtataatttttttttctttttcctgttctgtatttgtgatttgttcttgaaatgtcgtttgctattgctgtggttctcaaacaaaagggagaaataagatgtagtggaatgaacaatggagtattattattgcttgtcttttttaaattttgaagtaatgaacgggttctagttaattagtatcctgaagagaagagacattgtttagtatacacaaagtcagttcacattgttttgaaatgtcttttctttgtagagtctacctctgtatcaaacagtaaacagtggaacagagaggagctattccaagttgcttttaaaaagatttataagcttttaagaatagtaaatgcatggatcgaagggatcctatggcgttatctggttctgctgcttactatgctcagagaggaataggtgtccctggttctggagcacagcctgagcttcatggatcaccaggcatgcatcaattgtcgaatccaaacgtgtcttttcagtcgaatatgggaggcagtaatatgggatcaacactgcctgcagaaccaccttctgctatgtcctcccatggtgtcaatgtgggtggtggacaaggtatgatgtcatcaagtgagcaaattaaaaggaaaagaggaaggcctcggaaatacggacctgatggatctgtatccttgcaactgtctccttctcccgctaccaatcctggaatggcatcaccaacccagaagcgcagcaggggacgcccgaaagggactgggaagaagcaacaattagcttctcttggtaagtttctgatagacttttggatttttggtttgtgtttgatcatgacaagtggttacgtactatataggttttgcttggtgtaatattatgttgcatggtatcttttttatttataagcaaatctgtgttcaaatattgattttcctggtctctttttttttgcagtcagttattattcttttaatcttggtttgctttcatattgtaatgtatttctgacaagttgagcgttggaaaaaaaaaagtaataaataaaattgaggaacaagaaaacagaaatataacttaaagaaatgaacaaaattttggcccattttggcttagttttttataacttccttataagctttaagatttaaaaggtcattctagagatatttcgttaaaaaatagtcttttattaattcctagtttctctaaaaggttttttgtaaagctatttttgaattgaaataatttaaattattcttaatgcactcataaaagattttttttttctttttttaatgatatcgaaacatttcaaaaaggaaaaaataattcaataaaaatccttgtatggtaatgatccaaatagaaaagataagcaaaaactttttcttattatatgctttttttcttttgtcagcacttattattatgtgcttttagttatgagcaaaagcataagtttaacagcaccaataatgcattgtaggattctgcttctaatgttgatttgtagtcttggaaaatgcattttataggggcttgctgctacttaggtgattattcctgctcctagtgttaattttagtctttgataatacatcttgtagggtcttgctatttaggtgattctttgagtaaggtaatgagtggtgagttttaaatgaagttacttaggtgattctgggaggaaggtaatgaggggagagttttggaaaaagttagaagtgttcactgcttagggtgatcttttctagtggagtttttgtaggtagattttactgggtagattgtatatcagcatggtttgaaagatgctcttcatgtgaagtccctgttaatttggtagaagcatttaataaagctttctaaattagacagcagaaaaaccacttctgaaatttgtgcatcctcaatatattggtgtttgtaaacgtgtacatttatacgctttcttctgttttattcatctatatttacagtataatctaaagggcatttttgcactcgatatttttaatatttgtgattttgttgctcatttttacctatagtactaatgaactagccattggcatatattttattattatttagttgcaaactacaaaggtctaataaatatgtatttttaatatttgctaggtgaatggctctccggttctgctgggatgggttttactccacatgttatcactattgcaattggagaagtaggcatttctttcattattatgtattcttttcttttcctcagcattttagattatcaaatagacttgttttcacttttgttttttttattattatttaatagccaatgtattatgtatgaacatacatagggttttggaatttttggggatgctgatatgtgctcatgtttctatataggacattgcaacaaaaataatgtcattttcgcagcaggggccaagagctttgtgcattttgtcagccagtggtgctgtttctactgtctctcttcgtcagccttcatcatctggtggcacagtcacatatgaggtacttatagcatttctgtgcgtatgaatatattttgtttgaagttacagactgaaataaatggttactccaaaaaacatcttaggttggagaggcaaggatctctaaattgaggcttgtcttacatgtttggcttttgcctctatgaatttttaaaccagcttatgatgcttactataatcagagtattgcactttagcttaaagtttcattgttaacagtcaagtatgttcatattaaatgtcgagttagttttgagtttcttcaactttatttctgcagggacgattcgagatagtttgtcttacaggctcttacttgatcaccgatagcagtggctctaggaacagaagtggaggtcttagcgtaactctcgccaacgcggaaggccgtgtcattggtggcagtattggaggagcgctcattgctgcaagccccgtccaggtaactaactaacttgttgatcacagtgaactttgtgggcttgtgatcttgttcaagatgggggttgctttagatggtttttcttctaagctgattagataagttaaatttgggtttatttgttggatgttataagtaagtgaatgggttaaaactgcaatgcaggtaatagtggggagcttcatatggggtggttcaaaaataaagaacaacaaaaggcaggaagcaatagagggtccgacagattcggtggataacccactaggcatgcaaaatcaaaaccaaagtcttacaccaacatcgtccgtgggtgtgtggccagcttctcggtcattggacatgcgcaatgcccacatggacatcgatttgatgcgtgggtaacagttgttttctattattaaataataataataataatgatattattattttggaatgcaacgtcgacaacaagagcaatgtatatataatctttcagttttcttgactagctgaatctatttttcttggagataaaaactgatgacaaatgacagaaagccagctgctgattcaagatttctaacttcattttgcccatcatgaatggacagcgggggagatcatgtactcatatttttctagccttttttttttttgatggatggaattttcaatttgatcaaatttcttgaatgtgtgtcgttttttttaggtaatttcgtttgattctgtaggaaaaattaatgacctgtctccttcattcatatattattttaattataaagacaatgaaaaacataattcatgtatgatgcttacatggatgaatggatggacttatgagcactgcaaatcgttttcttgagtgtgtcaaataatattctagttgaattgaatcaatatccttataagatacgcacttcaactttacattgcttacaagtttcatatacatgtgcttgtaaaagatatgctattgacaacaaccaacattttgtttttcttcaatagaagcttgtaaacccaaaaagtagacaataagtttgatttgttggttcaagaatatttttttacacttctctataaactatgtatgatgcaaaacaaactttgattatggttttatatcattacataatgtcttttaatacctgattgtctattgtgaaagttgatgagtatggcaattaatgtattgaaagttcaaatgcaattaactttgatttaccaatcgatataacttctttacttcgtattttcttctacgtatctgcatgagttagtattaacatgtggataagaatgttctaaatcaacttgggctaagtatatatctaaagggaaaaaaagtggcttcatttagcttaatgagaaaaagctttagagaagaaggttgccaaaaaaatgtattatgataataggcataggcagaaggagagagttgacaaaatgagatggctaagctaccaaaccaaatgtgaatcctttgaaaggcttgctaattgagttcataactttggatccgtactgagagggatgcacatatttgttcgtaattgctttattgaccataaaacaagcaaactccaaaacttaatgatctatatttggttgaaaggctcatattccaatgttttttgttttttttttcttttgtttacttattaatttatagatatattgtacaattttatcttttgcaatagatatattgtaatagaatattacagtgtgtaattttctcacgatccacaagctcggtagctaactagctat

SEQ ID NO: 64937 - DNA, 684 bp, Cannabis sativa
  modified_base (653)..(654): a, c, t, g, unknown or other
agatacttaattatttgtttctaaatttaattcatataattaaacaaaaaattaatatttaagttaattatattcatgacacttaaatattagatattttttaggaaatttaattacatagaaaattatatttgttatacccgaaattcggctgccatctcagtggaggacacgtgtcacgataagaggaatatggatcgatgcagttgctttatatgaaataactcattaattacctgagtatcagagtatatttataacccgtaggctgtaaggtcctaggcgaggaattaatgtacaaactggtacttaatatataggcgagaaaccatatgatgctgaatgcaaatttcgaggcatcaaggacagtacacattggaaaacgaaagcgacatatatcaattgcgaaagtccttagtgtacaaactaagtcttatagacggatcgactcaagactaagtaagcgaggtgcttgtctatgggaagacctcatataacttcatcccgttagtgtcagtgaggctcacaaccctgggaagtcagaggctaacattcaaatgagttccacaaaatttattatacataagaaccgcgatcgacatccggcatgcatcgtcgacctcgaaaggaaaaatggccccagctcgcttttnngatcactggaaccaagcttctgttgagaca

SEQ ID NO: 64938 - DNA, 1095 bp, Cannabis sativa
gagccaaatttgcctgaggagatggagcagaagaattcgattgcactccagtgaaacttttatcgaatgtgtaaaagcaatccataacagtgtgcccaatcttgagacacagttggcattggggtctgttggaagagttgcttgatcggcgatcctctattaaagcctcctcgattaacctgagtgaagtgaggtacagaataatgtggaactccatatccatttgccctgggatgataaaaataagcaccccgattggaaggagaaccccttgctgcagaatactgaggagaaaaggttccaaattccagaggaggtcttgaaggatagttggttttgctaaaccgattttgataagcgagattcacttcaggttgttgttcagttttagaagtggcaagattggctatgagttcaggttcttattttgtcttttcgattcttgattcagaagcaagcaataaggactcaatttctccaacagagtatccttcgattcgagtgtttgtcgatatgacaaaagtgtcatagttactgggaagtcctttgaatattgctgctatgtgagcacgatctctaaggacttcaccaacagaggcaaggagatcaacatgctgtttaaccttcaacagataatcattgagtgacagtgtccctttctttaagttttgaagctgggttctaaattccaagattttggaggagactttcagcgtgaagtgtttctccaaattggcccagatttgacgagctgtgtggcacccaaccattcgagtgagaaggctcacagtcatagatgatagcagccatgaaactaacaattgatctgacacatcccaatcaagaaactcatggttgtaggttgaagaagcacgatcgacatcactgaggaattgttgtggaggagcttcatcttgaatgaatttcagcaaacgatttccacgaatcgcagcaaggacctgctgtttctaaagaagaaaattgtgatcatttgattttacataaagattatgagtaaagtgaacatgggagaactcatcggcatcacgatttcgacttctctacagattaggatgtgtgtttgtggaatttcca

SEQ ID NO: 64939 - DNA, 996 bp, Cannabis sativa
gacaaataaataattatggtgaaataatcaacaatagcaatggtataaatgttgattttatgttttattttttatagcaaagttaccacaatttcattaagcactcttccaagcatcaactattggagatgctctaataccaaactaaaaattattcttaagacaactaatatacataactactagtttccataaattttgttttacttttctttctgatttgagttgatgaatcccattactattttagttgtcctttaattgtaaatttgtcaatttgacatttacatttttcagagacattttcattgcaatcaaagcctgtttagtgtctgttaaagattcaaatttgggactattttaaccattggattaaacacttatttattttagaggatatgcaaactaaataaataaataaatagtattaagaagaagaatattgatttaacagaaaagaaaaggaaaaagaaaaaaactctatgcctttatggagttatcaatataaccttgaaactatatggatgagagttgacatgagagattgaatcagtcttcatttgataaccttgaaactggattttgattggtaatatctcgttctgtatcatcaactgagggagtagaatatggttgatctactggacttacatcattgttagttgaggaagaagtaactgaagtaatcccattatcgattgttgtggtctctatcgtagccgacttggaaatcagtccttgagcttccatggcttcccttgctgctctctctttggctcttctggctctttccaatacatattcctacatggagaaacaaagttgaagtttccaataattatcagagatatttcatgtaaccatttcaagaaaatctgctaaactactttgtctatatggccaagtggagggaactcttcaacacctgtaaatcatttcataccaatcccaaaagaaagaacttgacttgaaccagaaatattgtctgaaaactca

SEQ ID NO: 64940 - DNA, 2018 bp, Cannabis sativa
tatcttaaagtgatagaggtaaaactggtataatatttaaaaaaaaggtaaaaatgataaattttaaaaaagagggtaaaaataaaaaaggacaatataaaaaatatatagaaagaaatttgctcgtgtttgtttgttgttgtaatttcttcctatgttttgaagaaagtagcccatagaaatgatggtggaaatgggccttttaaggcccataaacataaacagagagtggaatagatgtatcggtgagagcgagatttaactcccatttttgtaataaacaactaacaacacaacagggtccttcgcttccacgccttctttcttctcttgctaaatctccatcactttcctgggaaaatactaccgaaaattcaccaagaaaatccatttccgaaaattagggtttctgtaaaataaaaattaaaaaatgtctcagacggggaaattaacgcctaatctcgaccaacatagcaccaaagccctcaatctcatcgtgcttcagagaatcgatccgtttatcgaagagattctgatcaccgctgctcatgtcactttctacgagttcaatatcgagagcaatcaatgggttggtgtctcattcctgttttagctccccattttgcttgttcagaatttataacaagcacaaaagaatttagattttttcttttttggtgttagatccttagattcttacgatttgcttccctctttgagactgaattcgctttatgttaatgaatctctgttttcaattccatttctaagcaactttgtttggtttcagagtcgcaaagacgttgagggatctctctttgtcgttaaaaggtaacagcctctatcttgaccgttatgtaattgtctagtaatacttgttttttctcagttgggatttttctttatggttaaattgtaattcgcttaggctcacctagttcactgtatctttttgttgttaaggaatactcaacctcggtttcagttcattgtcatgaatcggcgtaacacaggttcgcattattactcatttgtaattcattttaggaattgactcatttttgtgctcgtgatggtcaatacaatggcaatgcagccgatttatttattatagtttgtttattattaagctgttgacatcacatttggagcatgttactaagttgggctttatctttctatttgaatattccgtaaggtgtccagatactcagttggttcttagtgttatcccacattgtagatgactgttatctcttcgtgataattttgaggataaatgttatgttattggtttttacatgcctttgcatttttcttaaatcaattcctatactgaacagataaccttgtggagaacctattgggagattttgagtatgaagttcaggttccatacctcttataccgaaatgcagctcaagaagttaatggcatttggttttacaatccacgtgaatgtgaagaagttgcaaatctctttacaaggtacaatatgattaatgtttaatatccttcttatccattccaatttgttgatattttgatcattcacttgtatgtgaaacttttgttactgaacagtgtggataaccatatgtacttgcatgtacatgaattttattatcatttgaagttgttttctttatatctctaacaaaaggattttggaagttagatatactgaaaatattcaaattagaaattagaagcctttcatgactaattaacatacattttggccaatagaagaacttcttttcaatgttggaaggtcagcaaagttgaaaagttgcatatttcattaactttcgtggtcatgacattgaaaatgaaatttcttcgacccttttaatatggccaggcatgtggtctgctcccacaaggtctgaggtttaagttcctcttgggtacctacatagtaattactatagttttctggtatccaaatattgtagggttaggagctttgttaaaaaaaaaaagaacccgagtactcttagatgggtgcttctatc

SEQ ID NO: 64941 - DNA, 838 bp, Cannabis sativa
tcgtacataccgctaaagagcagcgtatttctgtctgatgaggaactctatctcgtctcgcaactgattacactcatttgtatcatgaacgtcattgttgtgatagcgatagaatttgttcatgtctcattttccaaactctttgaaaggaagaggtttgcaatacgacactgttgactgtgtggccgtatagatctactctcttgcgaccaagaggatggagtaggtggtgaaacgaggcttatactctcgcaaggacttgccccccgttttggatttctttccaccaggggagttcccttattttctactgttgttagctctttttcctccgttcaaacctcctttcttcccattaccttgcgcttcaatgtcaggggatggggagcctagtgacttcttcttgttgccttttaagccattggctcgggttgatagcttcttctagcttgataaagccatttactctatcaaaaaaatcgttcattgtgtagactacattgagacgaaagtcaaaccacaaaggactcatcgcctttagtccagctgtaagcgccattacccttaaatccttgctaagtatttttgtcttggcagctgcctctaaaaattattgaatatagtccttgaggagctcatcttcctattgcttgacatctagcaaatcattcagctcgatttagtgctttcgagaatgaacaatctgattgccaaaagcatccataagatctttccatgagtcgatcgatccaaggggaagtttgaggtaccaccgctgatccaagcttgttagtgtggcaagaaagattctgcacctgactgttggaaattattttac

SEQ ID NO: 64942 - DNA, 754 bp, Cannabis sativa
tccaaggtggcaactctcttcttcacctttttgctagaagtgtttagaaggttttccagatccatatctttgaggcaaatagatacatcaacactaaatcaaaaatacataaaaagggaaatggggaataaactcccacttaaagaaagttgccataatcaatagatgatgaagagggagctagatcccaatttgaattttggtggcacgccctatccaagtttgtccaatactactcgacaatcccataatacgagctagtgcaactaagctggatgtggaacctaggataccaactatcaaacctatgtgttatacagtctatgaggaaactgttccaagtatagaaattatattgactatcctagaaagttactaacgaggtgcacttttccctaagcacagtaggtgaccatccgtattgattaacttgggaagcttcttcttcagcttcccgaggggttactctctagagatagtgtatgcgagccacatagtcttgccactcctcatcagcttgaattgggaccttctcgcacgaagagtactttggaatcttgtagtcacaactgtactcatttgagccaaaaaggccatcagtcttcagattggcttcattcaagagaaagtctgcccaaatagaagacccagtaggattttctgtataacaccctaactagcataggcgtgtttacgtgattttaaacgtactgtgaagctcgttgctaatcaatgaggtttatggaaatcgtga

SEQ ID NO: 64943 - DNA, 2083 bp, Cannabis sativa
ccagaaggttctggaattggattcgttatatgtattccgactgaaaccacacacccaccgaaggtgaagccaaaaacgaaaacataatttaaatcgaaacatataatatatccttaggggtagttgcgtacacagaggaattagctttcagaactcgatcgaacgtagataaagggcattcggtcactggctatggatccattacagccaaagtcccagacaactttctacgcttgggctagctggctgggattgtattaattaatttgtctttatctctatctccatcagtactaaagttcaaaacaaattaaacaacaatgaagtgccctgttttgggtctgtatcagttttttctgttgtttctttttaactgcctatctcctctcaacgtactattctcatccatttcaactgtcttccctggtcattttttttcaaatttccttccctgtaaccgttccctctcacttctggttttgccggcgtggttttagccgtgttcttggctcttccgattgctcctatggatcctcttatcaacgatttgcacactggcctctctctcactgatgaggaaaggtcaattctcacaatcccagagtttcctcatacacatattgaagctgctcatcacactctcctggccaaagtcctcactcatcaaaatgtttacagccaaatttttattgatcaaatgggggctcactggcgaggccggttccatgttctcatcactgaatataaagagaaagaaggtttgtttcatgtcaagtttggatgtgaaggcgacaagcgacgggttttaaataaggaaccatggcattttcaaaatcacttaatcgttctttgcacaccagatgctctgcaaaatgtctcaaaggacgatctgattttcactccattttgggttcaaatttatcgtctacctttcctgagtaagtccaaaatgttggctgaagccttggggaatattattggtgagttcattgaagtgttcgaagattcaactaatgaaggatggggtcctttcctccgggttcgtgtcaagatttctacaaacaagccattgttgcgaggacaaatgatctgactgcctaaggttagagatgatttttgggtggattttcgctatgaaagactaccggaattctgttttgagtgtggttgtcttggccacccctttgagaagtgtattgcgtttatggaacgaatggatagcggtaatgatgatgacttccaatatggcccatggatgaaaggggcaaaactccccaccaatagttatgatcgttatcggacggactttgctaaaggtaatgcatggccacttctcacaagattagcccgtacatccctcacctcctcgctgccagcattaaacaatcgtgttcaaccccagccacgtgttctctatgatggagaatcctcctcacattccagaaatcatccaccctctcacccatttaccttaccaggcacacatgtttctagtaatgctgatactgttacttcccaccccactctcattaataatgattctctcactgcctctcatatcagcaatctgaagcctgcaactctgcctttgccatccttgccatctattgctaacactacccaatcctctaatcacacttccaacaactttcctcaacatcactcaccatctgtttcacacatcaaccacccgagccaaataatacaaaattccactacctctcacaaccaccacatcctaaacaacctttctcccaatcatccacaccaccacctgccaccatttactaatacccaaaaaaataagacaataaccaattactctcctactgagtcttcaccatctcctacactttcacttgtcaatacttctactaccactgatctatcccacatatatatgccagacttgcagaatggtacctttgctacttatccacccgtactcaatccattatctcccaacaccacccttgcatcctcaaccatatctccaccaatcactcatctccctacctactgcccagtcacaatatctgctacaaaagagaatctgccaccaggtgtgacttttaaaagacaa

SEQ ID NO: 64944 - DNA, 702 bp, Cannabis sativa
acgtggcttggcacgtaacaatcacctagtatatatgatatgtatgcataaaaatgaaaagtgatacaatttattagtttcttcttactaatgattatagtcaaacacttttttattttttagaattttttttttttgaaaaaaaaaattcttttttcgtcaagttaaccctaccataccgaccaactttgtcggtcggtttaattttttttctttatttgggcagattgtacttagaattttgtaatccggtctttacattggattaaaaatatgtaatataaaccgaccaaactgaccgacgtacattcctaattgtaattcttaaaatttccaattggagtaaaatgccaaagctaaatgttaaatatttgaagttgcaaagtatgaatatatttaatcgtcccattgaagtaggtaagtatctaattttattttcatttaatagttgttttactgtttttgttattattttttgttgttatgtttctttgttatattatgattgctaagtttttttaattattttttattattgttacaatcgcaactaaagaatatcaatccaacttctaaggagaaagacttgttgaatttgtctgattatttcttggatgagaccatttattccttcaacaaagggaaagacaaaatataagggaaaggcaattttgagcatattgcaaattaatgtttctacaa

SEQ ID NO: 64945 - DNA, 730 bp, Cannabis sativa
tgcatggaaactcactatacatatgtaagctctactaattactaataaacataatattaaatatttatgatttgtagtactattttttatttttattattgttttgtattaaaaggtcagctaaataagcttcctcaaaccattgttattttataattttcttcaaataatgaaataaagtcaagtgttggtggtatgcataatgcatgaaacgtggttaatattgtcattgaattttcttttatatttagggttataatacatattggatcgaataaaaccacgcatgttcaattgttcatttcataaaataaataaataaagaaagaaagaaaatccacgcatgaaatagaagatgctgctaatattgtgacccaatctaatctcccaatttatttgaatttaattatacattaggttaatagaggaagtcaaatctaataaaatagcaaaaagtatcaaaatttgttctgttaattcatttttgtaaaataaaggagagaataaagcgttaacagtgagagtggttgtgaatatataagggaaatttgataattcatgctaaaaaattagacatggtgtttaattatatccccaattataacacacaaaaaacatatacctatgttttaattttcttccaaaaatacccccatcatttcaattccccccatctctctaacttccctctctctcctctctctcttcctttctcggtttcaaactcacc

SEQ ID NO: 64946 - DNA, 1448 bp, Cannabis sativa
ataataataataataataatcccctattattttggggccctgtgcaactgcccaggttgcacaggttattagccgcccatggctatagcaattctcaccacagacttttccctctatttttttgtattgttctctactacaacagaacaaaccaatgatcattcaccaggaacctctcatgaaattaaaagaatcaaattcatatgcctattttttgcattcaatgattcgaaatctattatcattctgaaaattccataaatttacttaactcataagcagcactacactgcctgttttaattaaaaaataaataaaataaaaaattaaaattcacataatctctgcagcaaaagatagtaggagacaagaaagccctcactttttccaccagaagcaccaatgatgatgcgttcaccgtgcttaaacaactgattctcaacaattacttgatgaatctcctcctcaaatgccttgtagaaacactccctgcaaatctttacaaaacaccaaaaatgaaaactaaaacaatccaagtgattccaaattcaattatgcaaagcttgttactttatcaaaaatataataaggtaatttaaatatgtttttgcaaagttaactacatagtctaaggccttaagacttagcatcgtccaataaacaaaaaagaaaatctagaattacaaaaaaaaactcgttttaacttttctttccaaggaaaccatataagaaggtagcaaaattgagaagccaaaatgggtttgtgtgtagggcgggtcttctcgcgaggactcagtcatacaagcaaaaagaaacaaccgattgaccacataatgatcgatgaggagcagtagaaggtctaccaatcattatgggcggattggatttggtttgaataaggaaaatagaaaggtcaatcgttaggcagaaaaaccaaaagtaatagatccaaataaaatgaatcgaatcgaatcagaaaaaccaaaagtgaaaggatccaaatgaattgtatcgaattgaactgtggttgaggagtttcgacccactctcctcgtccaatcgactacaaatcgtgctgaccttgaatgaatcggaccaatcggatcaatcgttctccatcgtattgaagagcctcgactaattgactgttcatcgtgctgggcttgaatgaatcgaccaatcgtccaatcgaaccaataaatcttaccaaacgactctgttgtagtttgacccactcacctcggaccaaccgactaacaattcaatttgaaactcaatcggaccaatctacaacttcatcaagaactccccatacactgtaagatgaagttcacatcacatgcaataacgattgaaacttactcttaaaaaatggactgctcatcctgtgtggtcttgaagatttgaagggagtatttgttggaaatttattttaccaggattttaga

SEQ ID NO: 64947 - DNA, 1981 bp, Cannabis sativa
acactcctacgctcaacaacttcctccctcatgtttcccaccaacctattcactcaatgagtcccactcgaacacccatcaactcagctagaatagcagccggtgtaccacttgagactactaccccgcagctgcctaaatctcctcctccggcctatactaaagtcacaactgcaatgcaactaaatgtgcccttgccacacttatccacaccgcctactatgtcgatcccttctgtcacagaaggattaaactagcacactgtcccgatgtcatgagccttttccactattctggaggatttaacgacttctcaactgttgtaattttcccttggagcttctttcgtgccaacccttagtgctctcccaggtcgtagaattaaacccaagcatcgctctagcatcaatgaagccgagttcaggaagcttcttaagcgcaatcgcagtctcacacaatccttggatgaaagtaaccccgatgaggcaggtgtcgctcaacgcacctgccaggagccatgagtctcattagttggaatgctcatggattggggagtaaacgagcattttgctgactctctcttttagttaagcattttaaaccagccattttgtatattatggagactaaactacatgttggtgctataaataagtttcgtactaagcttagttttgttaacagtcttgaagtcccttgggttggccttagtggcagcctccttttgttatggtctcatgatgttgatgtaaccctactttcttataatataaatcactttcattgctatatttggtttcccaattattattctctcactttcactggtttttatggggctccgcatcacactaaccgcactaacatgtggcaacttcttcatcgccttggagatactattcataatttgccttggcttttaatgggtgattttaacgactttctctcacctgctaacaaaattgggggtgatatttataaacagccttcggctctttttaagaaattcctcgatacattcactcttcaccccattcatggtcatggtagcccctacacttggaccaacaaacactctcatcacacccacatacaagaaagattgtactggggcatctcgaacctcatgtgggtttcttcttttcccaaggtgcatctcctccatggagacttttttggatttgaccaccgcattctaaccttttccctgcattaggatgaggatagcttacggcctcataaccagcaattgcatttcgataatagatggcttgcatagaatggatttgaggactgccgtcataaggtgtgggcccccaatcatgattcatgtgacaacaatcatatctctgatcttacaaacaaacttcaacattgtgctctcactatctcacagtggcaaaaatcgattgggccccctcttcctcaacaaatcaaaaatgttcaatcttagcttcaagctacccaaagtcattcccaaccttccaattctcagcttcttctctgtcacgaacttcaaggggatcttaacaggcttctctataaggaagaagagtattggcagcagcgctctcgaatcacttactcatgcaccctaatggctcaactatcactgatactcaaagcatttaatagttattgaacaatacttcactcaacttttcaccaaccaatatcctattggaaagcaaatggattatgttctttctggaatctctgacaagcttactgatgcggaatgtttatgcttggaagccccattcacatatgataaggtccagcaagtagccttccaactagttggcgataaatcccccgggccagatggcttcaatggaatattcttcccaaaaaactagcatttccatgggactgatgtcgttcaagcagctcttagcttcttgaatgataatgcatattatcgcctttcaatagcaccatcagcgtccttattgttggaatttattttactaggatctta

SEQ ID NO: 64948 - DNA, 582 bp, Cannabis sativa
caaaaaatagtttacccatatttagagagtgagcgctctgaagtctgaagggtattcctaccatctcctctcctctgtcagcctcctctccacatttttcttctcttattttatctatccaatccgagcgggaaggtcatcatcaatggaagctaatgatgttaccgggaggggagccaaaacctccatcgtttcagtcgatgaggctctgcaaatggtgctgggagttgcccagcgtctgcctccggtcatcgtaccactttacgatgcgcttggcaaggtcttggctgaagacgttcgagctccagaccctttgcctccttatcctgcgtctattaaggtcacacaatagccaaatctttacataatccactgcctttgttttgtacttttcatgatgaattagcaactgggtattgcttagtttctccttaaattcagtaaattgatccacttgggattccttttctttaattttttgtcattttattactgggttttgagtgttatttatggtttcgtagatgtcaaataaatctggcgctcgcttgtgtatatggattgtaagcttctgttgtttat

SEQ ID NO: 64949 - DNA, 701 bp, Cannabis sativa
acacattaaataagtgatgaaaaatacttttgtctctttattgatattaaatgatagagattacatcgaaatagagttttatttagggcataaagcccaacaaatgttccccaagtcatctcgatatagcactatacagggaaatattttatttgataaatgaattggagaaagaattaatttctatgagaaataattcttaacggaaaaaaagtaattttgtgaaaattattattttgaataattgtattaattgtgattgtataattgggatttagctagttaattttatttgatgaaactatattaattagttaaatataataaaattcttaaataatattgaagagtggtatattattttagtaaaaataatatttatttaatccaagtgaaataagatattaatgagaattaatcaattattatttattagaaaaataaataataaatattatttctggtaaaattgagaaattaatattggaccttaaaaaatggctcacatgtgtagggtgacatataaaggcccatggaaattttgtttgattattttattattattataataaattaaatcaaattatgaattatcttttaattattatattaagtatattgttagataatgtattttaaattaaaaatataatattaaataaaaaattatacctaatttttgttattcagttatatgatat

SEQ ID NO: 64950 - DNA, 801 bp, Cannabis sativa
  modified_base (232)..(232): a, c, t, g, unknown or other
atataaaaatatgatatataatcgaattcaatataatacaatacaatacgacataataagacgtttcaaacgagcctaaaataaataaatgtttcagatcattaaatatatatagtactacttcatatatcgtattactaaaaattgatataccgtagtaatataatgatataccacaaaaaaattataacaatactaaattaatactctatatatcatgctaacaaaattntatataccactattaaaatatataagtatactaaaaaatttgtatataataaaatagaaattaaatatcatctaaaataaatgatatattatagacaacaaaaaatcatataccatacaacaaaacacatataattttgttaggatgagagagagagagagagagagagagagagagaatttaaccgagaaagaatctagagaagatgagtttgggactgcaaatcagtgtcattttatagacaaaaataaggaaacccatggtctttatcgttgctccagtaaaaagagctcacgtccaccactgtccggttttccatgatggtaaggaaacccatggccattttcgtcgctccatgtgagtcctcccttctcctcatctccctcgaaaaacccatttgctctattgcttctttacttcccacagattccgaatcacctgaactttcttccatgggcttctccatcctatctcgaccaaattggcagaaacatccttccctcaacaagcttctccattctatatcatcatctcatgcgcaaaagttcttgattcctaacgggttttta

SEQ ID NO: 64951 - DNA, 845 bp, Cannabis sativa
tccgcaaaaggtccgctcaaatttccaaaaaggaaaagagtcacagaggtgtaagctccctcaagcgagtcttggccctcaggatcgagaggactgaaagagcgtatccgtgcactaagagcccagggagagagggaggaaaaaccgaaggtaccctctagctgacctaagataaaaaattaatgaaaagcatggtgacttaagagaccatcttgaaaagaagaaacacgcattaccaatctctggagacacattgaacgagggaatcctagctgagttggcaatactacgcaaagtcattgctagggtctcccagagataaaaaagggatgactcggactctgtctgcgaggaccgggaaccgtgcgcccgacacatattggatgtagaaatccccaagaagtttaagatgcccgaaatgtcaacttacaccagagattcggaccccaccgatcatttgtccctatttaaccaagtgatgactgtcatgagggtcagaaatgacgcaaaatatttatgctttccactgacgctgagtggttctgctgaagaatggttcaagaagttggaaccaggatcagtggactgttggagtaagctacaagtcagttttcgaagataatttgtcgcgacaagaaaaattaaccttgaagtcagcgccatgactaatataaaacaattgccttcagaaactctaaagaactttgtaaagagattcaaagaagaggcttcaaagaccaagaaggtagacaacggacaacagctggccctcctccaagctgggatctccacggggactcctttctagaatgaactacaataagagggagcagctaatctccaag

SEQ ID NO: 64952 - DNA, 1707 bp, Cannabis sativa
tttaataatcaacaatatgaaagttttaatttggcatgtttttcaagaaagttctttgattagcaaatacagcactgcatttgaaaatgcactgtagcgtgccttagcattaggatgttacaaaaggtttgcaaagatgcaagctaggattattagtcaagatgagcagattcagaagttgagacaatagggtactcctgttgcacctcctcctcaggtacccattgctcctactccgatgttgccaatagagcagcctacagctagtacccaattagtgccactgtatgaaaagtttcgaaaacagggacccctaatctttctgggtggccaagatgtgatgaaagtcaagcagtggttgactactatgaactagattttgaattttacggcagtcaacggtagtggccgggtgacctgtgctacttttcaattccaggaggattcctttgtatggtgggatatggtatctctcacctgatatgttttagtgattacctaggatgagtttcagacctatttaacacaaatactacaatgaggcggtgtgcaacactaaaaggagagagtttactcagttggtttaggagaatcaatgttagttactgactatacaaccaatacttgcaagattggcctcaggtattatacccaaagacttcagcaagaaggagaagtatttggtgttggttttatggtacaaaattgagtacgtagtggaataattgttactgattatcattgtactatatacccaagatctctatatgtatatatacattaaactaaaagtaaacctctcaaagcctatcaaggcaggggcggaggtatattgtagccaagggtggccctggcccccccacccaaaatgtatatgcactatttttatccatagtcttctttggttgttagtcaaactaaaattaaatataaaacaatttgcgaaaaaatattaaaataaatggcgtaaaatagttgcatatatatatataagtattagtatctatagataaatacgtaatgatatggtaaatatgaaaaatcttaatatcaaataaaaagttaattaagaacaactttaatactctgatcatgtgcaaattaaaactttttgattttataattttggcaactatttttaacttactttggtggtgggtaaaaatagaaaaaaaaagtttttttttttgtatataaagtgataattcttattcttatacttataatttctacaattatcacaaaacaatttttctcagtcatgaatatagtaaagactaaactttacaacaagttgaaatatagatttttaagtgaatttttgctatagtctatattaaaaaataaattcttgaaagaatttgtaaaagattcatttatagacgttcttgatataaaaaagagatgcttatattttaattttaagtattaattaacaatacttttcaaaaaaattgttacttaaattctaatatagttttggccacccttgataattgatcctggctccgcccctgtatcaaggtaacctcgagtcttttcatatgttgtatccttagaacggtgatgaaaaatttcgcaccttgatcttttagatcttccaccacacacaaagactagtgtgggctagtaggatgatagtgtagaaaaagtttttgtattctcaacacatgagcaataacaatcttgttgtagtgatggaaagaa

SEQ ID NO: 64953 - DNA, 2597 bp, Cannabis sativa
agagagagagagagagagcaacacgagatggaatgagagagaggaggctgaatttttggattgtaggagagaggggcattgtggggttaagattaaaagattagcatagttaaaaaaaattttgtgagggtggcataaaataacaccataagtgttttttagaataaaatgtcaaatttctctttatatatcatattattattggtataattaaatattaaatctcatatataattttaaaaaatatcgccaactaaacataagatgtcagctataaaaagtgctagagattaccgctaattcccaataacaatatttatcaattaattaagtatggatgatatagattcgttacgtttatgaaccaatatcaaataatgctgacccaagattgaagagaccatgcatacatataaattaaatgtgagtataactatatattattatttgatacaactcacaccaacaccatacattaggcgatgtctcaccacttgatcacatatatatctgaatacacagcattgacgaaatactatgtcaaactatagacttcatgacttgcaagtttattgaaaattattaatttgtctatattagagtttttaaagaaatttgaatttatatgtatttatttattaggttaattcatattggtagaatatattaatattttaattataaaactcaattctactatttccatttgaaacacctaatcctctcgcttcctctcttatttctcttgctctctgaactcactctaaggattcaaacccacaactcaccacccacaacattggtgtcccttctctctacgaccaccacgaccactgacccaaggacccccatggactcaataaccatcgcggacccagtgacttctccatcaaccacggtttcaccatcgacaatgttgtacatgtcaaatgaataaattgtatgattaatgtttattatttgtgagtagatgttagatttagggtcgaaaatagtcagatctgagttttgggcaaaaaacaggtcttgaaattccttcgaggtcattgtagtgatgtcccaagtgagggataccatttcccaccacacgagagtgtccttctggaattaaaacaaagcacaggtcatcatatcattatcaatgacacccataaagttaagaataatgttaatcacaatcagccactatgctttcatgacatctggacctcccaaaaaggctagaggtgcttgcttacaaaaccactatacaagggcttcatacgattactagcatcaagttgttctactggaaacactacatcatgttgaatacttcgagcatgcatctcactaattcgggcataacaagagaaccttgccgccttaacctcagaatcactacatcatgttgaatacttcgagcatgcatctcactaatttgggcttgcatctttgcaaacctttgctcctattcatgaggagcctgtgatggattttcataaccatctctatgtgatctatcacgacctcttctgcgtccatggggatgaggtggattttgacctccccgaccacctccgttcttaactattctaccctaacttcttgtgtttcgccggacatccatattataagattagcatgtgaacccataagtcaagtagatcagtcaacgatcaaataaagtttagcaattgcatacatggaaatttaggcaatgcactaatcagctaacatattactaacatacttcctataatattttctaatcacaaaaattactaaacaagtaaaggcttactaaactatgagtcgagcttgtctctaacgatgactgtacatatcttaacggtcttcggtaaacaacctgacagctttgatactaaattgtaagggcctactcgcttaggcacactatagtgattttttaattactgtgtacacctttactaatcaaagggtttctcataaatcgtgtcaagtttaaactttttaagtaaacataattttacataagggtcgggatcccaatttaaaaagtttacaaccttttcaaagtacatttacaaacatgtcactttgcagctacaaagtaaaagcccaagtcgctccgagactgaactctccaagtctaaccatcatgatatgtacaatcatcctcaagctctggactcactattactcggccctcgccttttctttacctaaacatgtaaacaatatctgtgagtcgacggattcagtaagaaaagcataaaatataaaacatatatacacattactaacttggatctaggcgtccatacacatatctacaaggcttaacagataaatcaagaacgttcttacctttggtaagatatatcataatattagccacaactagcactataattgcgctataggcttagcacgatagttgtaccgctattatagcatcagtctatacctgaaagtactattaaccataatatcactcttaaccagtactatacttgtacttccgacttgcactactataaaaataagttttagtaacacacattgagtaactctaaaactattttacattcactttctgcgcgtcactataggcgtataaagtcagattttgt

SEQ ID NO: 64954 - DNA, 1148 bp, Cannabis sativa
agaagacttagtacaaaatgaaatatagttttcaagggcccaacgagagtccttcccattgatagcattgataaccaccatcgagtcattctccacaataacaaacttggagctgatatctaaggctactgacacagccaagcagcaggccgcagcttctccacagagaacatccgagaaatcttcccgagccgtctgaactctaatcactctgccaaaatgattccttacaacaacagcaatgcacatactatcaaatcccaccttgacatcacaattcagcttaatccaatccggaagagaagggaaccaagcttcctttaaaactggagtgggactaggaagtaaggaagcatgcaaatctgcataagaaatacaaatattatcaatacacttttttaggtcaggaggacagttattatggaccttctcattgtgtaccctccaaatagtatccacaacaatcgaggcatataagaaaacatcatcaactcggacccctctattatttagatcgcaaatgaatttgatccaatcccagacacagatgcatgtatcacacaccggaaagatactccagggagaagatcgccaaaaatgaaactccacatcacaggaaaggaacaggtgttcaaaggattcctcactcaagccacatagggggcaactagtgtcctctatatggaatctttttccgatcaccgctctaaccaggagagcactagataggagggatgtaaaagtgcagtaaaagacaagcggagccaagaaaaaaatgccaattttaggcatgacgcacttctggccgcggctagatcattgtggtcgcggctataactcgaaggcagaatgctcgaatttcaatgctccagtcgccgcggcgagatacacccttgccgcagccatagtggcactatagaaacgttgtttttagaagcctatctggccgcggcgagcaacaacttggtcgcggcgagatggaaattagttataaatagaaaactgcgattggaaattaggggaagcgatttggagacctaaaatacagcgaaaagcgacaagaggagcaaagtgaagatcccgaatcattccaccaacaatttctttctctattcctttttaatttctttatgttgaatattgttata

SEQ ID NO: 64955 - DNA, 1737 bp, Cannabis sativa
agaaggtgttgctttgcgtgagttgcaagggaggagcaggtgatcttaggggtgtaagagttggtgagttttcggggtttgcagggaatggttggaaggaggaagaagaaggacgcagccatgggagtaagagtgttgagtaatcttctacagttggagagtgactctcaagaaattaacaatttgtgtggatggaaatttttatcataaatttgtcacaaaaaataaatttatgtttttttttatacaaaaaaaaaggttaaatgttaaatttagaaaaattctatttgcaatctacaattaaaatttgtcaatgtgaaaattcattaatgggtttcaccatagaagagtatttcgacaactataaatggtgtctaatatctaagtttcaaaattgtatctaatatctatcgatccatctttttatgtcattattgaaaattgtaaaagcaagactttattgccaacaacaactaaaccaagacatcactagctataataataataataataataataatttcaaagttaaaaaaccctccaaaaaggaaacaataaatcaaaatcaaacgttacaaaaagcaaagtaaagcatctttctctctctaccctttccctagaaattaaaaaacatgtttataaacaaaagaaagaccaaagtataatcaactcaacaatctctttctctcaccataataaaccctacaattacattacaaatccaaacgaaaaaatcatggatgagtaaaacccctctccctctctctctctctctatatatatatgtgtatatgtatcatgtatatacatctaattaagatgttcatgttgttttgatattttcagatctgaagaatacccaaaatcttactcaatcggcaatcagagagcgatgtcgatgccatcttcatcatcatcatcgacgacgagcgtccacgtcacagctctagacggtctagtcaacgtgaactcactcttcaccatcgccgtcttcgtcggtctctctctaaccacaccgggacaacaaagcttggagaatcgagcttgcgacgccggaatcgatgtagccaagaagcttttggtattcgaagttgtttcatttagcttcttcctcttctcatcgctggtcgcccagggtcttaagctggccattaatttgctgaacagtaaagacgtagatgaggttttcaaagctcacatcaatctgaaggtgcttagatttggtatgatgggatcagcggttggatctgttatgggatgcgttttcttgatgttgtcaatggtgaatgtgatcgagattaggttaggtatgctttcgtgcggtagtaaatctgcggttcatgcggtgacgacattgttggttttggtatcttctgctctaatcttttatctttctactgcaatctatgcttttatgcattaattagcttagcttaattattctctttttatttaattaaacttcttaatcagagctcttgatcaatcttgttaaatatcgttaaaacaaaaagaaaatgtatatttgtatcttatttttataaattttcatttttggggtgtgtttgaatcaatttatctacttgtgaaatatgcatttgagtctacattttcaattttttcaaaccaattaaatgatcaaaccaaactaatccattaaaagacaaattggtgtgaaatcataatttatatttggaagttttaaatttttttaccataattttttttttatatata

SEQ ID NO: 64956 - DNA, 836 bp, Cannabis sativa
acatccagtccctcctacttttgctacaataaaatccctacaaaacttgagcaaaactttcaatttctctattaggcccttttcttcaccaaaacccaaataaaactcaataaactccactaacaactccaaattaccaagtggacacactaacacatattatcataaaatggaaggaaaagaactaaatataagtaaaatacacacatagattaagctaaaaaccatgaaaaataactctgtattcaagttttatcaatgagaaatcccaactctttggttgggaaggtgttatggaatactaactctaccatcatggaaagccaaaaaaggttcttctttacaatctatctggagggccttgttgtggggcagggagatagtggtattaggttctcggtggagggtgggttcaggtgagaacatcaatgggataaaggaccgttggctgcctagaccattgagttttaagcctttcataaaacttgagattcccattgataataatgtggttaatcttatattcacaaatggggattgggatgctggtttcttaagggttgtctttgatgaggacgatgatgagctcaatttggggatcccgagtggctctcttgacatgaaaagataaactaatttggcactattctaatgatggtgaatacagtgtgcgtagtggatatactacttctcttaataagaaagtctacgatgagagttctaacacgaaaaatactaagagatggtggaatgatttgtggaacatgagagtacccccaaaagttaaaatatttttttatggaaattgagccatttgtggctcccaactaatagtt

SEQ ID NO: 64957 - DNA, 786 bp, Cannabis sativa
tatagacggaggaaattgtctaacataatttatgagcatccaactgctaaaataatagtgatgtatacgttgttctagtcaaatatctaggtacgtagaattttgtgctaaatttgtttgttcattcaaatattattttagactatccattttgtaaaaattatcgaatgaagagtagagtattcggatttgtgggattgttgatacttacttcttgttgtttgttacacaagtgtttaattaaagaaacatcttaacttgaataagtctcaaggattctctttacttgaagagaggattgtgaccccaacatatcttcatgcacaaatttggcctcttctattccacaaacctgcaataacagtaaataaaaatctaggcaaatccacctcagactatcttcaattaacattttgtttgtgatgagacactattcagatttacaagtcttattagacatcttaccttggggtgatgagactaaaacaccagctaagatcacaagaagaacatcttaaatcatcagttgtcaatgaaaattaactaataaacatgccaaaaaaaaaaaagattggaacctgtcagacaaccgaccgaccaccccagctagagaactagctgagaacgatcctctacagccgtgatgatccaaagatcatctaaccgttaatcacgctctgatcggacggccatagttcatccaccaggtttggtttcctgtctccttagaactcaaggaaacagaggtacgagcctatagaacagatcctgttcaagtaaggtcgt

SEQ ID NO: 64958 - DNA, 1815 bp, Cannabis sativa
gtgacatgaaggagctgaagagagccttgctgaattttttctcgaatgaaatggcaatctatttcaacgtgcttggtgcgttcatgatacaccggattttcgctgatgtggattgcagcggtgttgtcgcaatagagattagcaggttgtttgtgagagacgccaaaatcgttgagaagggcaaggatccatgtcagttcggaagtagcattagccattgcgcgatattcagcttcagcagatgaacgggataccacttgttgtttttttgatttccatgagactagggacttcccaaggaagatgcagtagccagaaacggaacgacgagtgtcttgacagctgccccaatcggcatcagcaaagaaagaaacctggacattgtcacgggagaggctggtttctgtgtaggcttgcagatggggtgctgtatcagacggaaaaaatagcccctgacctggagtttgttttaaatattgtaatattcggttagtggcctgcatatgagggagtcttggacatgagagaaattggctgaggtaatttacagcatatgtaatatccggccgagtaatggttaggtaaattaatttacctattaaacttctatagaccgagggatctgggagaattttccctttgtccttgctctattttagattgagttccatgggtgtagaggccggtttagctcctaggtaacccgtatctttaagaagttgtaaggtaaatggcctttgagaaatagagatgccttgggaagttctaccaacttcaaggccaagaaagaagcaaagtttgcctaaatttttgagtttaaacttgttatcaagtttttgagtgaattgtgatatggcaatagtattattgctagctatgatcatgtcatcaacatagattaggatagctatgaatgtagaatttgttttctttatgaacaaagaattatcggataatgattgtttaaaaccatcctcgatcaaggtggagcttagtttagcataccattgtcgggatgcttatttgaggccatagatgctcttattcagtttacaaactgtattgggaggagcattataaccagggggattttcatgtagacctcttcatagaggtcaccatgaaggaaagcattgttgatatcaacttgatggatttcccatttatttatggcagcaagagccaaaaaaactttgagagtgttgaatttggcaacaggtgcataggtttgagagaaatcaacaccaggtttttggctatagcctttagcaacaaggcgagctttaaatcgtactacttcaccagcttggtcatatttaactttgtacacccatttgcaaccaattggtttgtgtccaggaggtaacttggtaatgatctaagttttattttttttttctaaagcaagagtttcagtatccattgcttcgagccaatgtttaaattgtgaagcctcagcataattttgaggctcggtctgagtatatgcggcaagcacagctgctctaaatgaaggatggagttttatatatgataagaagggttcaataggatgattagtggatgccacatgacatacataattttttaaatgagtttgacaatatgtcgtcctgtttttgtggtttggatgtcaggtggtgcacttgtgtcatgtccttttgatgcagaaactggtgcaatatgttgctgaactggagaatttgttgctggtttttgtgaagctggtgtaagagcagtaggctgctgaattggagactctgcagcaggggatgactcgggtgtgagagcaattggtggctgggtgaaagatgt

SEQ ID NO: 64959 - DNA, 952 bp, Cannabis sativa
gcggacccgaataaaaactcggattgggactcgagacgcgaacccaaacccagacacggacttggacccagacgcgaatgcagtacccagaccgggattggagactcaaaccaagacctaggtccctgacctagattagggacccaaacgcgaaattagaaccagaatcaggacccaggaaagggactgggacctaagaccagaccttagtctcggtcccagactcggacccagacacggaccgggacccaagatcggaatcggacctgagcccaaacacgtacctagacctagaccaggactcagacccagacccacacccaaaccttaaatcgtaccctgtgacccaaaattggaaccggcactagaagcagacccttaaaccctaaaccctaaacctgataccctaaatcctaaactctttacacttacccctaaaccctaaaccctaaatccctaaacaataaacccaaaacccttaaccctataccctaactttgacacggggccagacccatacccataccgagatcagaacccaggacctagacttggacccgtatcgaaacccgaacctagacccaaacccaggacctgaactcggaccaaaacccagaccgaaacctcgtccgggacctagaccttgactgggacccgaatcgtgaccccaacccagaccccaacagggacgtggactaagactgggacccgaatctagactcaaacctgaacccgtattgggacctagactcggacccaaactcaggatccaaactcgaacctaaacttggacttagactgggacctaggatctagacctagatgggggacctgggccccaaaccaaaacctaaacccaaacctggaccaaggatgcagacctggatgggggacttggacccgaaactaggccccagattcgcgaccaagacccaaaactcgactccagact

SEQ ID NO: 64960 - DNA, 864 bp, Cannabis sativa
gctcctctttgttcccttctcctcctgctggtgctgctctcctttaatcctctcttttggaagactttgtgatgtgaaagtagggagtgagtcaatgtgtattgcagtgttggcttgagatcacttgggaactattttgtggattggctccaacatgttcgctttctccgatcccatagccaccatcactgattgtctctctaatttaaatcaacactaaaaaaaataccatgagatctaaataagaaacacaagaaaaagaaaacacaaaaaataatataaatctaataaatcatcacaaagactttttttttgttgaaagtttatcccaaaccctcaaaaaaccaattttctctcatgctctctctttatctgaaatcagatctggaacgagatctgaacccaaactgtcgagatgaatctgacccatcgaagcctacaccgttcagaccttccgccctcttcaagcaacaccaagacccggtgaacgagagacaatcgacatcgtgaggatctgcaacaacaaacgaggaagatacgacaccttcaaaggagctgcgatttcgtcttctcgtttgatgagatcttgattttgtgatcaccttccatgagaacgagtaggtcgtcggggagagagagagagagcggtttatcagtttgtacgatggtggtgggttgcgagtgcgtgatttgagtattagacgagttcatgggttcgtacggtggtggtgggttgtgggttcgtaccatggtggtgggttatggtggtgatctgtatatgatgaagaagaaagaagtgacaggggagagagagaaagcgtgaagttaaaaaaaaaaggctaaaataaaaaaagaaaaagaaaa

SEQ ID NO: 64961 - DNA, 1256 bp, Cannabis sativa
ttaacagtagtggagattgattgtcgacaagcaatacaattgctttaggaagaaaaggctagctgacaggacatagatagagtgctccactaaattcaaagcttagttcaatttagaaatgtttctggtttaggttttattttaagataagctaatcaaatgactcgcattttagcaaattaagttttgttgtctagaactagtactatgtagattgaggtttcgttcccttgtattcgtcaagctcttcgatttgatgagccatttcctttgtaattgtttatcttgaataaacgaattctatttgaaaaaaaaaaaagaagaagaatcacctcatatattatttttaatttttaatatttttaacgattatttttttttttttatttttacgatttggattgcgatctgggttactgcatgggttgcaatgtggattgtagtttaaattgtgttacgatttaggttgctctataagctacattgtatattcctaaaaaatatattaaaaaatactttaaaatgtataaatgaaaaaattaatacaacatgattttaaaaataagaaatatacttgaaaataggaaaattgctaaacgtcattattagtgtcttgtaacaccctcttaaatattataccgctattagtataattatgtatcaaatcatatataatttaaaaaactaagttataaaaaatttctctaatcaattatgaatggctacaaataaaaaatactcggcaccacttgtgatcaccaccaatcctcttaaaaatacttcatagactgcactacaatttgtttttggctaattagtaatttttcctcccaaattttgacatgtaccaaattatgcccctaaacttttttggccgttaaaaattcttcctgaactattgagattgttagtacatatcaaagtttgaggagcatgatttggtagatatcaaagtctaaggagcatgatttagtacataaacaatcacttaaacagtaaaattgaatgaaattagagaaaaatccttcaatttaacaatttcaataatttggaggaaattttaaacggccaaaaaagttcagaagacacgatttagtacatatcaaagttcagatggaaaaattaataattagccaatttttttattctatactataactttaatagcaatcatggttgacttaccaaccccactagtcaatatagtgtagccctgaaccggaccaaccggttcatcgctctctctctctctctct

SEQ ID NO: 64962 - DNA, 1294 bp, Cannabis sativa
atgtttttgtatatagaaaatggtagcatcaagccaccatcgaaccatattctacatttatatatgttaacttccattcattaagctcatcaggaagatatcaggccactatcagaccatatcctacatttataggtggcattagaccaccatcagactcccattttcaatctttactcattttaataataggagagcatcgggccaccatcaggcctggcaaaaaaaaaaacaaattttttatcaaaaattaagatccgaccgttttgactctaaatctaacatcaatttacagataacaaacattaatcatacaatttattccttaatcaatgaacccataaataaaatcatatatttcaacccaaatcacatagaataaaacaaaacaaaatagaaaacttacattcatagcacagtggttgtggtttggagatcttgggtcttgggttggtagtcgtcggtggattggtggtcttcagttggaggtgcggtgtttggcaatcgtgggttgctagggtcttcgtgtgcgtgagaagaagagagcgagagatacagagagaatagaggaagagagagaagaggggtgattatgagagagatatttttgaatttaataaaaaattatctatctaactaattttaatatacttaagcttaggtttagtgtactaatttcacccatgaatattaattcaaattttcattttgaaatgtattagtcaaactctatccttaattcttttatgctttatttttattttttcacatcatggaagtttgtgaataacactaaactaaacaactctagaacttgataaaagaggaaattataaattttatgggtttttataatttttgtgcaaaaatatgattttttttttctttttcaggatggttattttataaaaaaaaaattaaagaaatagttaaaaaaaataaaaaaatttggtaaaggtaaccatgtaccattatggtaaccaaaggggtaacaaattactataaagaggtatccagaaacctttgctgttttttcatattttttaaacttttttataaattttttccataaaataacttttatgagaaaaatttatatttttcgtaaacttgtacttaaaaaaccatcaaaatgaaaattcacctttaataaaatcttcggggcaaaaaaacaacaacaatgtctattatattaatgtttttgtaaataaataaaatagggcaaaaaatcttgggaataatgttggaattattttatcaggatcttagatttactaacaagtatgttatttaa

SEQ ID NO: 64963 - DNA, 874 bp, Cannabis sativa
aaatattaaaaaaaaaactaaatccctaaaaaaaaataaatggaatcttaatttacttaggttacaaccagtgtcacaataaagagaacatgggcatgaaccaatatatttagcagatgaggaagtcttgaaggctactattgattcctggaagaataacattggcaaaatatgaaacataatttctaaaagaattttcctatataaaaaattaaaataaaacagtttctaaaaacagttaaaccgatagcagtttcaaaattttcagtctctattttatttcagtatcacattcacacctccttaaaatgaagacattcaagatcatgaatcaaactcgtgcacgatcttttttgacgagattttttctcccttgttttcgttttagcgtatctatattaagtcccttaattctttgtttatttcttattcgtgcacaaaaatggaggcggcgccttacacgccttaccggtacctgaagacgcttggagcccaggaacgctccatctcatgtgtcaaattctcaaacgacggcaccctctccgacctttcctggtcctccgactcccattaggtctcttccgtcgaccgcactcttcgcatctgggacgctcgctcctccaaaggggaatgcgtcaagatccttcgtggccactccgacctagtcttctgcgttaacttcaagtctcagtctaacctcatcgtctctggctccttcgacgaaacgtttaggatatgggaagtcaaaactggtaagtgccttcactccattatggctcactctatgcccgttatttccgtacactttaatcccgatggttcgctcattgtctccggtatggatcctgcgagatttgggactctgccactggtg

SEQ ID NO: 64964 - DNA, 906 bp, Cannabis sativa
aagtaatgagatgtttagttggtgattttggcacacacaattgccaatgtgtcacttttgaaaacaagaaaaagtgacaacatgaaatgacaacggggttagttttagcattaacttgttttcttggttttatggatgtattttttaatataaatatgaataataaagcttgttttcactcttcatttggtgatgattgcattagcttttgtgacactcttgtattcatgccattttgtttcagtttgtcatatgaaagaggttttaggttggctagatctagggctgacactaagtccacacttaaggcccacatattttagggccggcccaaataaaaaaaatattttagtaaatatatatattttgtaataatttttaaaaaatataatttatttttataacaaaagtttaataaatttatttttcttaattcccaaatcaactaagggggctttgcctgtgaatcttctctaccttaaatgcgctagatcttcgaatgggctgagttaacacacttcattgtcaagaccgattttacgagtagacaaaatagattcgtgtctagaactttcaccctaacaattgagcccaaaaaaagttaatttatttctaaatgtacatattagtactagtttaaaataaaagaattctctagtatgttagttctcaaatgtttttgtaacgtctccgcttcaaaaattttctttttgatggactaccgaaaaataagttgtaatttgttgatataggtagtaccaatcaatttatttaagtcatcttcaattacattgtctcatacttacatagtctcggtatcattacacttgaacttcttcaggcgatgtgggattgcacaacttccatagtgtttccccttacgatttacggaattactaactgtca

SEQ ID NO: 64965 - DNA, 935 bp, Cannabis sativa
aacattagtacttacctgaaagcaagaatgttgacacaaagagaaatagaagagcgaaatgaatttgagaaaccttagttgccatcttctaagatttattactcaaatctcctttggtactaggacaattgttgaagatgggtttgtgtattagactatttataagaaaatttaccaactaatatttaatttattaatttttcttgttagcaaaacaggaaataatgtttctctattttattatatttaatcacaaatactacaaattactagctgtcatatataaatgagtacagatttccttcccaaattaatttatggtaaatttagagcttttcaagaaagtttagttggtcaagtagcaaatgttgcatcatattatctaataactttttaaactattgaatttactgtgtcaatagatgggtacattacttattaggatgaacacagtctatattaatctatatttatataccgaataggtttgaatggttacatttttaatgtaatggttacatttgattataatttgctatataaggttacaatatgacatcattcaaataaaaatttatatttagaagggtgtctacacatttagtaccttgtattttatgtaaatttatgtttggtaccttgtgttttgaataatgtttatttagtattatgtattttaaaatcatacgtatttagtaccctaaattcatttttttttattgaattgtatatccccagtaggacattgacagcgttgaatagctcagcatagacctaaccatttctaaaactatgcgatttcttgtttctgcaactccattttacggtggagtgctaggggcactatactgtgattcaattccaagtgtaattaaatgatctttgaactgcatatccatatactctccacccctatcggttcgcaagatctttaa

SEQ ID NO: 64966 - DNA, 909 bp, Cannabis sativa
taatgtatttttgttgaggaaatatgtttcagacctaacccatgtcatgagttacgaagcccttgaactatagtcaggcttgtcctatgaggaacagcctgttcaaatcctcaataggaaggagaagattcttttaaataagaccatagccttggtcaaagtgttatggaagaacaacaaggtggaggaagccacgtggaaatcagagtctgacatgaggactcaatatccagtgctattcatgttagattttgagaataaaatccttttaacagggggacacttgtaatgattgcatttttagattatggtaaaggcaattagcattaatcattaacattttttataattatttatgaatttatttaattttgggtcccattaataggaatgagcatattagagttataatttctcaattccacagattttattaaactgtagaggtattatttgtattatatgtgaattctgctatttttatgatttttgctcggtaatgacggaaaatgcgatggatagccatttgaatcacatgggtaagtctagaacttaattcttagtgggataaatattggaaataaatagaataccgagttgagcagagttatggttttgaccattttactcctatgcttaagttggctttagtttacgcactaaaggcattttggtcatttagctagggattaggaggccttatctagagtttgacagctggtttttagacacttatttagcaagtgatttatccaattagaagaaaataagaaattaaaaataaaaataaaaattaagagaaaactcatttctctttctctctctttgctcgaccaccatcaaaatcagaaagaaataagcgatcctcatccctttttctggtacttttcaagaaatcaagaggagaat

SEQ ID NO: 64967 - DNA, 1782 bp, Cannabis sativa
taatatcactattgctacagtaaaattatttttctcatttgaagcatgtcaaacctcaaactgaggtgatgttttatataagtccccttttaagaattaggtttagattgaaaataggccacagtagttagagttagagaaaaaaaaatttagggctaggaagatgatgttttaggtttatcattaaaaacatttaaggaaatctagttgattgtattattatatttgattatataaaattcaaagtctaaattgtcatttagcaaaataaatatacatgttagcaattttttgcaaaacataagattaaaaatagtatagggtaataataataaaattgtttttagtctcccgttagtctcggagcatctgaaactgcctgggaatcgcagtcccttcatgggaagggtggagtcgacatctctgatcgtcaattttctacagtttctttcgatttttcgagtgatcatcatggatttggagctggtgtctcggttaacagaggtcttgcgcctggatgatttcgacggaccggttctggttttgaataaagctggcgtagaggaaggtaagaggagtttggatttgtctctggttggcaaagttattggccctaaaccggccaataaagatggaattgagaatgctatgaagggggtttggaaactcaatcatcggtttcaggtggaagagttgagctccaagaatgttttttgatttttcttcggtagccgtgaggataggcagcgggtttatggtgggggaccatggacattcgataaacaattgatttgttttgtgaagccgatggggttgggagagatttcaaaaatgaattttgattttacgtccttttggatatcgatcaataatgttccgttggcatgtatgaccgagttgtttgcacgggaatggggcaagaggattggtaaacttgaagacattaagcttgtcaatgggactatgaaggttagagtgaggatgaatattactgaacctcttaaacgagggctgcgggtggcggttgacgagcaaggtaatgaggtttcgctattatttcaatatgaacatttacctgatttttgttttgattgtggtataatcgggcataaggcattggattgtcctttgagggactttggtggggataatcctagacctgatcgtgggagatatggttcttggatgtgtgctccgagttcaccaccgcgtgatcgatttcggtaccagaaaaagcgtgataactctccttctaataggccgatcatgtctatgggagaggcatcacgaatactagttgcgatggagaaaggtcgagttcgttatttgggtccatcgcaggaggagttagctcccacggctatgttagaggcccgtgaacgtgaggatgaagggaagtctgggcttgatgctacggttcatcatggttcacattcggccgttccgtcttttgatgtgcaggctgaggctttgggtgtgcagtctaccacggttggcacatgggtggaggtggttagtaagaatgatcgtgaggtggggaaggtgatgtcaacatgtgaaatgggagtgacaactgaggcattggcggatgtaatagccattcatggtgccggtggtgagtgttcaagggtgcatgctatacccgattgtggcacgggtaagtgtttgatggagggggagtgttctatggatgtggctagtggctttgtagctgggaaagcgaccgacagtggtgtggggaaagtgaaacatcatagcatgcatggattgaatagtgttgat

SEQ ID NO: 64968 - DNA, 753 bp, Cannabis sativa
agaggtatgtttcaaataaatataaaattagaggtaaatttgattaattgattaataaaaggagtgttccctatgtaaattaggttttcaaagttcatatttaatatttttatttgtttaggcagttttatttattattggtaccaaaaaaagtcgttggagcttgctgtcagtatctgaaaagtcacagaagtagctgttggcgtcggaaaagtcatcggagttgatgtcggcgccggaaaagttgtcgaaattaatattgtcactgaaaaataccaagaagaagaaaccagtttcttgatgaaaaaactgatttcctgatgaaaaaactaatttcttggtgatttatcggtgatttttccgacattggtagctacttcggcgacttttctggcactgatagcaaaattcgaaaaattcttagaattggcattgtcgctagaaaaatcaccaagaaactggtttctgaaataatttttccaatgtttttcagacaccaacaactactccggcaacttttctggcaccaacagcaaactttggaaaagtcgtcggatttagcattgttgccagaaaaattaccgaaaaaatcaccaagaaactggtttcttttcttgatgaagaaaccaatttcttggtattttcggtgatttttctggtgacaattctaattctgacgacattttcgatgccggcagtaactccggcgacttttcgacaccgatagctactccgacaacttttttggtggcg

SEQ ID NO: 64969 - DNA, 1009 bp, Cannabis sativa
acaagtgcggatatccccactttgcggattggattggatcagctattttatgaacaccaacaaaaaaaaaattacaaaaatactattgcacataatttttaacattttttttataattgttataattttattgatagaaaatacatttttgatgtatttttatgttgtatttgttgattgtttgttatttgtatgttattttttttatcacttttatgtaagattcttgttgttttcgtattgtttttataaaatcccgtaaaatgtgaacaaaaaaatgtttgaacaatttttacaaaaaaaaaatagtggtaattattcctttcttaaatctcctcatatatggagaaagaaatacatttatttataagttaaaaattaattatgtgaaatcacagaagacagtgaataaatttagttaatactaaactaaaacaaaataattaaaacttaaaaatagcagcaccactggaaggcttggaagcaaacacataaagaccaagatcattattactaatcactcctttctcaatcctagactggtagtaatgctcctgaaaaacatacatacatacatttgatgttatatacatatatatatataaatttatatacactctcatatatctgaaaacataataagtattataaatacactaacctttaagttgagaataaattgtgggacaatattctcttttaccaaagcaactgcacaacctccccatccagctccggtaagccttgccccaagagcaccatatttacgacaaatgcttacaagttcttccaactccgggcaactatatatatatatagttaattacacaaaaccaaaatatcattatataaacagtgtatttaaatttagacatgatatgatcaaatagtattaatagtattctattgatacctgcactcgtatttaacactgcagctatagtggctctcgttcattagatccccaagttttttcaatatgtcctcttcactgaaacaacagtttatc

SEQ ID NO: 64970 - DNA, 625 bp, Cannabis sativa
cttccccgatcttctggaatgaatggcatgaataatctctttcgcaagaagaatgttatcagtaatttggcgcccctgaagaaaagcactttgattgatactgataatggaatgaaggacaaatcttaaccgattggcaataactttggcgcccctgaagattatatgtatttacaagagcattattaattaaataaatataaatctaaatatatattcatatttttttattattataagacagcacaaagtaaaattatctatatatttatatataaacttatttagtttatatacattgcattatatatataaatatataaaacgttaagatctcatatgttagatcagttttctatcaatcatgacagaaagtataaaagaaagatcataacttagtatcaagaatatttacattgttttttttcttaaaaaaaaaatcagttaaaaaaatactaaccaatttatttttataataattttaattatatcacagctataaaattaattatgaatttaaatcataaaatatatttattataaattataaaattaatttaatatataattctcaatggttataaaaatcgcgaaattaccattccctagttaactatatgaataa

SEQ ID NO: 64971 - DNA, 712 bp, Cannabis sativa
aaacaaggtaaaagctagtatatactttacaagtgtaaatgctaatgagaaacaaagcattaaggaaatgctactatttgttttctatgaaatatcatgaggtgaatcttagaccaacaaaatagaaaaaagtcagattgtgatattgtgttacaaaagttaagcatgaaactaaacacttgagctagctaccatttgacatatatagggagggctcttctcatcaactcagtattaattgggattagaatttactggatgaatatcatcttgttaccctaaaattttgaaggaaattgacaaaatctgtaaaaaaaaattctctggagtaaaaaagggcaacacaagtgaattgcacatggcatcctgggatttaatttgcaagccaaaaaagtatggagggttagtgtttagagaagggtcgaagtggaacaaattttctttggctaaatatctttgggcactaacaatacaataagattgacaaaatatgtagaaattttctctgaggtgaaaaaggcaacacaagtaaattgcacatggcatcttgggatttagtttgtaaaccgtataagtatggaggtttagggtttagagaggagtcgaagtggaacaaatctgttttggctaattatctttgggcattaataataaaacaagatgtcccacgggtgaaatgggtcaacagtgtttactttttaaccaagatgtt

SEQ ID NO: 64972 - DNA, 791 bp, Cannabis sativa
aaatgttacacaacaatttgaaacaagagatgtaggatcttgaagatttctataaaagagctaaaaggtacattagagttaaggatggccatgagaaccttatggtggggatatctcaagcaaggtccctagacaagcaaaagatgaatagagaaccaaatacctaccgagaagagcaaagaagatgagctcagcacaaagagaaaccaagggaaaggagaagacctcaaccggttacctactatacaatgtagaatgaaactagagaacagatactcctcacaaatgatggaagggttccctttaagtaaccatcgccaatgaggaaagacatgtccaagaaatattagagtacatattgcaggtttcactgagatgttggcaacaccacagaagaatgtaatcaccacaagatagaaatccaaggtttattacgaagaagattcttggggggattctgcagagacaacccttagtatagttggtaaagtccctatctgttcaggcgtctacacaagaacttggtgcaaaaatgttatcctaattttggttctcatgatgtggcgtgcttatgtggacaaaatcagtgtcacatggcagtataactcaccaataggaaggccaagtcaacgcctaaacaaacaaagaccctagcactcaaacgagcatcaagtgacagactaactccctctcaagagctggtcggccacctctggctagtcctatgaacggccagccttgggactgcaccatgtgttgggttttatttcctaaataaaacccatttcaat

SEQ ID NO: 64973 - DNA, 1581 bp, Cannabis sativa
  modified_base (931)..(931): a, c, t, g, unknown or other
aaagaatcctataaatagaataaataattcttattttcttaacaattgactttaagccactttgtcagacagaaaaaatagaaaacaaagagagcctctcttctatttgaaattccttcttcttcttcttcctctaatttttttgaagccatgggaagccatggtgaattgagagtgtgcctactcatgcctactcatgtcaaagcaatacctagcatagtgaagaagactatgtcaaaccatattgaaggagagaagatttaggttcatatcttgataatgctctgctacaaacaagaatcaagtgctacatatctgaatggaagaagtcattatatttcgctgtcatcaatgtaagaatttcttaatctcttatgtatttattttattatttttaaaaattcatatttaggatattagattatagacttataatcaacatacatgttagttgttatacccgaaattcggctgccatctcaatagaaggcacgtgtcaagataaaaggaatatggatcgatgcaatcgttttttaaagaataactcattaattaggtaagtattagagtatatttgtaacctggtgactgaaaggtcttaggcgaggaatcaatatacaaactggtgctcatgagaaaccatatgtcactaaatgccatcaaggatatcgacacatatcaactgcgaaagcccttagtgtataatctacaaactaagtgtaacgatcggatcggctcgaacccaaataagcgaggtgaccgtctcgctatgggaagacttcctataacttcatccatttacgtcagcgaggcttataaccccagcgagtcagaagctaacattcaaatgagcttcaaaaaactctttgtaaataagaaccacgatcgtcacgagacatgcatcgtcaacctcggaaggaaaaatggcccnagttcgctattgagatcactggaaccaagcttctgtcgagacatctccagatacaataattaaagatgtgtttaaaacacgatcatttttgacccagtaaaagcgggaaaatcacagctatatgattttcaaattataaccgcatttacactatgtgatatgtaatcaaaccccgtgattttaggggatgattgttgtaaacatattacagtcaactttgtaattaactgctcactatgtaattataaatagtgacaaacaagattaaaacgggggacaaaaaaactcatacaaaagaggccctaaaaaataatcagaaatctgaataagattgacttgtggactatgctactgcaagtgcccgaaaaagaaacaaccaaatcaatcagctgcaaaatgaagatggtaactggattacatgggaaactagccttgaataggttattgttaactatttttcaaacctcttcactgctaataattctgttaatgagttggtgatgaatgaaatcccttactctgtgagtgtggcccaaaatgattatattttaaaacctgttgaagtttaggaagtcaaagctgttgggttttgtgccctaaataaaacccactacaatctgattagttatcagtttaagagatttgaagtg

SEQ ID NO: 64974 - DNA, 2458 bp, Cannabis sativa
aaaaacaataaaaaaaataaaattgaaaagtcaaatcaaaaggtaactgattattgattgtgcattacataaaggtaaaaaaaataatgtattaatataaataataaaacatagataaaatcattgtgtataaatatttttttaaaactaaatattatttactttttaaaataaaaaagaaaattccattgacacataggtgtggttctatattaaataatgaatcaataaataagataactaaaatatatttataatatttttaattgattgattcatatatttattttaatttataaaagttttaaattaaatttaggagaagaacactaagattaccaatgaatatagtcactattatcttgaaatagagacgttggtcaccaaaattcataaacataaaatcttatttttgcacgcattgatcgttgttggcccccctcacatttaatcctagctccgcccctggtctgagttctcttccaatttattttattgactaggtcaagatgatgcattccaatattagtggcattcgtttaaggcctcgtggttctcagcctttggtacgagatggtggaccttgatggggatgggaagatgactctcctaagtgttggccaagatggtgcttcacaatcttctccacttccttttcattaattagggtcgagatggctttgagatgaggaggtggtgagatggtctttggcctagtgttttggcttcgactagcatatttggtcatgtgggccaaagttgcttgagtatcatgcttgggcgaaacttcttttcatcttgaactatgtacctccagtatggagtttaaaatataaagtgtaacctcatgacttcccttgctatatgagttgagttacatctctcatctcattaaatatcaaatttaagttatttctttaactcaaatttggcacttgaatagagttagagtctcttactcaagtttgatatttaagtagagttaaagcctctttcttcattttgatgtatgagcaaagttatattccatactcttttttgatgcaggagtagagttatatccctcaccctttttatatgtgagcagatttatatccctagctcttattgatgtgcgagtagagttatgtcccttgctcgaggttgtattttaattttcttggctatattatttcaagtactttatacacttatttttctaagttcccttagttaaatagttatcatggtgagtttgctctttgagctcccttgagtaacacgttccactcactagttatttttttggagttaatactcacttctagattgagtgcttatcatgtgactaaaattaaatccattctttatccattacaagttttagattaagtgtttatgaatttaaaaagtttaccactttttcaaaaatcgttattaatggtaattataaatttttttattcaagtgtaagtatatccatactcttctgctcccaaattaataagatttaattagtacttttggttacttttattttttagtttggcaatacgaatacaactattttttgaataaataactatttttattggctaaaaagaaaatacaaaagtcaagagaaaaattaaatcctccatctgaataaaacatcccatccaataaaaacaaaccaatgatactcataatcctacatcaagaaacaacaatacacgtcaataagctcaatacatagagcagagtcctacatcaagaaggctcaattcacagagcacaaacccgcatcaaaagtgctcaacatagagcattacgcataaaatgaaagtccaaaaaataacaagattcccatcataaataagacaagacattgctcgaataaaataaacatttaacaagtagaaataacatactaatgagccacctcagaataatttggaacttcagtggtacctttgtcaaactcggcaacctgattcccatcctcttcaacctcgggaacactagtgccaaactcggggaccgtagattcctcgtcaccagaggcaacctcatccataaacatttttctataaacttctaactcctcatctaccatccacatatcagacgtacctttcttaaagtctgtgaacgactctaggcgagctgtacacatagctttaaatgcaatgtcatctagttgagcatacaaaccaactgatttctccttttcatttacaagctctttatcaatctcttcaatcttcttttgtatagtgttaagcttttcaatgacccacttgttttcctcctgaagcgctttgttaaacttcttaagggcggtgttctccttgtcaagctgtttgcgatctcgacgaataaaaatcacatcgaaaagagcctatcaggagcaaacaaacattataacaaataaaaacctcaagaagaaagaaactttaaaaagatacttactcgatatattgaagagaccaagtcatca

SEQ ID NO: 64975 - DNA, 1025 bp, Cannabis sativa
aaaagtcacccataaatttttcataaaccaataattctattatataaacacattttatatagaatagatactaccattgatgctctaacttttctttgtttaagtgagtaagtgatcaagatacatgtgaatggtcacggaaatgctttcttttttgctatggttatcctcatcgtattatcagtacacaatgcatatggattatattttatttcaatatttaattacaaattacacatgtatattatattgttgtaacacaaacccttcttacttgtcctctacagctcttcattcttctcaggtctctttcttgattcttcctcatgccctaatttccatttaatttttttattattatttaaaacaacttattttcacagcttcgattaattcccaatttcacattcaccctaacaaaaaaaaaatccaatttcttgtttattaattatagtttatattctaattctaatttacagcccttcggataattaatctaaataatatctcatatataatataggtgtgaatgtgatcttatttaaaatacatattatttctataaatgtatattatatgaaattataaagtgtataccttaacttttttattcttagttttgttattcctggtaaaacattaaagaccattctcatacatcagttaaaaaggaattattccaatctatttttatttttaaatttattgtcactcttctttttttcattaggagaaaaataaccaaatatgaaagtacatgcaaaacaaatgtgaattatggttggtgaggtaacacaccagaaatgatttaaatttactgtctgaaattagtgactcttaactaaatatataaagattacacattttttttttttgcccaaaagatcacacgttaaacacagtaaagtaaaatttaacatgtgtgttagcatgtaattgttatttatttacattctaaaatttcaaaagatatttaaattagttgaagaaataggaaatgttgtaagaaaaagagagaaaagaaa

SEQ ID NO: 64976 - DNA, 833 bp, Cannabis sativa
tccaaaaatttcggtaaatattttagtgctttcattgagagctgaggaaagctagttagttgttgtctcacttcaactatggtgaatacgcaaaagaataccagcaagaaaactccattagacactgtcatggaggaggccgactcccacacctctaacctctagacaaatggcgtcaaagaagaagatacgacccacactaaaaactgaggggaggatactgagaacgtgtttcacggacttgatgatggccaaaacctcaaaggaagagatgaagaaggtgaagacgaagactacatcagagattggcattacaaggatgaatatcactatgaccatgacccaaacctagtgcgagtgattaaagacttaaaggcaactcaagcagagttggccaaacataaaaggctcactacaaaaatgaaaaaaatgacggagcatctgcagtgtaagttcggagatatggcagaatcttatggtgaaccgttgatggaagtgatgggcgaggaatgtacccgcaagaaagtagaggatgagatctcaaatcctcgtaaggataagggcaaggaaaatgtgggtgagccctcacaaaagcatgcacctaggcctcctcaaaaggagacaattgcgactggtcagcccttaagggcgcagaaggttgccggtgctcttgagcctggacgcccttctgaccctagaggtaaagacgcgccacgaggacaaggtgcaaagttactcacacacaaagcgcgaaggaatcaccctagcgactcgattaatcaagatggtagtgttgggttttgtgccctaattaaaacccatttcaatataat

SEQ ID NO: 64977 - DNA, 609 bp, Cannabis sativa
aggagagaatattttccaaaattgatcgagcaatggccaatccgtattggataaatgtctttccttgttttgaagctgtgttttcacctgagctaagtttcgatcatagccctatcttggtgtctatttatgaagataaaagctatgggaggaagccctttaggtactataacatgtggaaactggcacctgagtatgatgagttggtgaccaagtcttggaaagaggaaagcagggggtcaaaaatgctcagtattgttcaaaaattgagaaggttgaagatagtgctgaaacagcttaatcaagcaggtttttcagagatacacaagacagaaatcacaacaagagcagcattggttgaactacaagccaaactgaaccaggttccaaaaaaacacagagttgatggaataggagcatgagttaaggaattagtttgttgagattagcaaggcctttgctagcttcatgtctcaaaaagctaaagttagttgggcaaagtttggtgatgagaactctcacattttccatgcttctctaaaatcgagaagaattcaaaacaaaatcttctctattgaagatgagcatggaaattggtgtgattcacca

SEQ ID NO: 64978 - DNA, 1561 bp, Cannabis sativa
  modified_base (1529)..(1536): a, c, t, g, unknown or other
attacctgctaatttccaatacctgctaatttccaaattaaactaagcggtctttacacttgcatgcacattattttttgtgcaagaaagatcacttggggtacgatacgtcttctaccctccttctcggaatggtaggactgcttgaagtctatcctattccccatgatgcttttaccctttgatcttttcaagcaaagtcatcgcttgaattttaagcaactttagcattccttcgcgaaagttgaagcttgcgtcataaaaattcaacatgactctcgcatgcacgttgtttttcatgcaagaaagatcactgggggtatggcacgtcttcaaccctctttctcaaaatggaaggactgcttgaagtctgtcttatttcctatgatgctttcaccttttaatcttttcaagagaagtcatagcttgaatttttaagcaactttagtctttcttcagggaagtcaaagcttgcttcaaaaaaattcaacatgacgctcgcatgcacgttgttttttgtccaagaaagatcactgggggtatggcacgtcttcaaccctctttcctggaatggaaggattgcttgaagtctgtcttattccaagtgatgctctcaccctttaatcttttcaagcgaagttgtcgcttgaatttttaagcaactttagccttcctttgcgaaagctgaagcttgcttcgtaaacatttaccatgactctcgcatgcacgttgtttttgtgcaagaaagatcactggaagtattgcgtcttcaaccctctttcctagaatggaaggattgcttgatgtttgtcttccttcctatgaagctttctccctttgatcttttcaaacgaagtcatcacttgaatttttaatctactttagtcttcctttgcggaagccaaagcttgctccatgaaaattcaacatgactcttgcgtgccctgtagtgtttcaccctccggcttttgcaagcaaagtcagtgtctaaattttttgtgcacctttagcctttcctagtgaaagccaaaaatttgccattacaaaattcagcatgactctcgattatttaaatagaccatagtgtaggaacattgtctgcgcaaggatgcagacccaactttccctctgggaaaccaaaagtctgtcgtgccataagagcctatactttcccttactgggtatatcattgacggatcatttggggccagcaattcaactgggttttcaccattgaccccatggctttttctcacaaaagctgagaaattactactgcactttcaagaaaactcccctctaagtagtcaaggtgaggaaatacatggcctagaagaatagtatgcttcccagagcaaggcagaaccacactcaaacatcctcctcagaaactggaaaagaacacgagttagatccgaagctaatgaacgagaatttaagaccaaaattcccagctcctttacggggtatggtacgcccgattgctgacaactgcaactattggaatatattttaccacgatctagatnnnnnnnnaagtatgtttttaacatcctaaaca

SEQ ID NO: 64979 - DNA, 1300 bp, Cannabis sativa
  modified_base (30)..(30): a, c, t, g, unknown or other
gattctgagagacaaggggcactcaagcangaagtggataagttgttagttaacgactttatacgcaaggcattctacccctcatggatatccaaccccgtccttgtcccaaaaccaaacggaacttggagaacttgtatcgacttctcatatttaaataaggcatgtccaaaggattactttccaccaacaaggatcgaccagttagtggatgcaactgctggacacgagcttatgtcgttcatgcactactacaaaaagtataattccaaccggtttttgagtgtcatttaaagaatacacgtcggtttaaaaaatcgacgtgtatatcgtagtcgcaaatagtttttattagcgtcattttcaaaacgacgcaaaaaataattttcgacatttataaaacgacgcaaaagatttacttttctattttatcttatgcgtcgatatagaaatgacgctaaatggtttatgacattttaaaactgttacaaaaaccttattacgtctgttcaaaaatgccatatctattacgaaaatacttttttttaacctattgcgtcacttataaaatgaagcacaaatataagtaagggaaaattgcaaatttttcatgcaatttttcccacctgcattatcaaattttagaataactctatataatagtaaatacataatacaaaaaaaagttaaaaataacatttttaaaacttacataaaattagtaatcgattctattaactaatcacacaataccaaaattgttaataaaatcattcctaaaacttaaatttcatgtatatcgtaacctaaatataaactaattacatatgcaaaagataacaataatcatgataaaacttgttactcgctcatgtattataacaaaagtagtaaccttaagtacttaatctataatcaaaggcttcacaaattcggcccactcatcccgtactgtattgatctcctcgttactatagggagcgtctaacttgaactgtaaaacaaaagataaaaaaacattaatcattatattaaaagtataattaaaatacaaaataaataaagaagagttatttatgtttacatgatttttcaaaaaacttgcaggattaacaaccgtcatgaaactctggataatcttcatacataataaccacattgtactccatccggctgctgtcgacatgtgtattggttgatttttactggacccttattttgtatattgttttcgatcctgtacatgtccacagcactaaacaaaaaagaaattaattaatgaattgatttgtaacataat

SEQ ID NO: 64980 - DNA, 513 bp, Cannabis sativa
tggaatattattagaaaaactaaaaagagtatagtgaaatttcttcctaatcttctattttttaagctgcttgaatggtgaattgattgtactttaaatttattgttcgttttggatctagatacaactgaattctccaaacaaatagtgaaacaacaaacaaagcaatgaacctgcatttgaaataaaaattactaaagccataaacaaacaaacgcaagtaataaataaataaactatatacaattgttcagaaaaataaagttttggttggtaaagaggtactggattttaatttgcaaaccgtgcagaaaatagtttggtttgtaaatttatcttaattaattactaaggtctttatttctcgtaaagtaaacatgatttatcatttcttataccaatgcccaatgcccgaaaggaaaaaagaatagccagagtaagaaaaaaaaaaggaaaaggtaagaaataaatcgctgaaataaaaaggagaaaaccaatagtcctaaactaacc

SEQ ID NO: 64981 - DNA, 1302 bp, Cannabis sativa
cacttacccttctagtaatcccaatttaggggattagggttgcatattctagtggtcgtggtgtgcttaattgttagggcgttacaacactgccagcatgccaccactctcctaaatcactcctctccttaagattctagggctggcttagaagtggcctcttctcccttctcctcagcctttgcctcagtctctgtcaccctagtattagcaggagccgcttgggccttacgaacatgttcctcgaactcacctagtaatttatccatgaacttgaagtccaagtcctttttttttggcaccaacacatataagcaatcccaaagacattctcattggcatacatttcattgcgatcgacctctgtcttgtgatctatcttcatctgctcaatggtctccaaggcttttttattgtccgactccagcttaacaaaatggctatcacatggttttcacttaagactttatcacaagtagacccaaaaataatgtcatcaacatagatttgagctacaaaaataccaggttgcaaatgtttgataaacaaggtattatcactactagaaaaaatacatttagtaacattttttttaactaaagaaattcaaaatgcaacacttttaaaagtgttgcctcctaatgtgttgctaaaaggctaagtctttggcaacatttaaaaaagtgttaccatatacttacttaaaaaatgagacaacacaccttacaacaacactcataataaaagtgttgctatatagagtatttttttatttttattttaaaaataaaattaaaattattttttcagaataaatttataaattaattaattaatcaaatttcattacattaattcaattatatttagtatgtaattaaaaaaaataaaaaaaaaatcaaaatttatattgcatttaataatttacgtttacaatatgcaattccaatttaatataaaagtacaaacttatttttattctatgaatatatataccattatacatttgattacataggcattctaagtagagcaaaatgttagagagagaaatactattcatcttctagctatacaaattttctcataagctaaaagttgttcaaatttttttgtcttttttgaatcaagatccactcaatttgtgaaagaaacacctgcaaggaataaaaataaattatattatcattatttaaaaaaaatcaaacattaataatatagcacaaattcatcaaatatatataacattatacctactaaagttattgtactgatcaaattcttgacaaattattttgcatg

SEQ ID NO: 64982 - DNA, 664 bp, Cannabis sativa
tgactcaaagaaaaaattgagatggaaactttacaaataatagttgttaaatagttttataaaataaatatacataatatatttaagttatttcatcatatcgttaatcgataatagtagagagagaatgaaaagtaaaaataaaaaaattttgaattattgaaaggaaaattactacccatcatatcatgtgagtgaaattactacccatcataaaaactattaaaactcttcaaaattatttgttgatgtcattaattcgtcaaagtgcttgtgtatatgtcttgtttacactctttgtccatcgatcgcagagaaatatttttattagtgagggaaaaactgaaatatattttaaaagaaaaaaaaaataagaatgaagaagaaaatataatatatttttaaatcaatatatatttaggattaggttatatatggttaattttttttttttgaaattatataaatacacgtatatatatatttaaaattaagttatatgtttaatattttaattttaatatagatatttttaaattgattttggcatagatattttaaattgatttataaaatataatataagagatatataaaaagaattaaaattaaaaaaataagcgaattaaggagagaagagaaaaatagctttaaagtaaattta

SEQ ID NO: 64983 - DNA, 778 bp, Cannabis sativa
tatcatggtagtggtgtaggttttggtgatttgtggccgcaaacggcatgggcagagcagcgattcctctgaagagacgagagagaaaaacattgaaaaattagttcatacgcaaaaaaaataatataaaatttagattatggtatttgaaacttatagtatcaaaaatatggcatgtgaataccatacaaaatgaaaagaaaatgcctaagcccataaaatgtgggcaaacttaaatctgccatatttttcataaaaagattaaaaatcccatattaggtgtaattttcactataatgatagctatttgaaagtgtcatttttgttgggcccttggtttgctttatgctagtttcaattttatggttttttcttatttgcataagttctttatataaaatttagagatttatttataataagcaatttagggtactaatttatatttttattctagaaaggaaacacaaacaaaaatagaaatcaaaattttttattttcaaaaatacggtctcgataacaaaaccgtaaacaactcctctttcttcgtgacccagctgaacaacacccatctctatctccacgattttcattctctatcgaggaaattcaactccaaaaaaatgtagatctcaaccaaaaaacgatctaatatcgacaaatccaaattcagaaggtaagacaaaaaaaaggactttttttcacttttaaccaaaaaaatgtgacaatattataagaaaattttagctggccaaataaaaaaaactacacaatacct

SEQ ID NO: 64984 - DNA, 1393 bp, Cannabis sativa
  modified_base (322)..(324): a, c, t, g, unknown or other
aatatagtgtaattactaaactatatgtaattaccactctaataattactctacctagtaattacacagttacttccaaatacatgaattaaatattttcttttgagtgaaatttcgtttatatggcttattttttatttaggattctttttgtgaaaagtttaattaaatttccttttgcaagttttttttttttgttttgtttttttttttttaattttgatatgaatatagcagattgtataatctttatggtaggtattaaagtctaaattgtaatttttgacttatttggaaagttaagccactaaggctagcttannngtgagggagggatgggaaaaagagagaggttatgggttcgaacccaaacctttaagctattaagctaatatatgattgtaaaataccattatgctacactaaaaaaaaaaaaaaaaaagccttatttggaaaattttcctatttgtcactgcaaaatgtggtttaaatcagttcttattgtgaaaacgtgttgtggctggttctcacatgatgtatttttttagatatattattatttctcagcattttttttaaccgactaaacatttatcattttccttacaaatgtttcttaatactcttgtcttgtacgtaattaatattaataatgaacattaattttaaaatatataagagaataaaagatactcaatttgatttattaatatgcttcatgaaaaattgatattgacattgtagacttttacacattctcaccaggaaaaaacatatatatatataataataattaacatggtaacaattagttaattctaaaaatttaaattaattattggaaggaaaaaaaaaaaggcctgctgctgtaataaaattaaatttctactgttaatgatcaacaatatgtattaaatagaagataatataagactatgcagaattagttgaaaaatgatgatgatgagttatacacaacaagaaataatatgatgagaaaaaggcaatccaatccaatccaagtaagtagttgttcaattctcttaagtgatctatctagatgactatgcattgcattcatccccatttttgtttttctttctccttttctgatttttctcatgaacgtttcccttcggctaagctcaccctcatcgaccttccttctagttcctgaaaacaaaccataaaagttacgtagttaattaagagaattgctaaatagtattattggtgtctattgccttgtactttttcagtgtcacattgctattagtataattcaatatcgataccataaaacttaagaaaatagcttttagagaatattgctaagaccatctctaatgggagatgtaaaaattgtgttatatttaacaaaaaaaaaaatagt

SEQ ID NO: 64985 - DNA, 789 bp, Cannabis sativa
tatatttgtattacgattttttttacttagtttgacaactatagagttatctattttatactaatacattatttttttgtatggaatttgttgttacaactttattctttcaatattttttttttttttttgagttagtgatagttaaaatgataatttatttttaaaaagttaaataaatattacattaataatagaaataataaaatcttatgattttaaaatgaggtatacattataacgggtaatatataattaatatgtcaatatctactactgtacaccgtgtcaattaaaaaaataaaataaaatcttattattgtattttaaaaaaatatgtcaaaaatatttactaaatgtatgtatctacataaagcaacacacatacaacaatacaaattatcaagaataaattaaaatatacatcataaaaaatacacatgaataaaaaaaataactgaaagagtaaatagcggcataagtaccaaaagttttaagtgtgtaagcggcataaatccaatatttatttttaaaaatataattttcttctagttttgtcagtacagactctgttttaaatttattaaatgaacatttgaaagtaactgatactacatgtttctgtctagacctaatgatcaagaatctggaccttatatgtggcatgttgagaatcatgggctagcaatattccataaaacctattatattaaattatatgggacctatattgagaatcatggggttccatctcaaaactaattggcaatgagtagagtagcccatgtt

SEQ ID NO: 64986 - DNA, 1273 bp, Cannabis sativa
  modified_base (37)..(68): a, c, t, g, unknown or other
tgtttacttataatcgttttagaaattcatatttagnnnnnnnnnnnnnnnnnnnnnnnnnnnnnnnnagatcctggtaaaataattcctacaggatgaagatcttgatccttaaattctagatgaaagaaatttattgaaaccaattgaggagttggaagaagttgttcttgatccaaggaatcctacaaagtgtctttatattgggaagaacttggatgaacaattgaaatagaagctaataagctttttgaaggtgaaccaggattagttcgcctggagccatggagatatgatagggattgaccctaaatttatctgccatcacttaaatgttgatctgaattacccagctaaaagatagaagtggcaacgcagattccaagagacaaggggaactcaaataggaagtggataagttgttggtcaacgactgtatacgcgaggcattttatccctaatggaacttggagaacttgtattgatttctctaatttgaataaggcgtgtccaaaggattactttccactgccaaggattgaccagttggtggatgcaactgctgggcacgagcttatgtcgttcatggatgcatactctggatataaccagataaaaatgcatgtcccagatcaggaacatacaagcttcataaccaacatgggactttattgctataaagtcattccatttgggttaaaaaatgctggggcaacatatcaatgacgtgtgaatgaaatgttcacaaaaaaaaattggacgaaacattgaggtctacgtcgacgatatgttggtgaagtcgataaaagtcatactacagacctcgcggaatgcttcgaaatattaaggaagtacaagatgaagcttaaccctaaagcagtgttcctttggagtttcctcaggaaaatttatgggattcatagtcaatgggaggggcattgcagcaaaccctgataactgaaggatggctgcgcttaacagattcatttcatagtcaactgataaatgtctaccattttttaatgtattgcgaggcaacaagaaattcaaatggacagagaaatgtgaggaggcctttaagagcataaaaaggcatctattgacacctccagttttggcgaaactaataactgaagagacattactcctatatttggctgtctcagagagtgtgattagtgcagcaattgtgcgagaagagggaaagcaccaacaagctatttattatgttagaaaaaggttactaggggtagaatcgaggtatccccctctt

SEQ ID NO: 64987 - DNA, 1150 bp, Cannabis sativa
  modified_base (617)..(618): a, c, t, g, unknown or other
aaaaagcagtcctaatccctggagagaattttatcaaaccagaaggtaatgagttggagatcttaaaacaccctacacattgcctaaatcctagtatgaacggtttcaaccctaaaaaactgccaaaaccagatgagatgataaagatacaaacgaatcaagtaactgatccacactatgtaataaacatgagaaaaaagaaacttaccgtttgaaattaggtcttggggcaatgcctgcgaattctgtttgcaaaccttcgaacgaagcaaggatcactttgacaaaatgaagtcggaggaaactcgcaggaaagaggtgaaagacaaggatggcatgcaagtctctagacgggcttaatggggatccttaacgaagaagtttaagggtttttctcaaactttctgaaatggtgcaaaggtggtttttttttccctattttatacccatgataatgatttttaaaaagatttgatccaatggacatgattcgaagcagaagtggaaaagatggtcatttaattctaatgtacctcaaaaccgcacaaccgccaaaatcagagggaatgcgtcttttcaaaaacaaaggaacatgacagaaataccctttgtaatcnntaaaaagctctttttaataaaaaaaaagaactttttaaggggcaattgttatacctgaagttcggtaagcacatcagaggaggacacatgtcgagctgggaagatctcaaatacacaaacgacaagtatgcttagcatggaacaactcgttggaaatataattcacagggtatgtttataactcggttggctgaatagccttctgcgagacaaaaacgtacgaactattaacttatgtatcgacgagaaaccatgtgggtgcacacgttcatgacgaggcctcaatctcactgagtgaaagagaaagcaataacactaaaaatagttagcgtatattatacgatatacaaactgagtatagatagtatgacgagccaagataacaggaaatgatgcatttatctcgttagaagatggtacgcattcgaggaagatcctctcgacaccagagagtatagctatcagatttaagataatattaattttgagaagccaaaatgacaagcaattgctcgctatcaaagtgatcttg

SEQ ID NO: 64988 - DNA, 747 bp, Cannabis sativa
ttttttttttttttttgaacattattattattatttcgtacgtacaaattttcaaatataattgacgcatatattgcattaattattgatcactaatactattatattgggaagaacaaaaaataaaataataaaatcaattatatataaccactgtaatttttacaaatggggttttgttcttgttcccatgaaaaaaaaaaaaagatatatatatttatatatagatatagtgtagattaattatggcaactaccacctgaggtttgaccagggatattagtacatggatttggagtaggagtagtgttttcacccttgggaaggatctcattaatcaaaccctgtattaaccattgatgatgatgatgatgatgatgatgatgatcttcttttattaataacaataatggcctcagttctccaattgttgctaaaccaaacaaaatgcttacaactaataatgttctcagcataattcttctctcacaattaaaacccatctttttctactttcttaatataattctctctttaataaaagagtttatatataatatggtagtgaaatattatcatatgcaatttcatatctatttataaagagatgtgatttgactgagttatatattatatggtttgaatgttgaattttcggtttataaatttgaatattaattaattggaaccaatcaaacacacacgtagttacctggaataaacccaaaatgaatcacttagatacat

SEQ ID NO: 64989 - DNA, 766 bp, Cannabis sativa
attcatatttatgatgttaatgagttaatgaaaatacttgtatacttgttttgttcgtaaatctagatcctggtaaaatattctagaaccacccatccatccctactatatgcttcgtcgtacacctaacgccaccgagaatttcttgtcaccattgagcctcctcttcaaaaattcatgcaccaccaatctgaaacaccttgaaccacccgtccaccactgttatacgctttgtcgtacccagcgccaccgagaatttcttgtcgaacttagctgctctacaactacgaggtgtgctagatctgcttaaactagtcgcttgagagagattatgccgagatgagtgtatgagagacatggagataaaaaaatagaacaacagtagagagagatgagttgaaccagataaaaaaaaggaggaaaaaggtaaatagtagtggaggcagctagggttttgtttgtgggttgtaagtttgagataatgttgcttctatatatgtgaatataaaataaaaaaaaactaataaataataaatataataaaagtaataatatttttattgagaagtgggagtgaaaattgggagtcgtgtccaaatattttaatataatataactataattttttttaagcaatataactatgttattttaataataataaatttagaaaagtaaaaataaagagaaaatttgagggaagtgagacttgggacccatgctgttatatcaatgtgtagattgttaagaagttgggcaccaccta

SEQ ID NO: 64990 - DNA, 617 bp, Cannabis sativa
ttttttttcctggtttctttctcgataaatgtgaaggaaaattttctgtttttttttaatgtttggactttctgcttcttttcaagcttcggatctgattatttattgttttgtcatgttaatttggtttcagtgttagaactggcttgaacatgctcaactattttttttttttaattttcttttttggcgttgtatgtgcagtaagatttgaagttttgtgtaaatgtttcgtttagtcttatgttttctctggttccgtttgttttctgagaaaatgcgagggaaaattagcatttaaaaaaatcggatctgataggttaaattttgtgatgtaaagtttggtctcttacttataaactagcttaacgagctcaagtactttactgattctttttcatgtaaagattttaaaagatgtgtattcgttatgaatatatgttagttatatgatttacatggtcgagtatcagtttgatcgattataaaaatatttagatcatacattaatggaaattcattccaaatatttaagttcctctggttctgttatcttagattggatctggttctataattataactgacatttatttttaatgttgaaattccatata

SEQ ID NO: 64991 - DNA, 1359 bp, Cannabis sativa
  modified_base (464)..(468): a, c, t, g, unknown or other
  modified_base (535)..(541): a, c, t, g, unknown or other
  modified_base (568)..(569): a, c, t, g, unknown or other
tcaactaaccaccatttcagcattcaacccaacaccaaactgaacgaaatcactcacgattaaactaaaattaaaattttaactcaaaacacttcatcacattgtgcaaacatttaaacaaaagtactaaaatctagatgcctttaaaattgatacggtaacttaagataatacaacaaaaacaaataaaataacataccatcatcatattcaaaaaagaattattctaattaaagaaatagaggtaaaaaagtatttaaatcactattaaactctttaatataataaaaactattaattaaaaatttgatacactattaatataaaaaataaaattaatatcttaaatataactattagtgtatataaatacaaggggaattaccccatatactattttcttaactttttttcaaatttacggtttgagtttctaaagttgttgcagcgctagttgcaatagnnnnntctatacgattttttgttacaattcaggttgcggggttatttacaataggggtttctatgtagaatnnnnnnnaaatgcaaaaaaaaaaactgttttganntgtaaaaatgaaaaaaatccttaaatacaattacatataagataaaatattgtactaaaaactgtaaattatttcaacaaaatatatataatggtatacatataattattaaataaattacaatttacgatatacatatataataaaattattaattaaataatttatataaatataaaaaagaaaattagctaaaggccaaattaatgtaaaaaatcgatgatcaaggtaattaagatacgttaatggcaaaattgaaaattgaaaccaaaattatttcagtcattaagatacaataaatagctttcatacaataatttcggccataattcttatcgggttcgcaaattgtgccaacatattcgcaccaccggctcaaatcaccattaccacctgcattcatcggaagtaacaagtaggactgagtccaaaagaacaccaaatccaacatgcctttttttatatgcatccacacagttgaacatattcattcacttcaaggatgtacctctgacacactagatcaaaaacatatacagaatgatgaattatttgctacaaatggcccgtaggaaaatatatccaaataattcatcagtatataaaataaagaaatagaatatataattaccaataacaataacaatgaaagaaaagaaactgcataataatgtgtaagaaaaagaaggaaataaaaataaaataaagaggagaacttattagaaaaagacgacacaaaccaccaccacaagaagtctttccatcctggaccaccgatgtattctatctc

SEQ ID NO: 64992 - DNA, 1568 bp, Cannabis sativa
  modified_base (1061)..(1074): a, c, t, g, unknown or other
ttacacattccaaaattgtcatgatgatcaatataccaaagagattacaaactaacatgaatcaaaaagtttccaaaagcttaaaaagcttgaaacctataaatgacaggcacatagaagagatatccaagaagataagatgagatgtatataaagagagaagatcaaatatccaaaagcaggccatgcaaaaagccaacacttggctaaacaaggctgcacgacagagactactacaaacaagacgagagctagaaagtccctatccgacctgacgtccgcatagggactaggggaaaatgttatcccaatttttgtcctcatgacatgacatgcttatgtggacaaaacagttgccacgtggtcgtacatctcactataaggaaggccaagtcaacacctgagcaaacgaagaccctgacaatcaaatggggatcaagcgacagactaactccctttcaagagctataccacccctggcctgttagccttaggacaacaccctggccggccaccctggccatcacaggggtctggccgaccaatgagtgtactacaggcttcgttggacagctctaaacgtggacaacaaatttgggttgcaaattgggccctaaaagcctaacagaatggttgaataatatcttgattcagggacactttagtctattgtaattatctaacaaactatgtaaatatctagaatttaaacttgtaatctagggtttaggctgcctatataaaggccttaaccctagcctagaaacctaagttgcctttaagtcacttagcctccaaatcactctaagtatgaaaaccatactctctctctctctctctctctcttgtacacgcccattagagctctctttcttccttctcacttcatctctcacacgcctacctaaggctgttcaacaccctaggctgtccaacaccctaggctgtccaacaccctaggcggtccgacaccctaggttgtccaacacttgagatctgcctactgattcatactttgtaatcctaagggtgctataacagatcccacctatagtgatctnnnnnnnnnnnnnntcggtataaatacaaccaaaaggggagtaggtcattaccgctatcacaaggggggtgaacctctataacaaatccctgtgtttattgcatttcattctttatttgtgtaacacgtgacaagcatcagatccatacgaacacaccgtcagttgatcactttttgaggtcaacaaatagtattggtgatctcgctgaaaagatgattgagacaaagaagcatattgtttatcctctagtgtatcgactaattacattagcattgattctacctattgttactgctacagtggagaaagtattttttctatgaatattttgaaaagtagattgcacaattgaatgggagatcaatggatgaatgatcatttacttgtgtatattgagaaatacatcttcaatagtcttgataatgaagtcatcatgcaacgattttaaaacatgaaaaatcgtcgaggcaaattgtattttttatgaccatgttttattctattttg

SEQ ID NO: 64993 - DNA, 927 bp, Cannabis sativa
attagttgtggctgttaatgaattgacagacaacaaattacacttaaaggtaggcacatataggacattttcaagaataagttcatgactcaattgaattgttcctatgcaataaatcttagcatgcaatccattaggcatcaaaacagtttttaatctggtattaacagtagtgtttttgaataaatggatatcataacacacatgatgtgttgcatctgtatcaataatccaataagagctaggagtagagacattcataccagaaaaatgtgaaacaacaggttgttctttagaggcattttgagtgctgttctcagtggccttttgagcaagaatggccatcaacttctggcattgcacacttgacaaactagagatcaaatctctctccattgaaggctcctcgatcttgccttcatcagctctagaaaaattcactcctgcgggttttccagcattccctttagcatcacgattagggaattttccatgatacttaagaccaggtggatatccgtttagcttgtagcatctttcgatcgaatggccattcattccacagtgagtacaattgtacttagatctaaaaggttgaacagcaccaacaaactgtccattgtttcctgaacctcctttatctgaattagtggtattgctggaaccactagtcaaatttctctatctttcttcttgtataacagcagcataatccttgttaacgcttggaagaggatcacgcattaaaatctgagacctaaccagactgtaggaatcatttaaaccaacaaaagctcaagcaatctatcctcttcgtgatattctcgtattatcttcattgcgccacaagaacaaacaagtggtggacgcaattctcttatctgatcccaaagcgatttcaaacgagtgtagtatgtcgtaacagta

SEQ ID NO: 64994 - DNA, 958 bp, Cannabis sativa
aagccgaacccatttatcactgaatcccaatctagataacatagctgtcaaaaaatgccaatccactctatcataagctttactgaggtctagtttcaacgccatacaaccgtccttcccactctgcttccgcttaagataatgaagaacctcataagacaccataatgttatcagtgatcaatcttccaggaataaaagtactttggttcaaagaaataatcccagtgagtaaaccttttaatctattagccagcactttagtgataacttttgcaacaacattacaaagggaaataggtcttaactcactcatttcatcaggctttctcttctttggaatcaagacaatgttagtatcattaaaaccctccggcatctcctcagtcaaaaagaaattctgaacacaagctatcacatccgcaccaacaatgtgccaatatttttgaaaaaaatttgggttcattccatcaggccccggagacttattcggatgcattttaaacaaagcatccttgacttcttgagcttcgatgggtctgattaaaagatcattttgctcctcattaaccttgggagtaacacaattcaaaacttcttccaacaaccaggttcggtcgagaatatgtttgagaaataatcaagcattaattcacccaaactggaatcccaatacttcaacactcccatggcatctttcaaacaaacaataatattattacgtctacgagcggaagcttttgaatggaaaaacttactgttttgatcgccatttttttgccataattgcttcgaacgttgacgccaaaagatctcctcctggttaagtgtttcaaaaagctgaagcttggtgtccgcatacagttgtttcccctccctatcacgcctgcacttaagcactttgaggtcattgttacactgcttaatccttgctgaaaaattcccagcaacgttactcc

SEQ ID NO: 64995 - DNA, 1180 bp, Cannabis sativa
tctcttcgcgggagcagagggttttgtctttcgcagcagagtgaggcactagctcacatagaacttttgcgtggccggtattcagggagacttcctttcatggagacctctcctgcgaggttgatacctttatcctcctggggcgctgaatgaggcacttgggcagcttaataactcattgattaatatccacgtgtcatgtttgcgaaaatatagataacacttctaatcaataataatttaaaaatataaatattttatatatgctgaataagacctttcaattgtttggtagagttcatctctatttatgttattatatatatatattttttaaaaaaatgctatttcaatccaaagtttatgcttaaaaaattaacaaatatattttgatttaattataatgcatttaaactttaaaaaacagaatagtatataactaaatgctaattactaaccactcttctgaccgctaaagcttggtacaagcctgaactcgacacgaataattcatgtttaattattttgttaggtctgactctcgaaataggggtcaagtctgtcatattgttatgcgggtcatactaggcttctattataaatgcgagattcggtaaatatgggtccggtcggcccgtttgtacatctattttcatattattcgaagtaaaattatatgaaaaattaataaaattaaaatatgatataatttattacttttttttttttttgaaaagataactttgttattataaattattgaggaaagtcatttacaataacagagtaaattgaaggaggaaaattctccaactcagaacaagtctcatccaaccctaaagtatatcttgccaaactatcagcgactacattggcagtccgtttaacgtgagttacggatatgttaggaaaaaaggaaagaagactagagatgtctatgattaaatctttaaaagaaaaagtgactactacagtagaacctctatttaaaaatactctattcaagaataacctctaatttgttataaaaaaaatgaagtctcaatttgggccagttataaataaaaataacctttatattgtaattagctatacattttttaagtttcgtattaataaaatatacctctatataagaataattacatcttaaaaaaaatacatatattttataaattta

SEQ ID NO: 64996 - DNA, 1941 bp, Cannabis sativa
  modified_base (33)..(39): a, c, t, g, unknown or other
  modified_base (1346)..(1363): a, c, t, g, unknown or other
  modified_base (1524)..(1524): a, c, t, g, unknown or other
tgttaataaacatagttgtgagtagatctaagnnnnnnntaaaataaattccaacaccttgtttcaccctatggtttcgaattaagcataagctatgatccgataatgtctcccatttaaaacaagcatcaatttcagcaaaagatctcaaccagtcattattaaagaagactctgtcaagcttcgaataaattctttctcccacctcatgtttgttactccaagtatagtaagcacctgaacatttaaattcctccacctgaccattggaaagctaagattgtgcatctaaaatatccctggaaagaatcggtttgcccccacttctatcatgaaacgagaacatagcattgaaatcgccaaaaattatccaaggttcctgaatctgaccaaaactttctagtttctgccaaagtctttttctctcttccatagagttgcttccatagacccctgttgccataaaagtgtcctgttggccacaaacttttattctgcagtgcaccagcttcttgtcttcatctataacctcaacattaacaaatttttcctgccaaatcagcaagattctactagaaagaactgggctacaataatatttccagtttggaaaactatttacgatgaactttttcatgcttcaccttagtttcaaacaaagaaccaaatccaactttattcactctacaaatctcaagaatagcactatgcttttctttcttattcattccccttacattccatccaagaatgttacaaacttccattaataactaggttggggtcgggaaccattatctcatctacatctcattgaaaaatcgcatacccgttgttgttaactgtagttgcagcaacctctttcgggcttgaatttgactcatgcactgttctttttggggtgatccatgtgtttgaggtgccaacatcctcaacatcaacttcattctgtttctcaatttctttcctaatcggaccctctcgaatagcaccagattttttattgtcccttgattgttttttttctttccatttcagtcactgtattttgctcatgcttctccttcttttcctctctactagccttgttatcactagtttgtttccttctccaaaccacttgtttttccttgttacaattagccacttatgccccaaattcccacaggccgcacacttaaaagggatccattcatattctatttgttgctccactagttgtttcctttcattgatgaaggaaatcgatttcggtggctcctccgatatcaccatatctaccaatattcgagcaaacttcatataatatcctgaaaaataaataatatttaaatagacatattttnnnnnnnnnnnnnnnnnnttggtaatgaagtaagattataatcttacttaggataattattgagaatttatttaatgaaataaaatatttttttcaggctcagcaattgtggaaatttagcgaagtggttattaatgtcacgacattaatggaagaattattttgggaatattccggantaggttagaaattttagaatgtcggtttaatggaattagtaaaattaccataaatgcccctaggttataatttaagtttaggtttctttgcagggtagattagtcttttttatgttttgacattttgacctatttattttggtgggctgattgttatttaaaaaaaaaaaagcaaaccctatttaaggttacttccaaggcaagaaaccaaaaagattcataacatcaagcttctctttttcttctcctcttgccgaaccctagaagcagctaggaaccaaggaaaattcattccatttcttcaatttcctaagctaatcttaaccctagaagctagctaagtggaggtatgatccttctactcttctcttgatttattttcttgagtttagtttaggttttggtaaaggttttcaa

SEQ ID NO: 64997 - DNA, 1108 bp, Cannabis sativa
  modified_base (48)..(52): a, c, t, g, unknown or other
atattctgttaaaccaagaatgttaaaccaagaaatgccgttagatannnnnttttaatatataaagatattgtgtgatatttttttatatgtattaaaatttttaatataattttttttaagaaaataaataaataggtcccataaaaatttcctcattccctaattaatgaatagtgtgagaatgaaggcaatgaggaaaattaaagtgagtttgaggatatagttattgaattcaagatgagagtttgaatcatttggtttatttattttttggaagtatactagtaacttgttaccacttttaaaaaaaaaaaaaaaaaaaaaattggtaaatggttacttctggttattttcaaacttgaaaaaaacttaataattttagacattattgataatatagattaatttagacagcttagtcttcttaatgagaatttactatagattaatttaatttaaaataattttttaatttttttcttcttcttttctgcattgaagagatattagaatattattattaaaaaaatttgtggctaaaatattagccatcacaagagtgaaaaatttgttaactatatattaaacatggtttagctagttacaattatttttatcactatatatataaaaagataagttgtcaccaaattagtgacaactatatttaaatattatttcatctcaaaaactataaatattattttttaaaataaaaattaaataattttttaatgaggctaaattatctttgctgtgatataagtaaacaaaaaattaaaataaaaattaattatgtagaataaaataggtcttcgtttataatatatttatatattatagtattttaatactttatttagccccttgaatgaaatcttcttgaatgaaatcttgggtaatgaaatcttgggtccactattacgtcattcactttttttttttttttgaaagaagtgttctttattaaatgagcaatcgctctcaaggatagacatcaactccataggaacactattcatagaaaacatgcgttcagctagagaaatagagtgttgggcaacaaaatgcgcagcacaattcgcagaacgcttaacaaacaaaa

SEQ ID NO: 64998 - DNA, 785 bp, Cannabis sativa
tgtgactaaaagtcacatttaattgcaaaaaaattatgttgtaactaaaaagttgtcactaaaagtaaccgttttttataatgttaaataacgattattaattgaaattattagttactttataaatatatgtcaaatttgtgtataaattatataaattataataaatttttctttattaggtcgctttgtatgattatttatatttaaatttaattataataaatttatgtttaattattaatctctcatgtacagcctttggccacctagattagtgccattaattttgcaactgtttatttaaatatgcaagtaaaagagatattggaccactctacacaaaaatattgccataatgttgaaaacaaataatattattttgatttttttttaaaaaaataaataattattattattttcttccattatttcctcctaaattgttgaccaatgtctcaagaaagaattgaattaattagacatacaaacatggatgtttttttcttttcttttttgacaatttatatctttgaatccttaaaactatgaaatatgttatcacatgtttatagattttgtctttcttgtcaacttatatcatcaccaaatagtaatatatttataaagataaaaggtcatacaatatatagatacatatatttatgggtgagttactaactgctaaaattaaattttatttttaaactcaaattaattataattaattatatatttaaaataaattaatgaaatatttttattttttatagatcggaagagcg

SEQ ID NO: 64999 - DNA, 1416 bp, Cannabis sativa
tccctctctctctctctctctcgtcagaagtcaaattacatcattctttttataagtcgaaaaagaaaaacaatatgatgttttaaaattcaaatttaaactgaaaagctacgccaggcgacatgtcagctggaacacgaatatctagttttcgatcatgttttgcttctcgactttgacatatatctcgattatcattttcgtgcactaaattcataatattatcgtatttaaatctcaaaactgcacaactacaaaaaatacatgagatttatacaaaacttaaaaaataaataataattcatctaataagtaactaaaaaatgagtgtacaaatgtgcactcatcacaagctcatcataatgttataacattactatgaaaaacttggaggacaaataccatccctaaaaaaccttacataactatgcacaaattttattcaagatatcaggaaaggtgctcgagacaatattttcataaacttcatgaagacactctgggagcatcaccataggcaaggctaaccctatgtcaccacgggcagggccaaccctccatgtccatagacactaccgtgatgagtcatggggccgaccctctatgacgagcggccctccgtgaaaattcatagggtcgactgtccatgacaagtgacagggccaaccttggtgttttgtactcattaactcaatacactcgtgaatgcgacaaggggtaactacacttatggtccactcatgtgttaccaaggctacttacggaatattctaaaagcatctccaaaattaataatctattaaaatatttattttgaatattagtttattattatttaaatttaaatttagcttaatcatagttaagtgagatgtgtatctggttaagttaaccataagccacacgttcatgtaaacctataaataggtcattcaatcacttttaaaacaatttttgaaaaatactcacttgagaatagaattcttgaaaactatctttgggtattgagatcataaaactacaagggaattagtccattattgtcgaaaggaggtaaaccattataaaatttggtatttatcattgttaattctattcagtttattgtgatttatatttcttgtattcatcctatttgtttatgattttttgagatttgttgacgaaaaaaaacgttaatttttttttttgtcgtttgtatgttatttttttcttatgttatatgtatgttgtcttttattgtttttataaaactacctataattaaagtttaaaaaataaaaataattgtataatttaaaaaaaaaagtaaaaatgtgagaaaagagtaattactattttagatcttgtgttttgtaaaagttaataatttgaccttctattttgttaattgataaagtgaaccctgtatttttt

SEQ ID NO: 65000 - DNA, 800 bp, Cannabis sativa
aaaatcaccaatataaactcaaaaataactagaatgaactcgaaacaatacttattcaaaagagtcatttttattttattgtttttaagataaaaatttacaaaaatatgacttgtttttaaagaagttatttattacaaaaaagggtaattttcatttttatggttttgacttttgaaggtacaaatttgaaaaatgaaattaaaacaaaaataaaaatatatataaaaaaaacaaaggtaaatggttacttaccctaataaccatccttgtttttcccataaaataacgtctttgaaagaaggaaaaaaaagaccatattttacaactcataaaattgataatttcctctccaaaaaactaataaaatcaaaagaattaaagctttaataatgttaaacctgtcaaaacaagccgattttcacacttgtttgaccattaaggagacctatgtttttgtgtttgaggatcttcaaggagaagaacccactttcttgagctaacatttttcactctattttgacctcttggcaacttttctagaataccttagcaccactcatatatatagcaagatcaagagaatgaaaccactgccaaaacatgttgtcaacgagtaagtatgtatataataagttactaggtaatgtagcctgtccaaatatatttagttatagttataatttttattttaattatgtatatttttatttgtattattttttttagaaaagttagattttttaaactacaatagctaacgaaatcacatattatatactttctctattttattattt

SEQ ID NO: 65001 - DNA, 658 bp, Cannabis sativa
gttatttcatcataggacgggatatctgtgagcattggattctccacatcagtcaccgttgggctgattaactcctgaagttctaagttcagactcacattcgaactttcaaaaagttgttggaagtaattgttaagaataacacccttctccctctctttaaacacatgatttccatgatcatccagaagagaccatatgtaattacgttttctcctgatctgtgtggaggcatggaagaagtttgtatttctatccccctgaagcatccaagtttcccttgatctttggcgccaaatcaattcctggcgaagccaaagttcagcgatctccttctcatctaattcttcttcttgagaaatcgacacaatcacttctctactctgtagatccatcagtttagactcaagtaatttcaatttctcgttacagtccccaaaatttttcttactccaggatagaactttctgttgcacctttcgaagtcttctcacaatgtcccccggatctccaacgtcacgagaatggtaccaagccaacttaattacttcaaagcaactttcttctctcaaccacgcctcatagaaccggaagggtcttctccccctctgtttaagaggattcgaatcaaagatgatagggccatgatccgaagcta

SEQ ID NO: 65002 - DNA, 743 bp, Cannabis sativa
agagaagagatatatgtataatttttttttcattgttctttgacttaatttgccattaaaaactttctgagtctcaacttttatttttctttaaaaaaaaatatcaatgatcttagttttagttatattttaggttatttgataagcaatttttaagaatttttttttttaacaaaaggaaaaagaagaaaaaagaagtaaatgatcatttttattttaagagaatgatagtgtttttaataaataattatatatggaaaaaaataattaaaaaaataacatttaataaacataaaataaaataataatacatattaaaaaaaataactttacataaattcgtttttaatacaactactcatgtattatccaaaaacatattttaatgttcaaaaaaaagttcttattcatttcccccttctaatgtacgtcttggataaccttttggactgacgtgtcaataataaattgattattttactatatttatatttatattataatcagtagttcgatcggctgccactgccactaattaaagtacctaactaattaatcatagttattgataaaaaaataaggattttttcatttttaaactttaaagtagtttttttttttttttttacatttttataaaattctacacaaactagtagcgctcgctgctgcaatctaactaaattgtaacaaaaaagcgtatagaaactcatattgtaattactagcgttgtaaccacttta

SEQ ID NO: 65003 - DNA, 1347 bp, Cannabis sativa
  modified_base (1301)..(1304): a, c, t, g, unknown or other
catatatatttgaaatggagaagctaacatatgttggtctgcaattttgtggatatattactttataatttatatagagtcaacaatgagtaaagactactttaataccagctgttataacctatacaacaaataactaatcttcgaaatcctacgctgcagatttcgtgagtttgttaacaatgatctttcgaagagtacatgttttccaataaaattaattttgatcaatactgacggagaacttgaaagtgaaagggttttgtagagggaactctttgttgcctcggataacactgcctctcttgttattgtagccaggatagcgtgttttcacaaacgacactttttctttgagaatcaaacgtgcgttttgtgctagctcctcttagccccatttgttgtaaggattgtcatccctatgtgccacgtggatctccccaccttccttcagcattttactcccacttctgaagaaacctcttatcaaagtcttgtgcatcctattatttttattatatatactcccatcagttaatatataattcaaatattcttaaaaacattttacaagaagaataagttatgatataaaagagaggagagtgacattaattaataaataaacttactgaatgagagtttggtttgattcatttagacagaaatggcccgcatgaggaaaattaaaaacaataacatcaaattccatgtgtttaagggcgggatgttggctcatgtgatgcacattcacttcatgcaaaaccaaacaacctcttgtctttaactcattcaaatgactttcactactggtatacctcctcaataacacatctgcgtatatgcatacatacatacatatatacaaattgaagataaatcaaacaacttgtgaaattaatttctatggcatatgtagtataggtatatgaacgaacctagagtatccaatgatgttgcgaccatattcttggcagagcaaaaggcttttgctaaacaggcagaaaaagagaagtcaccttctccaacaagtaatattttctcacaattcatatactctccgatctgattctttatttcagtactactaatcattcttacttcttcctacaatttgaggtgaactctaattttttttactaggcagacagagtatatatgtatatatatacacatatatagttaagcagttatttaaaacgaactagatatagatgaatatgcatgtgtgggttggaatataaattcatatatgtagtatgtagagaaatgctaaagggcaccactggtgcctagcaccnnnntacgtgtcaatatcgctattggtgcaattaagtatcgggtccc

SEQ ID NO: 65004 - DNA, 546 bp, Cannabis sativa
ggcgacaatgccaattctgacgaactttccggcgtcggaagcaacaccgacgactttttcggcactgactgctactctaatgatttttttggtaccaacagcaaactccggtgactttttcgatatcagtgacaaataaaactacctaaacaaataaaaatatttaacatgggatttgaaaacctaatttacatatatatagcatatcaaatatcataaaaagacctaaaaataaaaaataaaaaaaataaaaaatactatataaattggtcagacttaaatgtgccatagttatcataagaacttttaaattctcatagttagtgaaatttcctctataaaataatattattacttactattttgcaaaaataaaaaaataaaaattgtatttaattactacctcacatttatatacattgccatttaaaatatagtctaattactagcccataaaattactatcctagtaattaggtgacctaataacatcattttcacttaaatatttgttagaattttcattatttatgaaacttgtttttt

SEQ ID NO: 65005 - DNA, 808 bp, Cannabis sativa
ctttctcttatcctcttcctcttgaggagtcgatggacataaatccttacatagagtaattccatatttgaacagtaactatcctttcttggaattctccattgagaatcttttgagcacttatcaatataagtttcttgagaaagtgctaatattctatattttctatctctatagattttgatctgagaacatagcttgcttctccagaatccttcatttgtaatttgtcagctaaccacttctttacatctgataacctttctacattgtttccaataagtagagtgtcatcaacataaagaactatgaatagcactacaataccttcaatgtatttgtatacaggttttgtctttgcttttttcaaagacatactctttaatagtcttataaaggtgatattccatatgaactagaggcttgcttcaattcataaatagatttaagaaacttgcacaacttttgatctttccttggcaacacatacccttatggttgttccatataaatgactttatcaagatcaccatttaaaaaagcggtcttgacgttcatttgccatatctcataatcataagtggcaactatggaaagaaaaatacaaattgatttaagcattgccacatgaaagaaggcttcgtcataattgacgccttctcgttgtgtgtagcttttgtctacaagcttagctttaaaggtctctaccttttcttcagtatttctcctcttcttgaaaatccacttacaccctatgggcgtaatatcttctggtggagtttcctattcccagactttgttggtgcgc

SEQ ID NO: 65006 - DNA, 1187 bp, Cannabis sativa
atatgcaaccaaacaaaggaatagaatggagattatttcctttcctttccattccatttcattacctccaaccaaacaccaccctaatgaatgaaaggaaaaaaaaacaccttttatggtagaggaattgagagccaaaagaacaagtttactaagagcgtgcttgacattattttctgtttttttttttttttttcaaaaaagtgtattcagaaatgaaaacaaaaaacaattttgaagtttttaaaacacaagtggcgtttggtcaatgttttctaaaaacaattttcgtgtttattttatttttttgaaaaacacttcaaaactttgagaccccgatatgaacaagacttgaccaggatccggacctcgatcccaaccccgatcaggatctcgaaccctgagccccaagaccggagccccgatccccagctccaaaccttgatgagagtgaaaatggggagagaggaaatgatatgagaaaatgatgagtatataatgatgtgagataaagtggaaaaaaatattgacaaaaagtgaattgttttttaaaacagaaaataatattttgttgttttcaaaattcttgtttttttgtaaactttgtgttcaaaaaaaataagaaccaaacaagcttaattattttcaaaaacaaaaaactgttttgtcattatgatatcaaacatccactaaggatttcgaaatccctcaaactcaaacccacctaaaatctatgcaactttaattgaactggatgtagggttattgagaaaataaacttaacatgttacagcatacagagaaattggatttaaatttttctaatacagataaagatttattggaagcttcttaggtaaggacatcacttttgctcctttaataaaattattttctaattttggtacttagaagaaagtataacctaattttttatatggtgtatattgtagttacagtagccatttcacctgttttcgaaaaattctaaataatttatggtgttgaaaatatatttcagaatagcttgttgcacgcttataaaaaaataggcacgcatgcaatgcaactgacaatttaaacctcatttttagtattataaactactgaaaagtttccgaaaatggcaaaatgtctacaataactataatgtatcactacaaaaaatgttacttttagtcacaaca

SEQ ID NO: 65007 - DNA, 898 bp, Cannabis sativa
gagactactgactgtcacactcttgaaatataacttttacaataacgtaacctttctttcatattctatttaattttatcgtaaaataggtgaagtatttaatttgtatccatttattaactatcatccaaaacttcatttatttatgataaaattgaataaaatatgatgaaatgtagaagcttagctatagcagaaattaatggtacaaaactagtggtacaaaccagtgcgaaagatggagaaagagaggaagaaagaaataatgaaaatgccaaagaaagcttaaccaattggttagcttagtctcttatttatatatttttttttatagtgttctcttatttatatattgatgaaaaaagatacaagttgcaagaattataaaataaagtttaacagagctaactaacttctaactactttttgcaactaattaactaactaattagttgattggcttaaatccccctaaaatgaaatggtgaagtagccatatgaagtttgctgttaagatagttgaatctgtctatctagtcaatgacttagttagagcattcgtaactagacctaaagagggcacatatcgaactgaaattcggtgagctaaaatttgatcttgaataatatggagataaatttctatgtgtttgcaacaggcatgaaacactagattagcatcaagagaggtggcagattggttatcaacccaaagaacatgagtttgaatgatagggagttgaagctcacttaacaaagatgtgatccattgaatttcagcagtagcattggtaagagctcaaaattcactctctgtgcttgatcatgcaacaacacaacctgtaactttttaattgatcatgagattagattgcagcctagaaacatgacatatcca

SEQ ID NO: 65008 - DNA, 1915 bp, Cannabis sativa
cactctaaaaaaaattttctcttctctttttaattctctcaattttaatattttattaaagcataaatctacaaattaatattttactattatataatttttctataaaaatataattttttaaaaaataaattacaaattgatattttactatcgttttaataatttttctataaaaaatatataaatctacaaattgatattttactatttattcaattttctataaaaaaaatataaagtatttttaaaaagttagaagataaaaataaattccaaaaaaatattaaaacttaaatcaaatataattaatcataaattttgtttatacacatacataaaatattaattaatatatataaatatatatctatatatatggcaaagacataaagtggtgacatagtactctgaaatttctttaaagctatttttcttttctctctttaatttttttatttttttaaattttaattcatataaaaatgctctaaattctataaaaaaaaatacaaaaataactccataaaactcaaattatagtaataataatataatatacaaccttaacgtttttggcttttttttttaaatattataataataatataaaaatgataactctaatgtgtaggtttttgacctttttttttaagaaaaaaaattaagatataataatattaataaataaataaagaatcagtgatatttgaaataatatttcaattgctttttaccacgtttaaatttttcattaaaaaatattaattaattttaacaaaagcctactctacatttttttttgaaatgataactttaatggcaagtatcacataactataactaaagagcattactattgggcactagtggtgcccaacacctttcataggtggcaccctacgattggttagcgatatttcttaaatcttatttttttttaagttatatggaacctactacttaattatgtaacggtatgataccagcaaggagggttgctttttagcatttctcataactaaaatatcacattttttatatatttttttctttttttaattgagatatttaaaaaatgattatcactttttcaaaactcattaattaatacgaaaaaaacaaactaatgaattttctctgaagtgttaaaaatgttaaaaaaatgtttaaaattcgagatgaaatctaagattaaaatgtatagatttgggaaatacaataatgacgactacaagtgaactatggtaatgacaagtgatgtgatacaatgatgacaataggtgagtgagatacggtgatgaaaataagtaagatacaatgaaacaacaagtgaaacacaataataaatagttttgaatgatcgagtatgaaaataatgcattatgggaaacgccgtaatttttttcaatactaccttatttatttatttttataaaaataattttttttaacaaagtaatttaaaatactacatataataaattttaaactttttaataaataattttaaataataattaataaaattgtgcatttagtttttaataaataaattatttataataatatgaaataagataatacatttataattttactatatattagaattatgtttttaagtaattatttattataatactaaaaaaaaaattaaattaactgcacgaagaacaactataatgcttagttttcacatatactacagtagttcactcagttatggtaatttatagttttgtcactctctctcatttttttttttatttttttttgaaacaagtagcatagatcaaatgaaatcaaaggccacaatataaacttaagggtgattctacaatgcactcccttaaaagggatgtattgatgcatccttaacttgtttcggcatccagaagaattttttagtcta

SEQ ID NO: 65009 - DNA, 578 bp, Cannabis sativa
tctgtcaagggatctaaattcaaatcccaaacgtctccagcatattcacctcggaaagatttatcctgggggtcccttagagatttcttcagggcctccacctccacattacccttggtgtgttcccccaaggcatagttgtacttggaaatttggagctgaaccctttcctcgttgggatgaacgggactcaagataatacctagaggcgcaggatactcatcaacctcagaaggaatccccggatcagcgctgggcgctggagtatctaccctccttggtttcttaacgggctccgtatccaccatattgcctttacgtttgcggtccaggggagggatgatctctccttcttcttcctcttcctcatcgatcaggatgacttgttgctcgagaagtccagtagaagatcttcccggagtcaccaccacattacgtggctcgagcaggacagcttcaggacagtatgtacaagcaagggcgtctaggaggtcctccattggcttatctgcttaacgataaacaaaagagttagaacatttccaaaataccatgcatgcaagaataacataatgaaa

SEQ ID NO: 65010 - DNA, 3501 bp, Cannabis sativa
tacatgtaaaaacagagagattactagtcgaattcatatatgtgacttggaatctcatccttgtaactctgaacatcaattttatagtggaatcgagctctcaatttgaggagcagctcaacggagacatagccaatttatttggtgaacttcgagaaaaattttggtgttttctaagcatatctttactatttttgtgtgtgtttggggatagatcagattaagttagatctgatcttgtgtttgtgaatggtttgagatttctgggtgtttagggttagcatcgagtttctctgagagagaaactctctgctagggtttcgaagcaagagctaaaactaagggatttgattgagaaggttctcgatccctgttggttttgtcttggcctaaacggggttgtattgactctgttgactttgaaaagtcagggttgttaaaggtcgaaattgaccttggttaaacctgattatttaatgttggtgtagggtaaattggtaaaagcactaattcctacacatattttgaattttgattagtttcaatatgatttctctaatttatttttctttctaattttttaatattgtctttttgccaatagtaaatagtaatgaaattttagtttagatgtaaatttgtcactttcacaaacgaattagtgttgtaatgataattttagttgataagtaaatttgatgtggctggacacttattgaagttgcccgagtgaaaactcatatgatttgttacccttgttcttttgttttaataagtatcattcatggtcttttgatattgatttttgaaatttaatatttgtagaattagagattctcattttgtgaaccaataactgtagagtccacaacgcacggtgggggtggttagtaatccatggtaataatgattcacttataaattataacttatgctctcatttttttcctttgttttcttgaccttttgcttttttttttcactgatatatagccatcatcaatgcctattgttgagttttgttgcaatttgagtcagccatctcttttaagctttagtactttattcaagagaatatgctgtgtcatatatctatgtgagttggtcttttctatataatatatggatgaacttttggagagagaaaattgacaacattaaaaattgtgagtattacaaagctacgagtattcacttagagtggcgaataattagaaataaaaataaaatgcaagtgaataaaaatagtaaaaatgtaaatgagacaagtgacttataggttcagtcagagcttgatccacttaatccactattgcaagagtttgtacttagtctttttcatactggatcactcctttatatagaaagcaagtatccgtttagattacatgatcgataaaaaatgaccgttattacatcaattatacaaattaataaaaaagatgtttaaaaaataaataaaagaatagtttcaaccgttctttattcattgtctcaacgaatgtgacttgataagttgcacactcgctatccatattctaacacgtgagctcgttggctggctctttggtgttatactcacatattgggcctttgggcctataataacttcaaaattattagatagttgaatgcatacgattaccctaggttgcgtatttgggcattcatgcgttaacaacatagaacttgagagttccttacgagttgtcgaacatattagtcttttagactagacgtgtgtaaagatgcggtctttacatgtcacaagagagatatacttgatcattgcacataatcgatatatgcgcaactagtactaacttctcttgatcctgcttctatctcaactatgttgggcatagtatgcaattagaccttgtatcggtcacatcttgtgcaagtttctatcatgtgaggttagctactggagctatgtattgacacgttatcctcttccatcaggaactgggtccacgtgttagctccttgcaagactgtactcgtatttctaggcaaaaaatttgcactataacatatgcccatagttttgcgatgatagttttctatcactcgacaaaactatctcgagagtcaggagaattgaattgtcacatcgtgctgatgcttgggtatcttattaagggatttgaaatgacggttataattatgatttttcttattatgccacatcattaaaaccctggggtttgcgtaggctcgaccttggttaactgtgcaatcatgcatcctttggtttacaattgccatgtgtcacgatcccaacgagtgacgacaacaattataaaaaccctctgtaaaaaaatgagatttctattttcctctcattctcacctacacacttctcttaaacttcttgaaattccaaaaattttatcctatttttttttttttcaaatcttcaaagtttgctcgaagacctttgctgttaaattgctcgagattacattaaagttcttctctagaaatcacagcttttaaataaaaagtaggttctttaaacacttaagttattttttatatgaatgtttaaataatcgcatacattcttgtttataggggttgaaaaagataaaactgaatggctattttctgggcagtaaaaatttaggctaaaataaactaaaaaatgcaattttttgggaaattttgacctctttttgaataaccgcatcttcttcgtaagaactatgaataactgcatgtttcatgctagaacactttgaatgctctcgcaaatgtatatatgttttcactcagagcataaagaactgtatgaatagtcgcgattttatctagaataccttaagtatttttcttaacatatttaagaaataatttgcacgagtgaggatactcctttaatttgcacacacaatatgctaaaaagatcttctatttttaagatgagtgatcccttggacagccaagagtactagtctcaagggagagcattcgtggatgaaccccaaagaagcgaaagcttcatacttgcatcaatttcagacaacgcgtttctgttagaagttattttaccaagatttaaatttactaacatgtatgttgattataatctataatataacaccctaaatctgaatttcctaatacgatgaaataaaaacataagagattaagaaatccttacattgatggcaacaaaataatatgactcctttcgttcaaatctctaatccttgattcctttttggtaacagagcattatcaagatttgaacctggatcttctctcctttagtttggttaaccacagtctttcacactatgattgagtacttgacttgatatgagtgggcatgatactctatcactaaaggcttagaaattgatgaagaacaaggagaggaattcaaaatactaagaaagggggctctcttttactagttgtctaacaaaaaatgaaaactagcttatgtgagatggatgataatgagagcatcctattccttttatagtattt

SEQ ID NO: 65011 - DNA, 1497 bp, Cannabis sativa
acaactctggtttctggcaaaaagtttggaacttaaaagttccactgaaggttaaaaacctgctatggagcgcatctgcaggttgcttaccaactaaatcccaactgcaaactaaacatgtttatgttaatgatctttttcctttatgtaatgctgagagggaaacaatctcacatgtgatgataacatgttctttttcgaaagcctgctggaatagattggaaataggtgttccaacagaggtcaatgggacattctcgacttggctgaaggaggtttactccagatttgttggcagtgagcgaaggttgatttcaatggttgtttgggctttatggaagtgtcaaaatgatctggcttgggataacaaaaacagatctgttagagaagttgtgacattggcaaatattgtccttaatcaatggcaaagtgctcaggataagacacaagatatatcctcaggatttatgaattcagaggatggtgatgagcattggcgaactccaaatgcaaaaacaattaaggtaaatactgatgtcgtaatctttgaacaatctcaatgttttagttattctttggtggcccaaaatcatacaggcagattagaggaagctagatcagtttgcagtagagtaaacgttcaactagaagttgcaaaagcaattgaaatccagaaagttctgagttagataaaaatgatgtcgtagtgtaaggttgtcattgaaacagattgcctcgtaatcatccaagcatttcgaagttcgtctgctatgttgtcttattttggcaaaattattgatgattgtaggagtctgttaactagttttgatcacaaagatgtttttttaaaatttgtcaaacaatctacaaacaaagcattcatttcaaccaaaactacttgttatttctgatcatgtttatctagtgagtaatgctctttcggagttcatttatgtaatgaggaacgatttaatgaaattttttcttctttgtcaaaaaaaaattattttattctatttttattaaaatatagcttgcaccaactgcgtatgtttaatcaggtggtgttggaaatcattgttgccccgtagcaatattcttttccgttactattggcttttgagacaattatatttcaaataattcaggtcattcatgtaatagattgattacaaatgaagtttgaaacaataattatcacaagtgtaaaaacaattctacgttcttttcttcttcatttattcagggaaggtactatctagtcacattagtgtatcattatcataaaccaatgcaaattcacactagcttcaaagagcagacctcatgattgattatcactattgactttttaatgccaaattattatatttttcaaacaatttgccaacacacaaaatcatagaatgataacaaaccaagtttgaaacaatattaggtatcacaagtgcaacaccaattagatgttcttttattttcttcatttagtcaaggaaa

SEQ ID NO: 65012 - DNA, 1155 bp, Cannabis sativa
  modified_base (663)..(665): a, c, t, g, unknown or other
aggtgcgactccttgaccggagaaaccatagataggctggaggcatggggttagatccttgagttggagtcccatcttttcatgagaagttttgaacaagatgatggaagaggctccattatcaatcatggttctggccaccattttattggctaaatggacttccacgaccagtgagtcgttgtgtggaaatctaattttgatagtgtcttgatcgttgaaggttatggttggctctcctgctcgtggaaatttaggcttcctttcttccacggcccggataacctcttcttgctcgtgctgcactgttcgggcatacctttcccgagctttacccgaatctccagcaatgtgtgggcctccaacaataacttgcagattcccatctaccggtggaggcagcaaatcttggttattgtcgtctctttgaccctgattggtcttaacatatttctgcaggtgtggattgttttacattattaggaattcaatttctcgcttcaagttgttgcagtcgtttgtgtgttggtcgtagtctccgtggaaccgacaaaactttgtcatgtccctcttgctggcatctttcttcatgggcccgagcttcttatacggggccagcgactgagtttccatgtaaacactttctatatcttcagtcagaannntgaatgcagtgtatttggcatgattctcccggggagcttgttcgaatttcccagtgaactttccttttttcccattcccttgcttgtggtagttgttggaacgcttaccacttgatctctaattacttggttagtggggaagttgggcggatgttccagtaggaggagcctttgacttgttaggcttttgctcaccttctgctcgttgaatggcctcttcgagcttgatgaagccttcgacgcggtcaagaaaatcactcattgagtctaccggcccgttcttccttatatccttctagagttcaccgaggacttcgatgccccctagtatcgcggataactttccatcttcaattacccgtgaaactttagtcgcctccatcatgaatctactaatatatgcacggagaggctcgcctggtcgttgcttaactttgaccaagtctcccaaatgcaatggaagttggtgtgaggaggagaattgtgcatg

SEQ ID NO: 65013 - DNA, 1028 bp, Cannabis sativa
gtgggtcgtaatcaaatcctacaatttcaggagattattgttctaagatatcagtccgatttgtaattcactgccctcatatgtaactataaataggagcaggatacactgaaaagaggacggaaaatccttaagagaaaaagccctagaattgtatcaaaaatatataataagatagactcgtggactcgtgttctttatttttttcctttactgctatcattttctgtacaaatccatcacgattaagcctttcatacagttaacaaaaatctgcgttaacatcaatttctcaattctagagattttattaatctgtaagtgtattatttatgtcatatgtgaaatttactatttttataatttttgctccataacaattgaaaatgcaatggatggctgttagagtcacacaagattggtatagaaccttttatctagcaggacaattatatgttttctttggtttatcaaggttatgcaggataaaggtatttgaccattttacccctaagcctaaagttaacatataagcttttgttaagggcaatatttgaatttgttggtaatgcatagattaccttaggctttttcttgctgatttaaacaaaagattatatgataagattaattagattaagatgtgttagaaattaagatatatcaattgcattttctctctaattctctctcactctcactctctcttagtctctcgacccttcttaaaccgaaaggaatcaagggctttccattgaagttcagtcattctagatgggaaaaatcaagagaatttagtagcaatttgaaggtattagcaatggtaagctctagaaacccttgttctttaagtttttgaggttttagttggagttttagcatgcaaatttttgtttctagctctatccaaacaagtggtacttggagtttgatttctaggttattactgagttatttgaagcttaattgagttgtttttgttggttgtgggaggatttgagcatgtttgagttcaagaactaaaactt

SEQ ID NO: 65014 - DNA, 1365 bp, Cannabis sativa
acttagtccacaattacaaagattacagtttagtttatttgattcggatcactcctttatatgaaaagcaagtaaccttcaggatttacataactgatcggttttagaatcattttacaataaatgacagtattaaatcagaataaacgttaaagaataaatgaagatctgtttaatatgttcttgtattaagtgtggcaacgtatgcgactttcttaacatgagttgcatgtttatattctcgcacaagctctcaaacttttggtacgtttagtatttgttaggtggaccatgggcctgtcgtttggatgtctgtgctcacctaagattgcatagacggataatctcgcttattgaaaatgtggaacacatgagttcctgacgagtcatcgaacacgatcagtcattcaaacccatctttatgtaaagaagcaatctttactagtcacgagggaagtctacctagtcttcatacatattgtgatatatacactacttatattaaatcctcacggtactgcttgtctttaactatacaagacatagtatgcgactagacctgttaaggtcgcatcatctcgtgagttcaaatcaagcgaggttaactctttgaaagtcattaattaacaggtcatccttttcttaagaatttgatccacatgtcaaatttataggagactgctctcatatttctaggtaaaaattcgcactataacacatgtcactaattttgcgattgacaactgtgtcatataggaaaactattaaagagaggtaggcaagttatcatcatgatatggtgacttttagttatcttactgagggtttcaaaaagacgactgtattaattgtttttattttcccaagatgccacgtcatcaaaatccttcggggtgtgtgtaagcatactcgttggtgatcattggatgaggtgacctttggtttcttttttgccacgtgttcatatcctaacgaataggaattatttgtatttaaccccctcaaatacaaatcgatcgcacttcatttccctttcattcctaatttctcatttttggcgttcttctcctttgaaaatttcaaacttcaaaaacctttcaaagtttttggattttcattttctaaaaacgattttgtgaaggatgaagaacttttagagtgattctcaaatttaggagaacatatcctcatacaaaaggttggtatttctttctcgattctttataaattcattctttttgaatgttcacataccttttgggtttttagggatagaaattgcatgagatcaataggacttatcgaggaatcaaaatttatgacaaaacaaggcaaaatatggaattttttctgaaaaattcttgc

SEQ ID NO: 65015 - DNA, 5646 bp, Cannabis sativa
agcaattaacaaactgaatcgtttccgtgagaatatgaaagtttgatttgaaatattttaaaagtgttaaaaaaaatcacccaataaattctcataaaccaagaattctgttatataaccacattttatatagaataataaatatcaacaattattgtgagtcactagtcacgcaatttacaccatgtgaccacatccaaagcttatatatatagatatatagattaattgttacaataataaaaaacctttttttttttgaaaactgaagatcaaagacaaaggaaacaaagaactgaaacaatgagggaactgaagcggttccaaactttctctttgtccgttccaagggctgctcgagcaaggctgtaggctcttgtgtttgctgttcttggaataaaatgaagttatatacactccataaatgtagtaatcactagcattttagctaactgtcttcttacatacatgatctatttttttgcttcggaaactattttatcaaacatcatattgccccaagaaagtacataagaaccagcatctaatttagcatttataatttttgtcacataaattaaggtttagcgaagattgtggagctgccaaaatggtaatgtttgtaggatgagagattgtagaacacgatgcctgtcctcgacatggtagattttatttgagccagagccagagcctgaccacccaatgttgtaaactctggacagctttcaatgatctatataaatgctgtagatgggcagaaaatatcaactgcaaaggaaaagtcacatatttttatcacaatacatctacgtttcttttctctaagaaaatcataggctttgtagacctaatgagagcataggagaaaaaatattcttatttatcattctgaaatgagttaaaagtcgtaaagaaatcttataatacctcaaacaagtgtgctggcaagaacgccaaagttgggttgaaaaagcctacacaataaagaaagcatttcatcaccaatgaaaagagtgtaaatagaggatgaagagggagaaattgagtaccaaaaataggagtcataagaagcttattttggaacttgaaaggaaaagaaagaatagacagaaaaaaaaaaataaacagagctgaaaagcaccaagaagaaattaaatcttcacttttttccatttcaacagggtgatactaaattttcactaccgtatggacaacattaagttttaacttttaactacccatgctaaatctttagtcagttgtatcaaggaatccttttcttttccttttattttccactcgacttaattagtaaattgatttagtttagttgtacatgcaagcattacattaaagcactaaccaggctaagaaagccatgcattctaaccattctctaggctatcagtttcctagtttcacaaagcacaagttccttgttccatacattctaaaggaaatgtaacaaaataaggcatgcaacccttcctggataacatgagagcaccagactgctggcccaatgtgccaatgacacacaagtttaggagttacttagaaactaaacagaagagataaagtactataattgccctactcttcatcaagataattagtttgagataattgtcaattaccttcttttatggattttgcagtaaagacttcataccatagcttaaatgcatcaggatccaaagcttattccccaggcaagcacaatttagctgcaggagaactgccatgcattcaatgaactttgcagccagttactatgaaatcaaggacaatgatcagtcagttcttccatagaattgcatatacacacatccaagttaatctgaccagaggcatcgaagaaacgaaatggaaccagaagaaaatccatcagaggaaaaccttcaacccttctcggtaagcattctgctagtgagctcaacctgagagtgctctttcctcgtttcaacacaagatcatacacaaaccttctttttgaaggacttggcgccatacatgtaaccattactgtgctcccaatgctttcaatacccttgttaaggaggaaaagagcaccatcatcctctgcctgaagaacgagaaattgttcattcatactcaaggaaacagtcaatgggctgttgtacctgaagcgccttcctgaatcccaatgcttaccactaaaatgaagtgacagctgttcagatgagctgacaaaattgcaatcaggaagtgggcaggcacatggtgcaaagaagcatgcctcattgtggtcactgttcttcatgtaatcaactttttcattgcaaccataatctttgtttcggcactgtgttctgactgattcaactatcaattcaatatccccacacacaatatccttacttttgagagaaatgggcatatgtggctgggaagaagaataccagattaataataaacaaaagtccaaaatgacatgctaaaggaaagggtccactatactcctaaaaaaactgcacgaatttaaaatttacaaattacaccttcatttttaaattgtttaattattttcttttaaaaaaagatcaataattaaaactgggaaggagtatgaggtacaataagcaaactactagtaggcctttctgataataatacaaagagaggaaaataagaatatatcacctcttgaacagcaatcttcccattcatctgtcctccattagtaacctacaaaattttgctctatgttaaaacatattttcttattaaatatgattacttactgaagtaatggcttaaaaatcttctgcataccagaatgcatactaacatctttgcagccagtccttaagcaccaaaaatggctaagctaaagcttttccaaagtataacaacataagtgtaatatgagtatttattgttgaaccgacagctaaatgaagtgaatgatgcaaacatgaccttttagaaaaccatatgtgtaatatgtcgtaggcccataaatcattggcaaacattttagcaacaaattacatacagattggacaaaattggacttttaatgctacgtaaataaaaccaatacatgatataagaggaatgaaacataataaatacctcgttcccttcgtgcgaaaagaaaggatcatggtcaaccccattacttatattgattgtagctacactatttggttgcccacttctgtcaaaagactccacaacaacacctctctccttgaaaatcacctgcagagctatacaaattatttcacatcacacattagcttcattatcataagtagaaaatgtaaaaggtacctgtccgcaaccataaccaccgagctctctttctcgtttttctctttcagtgatttcatcctccccccatgaagataagcatggacacacagcaggagcaagagcatttgttccttctatagagattctttcataataaaagagctgcaaagaaatcaaagctataaacaaggcactgtatggctatcaaaacactgcaaataaaattctacattacctgtagaaacaaaagacagccaccaacagcacgttgcttcccctgacgaaaacgtgctacctcccgaactagccggtcaagtagaaatttcccccagttgtattgatggatgacactcatatttgttaagaagtgaaggaatgaagggctaacatccagtcttgctgttggagataaaagcgtacccagagcatagagaacaaaggatcttttgaaatcctctccagcttcagaaactgccaacttctcttctaaaaggcgaacagatatacctcgattggttgcattataactatgtcgcaagtctaaaatcaagtcatctggccctgagttaatcacatctttcccactagcagctaatcccatcacaaactccacatctttaggagttagaggaatagaatggccacaaatctccaagctgcattgtgtcgtattaaatctttccaacaaccaaagacacaaactacggcggagagtccgacatctaagatcaaggaggcttccaaagcccatgcacttgactgcctctctttgttcagctgtaaggcgttgcagcacgttgaataagcggccaggagagcatcttgtgactagcttagtctgctattttgaagtcagagattatccaatctagttcccacacatctcccacccaaaagaaaaaacactatttacctggttccttggtttggaaggtcgcgtaggagctgcactcaagtagttatcccatacctcgcgagcacgactggtgtattttgctttctcttcaaggctcattgatttccacacctcagatgctgctttcgttgcctgaaatatacaaaccagtaattatttacttcatttgacgtttctttttcaccaacacggcaatgcaatgacaatgaagaggctcacagctttaaggccagaggactcgggatgggaagcactgtattccttgataaactctcggctgcagtagtttacttgaacgatcaacaaggcagccaggagataattaaaagtaaactatggaccaaatttgaagacccagaatcttacctaaaatacacccacgagcatgctgggcgaggagtatttactcgcttcttgttcttgttcttttttctactcttttcttttgaaacagtatgctcttcaaaatttcccttcaccattgcaagatctccttcactggagagctaattgtttggatttttaagaacatcactaatcatatttattaatctagttcctttttaaggttatacacatacctatatgtattatctattagccaaaagaaatacgaaaatgaagggtacatacatcatataaattcagtgagagcttcataagtaaagaatagaaattattatattttcccaataagcaaaatagcccttaatttgaaagacttacaaaacttgaagagtgagcttgaaaaaccagagaacaaacctggcaaacaggcacagtgaaagcttcaccatcaattatttcatggtcggtcaagcaaacggaaatggaggcgttgttgctgaaaggagcggagcaatcagaagggagctggtgaagagggttggaggattcgggtgtaatccaagcgtggggagcttcagctccatctccattttgctcttcttctccgagttcctggtcgggttgagagtgtgggggaaggggaatcccaaggtgacgtctcttgcgttgggggctaatggtttctagttcgccatcgtctccgtgtattcctctctcacccttcttgtacggtcctctcagactaccttcttcttcacccttcatttttggttctatgctagtccagtccaaacccaaggtttcaaatcaaaacatctttaaaaagtttcttcactcactgagtgatgtggcgatttcttattattttttttttcttgtaattagttatcaaatttcttaaattttttagtttgacatgatttaccccattactgaaattttgaggtaacgtccccaaaacttcaatttcgatttagtctttattttctagggaaattactttctttactaatattaaatatttatattgtcctttcctttggttacttttttttactttttaaatttttctttaatactatttataaagtttgata

SEQ ID NO: 65016 - DNA, 831 bp, Cannabis sativa
tttttttaaaaaaaaaaaaaaaattgtcgaaaggaatagaagttagagtagtgaggaggaactacacccttaagtaccttgtgtggaaagagaagaatgttattagcaatggatttattttttctttctatattcttggatagatgattaagagaggcaaagcaatacttatcttgatgctaccattaattagcattttataattcctacttagttttcttttcatgtggggcataatgctctatataacgtttaagttaaacatgtgcagttcgattaattgcactctattattattgttatcattattagagatatcaatagctcctttagacgacaaaatcaaaaaaaaaaaaaaaagagaaataagagcattttctcagtgttataaatatagtgtatatacatattttaattcatattcataatattaaattctaatataagttataatgtggtctaaatgtaacgtatattaaaaattgtatcaaatttaacacaaaatataatatgaattaaattttacaccacaataaatattatttttatatttttatttatatattaaatattaaacattatttacaatctaaagagttgttttgacatatcattatttgttttggcatctaaaaatttgtttttgtctaatttctttcttgatcaaataagttgcaactatttaggataacttatgaattttcagaaaatttaaaataatttacagttccaaaacttaagttttaacaattacttatcatacgtataagaaaaaataatcgtgtatgtaacaaaatatttaagggaataattacataaaattttattttt

SEQ ID NO: 65017 - DNA, 808 bp, Cannabis sativa
tattattattaatatattaatatattatatattaaaaatagtatatatattaagtttctaaactaaacttacgaatgaaaatgaaactctcatcctccgtcaaaattctctcccccttatatctattttcttttatttttaactcgaaacctaacgatctaagctccggtagtagcaggataaaaaatcattgaagaaggagagcttaagttaagaattggttttgttttaagtcgaatacaattggttttatatagtggttttgtgaatttgaatagttatggaggttgtgaacctataggattattctcggatagttattggactagttctgatattttcttactgaaattaaggtgattttgagttagaaattttgtttcggactttttataactaacactagtggcgttttccaattaaggactcgattttagattctattacataagtactatgtgcactatgaagtttggggtggtttggacaggttctagtagcatttcgatgagtgcgtaaacttaaaaaatcacatcccttaccaaccaatcaaccggttgggaaccggtcaactggttatggccaaccggtctaccgtttttagcagcctcgggaactcggaatctaattttgacataacttttcactcgagtgtccgttttggacgttttatatactgtttcgaagcttgcaatgagctctaccatatggtatatgtttcatgttagtttatttgaactacaaggtttggtaggaaatcctaggttgtcctttgcaactgttaagcagtgttttgggataaacactt

SEQ ID NO: 65018 - DNA, 1581 bp, Cannabis sativa
ctaaacagaacaactcaaaataacagtagaataactaaaaaacactagtagaacaacagtttaaacttaacacattatactgcaatatgaaatttatataaaaacatagtaacaaaataaaaaataccaactgacagtatttttgtaaacaaaatggcaaaaattagtatatcatgtatattttttttttatacgtgtgttgtttgaactatattttcaaaatttactgaaatttataaattgtcttaaatacttgcaacatacataattataaaagaaaaaatataaccaaatttaaaaagtaaccgatctaatctaattcacacatatttatatatatttttttaaataattatgcacatacaattaatatttttaagtaaaaaattataatttaaaaatttaatacatgattcaaatattattagaacttaatagattaaatgtatattttatttttatttataaataaaatgtaatataaaacaaaatgaaatatttctttatacatataatttttttttcttcttccttttaatttattattttttattttatttattttaatttattgttaaagacataaaataataataatttattttattttattgttaataatgtggaaaaattataaatattaaataatttaatattaaaaataaactaatttaaaatatgaaattcgtatttaatcaatataaattagatatactatgagtaaaataaggtgaattaaattagataaatgcttctgcttcatgatacatccaaaacttataaagtatgtaccataatactttctctataaattaacatgtacatatatttaaatgatgattattcttaagaaaaaataaataaatgatgagagaggtatgttaatattcgtaaggaatccttataaaaagaatactactattgctagtattaaatctaatatcttgattgtggtgttttgaaataagatccctttgtaatataattattaatttaatattttaagggaaaaaataaacagctagagggagtattataatattcgaatcagctgatgagagggggtaaggatcaaatcgtcacaataataatacaactatatatgtaatagcaaaaatatattcatataaatacaatagaattcaatattttttatttctaataatcgatacttggatatcattattacgaattacacatttaattttaaattatattttattaacatcacacttaacagattacatacattacatttataaagtttttttattataagaccatctctaatgggacactaaaacattaaatatagtgtaattcacactatatttattccaatagaacactaaatctatcctcataaatgactttgtctacagtgtcccaccaaatttagcgagacactgctgttttttaaaaaagaatttttaataattaaataatactttaaagaagaaaaagtaaataattatatacatttaatatgaaaatatttttattatattaataaaataataaaataataagaatattaaatttggtgtaatttttagtattgtggttggaattgaaaaaaaa

SEQ ID NO: 65019 - DNA, 544 bp, Cannabis sativa
taaatattaagagagagagttaaggtataagattattttatagcttttaaaaaatataaaaataaaaaaaaataaagggaaagctctttattaaataaatatattaaaaacaacacccaataaaaataattttttaaaataatctgacaaaaaaaataatttatgtttcccaataaaaataatttttaacttcattaaaagtgaagttgtttgtttcagtatgcgtgcgtacaaaataactaaaaatttgacggtattatttatattaatataaataaggacatttcttaaaataaaatgaaaagtgcgtatcctcatgcaattatttcttgaatatataggagtaaagaaattaatctcttcattgatcaataaaacacatatattgagaagtatttgaaatgtggatgaaatttcaattgcgagcgagagatatgagcttgaagattagtattaatgcccatgacttccggcgatcaagttattcaacatgaaatcgaataaagactttataagtgacccattaagcaattattattggaaa

SEQ ID NO: 65020 - DNA, 845 bp, Cannabis sativa
  modified_base (66)..(75): a, c, t, g, unknown or other
aaggccctgttggagttgaggcaggacgactggagcagtaggaggagcattcgagggggcttgttnnnnnnnnnncattttccttggatgccctaggttcttagtcttagccatgaatttctgaaagtaagaatgagaaacaaagaagcaagaacacaaagaaataggaattgggtaggttatgaaaataaatgacaaaggaagttagtttatataatcatgtgagagagagagagaatcaaaagaggaaaccaacttaaaaagaaactaccagcctacgaacacaaaggaaactgacccattttttttcaaaattatttattttttaaaaataaaaggaaactagaattaccaagatactttccaaaaatatggaatttaagaaaatctttcaatatcaatgacaaattacaatgaataagatatcaaacttgaaaaggaaacatatcaaaataaattaatttggattaaatgttgaatcttaccaaacaaagcacaaaatttgcttagcccacaaaccaagtcaccaacgcctccctctcttttatttatttatttattttttatttttatttttgaaaacccaaaaataatacaaaacagaataaaatatgtacaataaatataaggtattctaaagcaagtaactaatcaaaattaatcacatacgacaaatatgcatgttatgctttccaaagagaataactaattagtatctcaagaataaaccatacttggcagatgttgaggaaaaagatatgcatgttacaagtaatgtgaacaagattttttatttatttattttagaggagacttataaacttgtacacacttgtcagacataa

SEQ ID NO: 65021 - DNA, 1801 bp, Cannabis sativa
tctcaacggtcctttttcctttgttctacaggttgtcagtgcccgcgatccttccattttgatcattatagattttaccctctacaggtatacaatgtaatttcctcaaaaataagagtctctaaagcccattgttgtagtagtttgtgcgattttttctattattttattgtagtttaattggacctcctttcatgtaaaagaaaagctccctagctcattgtacacactttccttcctctctacaaggtccgagattctctcttttcatactttctctctttaaaaattggaaagtgaaagattctctcttttcatattttctctctctaaaaattgggaagttaagctatatacgtagttatttatttattttttttttttttgagttctcttgtacggcaattagctttttgtgatatataataaaatttctgagtaaatgtagcttcattaccttcggaataaagggagtgagctactataattattgtattttttttttagtttttgttcatatatttattggccgctaccgcttatcagttagtatgtagttgatcacttttcagtgtcaacaaacacaaatatttttcaaatgtggagcctcttaaagatgaaatagctctattaagcaaagattaaaaaagaaataaaatagctctactcttttagttttctttcttcttctccatattatggtgaagaattatattttaactcttgtgttgtagaagtctaataagtatgtgaaattatataattttcataatgggtggagaacacatggcagaagagagagtaggagacaatcccttcctggtaatatatttagtaaataatgtaatcattaaaaagagccgcaaaaattgacatttatttagaaggtaaggaagccgaaagcagaagcagcagcacaatacgtcttgtccaaatcactaaatacaaacaatttgccattttaattcatttccatgaattaatgcaaattgcaaatttttgatcataaaatgatgaaaaggtgcaagagccaagtgggagttcacgccagaccaaaatgaagtttcatatcccttttgccattaacaacaacaataacaataataattttttgatacttttcttgtcgttttctctgatgatcttttacttttggatcttcttttaagtgaaactttgttcgataattgcctactactgatttagcatgcgtaatccttttcgtgtactacactacaccaattctcaaatcgattcttttgcttataaagtatttttttttttttaaagtgaaaatttggccaatctgatcctcttttataaataataattcaagtgttttagtgtaaaaactcgattctgtctattttattgttgttgttgtcacacacacacacaataatgttaataatgaaagtgaaatcgatgccatgatttctgtatcttaaagtaaacatatgccaatgccacttctaaaagttgatttatcatttcactacccatgcacatctcttcattacttttcattaatacaaatagtatataattttgattaaatgaaatcccttactccattttacttatcttcatgttttccaattttaattaatatatatcgtatataattttgtgcacaatttaattgaaatatatctttagtattggttgaaaagtaggagtgaaatttgggtaattaagtataaataagcaaatattccattattcgtttgacatatactcctctatatgcaatgcaatcttatatgatttgacgacgtacgactaagattgagatgtcgat

SEQ ID NO: 65022 - DNA, 2406 bp, Cannabis sativa
gtctctttattgtttatgtatcgttttgctaacagagtgattcatagttttactagagcaatctgttaatttccaaattgaattttcaatgagtactctagtagacgatttgtcttgttaataaaattttatttccatttaaaaaaattaatgattttaaagtttaaaattcatattataaaaataaaaataaaaaatatgaattttaacccaaattctaagaccttgttaaggcttgggattggacaaaatagtcctaagccttgtttggtacttttttatatttatatttagatgggattgggtaattatatcccttctttcaaattaatcgcatgagcttgggactattttaacccaccagaaggttgggataatttagtccaagtactcacgatttttttttttttttttcatataacctaatttttcaaggtataaatatattattttatttaaaaattaatataaaaagatttcaaatattttttatttacttaattaatttttagaatttttttttattttttattacatattatttaatttaaattacaattttatatttataaaataattatttatataaatttattttaaaatattttatactttatttaattttgtattacaccaaacacgaccgagtactaatatatccaatctaattctaatttttagtccagtgtaatccaattgaacatatgaccttattgggttaaaatagccttaattcccaaatagaatgggattaaattggtaggttgggatatctttgtccaatcccaaacttaaaaaatgtgtcaaacataagtttggactaaattgtccaatcccatgaggattaagttctatcttgatttattgacttagtaataggaaactctggctgtacatgttttagaagatgatgtctgttgtaatttttttttttctttttgggagatattcagttttaaacaatttatttagtacaaaacaaaatttgagatacatgcggctgcagagtaaataatccataaaacatacagaaactttccataggttaacataagagcttaatgaacagaagtttactcaagtcaaatcaaataagattaaagtagcaccaaaggaccatcttatggtgcattgcatgaattattttgttcataaaaataaaacattaaagatatgaagagttctatagcaaaaataatcagcaggaaggagctgataaaaaagaaggcctacataattgaatgtagagaactgatgcctggcaagacatttcactcagcattgcaattctctgcttcagtactaatcttgttacttgcaatttcatcgttaactacttctaaatccggatagttcctgtggttgagagagtgcaaccatagagccaccacaccttctttctgctcagtcaatgcaatatgagcgtatatatgcttcattttaaaggctaacgcctcttgttcatactctttcatcgatagctcttcatgagtgtctttccacttttggttatatgatgtaaagaaacactcatccaagtacaacccaacttcaggggcagttggcacagtcatgttaacatccttttgcagggccttctctatcaatgactccggagcacagttcctcatcactgcaacagcaagcccaatcagcttccttatctgatgaagcatgaagctctgtcccaccacctcacacttgacaaattccatgccttcaactgttactacggtgtcagcattgaacgaaatgatgaagcgccaagctgcagggtctacggcttttgttctggtggtaaagttatggaagttatgagtccccacataatagttcagaattctattaaacctttctttctcattctcagcataagagaaattagtagtgtcctttgcagcattaccctcgttcgaatccaagactccatcttgaaccttgttgctttcagcattctcatattcaggtttaatttcgcctatctgctccgaacttggatcactggcattaccatttgctgaagaaatgccagcattctcagtgttcgacgaaatgtccaggtcaaaacgcgaaccacttaattcataactacgcttgcccattaaaccaacaaccttacgccccctctcagagcattcatggcacttgaagagctcattcccagaacccaaactagccattacgctctccctattaggatgcgaatttggatcaagagcaaacaccggaataagatacacataccttctccgatcacagaactttttggcgttaaacgaacccgtcacacgcttgtacccaaatatccgaatctgcggggaaagattagcattcaggcggtcgacaaagcctggtgggtccacgtagaaacggccagagaccacttgccccacagcgctgacgccc

SEQ ID NO: 65023 - DNA, 1136 bp, Cannabis sativa
ccatttccacaaataaccttgtaataaacaacctcagcgagtcaagcaccaataccacacttacgcacttattgccttaaaccctaactcgactatttcatttcatataaaataaatatttatcaatttaatatactaaacatggctttcatatcacaaatatattagatgcccacatactgcttaaaatagaaagcggtaaataaataatcacataagcagttaagcatttactctcaacacttattgcaccacgagtcgagcttgtctttgacgatgattgtacatgttcagccggtctacaggaggttaaaaaaccttggcactctaatactaaagtgtaaagccctaatcattaggcacgttacaccaatcaataataaaccctaatcccactaaactgtgattactaaagagataagagcgggaaaatttaaactttatttgcaaatgaatgaaaataaaacttgcaataacttttaacttagaaaacaaaccaaaagataacaagttttgggatcgcacaaaacttttcacaaaatattacaagttgtttcatttgccgacctaagcggcaaaatctgagattacaaaatacaatccctagtagacccaactcgcttggtctagtgtggcccgaacatgtacaagcaccgccaagctctcgaactcatggttgattacaaacaaattaaccctttcctgtacagtagagcacccgtgagccaagtcgagtaaaaaaatataaatatcaataaacgcaattaacattttaaatatataataatgccattacacttattgcctatttgacataacttgcgtgttacgctcacacacctatttatgtctatgtggcataaatccgcgtgttacactcacacgtctaattacattaaggccttagaacagtttatctcttttctaattactgagtccaaccaaattatgttttgaacgcataatccatacaatcaatatatataaaacatggcatagcatttaaaatcatataatcactagggtaataaccctaggccatataaccactcactttagggcaataaccctaatcccaatttccaactaatcacaactataatcagggccgaccttgagcataggcgggctaggcc

SEQ ID NO: 65024 - DNA, 746 bp, Cannabis sativa
atgagacaacaatatactcatatttaaatgattaaataattgattcgtagtgttggtatcacaatgccaaccttgcttgcatcagcggccagttgagaaaattaaattcttttgaggatggtatatatatatattctatgaaagttcaatctgatcaaaactttttgaatgtctaaaataattagattgttcatcaatcaaatcattatgtgaatgatgaaactgaaactgaattcattaaaagaaatttggaaacatgaatcaatgagaaaatattctagaaaaagtgtgccagtatataaaatgactaaattaaacaagtcatgtgtcttgctttgaataaatttctctcaaatattagtagatttaattccataatacaagattcaaatgattttcataaagacacaaagttttatgtaaatttgaattattttttacaattctcatcaaaatggaattgtaattcaagtgatctttaaatctattcaaatgagattaaaagtgagtttctctcttaaaacgaactcgatttactcttagaatacatgatcacaagttatcaatacctcatgaactacgttcgatttgattcctttcaaaaggatacgtaggtagcctaattgctaaaattaggtacaatcgcaatttctcaaaaaaaaatctcaaatgaggtcattcacctcagtaaaattcaaatgaggttgttaacctcaacaaaaactcaaagtggggtcattcacctc

SEQ ID NO: 65025 - DNA, 590 bp, Cannabis sativa
atgaccaagggctttgacccaacccgtagtaggtgactatatcttggaatcgtaccaagacccgaacctagaacaatttccagactaggactcaaacccagactccgactggagaccaaaaatcggaacaagattcagaattaggaccctagaacagagattgaacttagacccgaaaccgaatctagacgtggaactgaagacggaccccgacccatactaggatcgatacctggacccagacacgaacaaaaacccagacttgcgctaggatctacgacccagaacccagaaactaggactcgtgacccaggacctggaccagaaccgagacccataccataatccggaccaagacccaaacccagacctagacccagacccagagtcagacctagacacggactaaaacccgaacccaaacccagacccaaacccagacctggaccaagacccaaaatcgtattagacttcggactcgaactcggtactcagacccagaccgagatcaggactaggccccagacctgaactaggaccgagacaacaaccttgattgggacaagatttttgactgggaccaggacccg

SEQ ID NO: 65026 - DNA, 1120 bp, Cannabis sativa
gatatattaattttttaatatttaattaatgattataaatatcaaccattagatatttgatctaatggtcaggaataaattacccatacatgggtaatacccattaagagcatagccttatatatattgatatattgatgattagtacattatataattatgacatatcaaatttgacttaccttacaaacatagtttgactaaaattattttcgattttgatattaaaaaataatttatataaattatatttgaagattatgtgcttttaaaaattatgcgaaatgcatcgattcataaaaacataaaaatcattagatttcactccacttatatattgataaaagataaaaaataatacaactacactaaatataaccagaggactaacataaaatatttacaattaaaatcttcttatatagaatatctataatattttaaatattttaaaattaaattaatttatttatataatttttatctatataatttttatttttaaatatatgtaataatataataatattataaaattaataaaagatattctgttaagtgataggatacaaaaaaatttgttaacattttatatagaataaatatgaattggaaggaaaaaattaaaaaaaaaacttagtacaattaaatatataaattttatataaaataaaaattattaacatgaaatatctttacaaatttttggggtgtagataaaatttcacacttttatttattttatttatgttatggataaaacttttttttttatatatatataacagattatagataaacctaaaagcctaattttctctcttttctcctctggtttttgcggagccacttgacagtctttggccgccgatggtccaaagggactccatagtcaatgtcaccggccttcaaaacccataactctttctctcttctctctcccgagcccctatctctggtttccctctcaactacttggcgctcctgctccacccatccgggccagctccggtccgatcgaactgcatcacgtgatttcccagccttagaaaccccaaacctgttggaaatagtttaccaggatctagatttactaccatgtatgtttcattaacatcct

SEQ ID NO: 65027 - DNA, 1735 bp, Cannabis sativa
cactgaggctatgcatatattgagaaaatgttgtttaaagaattaagagttgttaggataaaagtattttatcaatcaaatgttaaagtttatcttggttattttttaggtttatttaatgaagatcatatatggtgtacgagtaacgaagccataggtgatatcacaaagaattactattctgccctctttacgtcgattatgcctacaaatgaaagcattgaggagttgttacaagctgtcgagcaagtggttacagatgacatgaatgaaacactgatgaagacctttacattggaagaagttcaacgagcagtttttagtatgcccgcggataaaagccctggtccagatggaatgagtgccttgttttatcaagaacattgggatattgtaggccctctagtttctaaagcagtgttagactgtatatcaggggtggcagatatgcgaagtattaatgattcgctaattacacttattcctaaagttcaacaacctgagtcgattagtgaatttagaccgatcagtttatgtaatgtattatataaaataatctctaaagtcctcataaatagactcaaaaatatgttaccaatgttaattagtgagaaccaaagtgcttttgtcccaggaagactcataacagatagtgtccttattgcctatgagtgccttcataatttaaaagcaagaaaagtcggaaggcgaagttacgtagcaatgaagttggatatgagtaaagcctatgacagagtagaatggaagtttatcgaggaaatgatgttaaaaatgggtttcaagaccgaatgggtgaatattgtcttgaaatgtgtttcatctgttagttattcattccaaatcaatgactctattcatggtgaagtggtgccaacgaggggtttaagacaaggtgatccactttctccctatcttttcttaatatgtgcggagggactctcctcgctaataaagcaggcagaaaagaaagaaatttttggaaagttgcaagagaggctccgagcataagccatctattctttgccgatgatagtctactcttcttagatgcaaacgagggttctttgcatacaattcaacaaatttttgcattatattcgcgtgctcaggacaggtaatgattttgatttaacacgttatatgattttttgtaccaaagtaggcgataatttattttgtagtaacctaagtgttgttaatctattcaggttataaattttaacaaatctattctgtattttcatcaaatactcctgaggaaacaaagaaactctttgcagaagcattgaatatgagaataacagaggctatagaaaagtatttgggtctccccatgataggagggaaaaacaaaaatgcaattttcagaccaattaaggataaaatatggaaaaagctaaatgaatatcaagccaaactattctcacaagggggtaaagagattctagtgaaagcagtagtccaagcaatgcctacttatcaaatggcatgctttaaaattccggaaggcattggagaagagatagaaagattaatagcacgttattggtggggctcagttgataataagcaaaaagtccattggagggcctggcataagatttgtaaaccaaagactgatggcggtttgggttttagacgttttagtcagtataatcaagctcttttggccaagcaagcatggcgcatattaatgaacccatcatcaattctg

SEQ ID NO: 65028 - DNA, 1600 bp, Cannabis sativa
atggtgtagatatggctaactcagattcaggctcagatttagacccaaaagcagagtgtcctagggggatacctacacgaggagctactcagatgaatgaagtatccaagctgatggaccaaggaaaaagaatggcactcgaagtgaatgataaaggacagtactgtggcaaaaactactccaagctagtatcgactttaggaggtagatgtcgtcagacgagagggttgtcctataaaaattggaacgaagtaaaccctacacttaaaaataaagtttgaaaagatttacaggtaagcggttatttgtgagcattttgatctatttttgattaattcagatgttaactctaatcatgtttttgttttctttcaaactagaccgattttatagtgcaagatgatttcaaacatgattgttttatccttgttgggaaattaatgaaagacttcaagaacaaaattaaaaaaaaaaaagatgttataatgcccgcattagaagaaaaagatgtgcaacgactggcacaagtccctgaaaagcatccagaaattaaccttactgattggttgaaatttgttgaaagtcgactaactcttgaatttcaggtgcttattatatttgtactaagataaactcttaaatacaagtaaaagtatctaatgtatttttttggcattgtaggaattgagtaaggtgcaaagggaacgttcagcaaaaatccaatccagacatcgaagtggtcggagtggaatggtgaacgtaagggaagatgtggtaagtaatcaatggtttctaataatgtgcttcaaaatgtaattgtacccatttaattgttataaaataatgtagaaaaaggacctcaaggttcaagatcccccacgccaccgtgtttggatcaaatctcggaccaagagaatgaaacttgtcactgattacgacaagaaaattgtcgaaaagatagtaagtatatattaatccttaattgagtactaataatgagttagtatacataattcatatactatttgcttgaatatgtgcattaggctcaattagaggagcaagttactcagggacaaattcaagtccatggccaaaacaatatccttacgcaggagctcgagacaccagagcatcctggacgtgttagggatattgggtatgctagtacttgagaaatattgtttccttagttatacaaaataaatcatagctaattttatttaatgatttgcaggttccttaccagggcatctaaactgtttggcaggaagaaatggaagtttctgatgttgtggctcagaaatagaaggagatcgacaaattaaaagtcgaactcaagtcccttaaacagaagaaaaacattgcccaacaagaggaagaaggagaggtggttgatcaagcatatgttccacaacaatacactcgtgaggatgagggtcgaccagaaatttatgctgaggagtttgtttcccttaacgagccatctctattgtacaattttgatgaatagagggcccttgatcagctagtatatctctgctctgacaatatcgacaatgttgtggcccgagcatatttgtacgaacgtgagggtcca

SEQ ID NO: 65029 - DNA, 1229 bp, Cannabis sativa
tctttgatgcatcaatgaataagttatttattgctcctttggtgaatagaaatctcaaatggggttccattataaaatattaccttttgatggtgatctttagtaaaagacttgtttctaaaattaatatcaaatggtctttttcccaacaacataataaaatgtactgctgtaaattgatactaaaacatatgcttttgacaaataaaattcttatttgtttaattttactactaaaatttggctcactccctgttatgattactgcagcattcatgtttgaccaatctttaactacccgtttgagctgttcctcatttaaatttacaagaattaggaaagaggttaacttaattaaaattcaaaagcatacaaaaaataatactaaagtattggagatttttaaaatctaaaattatttatatgtgtttgaatgtcaaacaataattatatataaatacttattttattatttggcaaataagttggtaatgaaaaatattttatggacttgtgcggttatgaaaattaaagagtgtaattgagactctttaattgtgtaattatgtggttaaacaagtgtactcagttcaaattataggtaatcttttcaaacactctaaaaatatatattaaaattcaatcaacttgtctattttttttattaatggatttgtaatacactttatcattgaaatgttctattcagttttcgaaattctacatccaattgggtatatcagatctgatctggtttagatggattgacttggattctaacaaccttaaaagagagattaacatttaactgcaaaagcaaagctatttctctccagtaaggaaaaccttcatcatagcttcattcattccactggctaagggaaacaagtgtccagcacttgataattcatggtagtgaatccatggaattttactagcaatatagcgctgcagcactaccgggacaagcctatcttcatcaccctgccatagatggacagaaccttcattgttaggaaaagggttcttcagatcatccattggatcaaattcccaactcccaaatccaatcatcatatctctatgcaatgactcaaattctccttgctgtttggcctgttgcacacacaatcattgagcaatatggatgagctaaatcaacattactacatgatctagtttcattcaagactaggctaggctgcaaggaataaagatgtagttcataa

SEQ ID NO: 65030 - DNA, 534 bp, Cannabis sativa
cttgtaactttatttatgggacaatagtatgggaatttatccaacaataataatatatgttcttattctattattgttattttaatctatttattaacttaagtgacgcgaatgatattttaaatttgctaccagttcaatagttcggaaaattttactattaaaatttgagcttgaaaagttaaatgcaagtgaaacgacaattaacaagattttagccgtcaaaactttattattacatataggaaattaattatattattcacctgtaaattatggttcgtgatgatgatgataatcatgatctttttaataattatctctttttttttgtgtcatgtttttgtgtggtgccaaaaagcgcacttgaatgtacaaatgctatatacatactataaacatatattcacttttaatttttttcgaaagacaatacccttattctttttttggaaaataaatttaaatctcattttgtaaaaaaatattgttataatgtaataacatacccttattcttttttttttttaaaaa

SEQ ID NO: 65031 - DNA, 604 bp, Cannabis sativa
agaaatacacttacttctccatacaaatgttacttagccaaaagaggtcttgaaagacactcatggcctaacgttgaaacgagagggacgcctctcaggtgtaagaaaatgcttgaaaattaagagggtagcacagtcaagtccaataagatccctcccatccgagtgaaaggatgaagaaataagtaagacgatgagactactcaaagagtaatactccctcaaatgaaaacatgctaaccacagtgggcaaagtcacttggccaaagagtaacccttagcgttgcttggtcgacatcagttacaaaagtcatttggccaaagcgtaacccttagagtcactcgaccaaaattattactcggcccaaatagcaactcaaagtcactcggcctcgtagagacaaaactcaaagtcactcggccttgcggtgtatagagtcacttggccccaagagcgactcaaagtcactcggccttccagtgaccagtcactcagcaccaagagcgactcaaagtcgctcagcctcccagtgactagagtcactcggccccaagagcgactcaaagtcgctcaggctcgcagtgactagagtcactcggcccc

SEQ ID NO: 65032 - DNA, 1234 bp, Cannabis sativa
  modified_base (135)..(148): a, c, t, g, unknown or other
taccgattttaaaaaataccacattttttctaacataaggacccaaaatttttttttctccttatggcccactttgtttgagggccggccctggcttgtggccttctaccccacataaataataataataataannnnnnnnnnnnnnataataataataataatatagagtacgtgcaaggtaagattaagaacaaagttctattacagcaagtacacacttgacttttacctccacgaaattttccatgatcaaaatgatttataaattaataattatataattttacaaatatatgtaaagaactttatttataaattctcatttaaataaatataataattataaaaaacaaaatataagtatttatcaattagtgataacaaccaacgtgtcatgaatatatacgtacatacatataatattataatatattattaaaggtgtatgtttcatgtggaggaatatgatttatcgtgtagtagcaaactagcaatcacatgcataacatgacataacctcaatctcatgtggaatccttttgtgctcttacttttcttctaaattactaattaaatttcattaaactaaatcaattattacagacattgtaaaaaaaaatcaattattacaaaaaaaatttaaaaatgtataaataacattattaacagatcgcttaatttttatattatagagaaagtattataaaattgaactttcaacaagtgaagtaaacattaactattttatatatgtatttttttcaataaataatgcttaattagatgtatagagataactatttattgagctaaatatatttattattttcttaacttttatatttatgtgtaatattatattaattatttatataaaatgaataaaatatattaaaaatgtaatatttaaatcatatatagaaaaattgatgtatggtataatgcaaaagtttgaggtaaattagataaaaagtatcctactgactcgaatcaatatcagtgtgtaatatgtcatacaccccaattaattaagttgtgaatatttattttttataacacttaattttaattaaataaaaatttaataaaggctttttattttttattttaagcccataaaaaagtaaatctaagcacgagccactactagaaaaatgggtttcagtgacccatattgagtgactctaaaactatttagtgacacttcactgcgcgtcactaatgagggtga

SEQ ID NO: 65033 - DNA, 723 bp, Cannabis sativa
tgtatcaacaatcaaatgaagcttattgagaattcatcttcttcaaaaaatcatgaatggatcaactcatatgggagtatccaacaacaactattcctcaacatcatcataaaagtaacaatgatgaaaaataagcttaaggtcatagtggcggtgatccaatagtagcacagtgttatatatggcgggatcgtcttcaacacctgataataatatttgactatgttacctcgatcccgatttatatattatgtattacaattatatattactattaagggatatataagtgcatggtcatatgtataaatatttatatataaatatatatttagtttttatgcttagtgttttgtgtcttcctttactttctcctaataaagtgaaatgtgtttattattatccgccatttatgtgtgttcatgttttctttttctctcatatgaatattttttttcttctaaatatttgtatatgaatatattttatatatatgatcgatcaattaaattttgatattttatatgaataaataaacaaaaccaaatagttaactatgctattttgccaattttgaacataaaactactattttttcctttcattcaaaaaatatatatttatattaatgtatagaagtaaaacaccaacctttatttttagagtaatgaagtaattgcaaaaaactatttaaaaaataagtcatctaaccctaaacaaagg

SEQ ID NO: 65034 - DNA, 856 bp, Cannabis sativa
ttttttaaaaaatattctttttcttttggcagtattgagtgtgaatattattaatctattgtgagtggatgagtttgcaattaaaaaattaagggttttacacataaaaaagttatatgttttgggattttacataacactgttggtgagaaagagtcaaaaggtttaaagtttatggttgggtgttgttgtgttattattgtagtgactttatgcatgtgcacatacaaatagtggggtccattgatttccatgcttgataagaagaatgacagattttttaatgaagctttgtttgattttgtgatccattccattcaagccaatattcatgtcgatctaacttaaaactagtttgcaaggagaaaaaaaaattgttgaatttgaggagcaaatccatgcttctacatgtaattatattattgacttcaacttcttagaaggatataattcaagatggattttttaccttagcttttaggtttgtggcagtaggatggtaatgagaaagacccctactactcttattaatttttactccagtactactctcatttttatcttttttaatttatgttcaaacccatggttgataaaaacaggcactgtcaaccaccaccaaccaataatcaacataaaatttgagccaataataataaaagagcataatcaatataaattttcttatgtatattcatgccctctctctctgtctcttgttatgtatatccctcttaggctccaccttattttttttcgtcaagactccaactaaagtaattcaaaaagtaaccatttaaaacaaacaaattctcaaagaagcccttaagtgaagtattagtatttgtgtaaattg

SEQ ID NO: 65035 - DNA, 1167 bp, Cannabis sativa
actaattctaacagaaaagctaaccaacctaactgtttttgtgctttaacaatgaatgttaggttgatgtcattatgtttatattaaatttatttatttaaaaatggtatttagaggtaatagcaaagtattgagcaagttaagtaaaggaaaaaaaagtacatagatacatcatacaatatttgtttagaaatattgaattaaaataatttttcagattcagccgaaccaattatatattattgactattatattggatcaatcaaatattcactaaatcagtttacagattgggtgctgcatccgataaaaaccgtgacaaatggaagaaagtgtaggaggggaggcactggatggggattctggttcgacaagctcccaaactttgatctcaccaacaggccttgaacccattactaattttgctaagggcaatgatggtcagtacgagtcagaaccaccgattaacagagccgagattttgaaggctcttgaagttgtcgagagggattcaatagcgatttcagagagctttgcatctctattcgcctctcttcgtgtggctctctccggggtcagtcttcttcttttcttgatgctgttgtttttccttttcaaatttctgttttgattttgagaaaatggaaacacagcgaaattggacttgtgaaagtttttgtggaacaatgttttgtaggttactagtaactctgttgaccatatgcattgtttaagcgatgctgctggtcgtcttcaagaatccggtacgtttagatatatacatgaatatatatatgtatatatatattgtaatataacacagtttctgatgttttgatttttatttatttatttatttataatcttacctaagattgcagaaagcagataatatatacataagtattacttacaacatctttgcaagatcaatgtggagaaaatatgtctattctgaagcaaatttattttcaattgcagtgcttgattctgcaacaaagggaaatcgatatatcaattcatgtttaaggtatttttttaaactatgaatatgaactatgattgttttgcaaaatttgctatatcacaggcatgaactgttagaatatttatatactatataatgaaaaatgctcttctttttcttttgacacaaaatacttttt

SEQ ID NO: 65036 - DNA, 508 bp, Cannabis sativa
aaaacaaaatcgataaataattatgcaaatgaaaatgaaacacatgtatattgaagatcaaaaatcaaaacccatgaaaaaaataataaacaaactcaacacttaccaacaataaagggagttccgatcaacattaaaattaagttttgtcaagaaaggatgcgagaacctcatattacagatttttttacttaatatataaatggggtgggtcagccccaatcctaaaggataagtgatgggatggtgtagggcgaggcgggtagaaacttgaatacaaacctgattattgcgtggcagagtcccctcgtcgggtcaggaccccaactcgacccatgaaaataacttaaatttctatccctaactgatattaagttgcaatacaattgtggtacaaataaaacatgctcaagggtcaaaccatcagttaacaaaatacaactaattttataatcaacgattgcaccattaggtaacccaacagaatatactggattatgataagtgt

SEQ ID NO: 65037 - DNA, 1068 bp, Cannabis sativa
acaaacaatgaattaagcctccatctaataataatgtctctgttacttgtggaacttcaatcaattaatcaactacaatttggattaatattctaacaattaattaagatggcttctttgaaatagatatatcttaaagtaatgtgagtaaataatgcaattttctccatcttatatggttgcctataaataagatcatcacctagttgtataagggtatgatcttggttttccggccattatgctgcaaaaatccaggaacctccattgttgtaagttcacaaaacaactctaattcaatgacttgagaagtaaagcttatttctataaccttttctcaaacactattaatccattcctcaattttcataatcttataattaatcttttgctaaaaaatttagttgtcacaaatatagagtcatatactaaaatataggtactaaaatagttcttacaatagctaagagtaatttaattatatttaaaaatatttgaccttatggtcctaattttaatcttttaaaaaatataaagtttaaaataatttttttaaaaatataaggtctaaaccgttaaaatgcaaaatctaaaataatataaattctatttaattattcattttaaaaaaggtgagatgcttccaatctaacctaaaaatctctttatatatttgaaataatatcatcatccttttcttattagtaatatgattgagagtgttcaaaaacatgcttacatacatttcatattacgagtaaaatcatattttataaatcaatttgatataaaagatataacagagcgtgctaaaatattttaggggcttttttattttaacacttcaaaacaattttttatgtatttttacgaaattttacataaaaactcctattacaactggcgctgcaatctaaattgcaacaaaaaatcgtatagaaacctctattacaaaatcactttaaaaactcaaaccgtaaatttgaaaaaaaaaataaataaataatatatatagtaattcccctatattttattacataaatatagattattttggttttttttttt

SEQ ID NO: 65038 - DNA, 1600 bp, Cannabis sativa
aatcttctccacatatgatgaatttaactcagaatctctttgtgcattcgaacaatggagtgattcgaacacttcagattattaaatgtccattgttcgtacgatgcaaccatccattgtcatcattgtgcaagttcttccaacaaaatatgtcaagctgataaaagtgtaaacatttttttgacatgagagcgtcatacacgaaccttgatattctttctaaagaatattggagaaaagggaaacaatactttcatgctgcaaatggaagtattttttgcacaaaattcatcagcaaaccaatttggttgcagttcttcccagggtgttctgttactcacaaaattatccaaaaaagacttaattgtcagctttgatctttacacaaagaagaatggtttgtgtattcttcttagtggacttggttacaaataacattttgctccatgggaagccataccaaacttattcttaatgtcaaatgacctatttcatcaaatcaagaaagagctcattgacgtctcatgtgccaataatcatctcaagttcctaaagaaatgtgaccatgctttatgaaaaaataaacaattcttcataagccttcttttaatcctaatgaagatataaaccctacaaaggctagtcacccaggcatgaatccagaacatcaataaatggcatccactgaatgtaaagagttatagcagcaggatttaatagagttaacttcctctccatgggcatgtcatgcattttatgtcaataatcgatcagagcaagctcaaggaaagcaaaggttcgccatcaactacaggccccctaaatgagttctttgcagatgataaatcgccaataccaaataagaatttattattttccaggttatccaaagcccatatttttcttgaaatttgatcaaaaagtgggattttggcaagtaggcatcaaaccagatgactggcccaaaacaacatttttcattcaaaattatcattttcaatggatcatcctaccatttgggctcaaaactgctccttctttattccaaaaggctatgaccaaggtatatggcctaatattggaaaaggatctcatctatattgacaatattttgcttttttctcctgttgaaaaagcccatcaatcgtaactggacaaattttcttttattactaaagcccatggtatcatgttgtctaaaaagaaaataattattagacagatgcaaatagaattcctttggatgaaattatccaaatgaccaaatgaagcccaataacatatagcccatgaactactcaaattctcagatgaaaatctcatgaaagtccaagtccaacaattcttgggcatcatcaattatttgtgagagtttgttctcagactttctgtattgacaagaccactcaactatatgctctagaagaatagtttagaatggtcatatgaccaaactatagcagtcagaaagttgaagcaaatcatgcagaatctataaatctacaacccttatagattccctctgacaaaaaatgtgttctttaaacagacgccaatgaccaacattggggtgttttccttcttgagcaagatgagcagg

SEQ ID NO: 65039 - DNA, 1776 bp, Cannabis sativa
gacatcaagattggaaatgcattaggcgtgttgaatgaaccacatttaatgttttgaagactatccagatccgatccaattatatattgaaagttcgaatttgttatccaatccagtccaaaaaaatagtaaaattttaattttaacatatacatatatactttatctataacaacaaaaaatctaattactcatgaaaatactaattagttcgattagatgttagatgtattgaatttttagacatcacatctattggagaacattatcccacatagattaaatgtaaaagtattgagtcatatataagaacatgagctactccactcatcaccaattgattttgagatgaaaccccatgattctcatcatagtatcagagccatatccctagcgaaccttccatccagatggttagctagtatttatcccctattcaatattaacctactattaataagtcttcaactaaaaaccccaaattttagtctaatttatcccctcaagtgaggttaacagacgtcgttgttgtgccttggtgcactaagagtgggtgagcaaagcaccctcaagtgaggttaacaattggtgcactaagagtgagtgagcaagacaccctcaagtgaggttaacagacgccgttgttgtgccttggtgcactaagagtaagtgagcaaggcaccctcaagtgaggttaacaattggtgcactaagagtgggtgagcaaggcaccctcaagtgaggttaactgtgcacaacaagtgagattaagcaaatcaaattgacaaaaccccaattgaaggtggcctcctcatcaaaaacttcagttaactaaaaaaccttcaactatacttcctatatatgctaaatttattaactacaaatcacaaaccatatgagctaaaacggcatagaaccatttaaaacaaaggttaatgtaacccaaaaataaaacttttatcctaactaaataaataattcagatcattccatccaaagatataatgaatcaaaacaaaggattctggatcagaacataatcttcacaacaaaccatgagccaattctgaaaaagatgtaagagcaaaggtgtaccttaacagagatagtcccagctaaagcatcaaggtcttcaagcaactttccaattctaacctcattccatggatctctgtactgctctctcaagatataatcagtagagaaattataaagaatggtagttctgctctgagaaggagttttggtaagcaattcactttgtggaggagcatccttaggtgggtcaagaagcctctcgaagatctgggaacgagcttcccacaatgcattagtcaccggtgaatggtacattcctggccacaaaattatgggctttctggctgaagagttggaatccccaactgaaggaggacccccaaacggtgaagcgaaggttgaaaccactgtaatgggttgattaggggaagagttcaaatccatggatgctttttaagaattgtaaaaaaataaaaagctcccccttttcccaatgaaatgggtttcaaatttcaatcgaagttttggggttttgctttgtatgtatatatgtaggtaggagttagttgaggtgcattaaaggctggattttgtgaatgaattcttctgcaaatgaatcagaaaaagataacccagaaatgtttgtaatgataacacttgtaggcatcgacaatttcgaagctttttccacaattgtgggactaagcagacaagaagatgctttcgtcaatttccatt

SEQ ID NO: 65040 - DNA, 1075 bp, Cannabis sativa
aatcaacactggttctagttcaaaacgatggatattgggatgagaacaatcaatacattgttttcgaagctacactagaatatgcatccacgcaaactacaaatatactgaattggtggacaaactgttgtgaaaacataactgcaacaaaaatacaacgatcctacaaatgcaatttcaggtacaatctggatatccagcattaaagatcatagatgataaaagcgtgggccttgcagttaaaactaagagaaaaggacataaaaaatatcctttgtgcatatatatggaattcccaacacaaatatcattttttcctgaggttgacacagggcaagaggttcacatgcttgaatatgaaactcagccagggaaacaccaacacatcaacaaatagaaaacaaaaatgaagataatgaggcattcaactttgttgactatgcacaaatagttaccgcaaaaataatggataaacttttaagacagattgatcaacaagaaatcaacgatgaagaagtattggtcatcatggataaacaacatccagaactcgaaaaagggcagatgtacaaagataaagaaacattgaagagtgtcctcagctactttgcaataaaacaacaatttcaatacaagatcaaaaaaatttgcacaaagaaatttcaaattgagtgtttagataaaaattgcaagtgatcactaagaacaccaaagaatgatgcaacagagaatttcattgtaaggacatacaatgagaaacacactttctcactaagcatcaaatttggggatcaaaggctagcatttgcaaagataatagggaattgtattaaatataagttttaaaacatgaaaacaacaacaacaccagtagatattagatttgacatgaatgataaatttggataacaaatcaattacataaaggcatagaagagtagggagcacactctaaacattgttataggaaaagctaatgagtcttatcagttactgcctaattatttctatatgctccaaaaaataaattcaagatctgtagtgcacatctatattgaagaaaataataacttct

SEQ ID NO: 65041 - DNA, 2393 bp, Cannabis sativa
  modified_base (257)..(261): a, c, t, g, unknown or other
  modified_base (1249)..(1257): a, c, t, g, unknown or other
gaatcacatcagtcaaaaaggatgaaggactgcactcataaaatccctacagaacctagggattagaccatgcattacctatgatatattcattcggaatgtgtggctttatcactccacgaaaacactataaatacactcgaaagctcattaaagaggggtcgagaattttgggtttgataagaactagaagagtaaaaatccaccaagaacattctccgtaataactactatcataaatacacagactcgtggannnnngctcattaacgccccaaccacgtataaatctctctcttaatcccttatagctctctaaattattattattatatcggttgccgaaaacctcggtcaacaaaagtgaatactggatgcaatatattcttaagataattcaaaaataaaataaaaattaatgttcaaatactaaagcaaacacaacttaaatgtgtgtaaaataaaaaagaaaattaaaaaattaatctctaaattgttgataattgaaaataacataagcctaaaagttgtagataagaaaaataaagatactcttaatgggtggattttaatcttcctttcctttaattcgacagagacaatagtgtaatatttgtattttgtacttttcattctagctaggtccgcatataattggattgtccatttttttgtgaataaattacatatggtagtctcgacaaaataacaatgttcctgcaaatagttttgaaaatatttttttgtttttgtttttcggggagaggagagggcccaatttttctttctttcttttctttttttgcagaataggagggcccaattgaattaattatgaaagtaatgttttatgggctgatgtcattgttccgatggccaatctataatagtaagtagggaatttaagaactccccttctccttgaactgtgaagctccgcctgcaaacaaaaaaaaaagcgaccaagatggagaaaagagagagatgttgtgattgctaccgtcgagaaccctataatacattgaaattatttattactttgtagatcaaaagctgatgaagagaagaaaaattgcagtagaggtaggcttcaatcgtataccatctgtggttgggcaattcaaagtttaatttatattttagggttgagatgaaccgaaggcctactttatattatggggaaaatttagaaaaaaaaaataaaataaaaaaactgttattattgaatagaaattttttttaaaaaaannnnnnnnncaataatttctcataaaccaagaactttgaatagatatatataaaggagaagtatgaggcggtaacgtggcggtctaaaattactttaaaatcatctttcttttttctctttaattctcttaattttttaattttttaattagttaattaatctcatatttaatagtcatatttattctctctttaattctgtcattttattaattttttattaagtttatgaatattcattactatttttaaaattaaaaaaaataaccaaagtcacttaaaaattaaaaatcaaactataagtagtactataaataagtaatatataggcagaggaacattttataattttatacatgtatagatttactggtcgccagtccaacttggtgaaatattttccctgcaagaatatgtatatgaagcggtctaatggtgagaaaatttctacaaatgagatataaacttatatattatttagttttattaccttcttattatcaatgcttttcatgttgtgttaattcctctttcatcaattcattatcatcatcatcaatatgtacatctgtttttatatacacaattactattaattcattcatattcgtattaaacgatgatatgaatttcatcattataattagtttgatgtacattttgatttattcttttgttaattctcttataatattagttttttattatgttcataaatattaattgattagataatatatacccaaaatttttaaaaactatttaaaactaagattatcatacttcttcttctaattggttcctctaagtttaatgaaggtatgtagttttcaatcttttttatctaatttttattttgatttaaaattttcattctaataattatctactaatatgtgtgtgtttttaattaacaatcttacatgataattcataataataataatccattaattaaaaaaagtgtaatccaaaaaaaaaacactaagagaaccgatctctagaaaagctctgttagggttttgtcaactccgatctctgaatcggagctatggtaggttggggatgccaacgaaaggatgctttgaaggtgtaacaccctaactaacataggcgtattccgtgatttttaaacatactgtgca

SEQ ID NO: 65042 - DNA, 2313 bp, Cannabis sativa
  modified_base (485)..(485): a, c, t, g, unknown or other
tgtacaatatgaacatatataacccaattacttttacagagattaaacaaattcaaaagaaaaccccaaataaaaaaaataaattccacagatttgtgattacaaatgaaccaaaattaaaattacaaaacaaaatccaatcaattctcatttttcttttcactgcttctttaatttacttattttattgtaaaaaaaaatagcagatagtgaaactccagaataaacccaccaagatcaacgatggtggtgctctcatcttcttctttcgctccaccatcgttgatccactctgtcagggttaagtccatccctcacagagcacctcgcgtgactctttcgtcaacctctcttccaacttaacgacgcctaactcgggtgacttgttcatcctcaagcatatattagcaccgttcacccgtctaaaatcgcagcttcaatggtccgcttatatattcccctgtagagagagagagagagagagngagagagagagagaggagaagaaatgcaaacttgggcgaaggagcgttggtcgccatggagcctcttggctgctgttcgtcagagatgctagtcagcagtgagaggaggggaaagaagaaagacgagaagcaaaaaatgttgtgcggcttggcttatttacttctatcagttagggtttctatattgtaaacccttattacaatatctttgtttttattttttatttttttaattattaaagtatgttaacagctgtgtataattacagctggttatatttttatttacttttatttctttttttttgaaaaaaactttacagctgtgttttttttaagaaaatttaagattatgatatagtgacgcgccaggtgagtcgggacatatttacccaatcgcgcttgacacgtgactaaaaaccagtatttttcaaattaataaaaattagaaaaaaattgattttactctttagtgaacctctatatttttagtgaggcgcattaaaagagactaacattgaatatttagaatctaattgtgcatgtcactaaaaatcactcctaactctttagtgacccaaaccttttgtgtgggtcactaaatagtgtcactaaaagaccaaattattgtagtggatgactctctccatcaagtatctgtaaaactcctcccagattagcaagacatctccgcaagaaatctttatggtcgtctatgctaatttgggaggttaacaaatcttcttctctaattatgccacatgtcccttgctcagaaacatgaataacaaccaccaacacttatcattttggaggtacgagttttgagaggtgactttgaagttaaagattgagattgagaggtagcgagaaacgatagagattgagtttagaatttgtatgaagaatcttttataaatgaagaagattcttgggtaagagtgcgatagataaatattttgagaaaatccaaatagggaatcaatctcgattgtaatgtactttctttctcaatcaataaagacgattttgatggtgttccagaactaaagtaaagccatagatcacattgatctagatgacttgaataagtatatatcttggtcttgattttattgttttattatttttatcttttctggtatttattggtttgttcatccctgcattatcatcgattcttttttgtatatagttaatcttgtcattgctaattgtttgttgaataagttcttagttgatttgattctgcatattagttataattttacttcattgttcttaaggttaattctgatgttgcaatctttttaatttgattttatttagtttttttgtcaaaagattaaaattaggcagtgaattatttgactcatttttttaatggattatttacaccacaaattgaaatttctaacttttttacttttttactgtggagtggattttttttcttcaaaatactgtgttttcttttaaaaatactatgttgttctatagttgttttttagttgttctactattatttttagttgttttgttttgtgttccactgttgttttataaaaacacagtatttttgaattttttttttcatatgacagtatttttgtaaaagttaacccaaattctagtatttttgtaagttttccttttctttcaaatcctagtcgtgtttacaatggagataagttgagaaatacctcttttttgtatccattaaccaaaaatacctttatatattatttaattaaaatctatccacttttatgagtgaattgtctaatatatccttaccttccacttaagtgtagcacataatttacat

SEQ ID NO: 65043 - DNA, 2344 bp, Cannabis sativa
agaggtaaaaatgatagactttaaaaaagaaagtaaaaataaaataggacaatataaaaagggtatagagtataatttcctcttatttgtaacttttaccttcatttccatattctttaaaatatacccacttttatagatgataactctattatactccttaaattgatgtaaattatgtgctacatttaagtagagggagaaggtatgttaggcaactcactcacaaaagtatgtagattttaatgaaatataatataaaggtatttttgattaatggatacaaaaaaaaaatattcctcaacttaatcatcccaaaaattagagccagcccatatggaggttagcccaactcaaaactatatatgagtctatgaaaggagcatataggaataggatattaatagtgctcaacactttttataagtaacgctccacgattagtcagcgatatttattaaaagttattttcttaaattatatgaagtctaatacttaattacactaataatagtatgacacggaaaataatactaaacactaatagtatactttaataattatctatgaaaatagtaatgacccaattcttttaataataaaacaattatcaatatcattgttatttgcatatttcaacttttaatggtgatttgagtgttacagccttttcctgtgtcaaaattgatgaacataaaaaatttaaagtggtggttttcaaattactaggtctcactcttaatggagattcaacctattatttttaggtagagtttcttaagattcctatcaacaccaattgcctaagattttgccaaggtattaatagcaaagcaattgatcattatgaatttggaattgtggtgatattttccaagtatgaaattctctcttctgtttccaagtaaatgagatcataactctacctctcattctcttgcaaagcttgttctttattgtggccaaggcttcccatttgccttttggacttagagcttcattttgatttgatgtaatctaatttatatctaggccatgtgcctaatgaaactttaagttattaaaaagagaaattatgtttgaatcaattttagttaatgctatatatattgtcaaatttagcataaattttcatatttatgtaatttcgatttatactatatttttctttcttgagaatacttatggcttttagttaggagtaaattcatccaactccttgagattcaatttttattcaattaacggcatcactctaacttcaaagttaccaatgtgggacaaaacaatatcacatatttctttttattactattatttattttctagcatactaattaagttcataatttatactatttacaaattcataggaataatgtgtagttcttaaccaaaaactaaactaattagttctaagtagaataattatttgaaggacgttccacacaaaaaaaaaaattgtgaaaatatactatattgaataccaaaaaaattgtgggttgaccgatggtagagtgtctatggtctctttactggtgaagttgcggcttgtcatctggctcttgagacgaggctaagtggaaggactgttttatgctaattgagagcgactctaagatcgtcatcaaggctttgcaagggacatgttccacttggagtattgataattacgtcctaaattgtaatagactctcgaattattttttgagttgtaatttttgttttattcttatattgtataattccacaacttataatatcgctaagtgagtgtttttccaaaacttaactggtatgattgatgtgccaactatttcaataaatattatttgtaacgaccataaagtctaatttttttttttaataaatgccatttttttaaaaaaaaataaaagtgtttatgaataaaattatgattctaaattaaaatcaactgatattaagtgaataaactatttcctctacgaaagtattacatttttttgaaagtagatccatcacgaacagagttagaattttaactgaaaatgagtgaaataacactttctaacaccctccaatgtgtaatatcactattggtacaattaagtaacgagtctcatataaattaatataataattttttaattagtggccaccaactctcctcaaagctcatttttgttgatcgaataccaatacaagaaattgaatgttgtcttctaaactatttcacaagaaaaagaaaagccaagtctctcatcaccatgtataaaaattacaaaatttacaaaaaaaaaaaaaaaaaaaaattgattttttatgcttacatttggttaaaaaaattccctaaacacataat

SEQ ID NO: 65044 - DNA, 833 bp, Cannabis sativa
atgaaatacatttaacggatagaaccgatccaatccaacatttaatggatgttagatcgattggatgggtgcaattaattgggtgggattaaagggtaaaatctaacatctaatatataattgaatcgaatctggatagacttaaaaatattaaatgtggctcagtaaacatccttataaactaggatggaccttattttaaaaacattaaatattttaaccattacttattcgaacttatttatttatgtaatatatctaaaattataatttctgtatttggttatctttctacctttactttcttctctcctttatttaattctttttctcaatcctctcttttttccgtaccaactctctctcctctctatttcttcttcttgataatgtttttttttattcttgtaaccccataataattcaacgattaaggatattttattataatgaacataaaatatattatatatagttttgatttggaataatatatcacgacacccaaaaaaaaatatggccaaatatatattagatttttgtctctaattaatatattattgtgctctttaaatttttcgcgggttaaaaatagtttctaaactattataaataatttttctcttaaattttattatacgtgataaataaaatgataatataaatgtttaaaaaattattatattattatttcaaaaaaaaaaattattatattagtgttacctgtataatttaaaaataaaaaatatatatttttaaaagaaaattattaaattaaaaattaattaatgatgattaaaaaatgtgtaaaactaaattaaaaattttaaatt

SEQ ID NO: 65045 - DNA, 849 bp, Cannabis sativa
aatctagatccttgtaaaatattttcaacaatcattatgcgggaaactcactggtgctgcgtcttctttgccaaaggagatcttggtttctatgggctactataccttagagatctggtcttaaacatctaagattttacctttaggctcgtgacagagtgttcgagcatagcgctccctggcttttctggttttaccaacaatgtgggggccgcctattatgactcccagatgtcctaccacgggtggtggcattagatctccattttggcctccttgcgcctgggtctggtcgtctttcacataacaacgcaggaggggatttttacaccttatcaggtactcagtctccctcttcaaattttgacactcatttgtgtcatggtcgaagtcattgtgaaatctatagaattttgacatgtcccttccgattagaaagggcttttggtacgggattgttccctgagtggccatgaagatggtctcaggcttctccgtttagagggtgaaacaagtgtacttctcctccttgttcttctgtggcgtgggagaagtgttaaacttcctctttttgccattgttcctcccagagttgttggtgatgcgcttttttctagtgtttttaccactagaggtctaggtggcatttgttgttgcctattgtgtgtttggtgggtcatgaggctgctcagtgcctcgtgactgtcagctattaacatgcctcgcctaggcttttcgtatggcttcttcaagtttgataatgtcttctactctatcgaggaactccttcatgtcgttgatggatatcctcttgatatccttccagaagtcgcttagtgggagtatgcc

SEQ ID NO: 65046 - DNA, 805 bp, Cannabis sativa
  modified_base (765)..(778): a, c, t, g, unknown or other
ttatttatttattttattttgatactaaaaaataaaataaaagtccaattaaacctgatttattgttagtttagtaaattgtacccaaaaaattaaaaaaaatatatttttaaaggctaatctattcaattcagattggtaacattattaagtgtaagtgaatataaaataatttacaaagtaatacatgacaaaaatgtacaaattttttttcagatctatatcaatataaaataatttacaatgtaattacatgactaaaatgtacgaaaatctatactgaaaaccaaacaaaaacacaagtcgaaaccagcagaacattaaccaaaaaatcaaaaccaaactcaagtccaattaatcccgacctccccacccactgcctctgcaacccgaactccggccaactgcgcaacctccaaagaaagcctctgtcgatgatctacagagaagagagacaaagagagagatagataacattatccagagaaagagagaaagtgagatcattacagagaaaaagagagatcgtcatagagagatagagatatagagaagccatacctaagtttgtctcagcgccaccaaagctaccgatgtcgatctgtctaagataaatagaggagaaacacgattaagagagaaaacgagggaaataccacaggaaccttgcaatatgtcttcatttagtggtcggattagaccaccggaagcccaacttttccatttctgttgggcaactccaacaacgagagagagagagagagnnnnnnnnnnnnnnagagagagagagagagaggggggtgag

SEQ ID NO: 65047 - DNA, 752 bp, Cannabis sativa
gggaagtatttccaggataagttctaagcactttttgaaaccacgggtaatctggcgggataggagcttgattctttgtttttggataaagtgtccgcgctggataatgatgaaattggtcgagttccttcagacgatgaagttcaagatacggtgttcaagatgcatcctctcaaggccccggggtcggatggctattgaggtattttctttcgaaaatactggaatattgttggggaggatgtcattgcaatggtgaggaattttttctctactgggattctagacaaagaggtgaatcgtacttttattttccttattcccaaaggtccaaacgctacaaagtttgagatttttcgacctatcagcctctgtaactttggttataagatcatctcctgtattattacggatcgcctcaaaggagttattgaacccttggtgtccccatttcaatttgccttcctccctggccgaagcattgctgagtgttccatagttgcccaagaagtgttgcatacgatcaaacacaagaaagggaaagggggacttatggctattaaaacggacatgagtaaggcgtatgatcgccttgaatggggctttcttcttcgggttttgtgtgtgaacagtttctcgccacatgtgcgcaatctcattatgcagtgcgtcactacggtcaacttctccatcttactaaatggtgcccccttgctcccttcaatcctaaacgcgaactccgtcaaggtgat

SEQ ID NO: 65048 - DNA, 1038 bp, Cannabis sativa
atcggatgggtccaaatccattggatgtgatccaatgaacacccctagttattaatggctttaaatttttgtggaacattcaattatagtcattatcctgctgaaattttaatagaattaggactagttactagttagtaatttagtatattatacatagttactagttattaattttataagtctcgaggcgtgattatattgaaataatattttagaatacctaaagatgaataaaataccaaataaaattcaaacataccaaagatgtagtataaaacttaaactaaagtaaagataattatattctagaactatattcctaaattctattatcctaaaacatacttgactcataaaactcgaattaaaatattaatgggaaatgcaatgatgattagaaatcatctaagtcatcatcacttgttttatcttattttagattattttttgttgttattaataactttaaattttttgagaatattcaattatatccattatgttgccgaaattttagtagaattaggataaaattatttcataaaagtttctcttaaacttggttgttaggattttttgttaatttttgttatggataaatcatggatgcgtgaagaatgtcgattattatatagtttataatttagtttaaaattagttacaaattatatttagtatactatagttagttacttactagcaatttagttagttctgcgatatattgtactacagtcagatcaaacgtttgaatatctaaaatatgcatccgtagtgaagtaggttctacgaatacatgtactgcatgcgatcagatggatggtaaattttttgtgttgctaaatgttgtgttgtgattgttttatatattttttaattgtattttgttgttattaataggtttacattttttgaaaacgttcaattatagctgttatgtagttgaaatttcggtagaattaggtatgctttctttaacctactaataagaattaataaatacatacataagaattctattaatttattttaagt

SEQ ID NO: 65049 - DNA, 1132 bp, Cannabis sativa
aaaaaaacaaaacaaaaaaaaacacatgatatggtaattaatcaatttaaaaagttttgtaaattgaaataattttaaagaaaatattttaagtagaaataattagaattatgaatttaactaatttatcataaaagtctttatattgaaaaattaatttatgattactaaaaatatgaaaaaaaaaatagagaataatttgttaattaatcaatttaaaaagtttcataatttaaaaaaaaaattagtttaactagaaattaaaaatttaaaataagtgagcataagctttttaaaattaataatttaaatatgagttacaactttaataatcttcttcatttaaaattttccttagatgacgatcgacaaaagttggataacgaaaaatcgttgtgatgatgcttattgggaaggtgttcaagcctttatcgaatttgcatcgaaacataaagactctagtaaaataaatttatgttcatgtgttagatgttgaaatacgagacgacatgatttattaaccgtggaggcacatactttttacaaggactttgaaagtagttaccaaaagtggatttggcacggagaatcagatggacctgttgtcaacgatattcatgagaacaacaaaaagatgataagagacaacaactattgatgaagaaaatcgaagtggtcattacgacgaaatgtttaaggagattcaagctgagttgtgccttgactgtgattggatgtcgtcactcaattttctagcaaaattgatgcatttaaaagtgcaaggaaaaattctgaacaatacagttgatgaattattgaaactgttgaagttttcctttccaaaagagatcaacattcctacatcacattatgaggccaagaaaaagctaagtagattaggcttggggtattaatcaattcatgtgtgtgttcaagattgttgcttattttataatgagaatgcaatcaaagaattttatccagtgcgtgtgactagtagatggattatcgaagcaacaaagggacagaaaataccacaaaggtgatgcgttactttccgttgagtccacgtttgagaagaatgtatagttcaagacatactacaaaggagatggtatggcatcatactggg

SEQ ID NO: 65050 - DNA, 1142 bp, Cannabis sativa
gataatattaatttatatatacatctatatgaacatagatgatatagaaagaatattgggttcatacagcttggccgccaatgcatggggaggaaatttctcataatgtaaagactaaaattaaagaccttcttataacatgtatagctttttttttatttatttatttttggaaaaagaaataatttttaaagcatcaatttttcaaattttctaactgctcttttaaacatgatatgtgtattttggaggtcatttattatctcattcattcattcattacaaaaatccctattttctcgtacattacacaccacatcaattttttatactttttgatacaccattaaattgatattattttagtttctacaccactaaaataagtaagtttgttctgttggtagaatttaattgagctcatttgtgtaaaattctaattagagaggtttattcggatttactttctgtggtaatagctatcaataaaatgagtaagtttattctgttggtagaatttaactgtgctcatttggggtattgtttgagaatgttatagttttattgtctaaattttttagagtagttttgtcttatgtagctcgcgataagaattttgtagctcatagtttaacaaagcgtgttatttggttagacgataagttatcatggttcgaggaagtatcaccgccgattgtacattgctgcatcgttaattatgtgtaattttgatcaccacgtcaaaaaaataataaaaataaataaataaagaaatttaaagtataaattattcattccctttaaattgtattagtttgagtgtatttttatttctattaccatgaagtggtgttttaagtttagttaataatattttcaaaaaaaaataaagtttagttaataatttatatagtaattattaaaataattttatgacatttaaaatattaataaataagatattataataataacttcgtaataaggtagaacaaaatttttggtaattagatgaatattacttagtgtcaatctatatatatacaaaaagttattatgataataaaattttaattttaaagaaaaatcataaatagatttgttattagggatccacacggagtggggaattagccaggagt

SEQ ID NO: 65051 - DNA, 8180 bp, Cannabis sativa
attcttgtaaaaatggattaagcaagccaagccctggcttaactactataattttcttctcttttatattcacgttgttttttacactgaagtgttctaatttaccttaaatactcacaatatttagtgttgtctatttttcttcaacaacaatgattgtgtttaaatatatcataaatatccttaagtaaaaatcataacagtttaatttgtataatttttttgacatacaatttgtataattcaaattaaattaacatcataaattaggataatagaattcttgaattgggagtatctcacattcatttctcataaagtaataacactcttgactcaattatgccatcagagatctagcaggcacaacctttgtcattttgtcattattatgattcgtgaatcacggtccatcaacaagcccatccgcttcattttcttctttcaatttttgtatcagctaatatttgtatgtatatatagatgtgcccatactaaatctaccaaatcagtatttttgtgattttgtcaaaggacgctgcatccatcttcctaccactcctaatttgttaatataataggccacggttccaaatttaaagcatgaagtcacaccacaacccagcaattaaaggtttagtttctttctttacgaatagaaatctactatctacatgacaatttgaggcgcaaatagctctaccaataagtagggaatctccataatatatattatataccaaaaagattctcaaatcactaaagcaatcactgtgaactaggcccaccataaactcattgtttaccatcctttagacaaaaaaaaaaagtgaaatgttatccatgtaagcatacagtcttgcagcgcaagcacatggcttatttttcttagctatattcagaaaataatcctttaatctccacaaacacaagtggaaaccaagaatgagagagatcagtggagtgaaagttctcacgtactgtgaccgagacaccaatatctttcttttagacagcttgagatttctggcgtttcaagtactggaggataggctccttgacctggtaatagcaaattgaaaaatgtcagaagccaaatatatcttaacatgaccaaatttaaccgatctaattctaactgagaaaataataaggcatactgtgctagtttttctggttcttttgtcttggctggctctactacacaaaatctcatcgacctcattacagcgattaatgttcacatttgctctgttctctttccctgcagcgaaactctctcgagaagccactggctgcagctccacaatatatatcaaacattagttgttatagataaattaaaaaagtgaaaagttgtttggatattaatgacccacagtacttgcctcggccctgcttagtggagtatttccaggctcctttccctttgaaatggtttgttcgctcctagttgaatcattttgatttgtatcggatctcactttcatccttgtgagatctgaaccaatagagtggaggagaccgcatgtggaaatgtccctacctgataacacaaacactcgttacgtacctataatttaagaaacacttctggggtgtccaaaaaggttatgattcggtacccatattatggctagttagaagacttgacttgttttgtggttcattgttggtatccacatcctgcccaacgcaaaagaattgactatttagcaatgaagtcttggaagataggaagacattcaatcagaacaagaacaagaacaagaacaaagctataaatatatatagaaaaacgtatagtccattaccatagcgtcattatttaaggctttcctgacttcagttaactttttctctgtcatgtcagaatgtatcacacgtttgcctaaaaattcattagataatcaagttagacaagttgacccaattctaaatcctctttagtatttgaaagtaaaagatttagctgaagagaatgtaccaagccttcggttgccttttgcttcaacaaaaccatcttttgtcattttatcaataatcttccgtacagtaaccggactcgcttcaagcttattttgaagttttggaaccgtcacataggtcataggaagagcatggtacagagcctgaaataaggcaatacagtcaggatatgacggtagacattgtagaggaagtgaaactgaagaagtcgaaagattgattttcattactaagaaaagagatacagagatgattttcattactaaaaaaagaattacagagaagaatatatacatgaactcaaaagcaccagcaagaacgagaaacataatagttacaggtagcaactgagaactaataagaatgactaacagacatatttaataacagatataccacactactgaactgagaccagacacaaaggcagattataaactatcctgttcatctgaccccaaaaaaaaagtagaataaataagtaactaaattagtttatttttgtaaatcatgccaattcaatgagtttggttcgttttaagaactcattagaccctgtacgtgtacattgtatggagtttgtttaagaattgacatatctacaaactaaaaaagacgtgacgtgaaatgcaaaattaccttcatgtacatcaaatcttcgccctgcgcaggtttatcaccaacttgcccatccatttcttgtttgaccaaactgtattcaaagtcaaatttctgttctcgtttcggaagggccagaacgaggatcagctagaaaagaaaaatgtaaaatagagcaaatcttttgaaataaaagaagtgaaaaatgaacaaccttcttcttgttgatagcataactgtcacttcctgtcttagataggacaccttcttttacaagcttatccataatttctgaaattcaaataaattcaatgccattattcaatatcctccacagaagttttaaaagctgaacgcctaacaaatttttttagatgcctagattttaggcttaccttcagtcagaacctgcgtacagcaatgcagaataatgttagcactataattcatatacaaacaaattctaagaaaaagaggctaaaacagttcaaatcttcaccactgagatgtctgggaaatttgataaaacatcagtaagttcaactgtgtcaaggtgacggcaattgatccagtctttcactcgggacagttgttgttcatcttccatggggtcctgcgtatcatctgcggaggtacaaagctaaacagtcagctaaattttcctagtcggatttgtgtccattctgtcgaaggatgctacgcaaacttgaattttgtttgttgttcaaataccttcatcaaccatggtattatcttggtcctgtcgtttctctgtgcaaagaaataaggttgcatccaatcatatgtagaaatcagaaagcagtaacatccttagaaacatgaaattttccatgtaattcttacctgctggcacaaccataaaattattttcttgtgaattatcctgaaaggaaaacaaaggctatgagcagattttttttttattgaactgtacaaaacgtgaaaaaataagttctaaacatatttaaaacgacagaagaacaagtaaacataaagacacaagtgaaaactgtagttgaataaattggtatacctcatcactgtcagaatcggaatactcgcccctctgcacagaatcagctcctaaactaacttcttcatcatggttatcttcattttcatcctcacatggatcaagcacacttttcacctaacgattaaatcgtgaaatcaaattttaatccaacatacgaagtcaaagtaacaaatctgacagatttctatcattttcctagtacctatcaaaccaatcataccttaagagctagaacaaaatgcttgctgtttacattcccaacctccattttcaaaggacttttggtccatgcattgtgagcttcgccctctgtgcagcctctgaagaatggaggctcgtaatcggctggctgcacagtaaaattattgcaaatatttcaaaaagataacggaaagaaaaatggcaatgaaatctccgatgcttcggatgtataggtaagcaactgcattatcaaatctctatgaaacacattcaattgcaaacagatactttgacaaagaaaatgaacaggttatccacattacattaaacttcattacaagaaggaaacgtaccgtcacgtcatcgtagtaaagtaacttcataagtatggttcgctgagacaatagaaccgaataaatgagcatcttaactatcgacatatcaatacaagtgaaaactaaattaaaatctaacaatattatcaggaaagaataaaacacaattgagatttacttcttcaggcatcttgtccagagttctcatgagttgaaccagcgtccggaccattttacaagcagagctcctgacagtgataatcaaatcacaaaattagatattggagccaaaccaggaacacaatgagagatgatcacaaactagtatgttatttgattaacctcatctgattgggagtaatttcttcagtcgaattgcatttgaatgttccaccttgcttcttgtttccactccggttgatattcatcaagacctcctgactatcagacccggagtaactgaaggaaactgcgaatttccttaaaaaaataagtctagaaaggtgcttttaactagaatcaacgtcaaatatcacaatttctcacagtttccgccatgatttgctattaaatatacatatacaacaatgtatcacgagttacttacaagtactttagcataattactatctagtattatgcgctaaggcaggaatttcctctcagctaaccacaacttgccacattatgatcattcaccaagaatttaacaagaaaatgcttgagaacacttacaagcatattcctcaatcatcggcccgtctactgcttcacacacgcagaacagcagcgtcttcaggtacttcttctgtactgcatcatacacacctgcaaaagtaaacagatacatattcatagccatatattctaaaaacacaaatgacaatcacactaagcatgaaatatctccaactcaaacctttttccatccaatcaataagtctccgagactccgcatccataggcataagcttttttatcttcatatctattgacgattaaaacaaaagaaaaatcagctcctgagtcctgattcgtaaatgtaattaaaagtgaatatctcattaaaattagtttacctaaagcaggaacagacttatcgttgaaatacttttccggaaaaagacctctgatgtagctgatattgaatatagcgatccggagcaggttccttgtctgaaagaagatttgatttatcaagcatttatgttgcaggtctacaaaggtaaaagctattgagaatttacgttgtttctaaatcaaaattcaaatgatgcatttagagaagaacttaataaaccgaattagaagcttgatctactcttgatagatcaattctactacaagcttgaagtattcagacgctcagagcagaacttaatgaaacgaactactcgtaatagccttgatctaccgatttaagatatctaaaggtcggattatcgcttaaactaaatttccttgtaagatcaaacatgatcttcaaaaaaaattgtagcggatcattttaaaataagcaaaatccatctccaaattcaaaacacatatcatcagttcaatattatcgtgatgatcgtttgcacgacatacaaatttgcatgacgcacactactagcgagaggatacagccaaacacagcaaataaaagtttattgccattgttgagctaaaacagctaaacaaaatactgaaaggcaaggaaagagttaaagtcgttcaccagaagaagcgaatcctgctcggtgatttctgcttccttaactttctgagcgacgacctgaagaaacaaattcacactagtgagctatcatcaacgtaatcggtgtataaagaagacgattaagaagtagtacggatcgttcgacaagcttcttctactcaccattgttgcaaaaaaactcagcgaattctaagagagagagagagagagaacactctggaactcgtatgtatttcaaaaacttgaatgaaaactgaaaatgtagaatatggcgggaggtgaggagttgggatacttatatagtgctctgaaatattaaccgtggctactgctaaacactgagcttgctgaaaaaaagcttggatcaaaagacacggttttcgcgtttttgagggtatcttcgtaatttatggaaataattaggggcattgtattttgtatggacattaaatccttaacaattaacatggcgcgctctaattggttatattacataattgttatgtgtaaggaattagagattagtcgattaatataatcttatattttgttagaaagttaatctagttattatattgtcttaattgtaataataaaattttaggcagtaaatttgaatctctagcatttggttaatttggtaaattgctggcagaagacctttaagtaaatcagcttgcttttcgaattatactaaaactatatttcatatcatccaactgtaatgtccatgtatcatagaaaatttgcttttgttacaatagataagaaaatggagtgaaatgaagatattaaattgtattattagttttttcaaggggaagtagtcaaagaattctctccaaatgtattctttagccataaactcgtggaagtatattctaattcaatggattatactacaaaataataaagtagaataaattggatctcaagacatattatgactattgctaaggagaatcgttatcattactattatcacttccgcttctttcataggttacacacgcttaatcttcaaacaaataggctacacaaatataaaaattacgatgatttttatttctaaaaaaagatcaaatatcaagacgcaagagctttgcaagaaaactggaaataagtaacagctgctggtagatgatgacacccctgatcatatctttcattcaccctattttttagttgaaacaacataaattttaaatgtggtgtgttcccaagcagtaaatgtctaaaattacagggaaacccaaaaccaattctagacgtaaatctggtgttttgggttgaagtactcaactttcgaaagggtcgactctgattgagttgactggatacacagctgcagcgattctctccctgaggttaaatttcttcgcaatcagcggtcgcacatcatcaactccaactaagctttccaaaaatggaagcaatgaaggcaactctttatccaaaggatcatcgaaccagctttcaattggtaccccattgtccacttgaaatccaaatgcctgaaagagacatagtaatcaaacttttctcccaagtgaattcaatcaatctaaaacagttaataaactaggacccctgagaatatcaatatgaacgcttgtaagacaaccatgacaaacaacaacaatagaaaatgtgactgttccctaagaattcatcctgagttgctaaacctattagcttattattactactaaaataaacattaaaagaccaccaaaaccatccttttagaaacacaaataatattctaattcctctttatcacaacaaaaacaagtgtgaggatggtacctggggagagttgtcgattataatgacacgtgacaaatcacgaccaagaattgttaagtccttaagataattaccctccacaaaaacacaagaatcacgataaacacgatgacggaatatcttccttcttgggtcaagtacatttagaagctgctctgcatatatactttgactagctgtaaatataataatctcaaaaagactggaaactctctccaagaaatctgtcagatgaggacggcatcgaacatagactgtgtgctcctggaggttaaaatgtacaggaaatgtgaagtctgcttcatcacaaggttctagtgtggagtgcaccaatgtttctgcaaatcaatgttactcaggatccagcataatatattgacacttctcaagagttcttttgtattggcaagaaaaggaaaactgaattgcaaattggtgtgtgtgtgtgtgt

SEQ ID NO: 65052 - DNA, 1031 bp, Cannabis sativa
ttcattacttctaaccaaatgctacttaagattaaaattatcaggatgtcgaaaacccaaagagtgcaccaccaagtttctctaagttcttctaggctacaagttagagaaatgctaagaggtgactaaagtgccaaacatcacaaaaagatactgatatggtacaatttattatcagatctttaacaaattgagttaataaataatataacaagaaattttaatcacttgtaacgtgtcacattagtacgatattaaacaccttaaaatatcaaatagtaataatcctacaagttaaccaaatgagacttataagtatggatacattttcattggctagatcattcagtattttattttatttggttaatttggatttttcgtctcttgaactttgacatatattattttatctaattttactaaaagatgtctaacgtgaatgaaaattttgagagcatatgttaaaattcaaaaaaaacatgatttggtagatataaaattttaataatttagggaaaatttttaacgactccaaaaatttaagagagtataatttagaacatgtgaaagttcaaaaatcaaaaatcctaaataacttatttttaatttatggaaataatgaggatgtgataatttggatcatggttatcatgctataatttttttttctttcgttaaaaatgagagagatgatcaaatagagtactttttaatgttttcattgtgaatattagcaataaacaattaccacatttattaagaagaagaagaagaagaagaaaacaacaaccaaatgcctttctacattaattcaaatgaatcaaatactctttcaatgtaatatacagaacaagactcattctcacagagaactcagagaaaaaataatcattaataataataacaattaaataaaaatgaatagtttcttctagttaaaacattgagacagaatcattaaaatccaaacacactattttgaccgattttcttaatttaagcacactgagttctgcaaaccttttatc

SEQ ID NO: 65053 - DNA, 729 bp, Cannabis sativa
aaggagaccaaattgggaagacatagaaaaattacttttaatagattggacacagaccaagctatcagtctccaaccaaacgtgatcccatgggtggtaagcaatccaactcaaaacttctttgatgcctattatttcagcgatttcaagttgaacacgaccaatctttctcttggtgaaagcttctagcatattgccatgatgatcccaagctacacaacccacaccaaatcgaccctcttgatcaaataaggccccatcaacattaactttgatcttacgtaacataagtgcagtccaatgcttagaatgtcgccccccatcattcaaaggagacaaagaaagaccctttctttcttgagcacatttataatgatcaagcatgttctttgctaatgcaacaatattttacacagcccaacttttcttttgccaaacaaactcatttcgcgcacgccaaatagcccaactcaccacagccgcttcctccatctcacaaacacgcccgttgctaaacaaaaacaccagccagctgctaaatgttacagacccgctgccaatatccatcaggctttggttccaggccgccttagcaaactcacactccaccaatgcgtggtacactgcttctgcagcaatattgccagacgacattaacaggtacatgacgtctttgaagctgaaaaacaagtagaaagaatacctaaagcaactctccataagaaatta

SEQ ID NO: 65054 - DNA, 1128 bp, Cannabis sativa
gagtattgaatttagcaactggaggaaaattttcaacataatctatgccatgagtttgtgagtaacctttggcaacaaggcatgccttgtacctctcgacttcaccttgggagttgtatttaattttatagacccatttgttaccaatgggtcggtaactaggtggtaaagatacaacagtccaagaattatttttcttgagtgcaaagaattcaaaatccatggcttttaaccactgaacaaattttgatgcctgtttgaaagtggtgggttcgatctcagtataagcatgtagaatggcatttcgaaatggaatgctgagtttgtcatacttgagatatttgaccaagggatgggcagtagaactgtggcaaatatagtccttaagatgacatggtgtggttgttttggcgacctgcctttgtagtgtgaataggcgaactgaccttagaagatgctttaatggaaggagctggtgctgatgtgggaattacatcagtagctattgctgatttttgagtaacagcaggagcagttgcatgtgtttgaatctcagcagtaggaactgctgatgtgggaatagcatcaggagctgttgctgatttttgagtaacagcagggtcaattgtagggttttgaatatcagcagtagtggaagcaggaaccacagttgctggtttattaatgtcaataggggccaatgttgggggattggatgactttgaagagagtaaagtatccaagtgattaagattaagagatcccttgagtggaaaaattttctcataaaagacaacatctcgagagtggaaaattttctttgtggcaatatcgagaagtgtataggctttcattctatttggatacccaatgaatatgcaggcatgtgcacgaggagaaaatttgtgtcttgaactggccagagatgaagcataggcaaggcacccaaaatttctaaggtggtcatatgtaggaggcttattatgcagcaattgaaaaggagttagatgctgcaataatgtagtaggtgttctatttaaaatgtgttgatgttttcgctcaacaactgagttttgttgaggcctttcaacacatgaattatacacttgaatacctttttgaacataa

SEQ ID NO: 65055 - DNA, 657 bp, Cannabis sativa
  modified_base (259)..(260): a, c, t, g, unknown or other
gtccttttgaaatactggacaaagttggtcaggtagcttaccgtttggccctaccgccaacattagcagaaacgcataatgttttccacatttccatgttacagaagtgtgtacatgatccgacaaatgtgcttaaatacgagaacttgaacttgcagcaggacatgagttatatggcatgccctgtgcgcgtgatgacaaaacagtaaaggtcttgcgaaataagactatacccttagtcaaaatcctgtggagtganngttctgatagagaagcgacatgggagttggagaaggacatgtaaaaccggtaccccgagttattctcaagtaagtaaatttcgaggacgaaattcttttaaggagcgtagattgtaataaccaaaaatatttttattacttcgttacctgttttctcgatgtggaagttcgtgattacataaaatgttatttctgttgatatgtaaaagagtggtatttttaagaatagtacaagtttgtgttagtttctaaattaaaatgttttgattattaatagttatttattagagcacataatggagacttaagctcaagtatttatccaaagccttgggccatgtagttgaccaagatatggattttaaatagaaattttttatttaatttagtgtagtga

SEQ ID NO: 65056 - DNA, 1318 bp, Cannabis sativa
ggtctgtacagagaaagaatgttatcagaaaggactcaccctcgaaagctccttcagaactcctcccatcaccaactccagagaaaggtcgttgtctgccccagccaactgctcgttcacctcaggaattgaccgagtcacatagtgagtaagcatttctctggctattttggtctctgggtgcaatacgggaggtggagcaggggccttgatctatttggacccgctcatgaccatctcgaattcgcccctcgcctgctctgacttgtccaagctacctcctcaagaatccttggacttagtcatttttgagacaggagggtctacaatggtttgttcctctgagagatcaatgaccacttcagttggcgccttctctctggacggggttgtctcacttcccttggacttcttggccggaggacataagcctgagcttcctcccactctcttcttcaaggcttcgagcattttctgagacatgtctgcatagaacaaaagtaacttaatcagaaaaaagcataagaaatatgaaagcatgataattaagattgttaaaaacaagatcgagtaccctacactttggcaggggcatttccccgaacaagtactgatggggcatcgtcatccaacgagtcttcttgctcctcaaggacgactttcccctttcctactacaggggtggagggctgagcaggtagaccgggctccctgatctagattgtatgttcaatgggcctctacccggtcggaagtttcttcttctttttgagcaacctttccggctcttcctcagcctcatccttcttctaagaatactcttgagcatgttgttcggccacagctcctcccttcaacttagcctcacgcttaagttgaataagctccttctcctgctcagaatgctcctgagcatacttcttggctctggcccctcccttcaacttagcctcacacattagttgaatgagctccttctcttgctcagctccctcatcccggccagcactggacttcctcttcttctcattcacaggctaaggttcaaactatgtcggataaagcctgtattccacaaagtaggcctctaaggtcaacaaggttatattctgaacctcatccggcagttgaacaatcttctgagctctgtcccaaagagccagtgtgagaggtggacggtaatatatagggatctggtgaaatcaagtataagtggtacccatgcctgccacaaagtaatactcgtcaacaaaattcccaattttgctcacgaccttatccacggtgcctgtcaaccacttgaagtctggctgagaga

SEQ ID NO: 65057 - DNA, 963 bp, Cannabis sativa
gaaaagacttataatgtggaaacaaaaggcagagaagaagaacacgtcaagaatgtacaatataaattaactgacggtagtatggaggacataactgaatctatgaacataacaaatgaatgagatttgaaagaatcagaaatgccaaactattttgaggtgacaatagaaatgctggaacttgaactaaaaagcccacctcaaatataagcagaggaaatagtaaaagtaatagagattccttcaaatgaagaatccaaagatgagaaaatgtcaaaagggtccgatgagccaaattactctccattactaaagagcaaggacttagatccatccacaacacccagtatcgatgaagtagaatacgacatacctgcttatcattttgaagtagaaattgatgagtcagactctgaattctggaacacgacagcaccaattccaacagatgtagaaatggaaatagacttcgaggaacacccaaaagaagaccctgaagaatctgaagccgactcatgcgtggaggacgcatagtagtctcttttaacttgtcaaattttatccaaggaaaatatttgtgttcctattccaataatttggtgactatgtaactagacatctagtacgcttttaaataaataaagatttttcttcaatcaaattcttctcttatgactgaagtaactccctacgagaaagtatgagaaagacagttcgcctctacttaggaatctacttttcactaaagtaatattgattcttaaactaggattaaatacttaaactagacaccaagaacgagaagtacaaaagaatgtgacatctgaagcatcacttaaaacaccaagggtactaagaatttggtaataccttcttaaatttttcaatgcccagaggatggtgtgatttcaaaaattaggtggaagaaattcattgttaaactgtttatatttttcgtactcc

SEQ ID NO: 65058 - DNA, 2888 bp, Cannabis sativa
aaaataatgcggattggattggatgaacacccctatgcataactttcagatacaaattctaaatgaactgatttaggatgcgttagaaagctgaaaaaaatatctaaaactctgtactttgaacttttccaaaatctgactagaatatagtcgaatataggcttgaagttttagttttattttcttgttaaattttttctattttataaatcactgtatttttttaaatttggccaatttatacattctaataagtgtgaaacctgaaataaaaaaaaaagtgtaattatgttccaaaaagtaacaatgaagaaaaaaaaattaattttaaaaatgatctgaacaataggctaaaaatagcttaacactcaacaccttctataggtggtgccctatgattggttaacgatattccttaaaagctactattttaaattatatgagatccgatacttaattacaccaatagcagtatgagaccgaggaaggtatcaagcaccaataataccttttaacatttacatatacttatgtcatgatgaaatcatgcaagttttctttgccaccatactcagaagctcacacacttcacaaaatcatgcatttgtctcactaaatataaacctcatagcaaaagaaactcaataaccaaaatcatgcaagtctcctctaccaccaaaatcatcactcctgcctataaaataaggagaccttaaactttaaaccataaatttgtaatctttacaatacatatatttattttattaatccacttcatcacaagtcgtaggacagtttggccaaaggaaggtaataagattttatgatattctttaattaacgaaatttgttacaattaatatttgtaatgtgatccttatatgtgtctctcttcttcttcttaattcatttttcgtcaaggtacctacatgacgagatttagtttggttgtgtgggctctcgtcttcttttgccatgcaactattaaagctgcaagggaagggagggttttgagagatgatcagatgatgatgatgatgaacaatggtaacatggacaacatgttacataattctcatgattatcatcatcatgacgttaaacatgataaggctcgaggacttactactagtggttatggagcaggatcaagtgggggtggtattggtgttggtgttggttttggctcgggtggtggtggcggtagttttggccctggtggtggttttggctcgggtggtggatttggctctggtccaggagaaaagggtagtggaggttttggcccgagcggtcctggctttggtccaggagaaaagggtgggggttttggtcctggctttggtccaggagaaaagggtgggggttttggagttggagttggaccaggtggcgggtatggttcgggtggtggctatggaggaggctatggcggtggaggatatggtgacgctcattcccaaacttcccaaagtgaggagcatgatcatgatgagtcaatgatgcatggccgcaaaccctaatatataacacaatatttgcttgctacgttttaataatggggagcaaacctaaataacacaatttacttacgttttaataatgggagcaaaacctaaaatatcatgtacacaaaaaataaaattacatgtacgtattttattttttacttaattatcactttatcatgatcatatatagttttagattatatagttttgtattaataagtgaatttttatcattttgttgtttgaattaattgacttgaattagctatagatcatgttggagaattttgtaacttattcaaataaaaaaatgataaaaattattgtaacttatatatatataaatatatttaaaatgatattattttagtaatttttattaatataattatacatattatcaaacatataatattaccaattatcgttgcattaatttaatttacatcaataagggtttattaattagagtgatcttcccatgatcttaagttaaactttcattcttataccatttttcttatggaacaaaaaaaaaatgttattggataatgcttaagtagagtcacacaaaaaatgtatgtacatacaaatatatatatatatatatatattttttttcaatatgtgtgtcaaaatattatattatactaataattaattaattccttttatattattttcattttttttgaataatttagtgacccctaataaagaaagttactaatatttatcgaaagtcatactaataaagtcatatgacttgtggtaaaaaaaattagtataatttgatttattaaaaccttaattttatatgtccaatgtgttcataatatttaatctctaagtttcactatatatcaaaacaaaaatattgcataagtgtttcaataaaaaaaaaaaattacatgtaagacaccttatttaaagactttttagtaaatgaggcttaaagatccacaatattaaatattagttaactttctttattaggggtcactaaattattattaaaaaaataaaaaataatataaaaagaattaattaattattaatattaaataatagagtaacacataatttaatgagaaaaatatttatatgtagagatatttttcatgactctacacctattttctaaagttattatatgatataattctttatatctcatctaatatttgttgataagccatgcatgtttattattgtacacgtgttacacttaaaacaaaaggtaaaatgaaaattaaaattacagtaaaaatctttaaaaaatttattttaatgtaaataagtctctaattttaaaagggaaatttgaaattccatgcttacaataccttaaaatttttccctaaatccataattatt

SEQ ID NO: 65059 - DNA, 723 bp, Cannabis sativa
  modified_base (43)..(46): a, c, t, g, unknown or other
  modified_base (144)..(155): a, c, t, g, unknown or other
aatatttatctatcgagatctaacgctattatgtttgtctaannnntgacaatccattagggatttttcccattaaaacaacaagccaagttagaccaataataaaggtttgaaatttgaactacaattaataacagaaaatannnnnnnnnnnnataaattcacacacaattcaaaaagggaaatttgattttttatgcttacatatacttaaatttttttccctaaactcataatattctatatttgtagaatatgacacattttataatattcctaaaatacccccttttcacatcaccccctctctcttcttttctctttttatttcactacactgtcgagccatcaggcccattatcacacccatcggaccatatcaaattctatttttttacacacgcatcgggcccaccatcgggcccactatcggccccatcggaccatataaaattttatttttttacacaagcatccggcctccatcggggccaccattggacccatcgggaaatatcaaattctatttttttacacaggcatcgggcccaccatcgagcccatcgggccatatcaaattcaattttttttacataggaatcgggccccatcgggctgatcgggcttttctcttcctgaattttcctttgataccatcggaccagtatcgggcctgcatcgggctgcgtcgggcccgatgaaatcaaatcccaaacccagatt

SEQ ID NO: 65060 - DNA, 1207 bp, Cannabis sativa
accctgatctgattttataaaagaggtatctaggtttcgaaccactgaaccagatcgtaaaacagggggagtcggagccttaccttgcaaaatcgcactgttacgttggtcatttgccctcaaaaagttgataaagtcatgttgcacctcctcctgtttccgaattgcttccagtgaagatttgggagataacggagtttgcaatatatccttgagtgctggatcgtcttcctcctcatctgacatctccaaaggtggaattgcagaaaaaccatcctccatcgattcacgaattgcatccttaccgagtttcacttccttcttcttagaaatcttagcattcgaattaggtttcctttgagttcttgatcttgtttttgcacaaaaagaatattactatactaaaaaaatacaaatatacattatcaattatcaatattattaaatatataaaacaaaatattaaatgggtccccgtcggggcggggagtgtgatccccatccccgtcccgtttaacattcagggacaaaaaataatcctcatccccgccctgttccccatttagacggaaaatccccgccctattggggcgggtccccgcgaggccccatccccatggtggaaatgtacatccctatgtgtggatgttattcaataaacaaaaatattttttattaaaaaatatttaatttatgtattatttataaaaggtaaacataataatattcaaaacatgttgttaattataattttagttaaatgactgtaatatttttaattttataacacttttcgttgttttagaaatattatacactttctttatttttttttattatttttagaaaaaatagaaatatattttttttggttaaaaggttataataaaaagatattattttaatttgtgcactgagtttaaatttaaattgtaatattaaaataaaattttacgttatatagacacatttaatataagatgaaaaataagagagatatgtgtaataagtttatttttttttttctaaaaaaatatacttttgttatatagccacatttaatataacatagatatatatatatattattaccaataacataaaaataactcaatttaaaaaaaaaatgatctcacatactaaatgtagacactaaaatctacaatgatcggaatgagcgtttgtgggcaccgacaacctgcggaac

SEQ ID NO: 65061 - DNA, 942 bp, Cannabis sativa
ccataggttgatcctttggagaagatagtcagtcccagttgagggtgtgtgactctgatgtcgtttcatttgttacaatcctttaggtagaatttactcccaaaagagtagcttaagagaagagggtgctcaaatagttataaaccaccaatcaatcctacacctagtcgaagtgggatactaacaaaactctagcatattactaggtaggtttggacaaggagtcaaatgacaaaccacattggagcaaattttaggtgtgaccacttcgaagaaaatgattagtttaaatcatatgaaatctgcatgctcactgtattttttacattagaattatgattgaacaattaacttggttaagcttttagctaaaatagatatggtgaatgagattttcagttgaaagtatctgctttaagaactcaatataatgcttggtttcatttttttcccaatgaatttatgcatcaatcaaactaaattgatagactttgatgttaaaggaaactaaaaaaaagtgcaggtgttccgcctgggagggctgcggttatgcagatatgtttggacactagtcattgttatgtgatgcacatcttccattctggaataccaaaaagtctgcaattacttcttgagaattctatgttttccaaggtatgtaattaaagctaaaagagctgcagcattggtatgtttatcactgcagatatatgaaattttagttttggaagcaaagcaattttataatataagtattgttgtgataacactctttatccatgcccaggttggagttggcattggcaatgattctgttaagatttcaaaggactataatgtttccatccaagcagtggaagatctttcctatctagccaaacagaagctcggtggagattcacaaaagtggagtcttgcctctttaactgagaatctcatctc

SEQ ID NO: 65062 - DNA, 1655 bp, Cannabis sativa
  modified_base (174)..(174): a, c, t, g, unknown or other
tcatatttattttcaagacttatgatatttttgacaagcgttgctcaagctttgttgtatttgtgatagtttaattatttggtgttagtccaaactgcagattccgcataaaccgtaccacaccgcaccattttttactgtgcggtttttgcagttttttagtttcgcgatgcnggtgcgatttgggaaattaaaaaaaaaaacacatgtgcgtgatgatttgaaaaaatagtcaaaaaccgcactacccgcaccgctaacacccctagtatttatagcctcataaagaaggtaaaaagtttactattgtcgcaagtgtagaagcattacttgtacaaatttccaagttcggataacatggtatttatgtctgtttggtaggttgtataggcatttcatgggtatttggtgagataagcctttaacctttcttgattgatgcaatagttcattatgcagccgtcataatattcatagattagagtgtaatcaccgaataataggtttaatgcccctaacacgtcttttcagaaccattcatagtcgtcttccccatactgcatttaatgtactcataccagctcaggtctgggatctaacatccagacccggatgttttatctagctccttgaggtgggcataactcttgacttggcacgacgcgactgaagctccaagaagggcttcctagacatgaccattaggtctcagactgagtcttaagaggtttactttacttactctagatatttaggctttcctgccacctaaccgacttcaagattgtcacgtgtgttagaaaaaatcagggacaacatctacccccaagtctcattttgcacctttgtaaaatgaaacttgctactttcctcagggagtgatgccaccagccatcatttagcacgcacgtgagtcatttattacctataatcatttttctcatttttggtgaaaacgattcgattcccacctgttcgatagagcctttcattaatatctttgttaggaaaatactcgagtattgcaatttcccttttcactatattttcttactaggatgtcccgaccattggattaaaaagattcggatagtttgagccttgaccattggatggtcgtcaattagtatttgccttggaaggtctataaatgcccgtgccttttccttctgagatttttacccactcatcttttttcacttccaaagttttcctaatcttttgccaaaattccactctccaaattgcatctttctttttctccatcgctgtcaggcaaagttctactggcgtacgacggtctcgaaaacctctgctttccctacagcatgtaagtttcaacttcgcccagtttcaacttttgaactatcatgcatgcatcactacacaatatggttctcattttctttttgttttggtcttttattatcactggaaatttcctttgaactgccattttttgggctgcttttctgaaaactttcgttttaagactatggttggaatttataggcttatggttcgtaaaaattgcagtgtttcccatttttttccttttccttgttcaattgttgtggctaggatgtctttcacccgatatatggcaacatgagtcattgataattgctctgcctacattcagatggggcctcttc

SEQ ID NO: 65063 - DNA, 1228 bp, Cannabis sativa
  modified_base (678)..(678): a, c, t, g, unknown or other
actttaaggttggatgattttttgaaagtaaattgatagttgggggagttttgccacaaattactcttaaattttttatttttattttaattttaattttgtaatatattgccacatagcataattttttagtgacctgtcattgccacgtgggcaaaattaggacttaactaagttggacaaacgataccttaaaaatataaacggaatagtactttggagggttttcctaccaaaatatgaggttggatggttttttgtaaataaattgatagttgagggggttttgccgcaaattactcatttttatatagttttatttaattatttcatatattattttttttaatttttttttaaatttatagtttgagttgttgcaatggtttttctgtgggttgctatacgaattttgcttgcgatttaggttgttccgttactaagcgatactatgtggaattccgtaaaaattaaaaaaaaataataaaaaaaaaaacaattttgaagtgtaaaaatgaaatttttttttttcatttttacaaaaattacatagcaacttacataacaactaacagaataacttaaattgcaattaaaatctacaaagcaagctacatatatagaaacacagatcaatccaaatcataaatttaaaatatatacatatatggaacactncttaatgggtattacccattgataggtaaaaattaaatttaaccataaatattaattttaaaaatattaagccattagattgtgatccgatgacgaataataaaagagaaatttgaatttctacgcttaaattagtttcttaattacaaaaaaatatcaaaaaatacatctttttacactatacaaaaaataagtttatataaaaaatatttaagtgaaattcaatattttttcatcattttttgtcgattttttttttattattatttttttcagccgatggaacaagctcaacccatataatgaaaaaataagagatttttctaattaaatataaaaattaagcataaaaactcaatattacccattcatgggtaatacccattaagagtgcacccatacatatatatatatgtaataattctcctaatataatttactataggaataaaatgtgtgtctacgtaatacataaacaatggaaaatctgaatttatatgcatatatttaggtggcgtttggtaacatttttttaatcagttttctgatt

SEQ ID NO: 65064 - DNA, 1057 bp, Cannabis sativa
tcacctcaaatttccaagttttgtccacaaagtccctaatggtatcttcattaacagacataggggctaaaactttccccacaaggccgaaagtggacaaagctttctgagaagagccacaaggatataactttatagtagattccacacgagaaaaacacttgcccttaccattgaatgcagggttggtggcattaactatgtccataacgacaacaaaggacaaaaccaccaaacaccaccttaaacactataaaaagatacacaacacttaaccccccgaaccccacacagatgctcacagaaggagacagaccaaacaagaagaaaggaatcgaatcgcccaaaaagactcacaagtcagccaacaaaaacaggacaaagataagaaaccaggagggagtgaaatctacagaaaaagctcgaaagggagcaaacaaaaaccactgagctttgaccacaaacaaaacctcaaaactcaccagatattccactcacaccagtcaacagcctctcgaaaccacactctcaagctcaccagactcaccacgcacaccagacactcactctcactctctcacactctctcgttctaattatatgtagatatatatgagatatctactctacgtcatttagttttgaccctatagtataaggtagtaaagtaaactaatgagaagttaaatattgaaagtcttctttagttacagtggactgttctacattataattgaatttatttattattttatataactaaaattactttatataaagaataggcatacttgagtgttttataagcgcccaacctagatttgaattttttttatacttttttttttcagtttttttagtttattattactacaacttaatatttttttattttatctcaaatttttatattctaccatattaccatacatcaacttctcagcaatacaaaatttattttatttttcaaattttaatatattttattcatttcaaacatataatattaatatttacatatattctcatatgtaaagtaaaattaaaaccccaaata

SEQ ID NO: 65065 - DNA, 1280 bp, Cannabis sativa
ttatgggtgtatttcagcatttaattgtattaatactatttctttttagaatgttgaatatttattagtgtaaatccatatcatatctcacatatttatatatatatatattgttagcgataaaaatagttaagttaaataatcgcaggttaatcaaatgaaaagataaaaataataactaaataaaaagaacacagaatttataaaggttcgatttcttatgagataatgcttgggcaaatcactaaagaagacaaagtaaattctagttacggctctcaaagtatttacagagaatatcttttagtaaagtgctcttagatgtgtgagtacaattttaggtctagatcttcgtccttccccttgtgaattcgttcactgagaaaattattacatttagcttcgtaaaaggagcaaacatagaataaatatcttatattctaaggtgtgatctattgaagctcatttattctcgaaaagatttgctggattcgagtttgtaggattcaatttgagatatttatgaagcttgctgacgtggaaatcaaggcttgtatagctttgtccagtatccctagcagcacttcttttggccggcatattcactacccggctagaccttctacaagacttgtttactttatgggatttgcttgtaaaatcacccttacaaggtattgctcccatcttctctggtcggcaagtagatgattctgccaaatgctttatgagacgtgcgacttatggctgtcaccctttatatggacctatcaggtatacttttacttagaatttctctaccagattaaagagttagttggattaaatcacgtgtaagtatataataaaatgtgaaaatttttagataatatatatatattttttaaaaatatcacatatttatacttatatctcactaatatatgtatgaaataaatttaaataatataaaaacttgcttagttacacaaataaccaaacctcaattccatttttatttgttcattatcttgataagtttgctcttactttagatggtcatttagtttggttgcatgtgcccttattgtattactaaccttattcaggtttacaataatagaccaatgttattcctggcactctttgagtcttttcccttttgggatttttcccattgaatttactatgaaggtttgaatgaggctatttttttaacaaaaaaaaaaaaaaactcatgattttatgatagaattttgataattaaataaatattatatgtgtgattgaaatttataaaa

SEQ ID NO: 65066 - DNA, 1454 bp, Cannabis sativa
tgttgaattaaaaaacgtgacagtgtttttaaaaaaacaacgtattattaatattatttttttgtgttattaatcttatatctaacaggtctggatgcaatgagcacaactttgcaagcagaattgagtgttttagatgcaatgctcctcgggactcatactagacattatcttatatctaaatatagtttttgggtaataataattattattattattaatgaacacacaatttatattaatattcattatgcttataataatatttaattaagattaataaaattaattgatgatattgttatatattgcaggcacttgagccaagcgatctccagagagagaatgagagagagagagagagagatgatatggtagaagaaatattaggagtgtttttcacttgatgaaatatgattattatttatttgaggtgctaagagagaggcttttctattaaggtggtgcaaaaatcagattatcaacatgaatatttggactacaactcttatattattgtgcctggcatcttaattataatataattcttagataatattataaaagtcatgatgtagttttttgttgtttttttttttttatgtatcaagggtttgtttgttttttgtttttttgtactctgcattgttttcttaaatggaattgattccttaattagcactacttattaattattattattattaattattgagttcgagaaattataagtacgtagcccctaattatgagatatatcatcaattaccacttgatgattagattgtttaattatgacaagactatctactactatataattatgattataatatatcttaacttaaaatcatgattaattaaaattcgataatgtgcactttaatacagcactcaataaatcaaaatatcatacttaaaattcagtttcaattaatatatgtaagatataagatagggacatatgaagggaccacaaatttgtgctttagatgcaaaagaataattgggtcaagattcaaataactatgattattaacagtacttattcacttttaaatagagcaattgtcattagtaactaacaataagaatattactcattatgattaggcccattaaacgaaagtatactacaactagtttcttttctgaaaaaggcaattctttttattatgtttaaatcaatatggcaagctctagctactctaataatattgtacattacgtactttatgttccattatcaaagttttccttttcttttttataatgaaaaaaatactctctctatcatgattgaatatttttgtagcaataaataataattgtagtaaggtgacaagtttattttagagaaatttactaaaatactagaattttgggtaacttttataaaaatactgtcacacggaaagtttacaaaaatactgcatttttataaaacaccagta

SEQ ID NO: 65067 - DNA, 1267 bp, Cannabis sativa
atcaggattatgtcttattaagatcatgcagttacattagggcccattggaaattttggatattgggtgagagacaaagtgactatggtcaatcgtgtgacagtatagactttgatgaaatttttgtacttcactttacattatttgtgttctttttctggtttatcttagcttctttgtaataatagtttaaccaagtcagcgaaaaagttggaggcatatctcgattgttattttttactataagtttggtcattcagaataatgtgtttaatatggtaaataaaacttcattatatgttacaggacaatattgcaaatggtaaagctgggagtaaagctcaatgcataaagagtgcaactgctgctctgaatgatggaaaaagtgtgtttattgacagatgcaacttggacagggaacagcgtgcagaatttgttaagcttggtagccccaaaatcgacatacatgctgtcgtacttgatctgcctgctcgtctttgtatatctagatctgtcaaacgaacaggtcatgagggaaacttgcaaggtggaagagctgccgctgttgtaaacaaaatgctgcaaaataaagaatttcctaagcttactgaaggatttactagaataactttctgccaaaatgagactgaggttcaagatgccattaatacatacagtgcacttggtcctttggaatcgctgtcccaaggtgtgtttggtcagaagaagtcagatgctaaagttcagctcggtataatgaagttctttaaaaaatcaggaacagctgaatctggtaatgttggatctgttgcaactagtgatcagaattctgcttctctggaaaaaacagaggataaaggttcctgctccaaagcagctgtatcgttttcagataatgctgttacagagataaatgaacataaagaccaaatgaaaggcatggttaaggatgcttctgcttctctgggtgatgctcccacattggcatttccatctatttccacatcagatttccaattcaatcacgagaaggcatctgacattattattgagaaagtcgaggaatttctggataagattggaaatgctagacttgtctttgtagacttgactcatagatcaaagattttgacgttggttaaggaaaaagcttcaaagagaaacattgaccccaacaagttctttacttttgtaggagatattactcaactttattcacaaggtggtctacgctgcaacgtaatagctaatgctgccaattggtaag

SEQ ID NO: 65068 - DNA, 580 bp, Cannabis sativa
ttattatcttttttataaataaaaaagattatttagctgatattttaattgtttattccaaaatttaaggaacaaaaattatcttttgctagatactatcacagatttaaatttaagtgactacttaaaatttaagatagtatttaagatatttataattcaaatttaattttttcattcgaattatataattggaacttgatgtgtaactctgcctaataattttgcagcttaattcgtcagcatacaacaagcaagacttttccttggtatcatcacatagtcaattggtctacagggtaagcctctttctcttatttatgacttcatatcatgatacataaaagtgcatgatttggatttgactgctcctcacaaagtcgaacagatatgtatataggtcttaattaatgcaatgacatatatatataattatatatgacatatatatatatattattttgctttttttattacattcagtaacatatatatatatatatatatataacttgtaaatttgcatcagtgcacatgctttttcccaatcccaatccaccgaaggattctcttgaggctt

SEQ ID NO: 65069 - DNA, 501 bp, Cannabis sativa
tttttttctttctttcttcttaatctcttcataattttctatatagtgtatgtatgagaaatgctaaaagacaccagtagtgccttgcaccttcttatgtatcaatatcgctattggtctaactaagtattgggtttcacatagtttaatattataataacttttagagagtattgctagttaatcgtaaggcgacatgtttagaggtgttaggcactactggtgctcaatagcaatgctcgtgtatggatatattggctttcaaactcaaagtgggttgaatccaaaatcctttttttccttttaattatactcttaaatatatcggttcggtacccgagatcaaaaggggtagctcaaatggttaggtatgtggtttggttccacaaggtctaaggttcgagtcctaactcggtatagttttcaaagaaaattagcattctttttcttatttgtttgagacataattgttaaaatattgattgaatgagagtgctaaca

SEQ ID NO: 65070 - DNA, 5649 bp, Cannabis sativa
acttagtatcttggttttgttgttaatgtaaaatttagcagagccaatgccattattctttcttttgaagaatataatttggtggctccatgccaatggctggcctgaacttgttgtgcttctatgattttttaggctttaggaaacatttttggatagaggtattatagaaccaacttgagtgggtgccatagaaaggaaataaactttagatggttcaacacgattgtggtagtgatctttggaacaattcagattcattaaagtttggaaaatgtgatggaacactgcaattggccctagtagtgtacagtaatagcatttgtggtgttagaggcacaatctgtgacctgttgttaaggttgcaatagatcaaagaatggaagtgaggaaatagaagatttgtaacttagattcatcgtgcataaatgtgtaatactcgcaattgagtattcatctgcgacaacaactttactggaaacttaataatctttcacaaagaagttgttaacttgtttgggataaaatatcctttttcctctttgcaattaatccaagttgataatctaaagtacacatgttttcctccacccacccatggcattaaaagacaacaagaaaaataagagtaaatagaaagatgtaagaggatatacccaatagaggaactgtggttccgaattctttttagctacttgaaaccttttttatccacttcattgcatgttgcaactttcaacctcacatttccagcaaaaaatctcacatgttttatgatgtttgtttcaggctgttgctatgaaatatatactagagcagtgatgcgagaagaggctcggaaacaagcaaatgcagaaaattgaagtacataatgatgagtttatgtgtgtctctctttgaccttaatagttcaggcaactatagcaggaatattctgactttcaaatgcagcaaaaatggctacatttacttggtttgaatttatgttttccagcctctttcttaataagatttgttgtagtagtgcacttcgaacttatcaatgaaagcaacaaaatgctttgttcttcttcaaatgaatgttccaaaaaaataaaaaaaataaaaaaaaaataatagcttgcaggcttaagccttaacctgaatgtgagttttcttactctcggtattattggcttcttgggtgagatgttatgttttttataccattttagtgctccgtggttaaaatactaaatatatacaataagaattatcgaaaatacattttttgaaaaaacaaaggtacctaaaaaaagaaaagacacagtttcagtacttttaccctttaatgattgtcctttgtaaagaacatcaatttaaatggaaaagttactatgtattcactttctttcttcaaagctttgatactagctaactgagaccggaaagtgaggttatattcaagaactattgtttaataccttcggctgttcaaagatttgatgtttagcaaaatatcacctttgatccacggaaagctgaggcagttcatgccattgtggaaatagtcagggtggtaagtcacgtgataccacgccgaggccatctgctgctgatttcccacttcacagctgctttgaaaccatcctcgggcttccttctgcagattcttcaatgccagtagaacccgatccttggtgtcaccatatctcctgttatcacgctgcaaataggctgctcgctttcggatattgcctgtcagtacttcatcctcagtctccactccatagtagatcattatgccactgagtttatccatatacatatctctgtggctctcagcaatggcaatgaagtccttaaacccactcacttcaagatcgcaatcataagttgatcgagcaacctcctctgaccaaaccaggtttgaacttccttgcacatctgaactgatcattgcacggtaaagttgtcccagtaccccattggagatgtacatgggcttttctagcctctccatgaaatctggaaattccctaggctttaaagcctttggcatttcagcaggtgcaccagtctttgcaaaatccacagccatggagtgcaaagttgcaagttgcaggcacttttcgctaaaggctttatctggttcacgatcagcatggactaaatgagcagtagagatggcacccaacgtgtcattgatcatgtagtcaacaaaaaacttttgaatttcctgcaagataatgcaaagccaaaaatgcaacttctttcactaaaactttccaaacctttgtaattcagtttgagaaggagcattcagtatatgcctagttgaagttttgagattacctctatggtcacgttgtgatccattatacgaggtcttcgtccagtgtagtccataggggatgcagtttgtggtgggatgagaccagtatcccaactaatgaaatacaagtccccatcaagatcaccaccagagcattcattcggatgaggcctgcaaaccatgaagaagatgtaaacttgtttaggttgcaatcaaggctttgttaatttcacctaaatgaggacaatatttcaacagtaatattttagcacttctatgaataagtttatacctgtctcctttctgagggaagatgaggcaatccaccaactccttctcttctaattcgacactgtatacagcctcaagcaccctgacatcaccaggatgaagacaagggttttttgtgacaaccacctttcccaaaacaatagatgtttcatcatccacctttctgaaaaattcctgatcccctgcttgcagctcttctcttgtcatgcttatgcgaacaaagatctgaccataatctaagataccagtttcatccaagcatccaataagcacacgaccctttgggacaaatattcggcatctagtttttagatcagtcaactggttttcgtaataagattgaagcatcatagaaaggtaaggttccatatttggctcataaccttgatgtaacatctttattaagatattagatttatcagaactattaaatttctctaagacattcagtgctgcctctctatctatccgcattcttcccaaaagacgcaattgttcgtgttgcaatgctaggaaactttcatccttcacgcccagtgtagacaagagggtaacaatttctcgattcagaaaacagggcatagcgtcactccacttggtgacattaagcattctattttttgattcaaatttaagcatactactacgtaaggaaagcttccggaaggagctacgatcaacagcaatcacccctttatatccaccatatcgaatttgaaatgctgaaggtgtatggttcagcccacatttctgtgcaacttgcctggcgaaaggcagagaaattttcccaatgccatctgagaaacagtagtcaattccatcattattcaactccacatcaggaataatctctacatcttgcactgggacagtaagagtttgtgttgaggaactgaacaactgacccatccttgcagcacatttcgaaatactgcgaatcttgctgaaacagcccatccactctctaatatctccggcttttatatgttcattagaagcaaacatccaaacagaatttgatctgagttgactcgctgagaaagctagaaattcgtatcttttggatccaataacaatcccatctcgaagaattgaaagtacgcggtgatataatgcagttctgtaaggttttggaaacatgccttgttcgatggttgtagtgatggcattaggaggcagtttactccaatcttcttcgacaaaagtcactctcaaaaaatcattaacatatgatgagaagtgtttgacaacatagttgaacttttcaagctcaggacccatgcaaacaatcttcaatggggtaatcaaagctctgtggcaactcatgacattagtctcagttagtcttttgttggctgaaggacttttgacagttttctctaagatatgtgcatgagtcttgacaaacgaaaatggattataacaagtggacttgagcttatgcaacttctgaaaaaccgcttttaaggtttcttcacttaaactactgaaaagctcaatgagattactatctacagaagccaaactaatcttttgggtatgtacaagagaattaagctggaaaaaggtttcatatcctaaactatcatttgaaggagattttaaaaggggaactgtttcagagacattacaatactcttcaccttcttctaagttaaaatcttctacatcttcttgtctataataagggaaacaatcaaaagtatcagaagctaaaaagttctccttcaatgcccaataaaatgaggttgaatgaccaattgatttcaacccagaaaaatctgtagtacgaacccaaacaaactcaacattttctttgcaaatatgataacgatcagcaataaatctcgaagctatatgaggcccagataatctcctataaatctttggtccatattttagctgaggaaaaagaaagaaaaaaaagcccagaaaattcagaatacagttcataatctgaagagaagaaatataaagagaaaaaatacctttaaaagaatggagaacagattcccgccatccgaatagtacccaacactctccaaaatatcctcaaacctaatctccagcttgtaacattcttctccttgccatacccagaactcgaccctacccctttcgggcataacccatgctcgcacactctcccaagactccaacacgctcatccgatcctccgttcgcatgaaacccacgtgaaaaactccgtcgtcgaggcggtgtttggggtcgatgggttgtacgacgatgtcgtcgtaggattcggagattctgaggttctgggactggaaatagagttcgccttggagggagagataataggctttggatttcgcaaggagggtagtgaactggacccggccaaagccacgggacttccaattcttgcgctcggtcatgatttcgagggcgaagactgagtcaggaccgagtttggactcgaggaaggccaagaggtcctgagctatggcagtttgaggaatgtttgagactcggacggtggttctctctttgtctttgtcttcgccttcggaagccattgttgagcgagagagcttgagactgagagagtgagtgagagaggaactgaagaaggaaagtgagtcagcgttcttctttacaagaaaaagtgagtcaaagtgggaaaaaatgggtcctcgatttttgttattatatttataatttaaaaatgttttaaaaaggagaaatttgaattcctatacttacattacccaaaaaaaaatttcctaaatgcaaagttattaaaattggtaatatatgaccattttaccaattttcttaaactacccctctcatttgaaatcagcctctctcatcctctctcttcgtctctctcagccgaacaccaaacccacaccaaacccaaaagaaaaaacccacacagtcggccgaactcacaaccccaacgttgagcacacagtcggaccaactcgcaacccaaaacgctcgcaatcccgacccactccgacgaactcccaaccccgacccactccgaaaatgtcaaaggtatgtggttttttttt

SEQ ID NO: 65071 - DNA, 1857 bp, Cannabis sativa
  modified_base (43)..(48): a, c, t, g, unknown or other
tctcactaggtactcaaaccatataaaaagcacaagtataaannnnnnttatttttccttacctcaactctattgtaattaactcttacgataccttctagcctctcaagatttcgaagacaccaaacgatgatcagataagagtggttgatccctgacttcgaagctcttaaggttaaaactatgatttggtgaaataaagagggtaatacttttgagagatgatgagaatacgataaatatatggctgctagggttcttaaattatctatatatataatgagtctatacgtatatatgagatattgtataataggtttaaattttaaaataaagatctaactaattagataaaaatcatgttaatataatttaaattttgaattttgaaataactaatttaattcctcactatttattttcaccatatatcactatttaatatatatatatatatatcatatttcttaaatgccataatggcgcacacacacgtgcactaataccataatgcataatataaatatatatatctataacatagccaaataataataattattataataacaataaaattgtatcacacacttaatatatcaaatatcaatgtatgtgtataaattgaatattacaggtacacatcctagcccttgtttcgatgcatcgcagtacaccataacttgtccttgtacataatacaggagcttttattagtttgtccttaagtgtttgggagttttcctcacacttatctaaccacacaaacttttgcatcttccgagttaagttggttagatgagttgctatcttggaaaattcttcaacaaaatgtctgtagtaaccagctaagccaaagaagcttcttacttcatttgcagtcttaggcgctggtcagcttttgaccgcttcgatctttgaaggatccacttcgaatccatctttggtaactatatggcctaggaatgccaccttctctaaccagaactcatatttcttaaattcgctgtgaagttgggtgtccttaagtcggttcagcgtgaaccttaggtatccttaacatccttccactagttgaggtacagagaacgtcatcaacaaatttgacaataaatttttcgacttaattttgaacactccatctttggggtgtttgactaatttaagaaggtgtcacaaatattcttagtgcctcgcagtgttttgggtgccgctttagaggctaaaatcattttatacttcttcttcttggtgtctaggtttaaaatttagtcacgtcatcagaatcattgttgcttattcattttgaaagcttattcgtaagtagagaaagaaaatatctttcttattcattttgttgggttcttaatgcataaagaaagtcaactttggtcataagagacgatgattaaacagccatatacacaaaatactatttcatcgaaactatcacattttaaagttttaatacaatttattcaaccagtctcactaagtactcaaatcatataaaaagcacaagtataaagtataattattttttcttagctcaacttcgctgtaatttactcttacgataccttctaggctctcaagaattcgaagacacgaaacgatgatcagataagagtggttgatcgctgactccgaagcttttaaggttagaactattaatttggtgaaataaataaggtaatacttttgagagatgatgagaatacgatacatatatggttgctagggttctaaaattaattatatataatgagtatatacgtatatatgagatatcgtataataggtttaaattttaaaataaagatctaactaatcagataaaaatcatgctaatataat

SEQ ID NO: 65072 - DNA, 1310 bp, Cannabis sativa
  modified_base (743)..(743): a, c, t, g, unknown or other
caagttttctaacccaaaacataagttaagttgacccatttataatattgttgagactccttttcttcaattaatattgatataatttctaggtcaaaataatatattgatataattttttcttcttagaattcacaagtaattaatatacagaaaattattattggatatatataatctgaatactaatgtctcatatatacagttaaatgcaatcgccaataatgacagttaaatttagttagtatgaaaaatatgtacttaacaattaataaaatatatgaccctaaaaaaattctcatttcttaaaaataagagtgaaagtaacaatcacaatataagaactaagaaaaattcagatctaaaattaaacaactctattttatcatgtggtttaaaattaaattataacattacttttgaggtgatttgttattttacaatatcaagtgattattatacttttattttacacagaagatctaaaatctaatttttttactgtaacaaagataacaataacgaaagaaggcaaactaaacttagttaattaaatatacatgtacaggaacataattgcatgagtaaacttaattaacaattcatctatacataatatatatatatatattgcacaaaattaacacacaaaagaaaagcatcatctagaaaattgttgttgaaataaacagttatgattatctgtaaaaaaaaaaaattatttttagtcacaaaaaaatttngactaaaagtaaaaaatttgtaattaattataaattattattctcatattgtgattaaatggtctgtggctaaaagtgttagtcacacaaattataatttcttataattaaatgtgtttttagtcaccatacttattgtgattaaaattaaattaataactacttgtatttaaatactatggtttaatcacaagtaattttttgttgtgattaaaaattattactaaaaataactgttttttgtaatgggatatagatagtacacaacagattgtacgttgataattgacttaccacaccgtcaatatatatatatgggtgtacttttaatgggtattagagtaatattaaaaaaatttgagtttttatgatttatttttctatttgattaaaataatttctcatttttacattatataagctggggttgttccatcagctgaacaaaaataataaaaaaaaagtttccggcaagaaaatgataaaaaaaaaagttgagtttgacttaaatatttttcatatagatattgttagggtttataaaacacttaagaaatatataaatca

SEQ ID NO: 65073 - DNA, 765 bp, Cannabis sativa
  modified_base (43)..(49): a, c, t, g, unknown or other
caaattgttttcaaaaaacaattttttgtttttaaaaacaaannnnnnntttttagttatgatgccaaacatacacttaatggcttgttcggtattaaggaaacctcaacaataccagaattgtgagcaacaaaattaaaagatttagaaagttttaaaagattacatcccaaaaaggagtacataagatttctacagtgaaggatataattatcaacctcaataatatcagttacaatttgagtaaacattctatttgagcatctcaacctcaacaacactacataaaaatcttgtgtagtctagaagtggttaaaatagaaaacttacaaaaatactggaatttgggttaatttttaaaaaaatactgtcacacggaaaagttttcaaaataacagtagaacaactaaaaaacactagtagaacactactgaaaacttaacacagtatactgcaatataaatcttataaaaaaatacagttaaaaaataaaaaataccgcctagcagtatttttgtaaaaaaataacaaaagttagtataccgtgtaaatttctcttacggcaacaagtgaaacaacttctcacaaaacttaaaaaatctttcataatacttttagtccataaacttatcatttgaaaattgatttgtatcaacaacttcattgtttctggttaaaactaaaaggtaaagaagtaactcaggccaagttttttaggtctagccttcggcataagtaggtcaagtctgtgcgtaaggccccctc

SEQ ID NO: 65074 - DNA, 624 bp, Cannabis sativa
cttataaaccaaaccaaatgtatatagggcgtttgggcatttggaatgaagttttgaaaataattttttttttgacaaagtgattaaaatcactcgtaaatttacgatgcttacgtctgccactagcactgaaacctccttgaacaaggatagctcatcgtctaaccacaaggcgaaggttttgaaaataatttaattataggaaagatcatgaaacagaatataattgtagaaaaatgtataaactgtatttggttatgtaggataatacgtaaatttaattatactgtttgattgagtacaaaaattttatatatatattaagaaaattaaaataaaaaataattttttggtatatttgtttaatgttaattatacataaaaatataataattattagtaatttacgacgtaaataactaagtttaattataaataaatacctaagtttaatttttgggtattaatacttaaattatatttttggaatcctgtaagtacttaaccgttaaatattaagttattatccttattttttattggtatagttaaattaattttttttaaaaaaaaataaatatttaatgacttgaaccaataaagaattgtcacgtgataatttac

SEQ ID NO: 65075 - DNA, 2620 bp, Cannabis sativa
tgaaaaactataatctaactatgtagttattgtaattaaggcaattggttaattatttagatagaaaaagctaatattaaaaaatataactacttgaaagaaaaatatatataagaataataataatgttcataccacgtgatctcaaaccaaaaaatttattcttatagggtggtttggtttcaatatttaactatcttttaagggtaaatcgataaaagattaaagtaacaaagataaatgtgttacacaaaaagtagaagattgtgtgtatgctaaaaatgcaaagataactcaggaaaattggacaataaaaccttaaaatcagaaaacaaaacctctaacttttatctttccatcctaccaatataaatattaaaaaaaaatgttaattgacatcaaaatttaaaaaataaatgaaatttgaataaatatcgtgacatatataaatgaaaataaattttatattgttctcaaaaggaaaattgcatatataaatgaaagttattttaagaaaaacaataattatgtattcccaaaacaaactaaattatttaaacaacttagaataagacattccaaagtttcctctagaagactctttaaaattgggtcactaagacttttattttcacacaattaataattacctaaaaataaattacaactttacaaatatagataaataaataaaaaaataaataatttgagtcaaactccaacaatctccaccttggctcatattctctaaattcacaactcaaaccatcaataaaaatatatatgcatcgagttcatacttttattgaacttcacttgaacacttgacttcacattcttcaatcgttgattgatgccttctttcttcaaacaacttctagctaaaattagagtttttttcaccttgtcacattccttcactctaactgaatgtcttttatgacttgactctaccttcacatctccacctaaaatagtcttccggctaatttattcaaattctgctctttcctacccttcacaactatcaacccacctttcttaatatagttatctcaccatgttttgtggaatagacacaacctcaattatccaaagctcccaaagagattaattcctccttcatgttggaacatatctcacattagtcagtgttctcacacaccatcaaacatcttcacattaacagttcctatgccaacaactttatagctagaattaatacccataaaaatagtacaaccatcatattccttataagtgtcaaagcactccttatatgtgcacatgtggaacgaacaaccaaatttcaaaattcaagagttaggaaaattttcatcaactatgacacagagaacatctgagtcactttcaaagccttcaccaacaacaatagtggaatctgatatgtctttgatgcttggtcaactcttcacaattctacctaacatgtattttttcgtgacaatagtagaactccacttccctctaagagcgtgaatgagcatgtctcttctgtcatcatatcttcctctcgatgtactccaatcacgacttaattctgacattgtcacaagagcttgatcagtatgagacatactacttggtattgcttgatactgtctatctccaaaagagcaattgacacctcatctatagttaaagtagtctttctaactaaactgtaatcactaatatctcatatgattttggtacagataccaacaaaataatagcttgatcattatcatcaattttgacttctacacttaacaaatgcgttatacacttattaaatctatttatatgatccctaacatcttttccttcaaccatttttaactcatttaattgcttcttcaaatataatctatttgttagagattttgacatgtaatgcttttttaactttttccataatttagatagacatgtttcattcaatacactatactttaatttaggagccaaacttgaatgaatagtgcttaccactttgcaactcctcccaatcttcatcagtcatactctcagtcttctttttttgtagtgcctttaggagtccttgttgtaccaacacacctttcaccgtgctctgccataaattgaaattgtccttcccatcaaaatgcccgatctcaaattttgtagaaggcaccatctttgacattttctatgttgatctgaactttggttcttgataccacttgtggagaaaaataataaactttaagcgcaacaaaataattaaaaaacaaagcaaaattatttactcgatttggtaaaattaccaaacccacaaagatagatttatttcacttatcacttcgaattacacagtcactatctcaatctcttcacttaaatcctaataaactatttgcttctttttcactctcacaacactacaaactcacactcacttttttttttcacaactcactcttcttcctcacacacacacctctctcacacacaaaacacatataattataaagttacaaaacttaggcaccaagacattccgaagcttcctctagaagattatttaaaacttgaccaccaagacttttcttttcacacaattaataattgggtaattagtaatttttccccccga

SEQ ID NO: 65076 - DNA, 966 bp, Cannabis sativa
tggcactgaggccggttaggaaagttaaatccaaacctgttatttctgagaggattaaagttgaaattacctctgctcatgctactctgattgggattgggagaaaaattgttgaacctaacattaggattaggaatcctgttaaattgagcagaagcattgctgagttgagaattgccacgaccaaattgcttgaatcttctaaatgcaagattagcttcagccgtggagtccagatcattggtgaccaagttggcactgagatcaatttctttgctggacttttcgattctcgactcagaagcaagaagtaatgcttctatttctcccacagtataattctcaacccttgtgtttaatgaaatcacaaaggtatcatactcacttggcagccccttgaaaatggcagcaacatgatctcgatcactaaggacttcaccaactgaggccaaaagatccactgtttgcttgaccttaagcagatattcattgagactcatcgatcctttcttcaagttctggagtttagttctactcaagaatcttggaagaaacctgaagtgtgaaatgtttttctaaagcattccagatctgaagagaggtattgcacccaaccattcgagttaataaaccttctgtcatggacgataacaaccaagataccagaagctgatcttgaacctcccattctaaatacactatattgaacctgtcagcttcacgatctgcctctgtcaagaattcagctggtggaggttctttgatatatttcagcaatcgattgcctctgatagccgcaagaacttgttgcttccatagcaggaagctgtgatcatttaatctgatcgagatattgtgattgaaaatcacaggttcttgatgtgttcgatttctcacagtagctccattcgcgcttgcaggattcggttgattggtcacaccagagtttgcaccagcattacccac

SEQ ID NO: 65077 - DNA, 581 bp, Cannabis sativa
caagagcgatcgatggtgaaattttctcgtgtccttgtggagattgaaatttcggatgaccctccgaaaaccattgcttttgttaatgaaagaaagcaactagttgaacaaccagtggagtatgagtggcttcctaccaaatgtgcggcatgtgcaaacttgggacacattgtagctaattgtaatagagatcttaaagttgtttggaagaaaaaacaaggagttgacaatggtgaattgaagaaaaaataggaggttaattcggacaaagaaccagtgttaaaaactgatgctaaacaagaggcaaacacaagttcgctggtgcaaaaaaaggcaggggaggtagtgccgagtgatgttaatgaagttgatggggagaataggtggataacccctcgaaagaaaaggctgagacaatttaacactgctaaagacatgaaggaaaacaatacaaccaacggtaacaatggctatgaagtgttgcaaattgtagcaatagaagaggttgtgcttcctaactctaatcattttttatggatgctttaaatatgttagggtggaatgttagagggatgaataaa

SEQ ID NO: 65078 - DNA, 604 bp, Cannabis sativa
agatttgagggaccgaacacgggtacgccaaaccctcgaacaaaattaggacgcaagacggaatcataagatttgagttccacttaattatgcctagttgcaattttgtaatggtagttggttgtttacttttattattgaaaaattgtaatgttgattacattgttaagaaatatctattttgccctatcatgttactttatctctattggaagtattgattgtaatcaaagtgaggatattttcgtatacatagaagttactttatctcattacaatctatatttacagggtcaaataaagcatcatatggaaatacctcaaagcaaacatcacctaactttgtacccttcattacacacaaaaataatttccatctttatagcaaaagtggttccaacaaattaattagcaaatataaaagatttctttattctaataacgtatttctacgtaagtcttcaccttcccagcgtattttaatacgtttaaagttttgaaaatacgtacgtcaaggtctgtacacagtacgtcacttccaaatttgaataatgcgtgacatgctgagcatatttgggtattatgagaacaaatgaaaaaatat

SEQ ID NO: 65079 - DNA, 2140 bp, Cannabis sativa
gtccaacaaagttatggctagaaaatcaagaatttaaggcaagataaaagcaagtatgagtgaacttaaaaatgttgagtgagttgcaaaagtaagtaaatggagaagaagaattccgaacttctattatatatcccaagggaacaagttacgtagtactactacaagtgttagaggttgtggtcttgtgtcaagtatttactattgggtgttaggtggtcccaaggtcagaggcagtggttccaatgtacccttcgtctggacgtcacgtcttagggacactttttatagttgtttttcttctttgttattatttttcaaatataattatgcttcttttctttgattttaggtttcgacacttaaaatgtataaattggtcaaatttcgaaaaacggtgatttataaaatagagaaaattttgcaagaaataaagctaaattttaagcctaaatttaactatgttctgatcatattttagaaaattaaaacataaaagttttagatctcttttgtagcttttcaacgcatcttgaatcagctcatttggagttgtatgtgaaaattatgtatattttactgagaggggtcgaagtaggaatagtttggtcgcgactaatattcgtggccgcgacgagcacaacttatggtcgcggtgagggactacagaaactctatttttcacttttttacaactgtcatagcgaggctattggcggccgcggcgccgactccgtacgggtcaaggagaacttcttttcttatttttcagttgaaaaactctatttacactactacaaaatactcaatttgcgtcggtcaaagcgtctcaccaagatggttgaccgaagcaataaataggcagtaattttaggcttcaaatgttaactgaagctaaaaataatacaattagcgttagttattaatccaatgccgaaagaagaaccgaggcaaaaaagggaatagtttgaaaaacatattttcctttagcttcggtttaaaagtgatgctaaatttattttgcttcagttggaaattgagggtaaaacttggccacaatgttttaatcttttcaccccccaatattttgagaagaacccctatcatattgcatcttcaaaattaaatcaaaccctagcacaaccccgccctcttcgaccctcaccactaccaatggtagtagccttattcaacctctccacccccagtagtagcaggccagtgacgcactaccatagccaacaacccgacgactcaaatagagtagatacgagtaaggcatttgtcttaaccattaactcagcatcactcttctctctctctctctctctctcatattctttttttttttttgacataaaacttcagatccaataagcaatcataatcaccaatcactagtcactagtcactatagtataggttaatttaggttatggcataccggtttaagaaacagacaagactatacactaacgaagataagaaactgacaagactatactgtattaactccccccctctctcttttggtgggagagtgccccaactcttgttaatacaagcataagttaattagccccatcacgcattattattaattaaggaaaatttgaatgaaagttttgaatactatttccaatgttgtgcttgtgctggtgcagacttcttatattggcgaggattattcttcttacaaagaatagatgtcgctgaatgaggtaggcttttcaataatttcacaacttccttcacaccactatgtagaagctttgatactccatctacttcagattcatattgttcgtaaacaaaaactacactgaaagcaaatgctagagctatgcccatagccatctctctctcatattctaattaaccaaacagagatatttcattttgtttttcgtagggttgaggatttatgcactgaaggccttaaggatttggcaaatagctttcttagtgagcttcgttcaagtaaaagttattttcaccagtttgatttgctttactttattaaagatatgtttttgaaatgcatacgatatgtatcaatgtggtagaagtgaatcagctttagagtactggttaaaactaaaaattcctttaaaagttgtgttaattaatttccaaataa

SEQ ID NO: 65080 - DNA, 766 bp, Cannabis sativa
tacttttatgtagttttcttgttgttttcgtattgttttatggaaaactgtaaaaatataaaaaaaaaattatgtaaacgtaaaaatataatttttttacaaaacaatgatgttttatgtaattattcctttttttaaagtatgctaacagttgtataaatttaaaagatatgtactttttatttattattaataatacagaaaaaaaaattaatttttttttaaaaaaaaactttaatacaaatatttaaattattgcattatcatttgatttttttttattttttaaattaaatattaatattaatatactaccgttttgttatatgtattattaatattaatatgcatacatatgtatagtaattttaatttttttaatacctctaaaattgcgggatttgggacctaagctcccatcctttgggcgaccatgcctttaggtaattataggtactactaatacttaatagtaatgttcaatctgtattcaagtttacgtgttcattttttaacctgtccctaaacatattaattaactatataattaatatcggtactaaacctgttcgaaatccattaggagacaaatcctctgataaaacaaggaagtttccagctgcagcgttcacaagtatgtcaatcctaccaaattgctcaaaagttgaatccacaactctttttgcgtcttcttgttttcgaacatccccttgaaaaccaacagcctgagaccaaaataagagccaaaatgaatatatatacatat

SEQ ID NO: 65081 - DNA, 556 bp, Cannabis sativa
tgatggggaacaagaagtggtggatttggtagtacatggaaggcgtgcctttgatcagctttttagaatttgtaagtgttttatgcctaagaagaaggaggccataatcgttttcaatttggttcttgcataaaggaggatagtccatacgtcaaatatttttttactttaatggatatttgggaatgtggacaccatcgcatcaattctaaacatatatggatgacaaaatcccaaaaacatcgagtgcattctgacaagtaatgagtataaaggacgggagtgaacatattatgatgagcgagaaaaaaatatcaaagagattgagcaactctttggtgttagtaagcaactagttagcttacatcatttgaagaaagaactacaagactgtcaagagtacgactgcctgtatgtgatgaaatttgttatagtagttcttggtaccattttggtgcctaagaccctcgcaataatcaatagtggttatatatgttggaaccagaatctagatttattaacaagtatgtttcattaacaccctaatatgaattct

SEQ ID NO: 65082 - DNA, 2064 bp, Cannabis sativa
taatataacaggtaatggtccccatttgcatcggtatcattttttttttttttttttcagaatcctaaatctccatcatcaagaaaataaggcttcaaaggtttttgatgcaaattggagatcataccctttttacaaacgatttaatagactccggtacgcttccgctattctctaatttattgtttgattctcacgaattaattaagactaaattcaaattttacagtattctttaacattaaatacatacgtgactgtactcatatttctaaataaaaaattggcaatataacaaatagcattacaccttagcccagaaagcatagtcaagcactatgcatatatgatggaacccaaagtgggagtgcctaggcaagcactataaatatgtgatggaacccaaagtgggaagcactatacactcaacctcattaagaagttttgataacgtatatatatgacgcaatatataattacactagtattagtaattgagttagtcaatagtcttggcatctatgtattttcttgagttctaattcacctcatattgttccccttcccatattgacatcattttccaccacgcgtaaatgtccactaactagtgaaatgatgtattcgtataaattaggtaggtaggcagccattaaggaattcggtgaccgcgtatagcagcagtcgatacataaacattaagttgccatttgtggtccttgtccctttcaaaagacaagaatctatatgaaaatgaaatgtgtatggatgtttctttcaaggtcaacaaaatatattcatgccgtctaaagatgataatatgttttaatttgtcatggtgattggtatagtgtgaatttttatcgagaaactcgagattaggctcccgtaaagaagacacgtggactcactcttttcgaggattgctgagccgttagaaagagatcactcgagaataaatctcgcttgaaccaaacttagcgaggtgatgtgaccttgatagagtcaagtagcattattatacctcgcatgatgtaggaccaagaaagacgtgttcaagtctcgcatataccaagatatatgcgatgtctatgaaaacttctcctacgaactagtaaagatcgattctttgtttagcgagctggtccaaatgacctatcgtgatcgatgacccgataaggactcgcacgtcttgagttgtcaacacgaacaagatattggtatatgcgacttgattaggacacatatatcttaacacaagactcattagtcctacacgcaccctaggcccgcgagcttgtgcgaggatatgaacagacaactcgcaccatagaggtcgcgtacgttactgtatttagtaaaacgaattgaaactgtcttttatttatttcatttacgttttccttaattttaatgacgatatttaatgtaaaatggttcagtaattaattaagtactgtgtaatccaaaagacacttgctttgtatatagaggagtgacccaatatgaataagaacaagatagaattatttgcaataatagactaagcagaccgtgatctgactgaaccactatacttctctcgtgttcattgtgtattagtttttccaatttgtctgtgtggccccctttgaatactcgccattctaagttgagtaatcgcgctttttattaaacaattacttttttatttttttttatttggtgtcatcaaaattcttccaacaaatcaatccacaatattgtggtcattatgtatttaatatattaataatttactaatatacattttattcttcaaataaccaaacaataatgaacaagataagcaccctctaataatacataacagtaatataaacaacctccaatttcttttttataaaaattatatatacataattttttttttaaaaaaagaactactatcaactattaatataattttttgaacatattgtaagggttcatttggtacgctgtattgtaatgtattatattgtattgtgttggattgtgttgtattgtattgtattagtattatttaatacaatacaatgtttg

SEQ ID NO: 65083 - DNA, 1660 bp, Cannabis sativa
aaatttaacctttacaaaactcaatttgaattttttatgaattagtgatgattttttgaatttgactaaaaatatcatgtgcgcgcgcggaccagctcggcaagcacgcatcttcagacaggtgcctgactgaggttactcagacaaggccttgtctgaaagccttttcacaccgagctccctctgccaacagaggctacatgcagccttctccctcgctcgtttcccctcttacgcgcgtgcaggggcatgcaatgcatacccatgtgccaaaaatttgttttgtgatattttggactttaaaaaataattttttagtgaaaaaaattcaaattttggtagaattttgtgtagaatccaaattttcaaataaaaatctaattatttgaataaaattaatttttattatttttttaattaattaaaacttgttttacatattagtagcgtttaaatttaaaaatttaatttttgcacaaactagccttatggttaattttaaaagttttgattatttttgtttgttttatttattttaattataagattagatattacttattttattattgaaatttgaaatgatattttttgatattaaaatactaataaaacttaaaaataatctagttagaattttaagttggctaaccatatcagttttataaaatttgttattttaaaatatattttattaaattaaattataagattagaaaaatgttaattttgacattttatcttattagatatttatttaattataatttatttatgacaaataacatgaaattttgaaaattttgttaattttggtttgaatagaaattttagtgtttggtaaccataaaatttttaaacttaggatattttgttttatttatttattaaataaaattgataatatcctaaccatcaaatatcttatttttaaattatttatttttgttgtatttaatttattaaattataagattaaaaatatctaaattttaaattaagatattgtattatattatcttattagatatttagttgatttaaattattttaataaactataaatttgaaaaattaattagatatttgaattttagttaaaattttgaatatttaggaaatttgttagattttaaatatttttaaatattctctaacaacctaaattttaaattcaagttaagatatattttaaatattttatttttaaatagaaatatcttaacctattttccagatttatgttacatgtttattatgtttgattatttatttatttatttattcaaaattacttttataaacttattatttatttgatctaaattgctatgattaacttgttgagagatccaaggatttaattttaatcatactccaattgtcaatagatcttataaataatttgtaatacgtaaattttgtaatttctttcatctatgataaacctagatgcatatatgaagcccatttaagtttagttaattaaatgaactaggttgctaaaataaaatatcacatacgatagttttatttaggcccaattagcattgtgcttattgaatgaataataattatttatttaatggttaaattcctctaatttgggccttgtgtgagagttagggggccatagtaatgggtacgacatactggaccc

SEQ ID NO: 65084 - DNA, 525 bp, Cannabis sativa
  modified_base (159)..(163): a, c, t, g, unknown or other
cttattttattaaaatttaaaaaaatagagaagttgattaaataagaaataaaaaaaatacttatccaaaacttgattaaataagaaataaaataaatgaaatacttcccctactaattatttaaaagaatgttagtaatgacttttatttatttttannnnnttttttaatattaaatatataaagataattttgtcctttaaaatatatcttacaaaataacaattatatactataatttataatgaattagccaaatgtaatgaattacaaattcttaatctcggacacaatcgactgattgacacattccctttttggttacaaaatttgacaagtttgcaaattcttgtactgcgttccaacaaatttcatggtccaatatgggatccaaacaagtagatggctttaggaaactacagattgttgatctctctttcaatcatttcaatcatcagattggagataagccaagatcgatgtacatggatgaggatgaccgtagttactaccaagagtcgcta

SEQ ID NO: 65085 - DNA, 1640 bp, Cannabis sativa
aggttttagagagactctcaatgaaaataccaaactgttaactcagaatttcgttaacacgaacgagagttgataattaatgttttgtatttaatgtttagtaaatactatatattttatatagatatattataatatgagaggattttttttatgtgagtttgtagctaaaatttacatactctttgagtctatctttatttctattgttctttatagatacaattgataaaatttcccttaattttggaaaattagttgtccttcttacagtgtttgatatgttatttataggagtaggatagtagttattttttatctaatgtgtacaatagttataaaatgtgaacatttcccacgtttcatatatttcaactggtaggtgggaaataacatgtaaccactttcattttaaataagataactgccttatttgacttggtctttgtattctgtatcatgcaattatcgaggcgcttgattgtttgatgtatggtgcttggggaatacaccaacatttagatgtgtgtttcgggtaacatattctttagaaaacatattgattgtatttttgaggtgatgaacttgaataagcttaagcaaattaagcctctcaatgttaacaatgtcaaccccgggaatgttcctaaattccttaacaagcttagcatctttagtcgtatactaggaatgtgttgagcgtcttgcacttaatgttgcaagtttatgctttaccccgagaagaatgtgtatggacttcatactacgatgagactatttatacctcgactctttaattaactgagttaatttactcctttcgtcgtacacatgtcatgtggccaatctcattatttaccgctcgaaatatgagtgtaactttaccaaaaaatattaaatttttcttatttttattttgaggggtacgctgttatcaaagtttaggaagcaaaattgctaattacaaagatacatatgcatttaaacgaaataatgagacataacctaatagaaggactaaatttctgtaaatgtaaaagttcataaaaaatttttaacaagccgtatattttaagagacaaaatcagaaagtatcaaaagattgctaattatttttattttacttttacttttatatatatgtttgaatgatgtataattttattttattttattctaataaatttaatatagttttttattttaatttttgttgtatgaatatttaaaatatattatttatgaatatgagatggaaaaaaaataaataaaagaagttagcaaagattaaaaatatatattttatagctagtgcatacttgagggattaccaaactgccaacaagaatgatgaatctgctcaccttgcctctgtctcgtcctcgccatcaacttcaatttctcagcctccgaaagccacacaaaattggttggctccaccatcaggcaaactgaaacttaatactgatgcagcctttgacaagtctaatggagttgtaggtatgggtgcagttttgagagattctactggttctgtcattgctgcttttgcaaaacctattcgtagctattttaaatcagaggagatggaagcattgtgtttggccaagagtttacaatggttaatttcactcaatttg

SEQ ID NO: 65086 - DNA, 1361 bp, Cannabis sativa
ataaattgccactccactgtatcatatgccttttgaatatccaacttaatcacacatcctggtttgttggatttcctaccataatccctgatcaaatcttggccaatcataatattgtgcccaataaatctgcctttaatgaagcccttgtgaatgagaaataatatcagataaaactaattatagaactcaaaagcttagttgcaattttataaatgacattgcaacaggcaataggtctaaaatctttaatagtattaggaaattttaccttaggcaccaatgtaatcacagttgagttgatttccttaagaatcatgccattctaaaggaaagaagagacagcttggaaaatggtgtccccaatggtttcccagatatcttggaaaaaataactagagtaaccattagggccaggagactttgatccagggatgtcaaaaacagctttcttcacctcgtttaatgtgattttcctcataagcagctctgagtgttcctgagataccataggatccctcctcaaaatgcctttgaccactgatttcctattttccattttagttcccaaaagacttttgtaataacttagaaaagcctcctgcaccagaaacgggtcattaactctttctccattttgttgctcaatggagaagatcctattttgcctcaatctttgttttatgctagcatgaaacaaagttgtgttgttatctccatcatgtatccatgccatttttgctttttgtttcaggaaagatacataatcctgctgcacttttacatatctttcccgagcctccttctcttcattatgcagctcaaaattcaagggactttgctgcaatctagtctggatgttgtccaaattagctttagctgtagttgtagcagcctgcaagtccatgtatccctccttgttgatgtccttcaatacccttttgaacaatttcattctcgagaccacctgaaacatctttgaacccctataggctgtttccaaatctcttccaaactcttatcatacttagaatgagatttccacattctaaagtatttaaagggtttgatcccaccattcaaatgaggatacaaagttaggatcctaggacaatggtcgaataatccctcactaagaaatgtagcctcgacattctcataagcattcaaccatgtctggttagttaaaatcctatcaatcttagagtaaatttgatcctccccatgttttttatttgaccatgtaaagaaattcccactaaacttcacatcctccaagtgacactcgttcacacaattaagaaaatcatcattaggatagcttttaacccgatgcgcaattctctcttccttggagagaa

SEQ ID NO: 65087 - DNA, 1167 bp, Cannabis sativa
gaaccgtctgaactaaatgcttttacatcaacccgttccttcaagtaaaattcaatttcaatgatcattaacattagaaaaatttaggtaacaattatttccttttctccccttaaagttcaagcagggaaagaaagcggaacaaagaaaagttaataaacagtataaatcttgcacaccttcttttctatctcaagaagagatatcccaggactgaaaaattctgaattacgcatagcaacagcaatgccaacccttgcggacacaagtgaatctttttgtgattgaaaaagcataaccccactgcgtccagcattatcttgtggagaaagcatgcaaggaaaaggactagtttcctcaattacttcaagcacttgaatgtttcttctttgaacagaatgcttcctttccaacgagtttgtaggacttttcaatgccatcttagcagatttgactgctctagaaagtatttgggaatccatttctgcactgtccaatggctctacttccaccactcggtatgccaaagggagagatgaattattaactatccagtatggaacaaaaaaccttattgttttaggtgcagcagtagttcctcccatatcgtgctcaattcttacacgcagtctcctgcaaattgtgatattttaaagatgaagatcaaccaacagagaataataatgataataaatcttggttcttttttgtttaaaaagagacagaggccattgtcttagactggcccctacccgttacatattgaaagccctcacttgtggcggaaatattgattaatttttttagacatgttgataacaaataatcaatgtaagtggctgtgagatctagaaatcacaatagaatgctgaagaccagttgcacaaacatcaaaagccctgtggaaaaataagaattctcatgtttggattgaaacatccaattcagaattcttcttctttttctttttcttttttttttttttaatttaaattttgagcaattataaatatgtaaatatgtacaataattatgctaaaaaaaagtctcctaccaaatttgtggagaacatgtttccattttttttgctactatttttcgacataaactttttccatgctaaaatctacgatccaaacaagaccaaaaggaacaaaaaacaaagta

SEQ ID NO: 65088 - DNA, 1618 bp, Cannabis sativa
taaaaaccccaaggagaagaacgccagaggtgaaaggccacatcacaagagaggaataagtgttccatagtttcttccttggttccacaaagagggcaactagtattctctatgtggaatcttttgttaatcactgatcttgtaggaagcgcattagacaaaatacaccaccacaggattttatgccgttccagaattttgctattccagagcttgttccatagcttcggggcaacctcacactggggggctctatccaacgcttgaacaagataagcagacttgcacgagaatttaccattgctagtttgagtccatatccatttgtccatgccattgccagagggttggcccccttttaagatagctgcaacagtttcatgatcaaagttttcattcagtttatccacgttccagtgaccattggatagtaacagatcagacacacggttgaggttattcgcacctcgcctgcttggttttggacaaaaacctttaaagtggggaatccatggatcctcccaaatagcagtagtctctccattagccactagtttacaggcacctctcttcagaatagagttggccttcacgacactcttccagaaccaggagtcagagtttttatatttatatttgagaaaatccttccctcttaaatatttagtcgttaaaactctgcaacacaaagattggttaccagtaaggatattccacccccacttagccagaaacgccagattcatttctcttgttttccggaagcccaggccaccaagagatttaggaaggcacaacttgtcccacgcctttaaatggagcccatgatttcctttctcaaatccccaccagaagtccctaaccagcccatcaattcggttgaccatacgattagagaggttggtggtctgcatagcatacataggcaaagaaagacccactgattttatcaaagttgcacggcctgcctttgacagagacttagccttccaaccctggagtttagaagtgagattatccagaataaagttgaagtcagcgtccttttgtcttgaacggaacaggggcaggcctaagtacttgatgcacccttcgggcgactcaatccccaaagtttccttgatttctcttctcatactcgacggggtgttcttactaaagaatatagaagtttttaacttattaacctgttgccccgaccacaaacagaatttctccagacagttccagaaaccattaacctcattcaaattggctctccccatcagaattaaatcatccgcgaaaaaaatatgggatagaactggaccacctctacatagctttatgccatgaatgcttccttgcgacagggcgtcttgtagtagtctcgaaagaacttccgcagcccaaatgaacagatagggcgataaggggtccccttgccgaagaccacaagtggggataatttttccaacctgacccccattcagacagatgtttaaagtggtggtggagatgcattgcgagatccaaatccggaatctcactggggtcccacagcactccatcacgtggtcaataaatcgccagctcaggcgatcataagccttgaccagatcaattttaatagcaaaga

SEQ ID NO: 65089 - DNA, 987 bp, Cannabis sativa
ctatatagttttgagaggatgtcacaacaaaagattaatgtgactaaatctactactttctttagtagaaatgtgagtggtgccatgcgaaaggctatttgtgcaattttaaatatcaataaagctggggagaatagcatgtacttgggtctttggtagaaataaatctgctgtcttgggtttcttgaaaaagaagatgtgaaaagcgtatacaaaattaggatggtaaacttttgtctcatgctagcaaggagattttggtttgcaatgtggctcaaagccttccaacttattattccatgagcattttccttctttctgtgagaatgtgtcatgatttggaaaagcttatggctaatttttagtagaagtcgtctacgaattacttttagggcatttcttggatgagttgggagaggatgttgcatagcaaggaggttgtggggatgatttttttaactattcgtgatttcaacctctccatgttgggtaaaaaagttggtattttctgactaagtctgactggtttctaaggtgcacaagacccggtattttaaaaatgagaactttctttcagcacagcttggtaataatctaagttatgtttggagaagtctcattgaagtgcaagatttggtttgtaagggggcgagaaagggtattggtaatggagaggagacccttctattttatcaattgtggcatcctaatggttaaattttgagtctagttagtttagatcctggtctggataatgcaaaggttactagtctttttatggtgggtgagaagtcttgggatgttggtgttgttaaggatttgtttgatgagaggctagtattcttggtattcctctatctaatttgtttgaggaattactggcattggggttttgactcttttggaggatatacagttaagagtacttttaaattattataggcagactgtgatggtaacgtagatggtaatgttttgccattttgg

SEQ ID NO: 65090 - DNA, 2277 bp, Cannabis sativa
  modified_base (2230)..(2236): a, c, t, g, unknown or other
cataaaagaaataagtaatttattagtaacaaccaataaaatatggtgatcacaaaattttgttatggttttaggttttatgtctttactcctggcatcttgcttgctattcttgactttataattacttctcttattttgaagtactcatttggttttttagtttcaattcaagtggttttagatttatgcaatttaatatatcatttttacttaaatcatatatacatgaaagaatggaaccatatgaatatgaatgggaagcaagtatgtaataaacaagcttcctttaataaataatatgtttggtaaccacatctttcttttttgctattatgacattgaaacaaaataattgtataaattaatttatcttttttcattttatccactaccttcagtttgtgctagttatgtgatcaattagtctactttactttttcatcaaagtatatgaaactagctaaagtaagtgagtgcactaatgtgaaattcaaagttcaagttttgttattttatttaatagtagtttaaatctgtgtatatgtgaattgaacgatttgtagtagtgtggtggtggtagtgcatggtttagattttttttataattttttttttaaattttgcatcagttcataatcgaagcaaaaagctaattagcgtcggtgcactactattttcttcagttataaactgaagcaaaaaccttttatttttgcttcggttcataacggaagcaaaaaaactaattagcgtcggttcataaccgaagcaaaaaatatcactatttgtgtttacggctatagcgtcggttacaccaactaaagaaaattctttacgtgtctcttaaaaatcgaagcaaaaagtcttttttgtagtagtgcttatgttattgaatttttttttttgtataacacgattttacactaaaccctttaattagtaaagtttagcacaataattataaaaaaaacactgtaccatgcctaagctagtagggcgttataatttggtatcaaagctaccagtttgtactctgaagatcatcaagatatgtacaaacatcattatagacaagcttgagtcacggttcagtaagcttttatatgctatattaccatattcagttgagcatgattagaaaaacatgataggaagcatgctagtagttttatatcagaatataagcatgtttaagtttccatgtatgcagtggttagattacaatttttgatcgctgcatgataggcctgacttatggatttgtaggctcgtcctatacaatggacacccgttgaaacacgagaagtcagagtgaaatggttgaggctggtggtggtcggggaaatcagaatcctatcatccccgtggctgaggtagaggtcataggagggcttatggtggtgatcatgaaaacccgccacaggcttcgccagattaggagtagaggtatgcagagattaaagacacaattaagaggcaggacgatgagattcgaaggttgagggagcatggtcctcaagttgtacctcctcttcaggtacctattgctccagctccagtgttaccaacataataacctatttctggtaaccgaaacgagccactgtatgaaaggttccagaagtagggacctctagtctttccgggaggcccagatgtgatgaaagttgagtattggttaactgctctaaaccaaattttaaactttatgggagtcaccataatgatcgggtgacccgtgctacttttcagttctaggaagatgccctagtatggttggagttggtgtctctcactcgggatgttattgtcattacctgggatgagttccaggacctatttaatgctaaatactacaatgatgcaacgtgtagcaccaaaaagagagagtttactcaattgattcaggaggaatcaatgtatgtaactgagtataccattaagtttgaaaggctcgccagattggctcatgtattgtacccactgattttaggaaaaaggagaagtatttggctggattaaatgcccagatcaagcatgatctaatgatcactactcacaatactaatacctatgcccagatggtagaaaaggcccttcgagccgaggtggctgtgcaatttattcaggattaccaagggactcaaagtgttagtggggtcattacccttcctacttccagttttggtaggggtggtggtgattctgttgggttttataccctaannnnnnntccatttcaatgtaatccctattcttttaaatatcaataaa

SEQ ID NO: 65091 - DNA, 535 bp, Cannabis sativa
ttttttggtgtcctaaatattggtggtgttattcttgtcttgaaagatggtggtggtatgtctatggcagatgtgttatagtgggttgttgttgggttgaagatattgggctctgttatttttattagtctatacattgggcttagccattaattatactttgataagtttatcaaattcatatttgaatttttgaatttatttccacctggttaggtccatctaaactaaaggagttattatttatcaagtatagttaatatgaatatgcaaaaaaactaccatctctaatcctctaaaatttatgttaaacttagtctactatttttttttttttttgaaattaaactcttactagcaggaatcagagtttaatacaaatcaataaaaaaagatgaataattctcaatctaagctaattcaccatccaccctaagtgcatgcacaactaattcatgagaaatagacatgaactagggatgcctcaggaaaaccggaaagcaaactaacaaaaaaaatctgaaaaacctaactc

SEQ ID NO: 65092 - DNA, 1329 bp, Cannabis sativa
cagttagtattgttgtgtaactctgttgtagctttaataattaataatatatttatatagtatataatgtaattagcaaaatgaaaatataaaataaaaaaatatgagtgcaaatttatatgttggtgcatgatgaaaggtgtcaatataagttctctatacgcttatgcgcaatattattggcacatattatgtttgttgtagcctatgtcgtgccaataaggttcaattgtaatgttaattaggatttttgttgcctgaattttaatatgtaccaaatcatgcttcttgaattttttaggttgttaaaaattctccctgaactattgaaattgttggatttaacgacttttgcccaattttattagtgaagtttgacgtggatgaaagttatgggaacatgattttgtacttgtcaaaatttgaggagtacaatttggtagatatcgaagtttcgggtgagggagggaggagcacgatttagtacatggattatgaccacataagtaaaattaaacggaattggacataaattgttaaatctaacaatttcaatagttcgggggaaactttaacagtctgaaaagttcaagggtatggtgtagtacatgacaaagtttgggagacaaaaatcctaattgtaaacacaatagttttttgtcagtagatgtgaacagtcaagatgaattgttagataaatcagaatttaggcagatgtgtcaaaatcaattccttaggattaaatatggtgtagggctgggacccggcaataatctgcttctgcatatggattgttattatcctagttgaccttgttgtccaattctaattcttatcccaataactaagatcacatgcaatgctatgattagatatggacgtctgttacataaatataatgcaattatgattagatcattttatcgggaaatttagatacacaaccaacaaacttctcttgagtgtaacatgcaatgttttgaaaggctaaaacgccgtctcgaggcgcattgaggcataaaaatacacaataagaataaacagttcacaaaacatcatataacataaatttcatataacaacacataattccatatcaaagtcataaaatagaagtcttaaaatcatagctaatataaggttcaaaataaaaattcttgagaaagatggaaggactgccttaaggagatggactggttgtttgagattaaagagaagagagaggatgagacctagttgtgttgctacatgtgtgactggagaggaggaaagcttgctgtattgttgtgtgtgttcagagaagagaaggggagagatgatgtgctgcta

SEQ ID NO: 65093 - DNA, 826 bp, Cannabis sativa
  modified_base (660)..(672): a, c, t, g, unknown or other
  modified_base (774)..(789): a, c, t, g, unknown or other
tcaaaagataataacaataataacttaataataataataatattaataaaagattatctcatcattttttggctactaagaaacttctaaccttaaggcatttggtcaacccaagtaccttagaatatctcggtaattctataatcaatttatctcaacaatttcattagtattactaactaaatccgttatgacatttttggtcttcgattgggttttcaaggtcgtcgaacttgaaagtatttttatttcacaaatagcttacattatatccacgtattctaaataaatcttcataattaataaattacatttatttatccacttataaaaaaatttataatttatgataaagtaggttagcaggatcataatcctactcattactacctaattaacccataatatataataaattttaattattcataattagatttctgagaaattacataaccgaagcaaaaaaaaaaaaactagtatttacatttacggctataatgtctgttacaccaactgaatcaaacaccttattatggcaatctccactctagagaaaattaactggtcaaatttttattttatgttttagctaattaagatttttaccccaacttttaaggtcgttaaaaatgcttcttgaactattgagattgttgnnnnnnnnnnnnnttatccaattttagtaaaaaaagtctaacaatgatgaaaattcaggggccattttttggtatgtatcaaagttcgagtggtatgatttggtagatatcaaannnnnnnnnnnnnnnnttagtacataaataatcattgaaatagtaaaattgaa

SEQ ID NO: 65094 - DNA, 687 bp, Cannabis sativa
tatatagtaaatttacaaagtattttttagtataaccaatgattaaaatcaaatggagattaaaaacaaagtaaactttaagaatttataattttaatattaaaaaaataatataacatggtgtgaggacatacaacttttcttcttctggagccttctagcatgttgttcatcctctcaactgagattttggtccctctcatggggaaatcagtccacccttccatgtttagtggtggtttcaggtgtttctctcctatttgtaaatcatttccttctgtttctctctcctttttgagcatttattactctgggggatattattacatcccttcccatctcattaaactccctcagagcattaattgctcacaccttaaaatttcgtcatctctctccctctttaatcatcttctcttgtcttctcctcatttattacagattcttcaaatcctccctctgcaaaacacccttgaagatcgtaagatggaggcgggcgactggacttccgaagctcctcagcttctcttcatcattgcttcttcaatggatgggactagggatgtgactagggcggcgatgaggaaaattctcaggggattatggtttttcctatatatatccaaaccaaggtaccatttttatcacctctttctgcctgattttctttttttagcctttgttttt

SEQ ID NO: 65095 - DNA, 661 bp, Cannabis sativa
aagactaatgtggatgttgggacagctcaagtggctaatgcttaccagctgttaattgactgcaatgaggatggccaaactgaagcagaagggcaaaggtttgattgttataattcacatggtactgctggttttgctagaaaaaaatggctcggctggtgcatacaatgaaaggggaattatgattggcaccaacaatgttgtaacagtggggaagacaagatgagggggagatcctcctcttggaaatggatagaattatatgttggaacgtccgagggatcaatgaccatgggaagcaaaatcaagtcaaaggcatgttgcatgctaaaaaggctggtcttgttggtctcctcgagatgagagcaaaggcgtcaaagcttggggtcttgtacttaaatatattcaaaggttggtgttttacctctaacattgcttggcatgatggaggccgaatagttgtagcatggaacccctctagttttttggtgaacatattatccatcttcaagtctccactttggatggtaagtctttctttgctacttttgtgtatgctttcaacgatatagagggtaggaaactattatgggatgatttgcaaagtttgatcacccttgaaccatggatgattataggtgattttaatgatattttgttc

SEQ ID NO: 65096 - DNA, 1156 bp, Cannabis sativa
atcaactgaagccgaagtgttggatgcatcttcagagttggaattggcagtagcatgattagcagctgcttttcctttttcttgcttctttttgtctccataaccaggtggaaacccatgtaagaagtagcatttttcgaccaaatgacctggttttccatagttggaacatgagggtcttggtttcttgtttcttgggggattggtgggatttgaaggcttaaccgaagaggcaaaagaggggatatcagtattgcctaaggttctttgacgttcttcttgaacaaccatggagaaaactcttgaaagattgggaatgggctcattaagtagaatttgagccctaaccgatgcaaatgactcatttaaaccagtcaaaaattgtaaaacttggtttttgttatagtggtcaagaaaagctttcatagctccacaagtgcaggttgtgttaggttgaaactccttcaattcatcccatagagatttcagtttagtaaagtaggaggtgacggactgatcaccttgatgcaaacgagttacttgtgtttgcaattgaaagatgcgaggaccatttgcctcattgaatctttcagcaaggtcttgccacatatcggtagcaagatcaaagtacattatgctttgagcaatttcagcagagacagaattaacaagccaagacataaccatattattgcaacgagtccaagaattaagatgattaccagcagctggccgaggcagtgatccattgatgaaggttgtcttgttttttgcagcaagagccatggtgatgcctcttttccatgattggtagttagtgccattgaggatggtggagaccaatacaaggcctggatgatcgccagaactgaggtaatagggactcgaaacgtcgtcgatggtgcctcgatcgtgagtggatctggaagagggatctggtgcgacgggagaaggagcagatgaatcaggaccaagctgcgatcgaggccttgtagattgacgaggggcgacggaagagggaggaatcgaagcagagatgtcttcaggcagagtctcggactggtgatgctcaagatttgatggaagaatgccatcttgtgatctggtagatggtctggccatggatgaagttgtgtcttctgataccatgagagaa

SEQ ID NO: 65097 - DNA, 809 bp, Cannabis sativa
tgaatgaggttccatcccaaaaccaattggcaatgggaggagtagcccattcctcttatatattctattatctttccacacattgacaatgtgggattctctaacatgtcaatgcgggactctctaacagaaaggaactcccctttgtcaacaaaggtactgacgacaacctcccctgttgtctcttctctttctctctcaaagtactagggtcttgccattgtcgaggaccaccaatctagagccgttgtcgagaaccattgtgtagccaattgccttctcctttttttttttttaaaaaaaaaaattcaaatatgatatgttcaaccccaatcaacaaaccctattccttgagtttatttttgcaatcttgatctttctctatttcccgtagtcgcaggtgttgcaaagggatgtgggtgaacaggtaagcggtcaggctatacgctgcggtagagcgcggaggggccaacgtgtgatcgaccggcgtgcagaggagccgactacgcttggtcggtgggcgaaaggccggagtctcataatttactcaatatcttgtttggaagcctttgcaccactttgcaaaaattacattacccttgtgatattcatgttgatattattttgtatctaccagaactcttcaataaattctaagacttgtgagatcacaaaatcacatatttacacaaactttcaccaaatcactcacaattaaatgatcaaggcatttgtgctcaaaactggacatatcttaatcaaaataaaactagcacaagtattagtcacaagctcaaacaatatttaca

SEQ ID NO: 65098 - DNA, 977 bp, Cannabis sativa
tacttttatcgatttaattattagtttgcatttgttatatatcttcattttgtatttcacatcaagacagagtatttttataaaaagaaacattgttttttttttgtaaggttgtaaaaaagatgcattgaattctcgtaacttgtattttttttcagtctttcataacttcgattaaagcaggtggtgatttctcacattgattcttttacccttctgtttcttgttccgtggacaaaaagtaacatttgttttgtttgttgattttattatagctgtacaaatcagtgtgttgaaaatgactatccataaatcttaaattgtaacttgaacaacaaaacatgaagattattatttgaggaaaacatcaaaatatttatatttaatttacaggatggagaatgtaacactaaagacaacagcagggatagtgaagattgcagggctagtggcttgcgtgggtggtgttgtgactcttactttttacaaaggccctcacttgaatccatttctccaccatcaccccatggagtatcatcatccgcaacaagcacaccaacctcatatctcttctaacaaaacatggtttattggttgttcgctctttgtacttgcaacctttgcgtggtctttgttccttgttcttcaggtagtactatttacagtttatcacagaaaatacaatgtttcattttgtttatacatatactaaactcacacttttttcattgataaaataaatgatggatgaaattttgagaactaagtactaagagtctgagtgaaaacacatgtaaaagcctctgtaataaggagattttgtttcaattaaaaatacgtcaaggtaaccttttatatgatgtgttactttttttttaatttataataggctcaaatcttgaaaagctatccagaagggctaaggttgacaagcctactgtgccttacaagttctggtcagtgttttgtatttgcta

SEQ ID NO: 65099 - DNA, 1156 bp, Cannabis sativa
gttccttaccaatagtaacttacatatcttgcagctatacaagcacaaaagagcattccttatttcttgtcagacaaaaataacatacataaattaacaacaaggaagataggaaaaataaaagaaaaaaaaaagtgaaacttatgtctcatttccattaactcgttatgctataaaccatcaaagatacagcctggttacgaaccagaagttttgagtcttttgacacctcattgcacaccataataatcatgttataaaactaaaaacaatgaaacaatctgtaaatctaccaaaacaaactctcatatgtttcagttgaagacctttagtttgatttcaagatttgaaatagtgaaaacttcatgaatcttttcaaaaatgttagtgacctaaaacaaattagatgactgcagatacatttgaaatcatcccaattcagaaaaaaagagaagtatagaaagaccaatgtgttagctctcctagttttaattcttcacattgaaccactattagagatgggctaacttaaataatgtcacgatagcagtgttgatggtcagatttcttcccaatgaaagaaaatttcaataaagcaatgcctttaaaatgaagaactcgtctcatagagtggacatcgaactatctattattctatttaaatttggtgcttgtatagcattaaacatttctttttcatttaaaccaaagccaataatcatgttaattgttcatctgtacaacttctaatttaaattaggaaaatgaagtgactctaaaatttcgcgttcaccaatgtatcaaggatttaattttgctaaaggccatgtcgatcattgcacatagctcagaactaagtttatggaaacaatttaaacgctttactgttcaataccaggactaactatagtctggtactacgcaaagttttgccattctaccaagaattagaaaagcaattacaatccttagctcgaaacgtagaatatacatccatacagctacaggaatcgaaaatattacgtaatacacaattataagcctagctaaaccaaataaggaccaacatttcatgatcccaaaacaaatttcagaaacaataattttttaacccagcattcgaatagccggaataataagattttatagcacgaaa

SEQ ID NO: 65100 - DNA, 520 bp, Cannabis sativa
attataacttttggtcaagtaatggtaaggactcagcaattctggtccattacactggaatatgtagtatagatacagataaaatgtattagttggattctaatagtaaagaattaggttacaagttgaataattgagaagtacggaagtactcgcctattataattggcttgcaaggcttgtcgtcgctctccagttataattactaacgtaggtgtgtacttgtttcaattcgcttggaacaatagccgtcacaagcatttaaagaataattgtttagattcggtgttttagtcaattccaaaagttttaaacctttgttgttttagtaatttggtcaatactttgttgtacacttgccatagttgcacacgtggtgacgctgatctagatagaaatactaagctttaatttcttcttcaaatgtgcaaagcaatgtgtgcgttacatttttttctctcgacatttctaacaactagaatttattgttattgtcgaatgtttttatgatttgctatta

SEQ ID NO: 65101 - DNA, 1398 bp, Cannabis sativa
tgggtttcacaaccctaaaagaaacctgattaaaaaaaaaaattacatgtgtaaaatgacgtggactgcctaatggcagccacgtcatcactccgttactaaaatgaacggaacaagacagaataccataaattaagcattgtcaatagttcgaggggaatttttaacgtcaaaaatagttcagggggcacgatttagcaagtgtcatagttcgggggaaaaaaattacaaattagccaaaaaaaaaaaaatataatcattgtaacatattcatatatttcatttgtaaataaattttaaaatattcaaataatctgaataattagtggtattcaaataaaaataacatattacttcgttaaaaatattgttttataattagtttttacaactttttgaattataaatttactattataaaataatgaacctttaattttatattgtatagttgttaatgtttgaaactaactcgcacatgaatttgtatgagataaaaatattttatggttgtcttattaaaaaaaaaaatgactcgaaaataaaattgtgtaataaaataagaagacatttcttttttgattttttaagattataaagaaaaaataaaagaaaatatttatttgttgaagaaagattaacatactaattgggaggagaaatttgtcattttgtcatgtcaactcaactcatttttatttcattcccttctctcttaggtaaaataagtcaactaaattctatatctcaaccttaatgtaatttaattaagggaggccgaaattatttacgcttaataaaggttatagattacataagatatggctacaatgtggagaagttacatattttagttttttgatattaaaattttatattgaaaataattatagtatatttttttagaaaatagaataaaaagagaattaaaaaaaaaaaatcgactcatatctcccctagtatatatgatattttaaaaaaaaaaccttctttgaatataattacacttttcgaaaaaagaaaaaaatgaagtatgctgtatattacacaatatcatattatactagcagcaccatgtttaatcccaggtaggattcttacatgatttggcataccttgcataattacagatgtcaattctatttgtaggtgtgaaaataaattgatttttttcagtcactacaagagcaatataagcatacattcctgattgttacccaataaattaattaaacacaatgtgaattgttaaaattgatttgtaaaatggggcataaagatctctggtttcacaagatgggcatccggattccggttatatcatccctgtcaaaagaaaaaagaaaaaaaaaaccattacttgggaataagaaaaaaattaaaggatagatgtaacca

SEQ ID NO: 65102 - DNA, 982 bp, Cannabis sativa
tttcacatgtagagccaaagataatgtcatcaacataaatttgggtaacaaaaataccaagatttaaatggttaataaacaatgtgttatcaacaatacctcgcataaattcatgagaaatgagaaaagatgttaacttgtcataccatgctcgtggagcttgcttgagtccatacaattatttttcaagtttgtaaacatgattaggatacttggagtcctcaaatcctttgggttgtttcacatatacttattcttggagaaaaccataaagaaattcacattttcatatccatctcatgtatttgaatttcaaaaaaacaagtcatggccagaagtaattgaattgattcaattttagcaacatgtgcaaaggttttctcaaaatccactctctaaacttgcttgtatcattgtgccacaagaagagccttgctccttattacagtcctaaactcatcagatttgtttttaaaaattcactaaagtcccaatgatatttattccatttggctcaagaaccagatccagaccttctttctcttgaattgacccatctcatcttgcatagcattgttccgaaattcatctttcgaggttcaactagggatacataacaagcaaagtctatgacatccaataccatacaataagtcaccattgtagcattgggatccctgatcacaacagtaggaggatgagccttttgtatccacgatggaggctctttcttatacagtcgagcatgagatgaatcatcagatgatctatttgtagcttgaccacctgcagagacactagatggttcaaaagtatctgtaatatatgcagaagggcttgtaacacagtcagatgagatagacggatgtctagatgagttagcatttgataattcaagagcttctaggattcatcatagaaggattcaattacaaagtggactaagagattcatcatcaataatgacatcattagatacttc

SEQ ID NO: 65103 - DNA, 1460 bp, Cannabis sativa
  modified_base (1344)..(1364): a, c, t, g, unknown or other
agtccacgagttaatcttattcagatttctgattgtttttctcagggcatctcttgtatgagtttttctgtcatttttttgatcttgtttgccactatttataattacatagtgggtagttaattacaaagttgaccgtgatttgtttacaatgatcatcccttaaaatcacggggtttgattacatatcacataatgtaaatgtggttataatttaaaaatcatatagctatgattttcccgcttttactgggtcaaaacaatcatgtattaagaaagctttaattgttgtctctggagatgtctcgacagaagcttggttccagtgatctcaatagcgagctagggccatttttttttctttcgaggtcgtcgacgcatgtcttgtgacgactgtggttcttatagagttcttcgaggctcatttgaaagttatcttctaacttgccagggttgtaagcctcgctgacattaactggatgaagcgattgataggaagtcttcccatagcgagacgggcacctcgcttacttggtctcaagctgatccgactgttacacttagtttgtacattgtacgctaaggactttcgcgattgatacatgtctctttccttgatgcctcgttattcgcattctatgacatatggtttctcactaatatactaagtgccagtttgtatattaattcctcgcctaagcccttacagtcaggaggttataaatatactctgatacttacgtaattaatgagttattccataaaaagcgattccatcgatccatattccctttatcttaatacgtgtcctcctgttgagacggtagccaaattttgggtataatattaaggtaagtggttaagatcttatgaattgataggagtggagaaatatttggttatgcaattcaaagatcattaagtttaacttcaaaatgtatccaaacttaactcccctaaaatttggattgcatattgatgaaagttaaaggtttatgattagttacaagtagctgcctaagtccttctagggatataccctagtgataggaaaattttagaatgatggaatggtcgtatgcttagtgtacatcattactagattcaggaatatcctgatcataaacttgtgaaaaactagaaatattaactaagatttgcatgtttgatagttattctaaagtggttaagggtggaccatcctatagtcattaagataagaaagtctttgtttcaacaaataatacttttctaactacatgactaaatctgaagacaaagtagtaaagtagaggaaatattttcaattccaatgtttcctatcatcttattctatataagatnnnnnnnnnnnnnnnnnnnnnttgacacaaccgatgaggtcaatacctaaatgttcctagacaaaaagtcacggtaccttgttgtagtgggagggtttcaaggaactcaccctgtta

SEQ ID NO: 65104 - DNA, 543 bp, Cannabis sativa
tttttctttacaaattacgagactgtgactgttatatatattgtatgtttttttaaaatttagtaaaaaaaaaactattcaattagaatcgaataaaattgatttgtgttagatctttcattgctaaattgaaaaactaggtatatttagtaaattatgtttctaaatcaaacttataacactttttcattttcagcatcaatgatttacaaaatcttaatttcaataaagttaaggtcattgctgacggaactgttaattatcttaatattttttttcacagtttcttctgtccccctcctcttaatttataattcctccctctgtatgtgaaaatcaaggtggtggtcttcgggttaagtttgttgatacgatgcgtaattattgtcattgtcagaatagtttataaacgttaaaaagattatcaattttctaatgagagaaaaaagaaaatgaatgagagaattatagaagtatctttgcaaacatggtaccctaacccttttggtgcatagaaattcaaaggctaattatgatttttgc

SEQ ID NO: 65105 - DNA, 1160 bp, Cannabis sativa
aaaaaaaaaaaaaaaaacttcctaaaaagctaaaagtaaaagcaaaagactatatatttgacaatgtaaggggggcaaagtacaaaaagataatttgagagggaccattaataagtttttaattaaactttaaaaaaaattataaaaggttcatctagtaagtatttatgattctatactacaattttttttacgtttagtcacaataaatttgtgattaaaagtgaaaaagttgtgactaattataaattattattcctagtccgtggctagctaaaagtataagtcacaaaaatcacaatttgttatacttgttgtgactaaaactaatttagtaacaacttatatctaaatactatgttttagttgcaagtaactttttttttaattatgactaaaaggctgtcactaagtaattattttttgtagtgttaataggtatttatggtgtagtattcatgatctcaataagacgtatatttttaatgccaaagggcaccagtagtgcctagcaccctcctatgcgtcagtatcgctattggtccaactaagtatcgggtcccatatagtttaatataatagcttttaggaagtatcgctagccaatctcaacgcgacatgtcgagaaggtactgtatagacaccactaatgcctaatagcaatgctcatattaaaacaataaatcattaggttgcaataatttgtatatgttggcattcatgaatgtataagtcaatttatccgttgtaaagtcatcccttattatgttgcaattaagttttgaaacaacattagtgtgtgcatttaatgaagctagtggaagagaagagttatgaagatttgaggaaaaaggtaaatgtaaggagaagtagttggagattttaatgctataatggctctagaagagaggattcgaaaaggaggtgctctaaagaatttaaagtatgaattgaactgcatagaagacaatatcaattgcaagatataccttataatggatgtttctatatacgtggaacaacaaacaagatagttccacaagagtttgtgcaaagttttgacagaatcactactacaatgtaagcctttagcttcttttttttcaacccaatttataaaaagggaagctaaagggggtgaaaatatctgcattgacatt

SEQ ID NO: 65106 - DNA, 1070 bp, Cannabis sativa
tggaacctaagatttgatgaatttgtgatgaaaattagcttcaccaagagtaattatgatacctgtgtctactttcatgatggaatctatctactattatatgttgaaatactaatacttgggacagaaaggaatcaaattgataaactcaagtctcaactaaatgttaaatttgagatgaaggacttagggccaatcaaaagaatcttaggcattgagatcaagagaaacagacctcataccatctgcttatcctaagggaattaattcaagatggtacttgacatacatggcatgaaagatgctaaaccaataactactccacttgctttgcatttcaaactatctcataaccagtgactaaagatagaagttgagaggaagcttatggaaaacataccttatgcaaatggagtagggagtctcgtgtatgctattgtttgcaccagacctgatctgacacatagcatgagtgttgtcagcagatttattagtgatcctagtgaaaaacattggaagggactgaaatggatacttacatacatcaaaggctcagtcaaaattggcctagtcttcaacaaagtctacaataatattgataatgtaactagttttgtttactctgactatgtggaaacttgcactagaagatcattttctggttttgtgttcattgtctttgggggttgtgttaggttgaaatcaaaccttcaaaaggttgtagcgctgtcatctacagaagcaaaatacatggctgcaataaaagcagttaaagaagccatctggctcaagagattgacaattgaaatgaggatccactcaaaaaacttagccatacattgtgataaccaaatcttatgaagaattccatgtaccatgcaaggtccaaacatattgacatgaagagacattgttgctagcaagaaagttaaagtgatgaaacttaacacacattgaaatccagctgatatgtttactaagtgtgttgccggtgagaagtttaggctatgcctaaagttgctgaatatagaacattgttgatcctcccttttgtttattactcagagttt

SEQ ID NO: 65107 - DNA, 1137 bp, Cannabis sativa
aaaaacgtgttcatgatattatataggaaacttgaatttatatagatacattatttggtgtatattaaatgcgctttgcggtaaaaattttaaattatatatataaaataaattataatttttatttaatgacaactaagtaataaattgtattaaattttaatctaattttttaatttattttttaaaaattaagggtgtaccaacagacaaatcaaactcgtatttatcaaatttcgttattataatgaaagtcagacacgacctgtataacataatgttagacttgatccctcgaattgttataaggattgataaatttataaaaaaaaaaaacttatcatataatttcaaagctattctcatcatcgtatctcacttgtagttatcattacattcaagagtattgttattgtcatatctcacttatataatatgatgttatgtttgaccacagtatgttcattgtatatataaaataaatcaaacaataagttaaatactcatttttataaataagtgaattttcacaattttcttttataaaaaaatatgtcaaatgaaatttattaattaataatgagaaattagatataattgtatctaattctcacagaaaataaaaatttataaaaaaacgtaattgataaatctagaaaatatatgattcaaaatcaataataataataaaggtttttcctgtagcaacaacaacccaaaatataagagcagctccacattcgtctttcatttccatcaaccctaaaatctcaggttttcttcttcattctaaagttaatgctctcatccattcatctattattatgtatcaacttcatcactttgcttgattttacgttttatttatttgcattaaactaagactctacaaattgggattgggatgatgtgcatgtagttatatatgtgtgtgtgttttttctttgttgattgttgtgttcaaaatagaatgcatttaatcttcccttgatatggttttttcttttttttcattacgctgtgttttggttaaatacaatcgtgaattcttcttctttgttcatactatgtatgaatttagggtttttgggtgagaattataattgaatggcggaaagaaattaggtttagagtgag

SEQ ID NO: 65108 - DNA, 1075 bp, Cannabis sativa
catttgattttattatgcttaatctgattttacaaaaggggaaggagcttatatagctcagtattgaagaagagctgtaaccgaattgtacagctgaaacacaatctttgtagtaaacaaaacaacccttaactaacttaatccaaagcttaactaacttaatccaaactaatcctaagaatcttcaattctaaatgaatattattgaacacataagattaaggttcactgaggcaatttaacaaacgtatagtaattcataatataaaatacattcattattacaatttcaataatgtctatctaatctaaaagtcatacctataagaagaaagatacaaatgaatgaacttaattcatatttttaacattatatatagatatgtataaacccatccattattcaattaaaatgtgaaatgaaattgcacaaacacaaatttattttccagagacttgcaagctaatattgttatgcataactactcaaactagcatttgaactacttaaacgtaaatgctaattcaaagagtgagtgaaaagccatgattgaagctcgtaaatgggagcgacttcaaatagtcttcagctataccttctcatcattaaaaatttaaaaaatgcagataaaagtttgtaaaaaagaagagcaagagaaggatgataggagcctagaatcagagtacaaatgcgaggaacatgatgatagtctcaccataatgttgagagaaataggaggaagaccaaaaattgaaataatttggaagaagaaagtaaaataaaataagaaaaaaggaaagcagtgaagaaacataaaaaataaaaaaaaaaataaaaaaattatgtttaatgtagaaataaaaaaatgagaatacagaagtgaaaataaaataaaaaaaaatgtaaaaaagaataaaaagtataaaactctatactagaggtgatttgcttatataatatataatgtttaataataatatgtagaatttgaatgtttttaaaatgtgatattattagcgggagaacgtgtttttatgaaaatcattgtagtatatatatataaatgaaaaaaaa

SEQ ID NO: 65109 - DNA, 1416 bp, Cannabis sativa
attttgtgtatgtttattaggatctttacaaccgaatgaggatattgaagcaagaattaaaaatacatatgtattgttcaacccactaatattgagtgaatattctctcaaataattgaatcatagtatttgatgaatataaatctacaaatataattatcaacttaaatattaaccacctacaccaattagttcacaaaattagtttcgacccatctcaactcacacacatccaagacatcttccttgttgatccaacactcatggtcaagtccaaacaagtcaggtttaagctcatgctgtattatttttttatgccatttctgcacaatccttgaaagtgttgtcaacaataatatattaattaaagtaatataaattacctggattaaatgagctggaggtatctttaatagtttctttggctaaaagacaaattgttgcatagctaaacacgctgggtagaagccttcttactttagaggacatggcagcttggaattttctttaacaactttctctatgaagacaagtttaaagttacagtacttcttgttttctccatgtaccgtgatattatctttctcattcggttttcaaatatgacatacccaaatgaaactaagctgtctccttcgatgttgggatccatcacatgcaaactacacttttttgtcttcatttgcaaagcatacaatacacaaacttgtattacaatatgaaaattaagcaattgaaatgtgactagtcactaaatagaatcataattatttcaaaaaaatacaagtgaaaaataccttatctaaagtatctaatgacgttgctggtggagaaaattctctgaggactattggtggtcgtagaggagaatagtccttggtagcagatgctggaacagaggtagtatcaacacaagatagttcaacacctagtgtggagcccctggtagcagaatagtccttggttcattggatgctcctccaacacttgaaccagatgcgtgtgaggtgccagcaacaccgctttattggccttggactagttggtggagttgttttaaaaattcgtcagtccacctacccctttcctctgactcgtgaagtcacttctccatctcacccatgcgatcgttttcactagatctctttcttttctgatgttgagttttttccttccactattaccatcccatctttaacatgcttccgtaacacatactacattgaaaataattattagtaagaatttgaagaacataaaaatgttatttagaatttaaagaacatgaatggtaaaagaaacttacaatccttttagcaacctcttgtgcagggccatcaagcttgcccttcttgttagtttgtaatctgatccacaagttacatctattgctgtagtaagttggtggcccaactc

SEQ ID NO: 65110 - DNA, 1074 bp, Cannabis sativa
attcacttcttccaactcttcaatggcgcctagagtttgttgtactcatcttggattccttattctagctggtgatttttccttcgtgtatttaattccacaccatagcactatctggtgattagctagtcacctttcactctcccgactccaaagtgagttgagaatttcaaggataggtgctttatctagttgattgcccctaaccctgcaagtgcagggcgacccattagtatattgtataccaaagagatatcaagcactaggaactcttgcatttgggtcgctgacaataggggttctcccatagtaagttgtagttcaatgatgccaaggctcgcaacactatccctcctgaagccacataaattcaccatacatggtcttaatttggcatcttctagccccatcttcctcagtgtttccgtgtaaataatattaacaaaactcccattgtcaatgagaactctttttattcttttgttcgcgagctagactgtgataaccaagggatttgagtgtgggaaccgtacgtatgttgcatccacatttgtgaagattattggtggttcctcagacatcgcacgcttaaggggctctggtgcaaaagtagattcttgatttttaacttgatttatatacctttttttgcactattgcttgttcccgcaagatgcggccctccaaaaataacaacgatgtcctcaccctcaattggggaaggttgtagaccttggttttgaatttggttcttgggctagttttgttcattccccttgtttcttacgtactgtctgagatagcctcgggaaatgagtccttcgatcttgtcctttaattggtgacattcatcagtagtatgtccaatgtctctgtggaattgtcaatatttgtttggatctcgcttacttcttgagtgcctcataggttcgggcctttgaaaagtgactagattctcgtttgtgagaaaaaatatttcacaagtttcatttaattctgtataaacagtatgggaacatacttcttgtgtttcttttgtttcttcttatgtcttgatgaatcttttgattcatc

SEQ ID NO: 65111 - DNA, 2802 bp, Cannabis sativa
aaaattatacaaggactatttgtaacaagctgaatagattaaggggcataatagtatagtgtcataagtacaaagggtaaaaaagataattattcttataaaaattaatactttttgccacttattaatgtatttagtaattttttacattttatttatatattcaataggatttttatgtactttcaaaaaaaaataatgcttttgttaatacttttacacctttctataaaaaaaaaaataaaaaatttacccctaattagagtactattgtataatttgaactaaatataatatttacttattttttaaattaaatttaatttaaattataatcgaaattaatagtagaactttttcaatacacaaaaaaaaaaaaaaaaaaattattgtcaccgtttttttatacatatttatgtaagacaaacagtccttatttatttaattaaatatatgggacagtaaaggggagaagaatttcccgttgtacaaaaaaacagttaatagcacatgcccgctacattcataatatattacatcctcacatctaacacatctctaattaattgaatatatgtgtaaatattgtataatatttagcataaaaattaatgcaaagtgatatatttaacataagtttaaattgaggctttaaaaaaaaaatcataaaccttgaggtgggcaatttattgaattaacccacccaaaaaaaaaaagaacaaagtgacacaaaaaaaaaaatagtttggtgaaaatattttgatacaattgattaaataaatattagaaatgtgttataaaagtgtcacatatattaatttaataggaaattattatattatttaataataaaaatataaatttaaatgtgataatatattatatattattatgtaaataatatgatatatttgataaataaattatgtaatatatgatttatttaacttataaattgtagtctacactttgtaacgtggagaatagttataagttaattacttttgtaatttttttagttgattacattttagtataataaaaaagatattagacaaaattgattatgagattcaaagctacgataatataactgttgagaattggattaatactcatttatttgataaaaatgagatgggaaacgtttgggattgtgggatgatttggctccaaggccgttataaaacacaaattttaagtatagaaatatgtacaagcgacatacgttgcctagactcaggcaaacatgtcgcctgaaggtgaaaaattcaaaaacgttctttgaatattggggaacggttctatctattgtatgtaaacacaaatcttcattattaatccgttttacattcattaattatgtgctcatttgtgtaaaaacactataaaaagaggtctaatgtgttcatttgtgtaacctagttttctatcaaaaagaacattttactagaaaattctaaggttttgataattctccaaactattttctagagctcccttagtgcttaaagatataaaaaaataagtttttggataaacatgttacaccttgttcaagtcatagtgatccttactattttacactcaagattgtgagtgaaaattatcttcatctcttgtgttgtaattttatcttctacctttcttatataaatataaatatatacaaagtgtatgttgtaacattttttttttttaagaattgtaacatctatttaattaatcttttagtccttttaatccttgtattattattatataagtagatttataatttatcttctatcgtaataaaatttttaacatataaaaatgggtctatcgatcggctaatgcatccctttcgtatttttcgaaatatcaaataattttaaacctttaattttctatatataataattatattgtaattatttaaaaaaaaaaaatcaaaataatttaaatcttaaaaaataaaaaaaaaattgtttgagcccaacttttattataaattatttttaaattttcaaaaccttacattaaataactatatcaatatacaccatcatataacaaagattaagattttaactatatcaaaataaaaaataaaaacaaaaatgagtgcatctatacagctgtttttgggaggtgcatgcaaattgtattaattatttttaaaatttggaccatatacaagaaagaaacaaaaatatataataaaaaactggagaaatttgggttttgaaaatatataataaaatataattaatcttatcttataagtaagaacacactttctctttggttcttacacctaattccccaattaatcaaatttgtgatctcatttctttgactgtgtttgaaagagagctgtgtagagcaagccatgggagatgaggatcaggttgttctattggatttctggggtagtatgttcggcatgagagtgagaatatgtttagacgaaaagggtatcaagtacgagtataaagaacaagatcttcttgacaaaggtcctttacttcttcaaatgaaccccattcataagaagatccctgttctcatccacaatggaaaacccatatgtgagtctcttatcattttgcactacatcgaagaggtttggcctcacaaagctcctctcctaccatccgatccgtaccagagatcccaagcaaggttctgggctgacttcattgacaataaggtaactaactatatcatctctatattctgttaattattgtataataagattgatcattggatatatttattaattgcaggtgtatggtgttggattaaaaatccttt

SEQ ID NO: 65112 - DNA, 703 bp, Cannabis sativa
gaaagcattcttttcgcgaccataaggcatcccatacatgaagaacattgtccaaacagctctgttcccttcttcgatttgacactcaaaaccagtgttaaacttcttcctcacaatcatcttcagacccttcttccacgcaaggcagaagccccctgcgattctgattgccggaatgccacaaaagtcatgatatcccaatttccttgtcaaattcttcataaaaacctcatccacctttgtttccattaagaagataacatcgaacccctctccccgagagagctttctcaaagctctctctgccgcgggccttcgaaggccgcggcaattccaactgaggcacctcatggcgaaggtgggggcatggctctgggcgcctcctcgccatttccaaaattttgagcatagttgacaggaacttcaatacattgagcaagaacatgatctaagttaatggcattagccgagttaccttccctgtgcaatttcttgcttctcctcgttttaactcccgacgttctcttgaggaaagagctgcaagtttctcctttcttgcgccttcctcttggattaccacgactcgttccagctttgaaggactcacccgcaacctcttccccttctccatcagtcttacttgctttgagatcattgatcgttgtagccgattgactcacctcctcaaaaggagagttctcta

SEQ ID NO: 65113 - DNA, 623 bp, Cannabis sativa
gtgcattcttaaatataacctctcatgttaaattatattatacttcatgattcatcctcccatatacaaaatgttttcttgtggaaataaaattccagctttagtgccaaatcataattacaattttaaacaaatcaagaacaagcatacttatttttattcattgaagagttacattataagaagctctccatgtatatttcaaaaaaatttacaaacaactaaatttatggttgttgtatgtgagatgcatcaatctcaagatgacttcgtgattcctgaagagacaatagtttcatgatttcttaagagactgtggttttatgattccttaagaagcattggtttcatagtgtagatctttactttcaaaatttaattataatttcatgcatcaatctgaaagtaatgaaaaaatcaaaatctataattaagttcattatggaaaataaatacacacaacataaaatcaaaatatataattgaattccttatgaaaaataaatacacacaacatatgtaaattatcaagaaatatatttatgagtgacaacaaacaaagttgagaatctacataaaaaatatataaatatgtgtaaatgctagtacacaacatgatatat

SEQ ID NO: 65114 - DNA, 1155 bp, Cannabis sativa
tgccattaatgatttgcattcatcgaatccaaggtatcataaaaaaatttagtttttactggaaaaccatgtgaagatgcacatgtcagtgaaactttatttggttttaggaatatagttataggaacatacgcattttgtagaagatttaggcacttactttctccctacttaatatcagttcaaattaatcatggtactttacatttaaacatatgaaagtttcaaggtttgtacagttgaatcatatttagtttaattcaatgatataatccgctagaatcaatgctagcaatttgaaatctcaacagttgcgaaaaaattcaccttcatggagatgagctatacataaataaagcaaaaactgtatttctgctgtactgttcatgaagactcagatcctaaaccagatcataaaatagtagaaaacaactgaaatggatattatattattatatatgtgttgttcatttcatgattaactacagggtaatctcaataatcatgcctgaaccatgtggttgcaagagaaatgctcttattatcaacttgcttgattagaatgggactcttttaatcttttacctttttatattattttttcccagcatgagtaagacttacttttttttctttttgaaaagcctgagattgtctttaatactaataaatggaagatatgagattgttttcttcttctttttttctttctttttgaaatgccatccatttggtggaagtattttattattattttccacatattattagatggtaaattaaaatggaggaaaattagcatattgtactgaagtttggaatgttaatatatagcttgtgtcaatggtatttatataaactacaaaataattatagaagtttatacagtaggtagtagcaggtgcatacttttctcctactgtagagaattgttttgtttttattggaaaaattatgatgtattttatttcatatataatggtgtatagtgatttaagatatctgtgaaatttcaaataattaaggtaccaaaaacaagcttcaacataacttgttttgtataaatcatgtaattttatcaatagcaatgagctaaaataatagcttacaattcaattaggacatctcttttgttggagatacactcaggaatag

SEQ ID NO: 65115 - DNA, 755 bp, Cannabis sativa
tgtgtctcatagccatgactcaattctaaagttatcgtgtccaaaattagcttacaaggaaagctggtgccttttactcgaaaattgggaaatgcagctaagcgaggtttggtggagcacactgtcacagcctatgtggcgttgtgcacaagcatcggcagtccaaaatgcgtgtgtttagcactctatttcaaattggtgcatcctcaaccgaaaataaccaattgtccaatatttgtgggatatttgccaaaatataaagagattgttattgatatttatttacttgtaatattttattcataaaaaatagtggtatacgggatttagtaaaatatcccgatgtgtgaggaatcaataacaaaccctctagcctatatatacaccaagtaggaggatggaaaaggggtggatcttcttcttctaactcgcttctttttggattcttccttttgagacctttccctcttttggatcttcctcatcgtgaccttccccttgaagttcacttgacaattgccaagaatactacattatttccatcaccttcttcattgagtctaccatactcaagccacaccagacctcaaaacaccatttaatacacatttttttccacaaattattggtttattgttcccaagaactttacaacctctaattcagatcagatttataaatataaagtctcccatgagctttatattctttctttttcctttataattttcaagttctctctctctctctccctc

SEQ ID NO: 65116 - DNA, 1017 bp, Cannabis sativa
atcatgaagctgaacccacatatcaatctcatgcaacggaaccactctaggatcctcccctcttttcaaacgatgaaacacaagcggcattctgttaaacgtccaaggactcccatcgataaccgtttggacatcaatttcatgatagaactgaaatagataccgattattatccaattctttgatataaactcccttcccaggctgccaaagtgaagccaacatatgcctcatagcatcaaaatcaaatgtcctattagtaagtaacttaccaaccaagcaccattgatcgtcaaatgcttgaacatcctctgcctgatcatcagaaatcagaactccctcttcttctccctcaatatccaggtgtgcatattgatccatccagtcaccaccttgatgactacttgaagccataataacaaccagaaagaaacaacaatccgaaacagcaacagacaaaatacttagagacaaaataacatactcaacatgtcacaagacaagacctttgctaattataatttaagacaagttaaattgttttagtacttataaatcttcaatgttattaaaaattgaacaaagtttcctctgtttctataacattttccaattttataaatacctatatcaacaaataaaaatcacgataaacaacacataaaaaacataattaaaaattagacaaagtttccttcgtttctataatattttctaattttaaaagtacctatatcaacaaataaaaaacacgataaactacacacaataaatataattgaaaattaggcagagtttcctctgtttctataacatttttcactttcataagtacccattatatccacaaataacaaatatcacacaataagtttcttccttatatcttcgcacacaaattttccaggacctacttcactacaacacacaagtttcaaccttccattatcatcgcaacaaaatacataaccaggtcgcacaacgactacaaaataataaagcccagatgtcccgaga

SEQ ID NO: 65117 - DNA, 1561 bp, Cannabis sativa
tgaggcatccaacagtctcatgaccaaccatgcgcgtaggcagacgccaacaactctacctagaaatctagtggtaaaaatactagaaacaagtgcaacaccaatagctctgggaggaatagtggcaaaaaagggatgtttaacacttctcccacgccacaaaagagcaaggaggagaagaacagctacttcaccctcctaacatagaaacctgaggccatcttcatggccactcagggaacagtcccataacgaaagccctttcatatcaaaaaggaaatgaccaggaggcacatgtcaaagttctgttgatatcaccgcgacttcagccatgacaccaatgagtgtcaaagtttgaagaagtaaattgaatatttcataaggcgtaacaatccccacctgcgtcgttatatacaagacgaccaaactcaagtgctaggactctaaaatggagatccaatgccatcaccagtggtaggacatcttggagtcattattggtagaccccatattgtaggaaaaccatcaaagctagggagcgctatgcttagacaatatgtcacaagcctaaaagcgatatcctagttgtcaaagataggacccttaaataataaaagcctttagagcccataatctccttcaccaaagaagatgctactcaagtcagtttcccgcacaatgaccccctagtcattactgtacaaatcgggaacatgaccatagcaagatgtatggtggacaatagagtctccttcaacattctttttaaatcaacatttgagaagatggcactccaactcaccgacctggcaccttgcaaccaagtgatgtatgacttctttggccaaggcatcgcacttgttcagattacccctcacagttggagaaaatccaacaactagaacaatgatggcgtagttcttcgtaatcaatgctccctaagctttcaacgcaatgataggccgactggccctcaaggacctaaagctggtaacatctatctaccacctatgcttcaaatttccaacaagacatggcgtggcatgcgtgaggggagaccagcagtttgcctgacactgttacaacttggtcttctccaagggaaaaaatgagcccaacaaggggcaatgaagtctagcccaaggtggggacataaacatagatccttcctttagggatcctataggaagctttgggtctgtagaagtgttggaagaagtttaggtcgaacccacttttctaacaagaagacgaatgattgggaaaggcttatctctagaaatgaaatcaatattggtagaatttcttagggaaaaccttgacctttctgtattgtcacattggcatatggtcgggattgacccctccatgatgacccatgcactaaacattgatacaagcatccagcttatttggcaaaaaaggcagttgttggacaaggagcgtaccaaagtgctcaaagaaaaggttgaaaggctgacaccccatgacatcataacagaggcattctactctcagtgggtatccaacccagtaatggtgccaaaacccaacaagaagt

SEQ ID NO: 65118 - DNA, 1276 bp, Cannabis sativa
attgtattaaatagtactaatataatacaatacaatttaatacaaatacaacacaatacggcgtaccaaacgagcccttaatagttatccttatgtaggcaagaaattgtgtgagcatgatggggtgtttgccattattttctgttttctctttttaaattttgtttttagaaatgagaacaaaaacaatttttttagttttcaaaatacaagacaaattgtcttctcagaaatgagaacaaaaaatatttttttctaattttcaaaatacgaaatgcgttcagttaatgttgtctaaaaattatttttagattgttttttactaaaaaaaacttcaacattccacacattgacacgaacccaaccccacctgaaccttggcacagacttcggatgtggtggacattttagtggtaagaaaactgctttaaaaattttacaatatgaattttattggcctactatcttttatgacacctatatgtattgaaaatcttgtgaatgttgtcaaaagttaggaagtataactaggagaaacatgatgcatttgaatcctattcttattgttgagatatttgatgtttgtggtattgattttatgagtctatttcctaactcttttggtaatttgtacattcttgtgagtgttgattatgtgtctaaatggactattgtatgtcacactaatgaccacaaagttgtgcttaagtttttaaaagaattttttttttcatgatttgactcaccacgtgctatcattagtgataacggtacacacttttgtaataggccttttgagcatttaatgagacaatttggcattacacataatgttactacaccttatcaccctcaaactagtggccaagtcaaaaaatcacatagagagattaagcacatcttagagaaagtcgtcgacccaactattggtccctaagactcattgatgcattatgggcatatcgtactgcatacaaaatgtccattggaatgtctccctatagacttatttatgggaaggtatatatgccacttaagacaaagcgggtgagagaagaaagcttcgattgaatgcgttagaagagctttttttttttgtttgataaatcaggagtttcattgcacaaaaccttttatattacaacctatagctcacggaagagcaaccatctatacatttatctgtgaaacaaaataaaaaacttaacatcctcttataaatcttgaaactattctaactcttttctatctatacattttggcattacaccagaaa

SEQ ID NO: 65119 - DNA, 1043 bp, Cannabis sativa
agacaaaggtacttcatcatcatccaagttagggccttgcccatctccagggtaggcctcatcagtagctggcactcttgcaagtccaggaataggaggatacaagccctacatctagaaattatccacattgatcaaccagataatgtttctctgctcagccgataaaagaaaggatgtgatttgccctatccctttatttgtaatgtggggatggaacacttgaaaaacagtactctatgaaagtgtcgatggcaaatctctttaacatctcaagcaatgaagtacttgttagcatgctcgtcaacctttggcatagatgagttattggaatcatctagccattggtgactaacttggctaaaatagaaatattcagaccgatgttactgcgaaatagactccaagtcgaaatagtatccaatctcataagaagtgggctagggctagcctagctccttatataaaacgaacattgctgaaaggtacttgatacctttcggggtgatttgtgttggacacatcttgagataagcgacaatatcatgaaagtacaaataaagaggtagtacgactccttgatcgatgtggtactctgaacacaccatccagttgagagccaatccatgcgctagttggtccagaggatgtatcttacaatggatactgcccatatgtcattatgggggcctttcaatactataacaccatccagttgagagccaatctatgcgctagttgaaatttcattcaaattctaattctttattgcaatgttccatatgtcattatgctaagcaaagaaaacttcctttcatatcgaaccataacatttcaaaacattattttgatttgatatatgtggatatatgtgggcctaacaatactataacacctaggtttcaaatatttcgtcactattatagataattgttctagatacatataaatccatcccattagacataaatctgaagcatagattattattccacagtttataaggttagtgcaaaaccagtttaatcaaaccatcaaaggct

SEQ ID NO: 65120 - DNA, 1574 bp, Cannabis sativa
  modified_base (350)..(356): a, c, t, g, unknown or other
tttgggtgatgagggcttcgggttagcttgctggtggcgattttggtgaacggaggtgggacgtggtgatgggagatggtgaaggtgggtcgtttgcaggtgagggagtcgctggttaatgtggttcgagtgggggtttctgggttagtgaatggaggtgcgaaggtggagggaagagggtctgggttagaaggaggaagaagaagaagaaagcaaagaaaaaaaaaatatatataaaaataaattttttaattttaaatgttttttaatttttaaagaaaaagaattttttttttatttttttatttttaaaataattattttttttattttaattttaaatatttatnnnnnnnactaattaaactgtgccacgtgtacactgtgtacacgtagacattccaacatagcacttaacacccaaaaatggatggaaatgactaattgctgacagaacttgggtttaggaggttttaccatcaaaattttatagttgggggttagttgtaaaaacttggccacttaaggaggttatgccgtaaataactcttttattatatataacaagaaccgatatgaattaaaatttttatacaaaagtcatttaataataaagattagtattcataaaatcataacagatgatcatttatcgattaacctaaatcatgagtattcatgaagacctgtttatgttaattgaattttttaattcatttgttaagatcttgagtctagtgacttttgttttagaaatttaataacatggatggctgggaacatgaattaacaaaaaggaatcaaattcttcttaacagattgtatattggttctcttaaggattaattctaagcctaaatgattttgagctcaaatctataatcagattatagaattgttcacttcactagtgaattaatggtacttaaagaataagaagtaagttaaagggtaaaatggtaggtaattcttccattctaatttatttataaactaatttattggatggttgaactattgtaaaatgattatatcaattgacaacttaagaaaaaatttatgtaaaagtatatctataacataaagagttcaattctgaatttatagtgaatgaataacaaaattaataaattaactaatataattatttaattttaatttattgaagcttaatgttataagtctatggttttcaagacagctcaatcaaaaactgacgaaggtaaatacaaacaatgggcaaaaaagatgtatatgataagtaaaatatttactatgtggtaaacataattattggataattatgattatttaactaattcaattaaattataaattaattaattttgaaaaatttgatattccaattaattaggaaattgaggaatcaaaagacacatatgctcttcctgacatatgaaatatgcgtataacatagtgccatgttactatgtgttacacgcatacaacaatattctcaaaagaaaattttgattcaataattttaattattaaatatcaagttaaataatgaattattttaatatatgattaaaataattatttaataaatt

SEQ ID NO: 65121 - DNA, 1548 bp, Cannabis sativa
agactgatctgaggagctatggactcccaaaagatcgtagagatcgaattccgtgacagaggtagaagacgatgaagcagtggacctggccctgcatgggattacagtagacttgcggattcgatcgaatcttcctctgtcaaaccctaataagagtttcgaatttggatcaactgaagctgtagaaatggtaggtgtggataaaggaagaagccatgcatggagcattgttctttctttattattattgttatttttattttttttttagttctgggctcatatttttttgggagtggatgacatataaagtgagaaaaataaaaaataaaaatgcaggcatgatatttttgttaatggaaaatgacatttagatattttaaaggaagagaaatacagaaaataaaaacactctttcttcttcgtgtagaattctttacttgtatagaatcaccaaaaataattttatttgtgcagaaattgtttgtgtcattcaagattcaacacattcaaaaatattcctaagctatgaagaatattctgtcagttaatcttgagacttttcataattggttcagcatgcattttttcagcatgctttttgatgaataaaaaaaagaattatttaaagagaaattataataaatgaagttaaatcatagcactgtataactaaatataatattacataactaattaaaattaaagtgcctaatgcacataataagaatatgacctataaaattaggtataaattaaaaagtaataagctaatggtacaaattaaactaaaaaataaaaagtaggtatagagtgtaattttctcttatataacactatataggtaaatgtttttattttaaaacatgtagagaaatgacttgttaacattatttattacttatcatgcaaaaatattttattatttatattgttttttgcttcataaaattataataaataattccaaatcatagcactacataggtaactgtctttattttaaaactaatagagaaatgaccctttaaaaatatttattacttctattatcttttgccacataaaaatattaatcctatcatattaatcatgtcatgtatttaattttggttagataatagagtaggcaaaaccctacttttttatcaccaatgttagatttatacgctatttttctttgtttagagcactcccaatagatgagctaaaatagctcaatctttaaattatagagaaaaaattataaaattgagcttccaacaagtgaggtaaaccttaattattttacatatttttagtttaatgaatagtgcttagttaaatgtagaaataactattcattgagctaaacatattttaatattattttctttaactttctatatatgtgtgtaatattatatgaattattaatataaaataaataaaatatattaaaaatataatatttaaataatatacagaaaaatagagaagctgatgtatatataatataaaagtttgagataaaatagataaaataaaattttaatgatgtattttaaa

SEQ ID NO: 65122 - DNA, 1182 bp, Cannabis sativa
  modified_base (709)..(712): a, c, t, g, unknown or other
tattctaaacaccagcaagagtaggtgtagagcgaggcgaccagttgttggctcgcgaatgttatcgtgtagaacttcaaaatagaagagctaaccatcaaataatggtggtcataacaaaagaagacgaaaagaaagaagaggatcaagaccctagaatccaagacaagaaaaaacagttaaaaccaattgaataactggaagaagttgttttagatccaaacaatcccactaaatgtgtgtttattgggaaaatctagatgaaaaactaaaatagcagttaataaactttctgaagggaaaccaggatcaattttcttggagccattcagacatgatagggattgaccctaaagtgattttccatcatttgaatatcaacctcaattacctggccaaaagacaaaaaaggcgacccttagattctaagagacaaggggcacttaaagaagaggttcacaagttattaaccaatgatttcataagcgaggccttcgatccctcgtgaatttcaaatcctattcttgtcccgaaaccaaacgacacttggaggacttgtattgatttttcagacttaaataaggcgtgtccaaaagattgtttcccacagttggtagatgcaactgcaaggcaagagctgatgacatttatggatgcatattcaggatataaccagattaaaatgcatgtccctgatcaagaacatacnnnnttcgtgaccaacatgggactttattgttacaaagtcatgccatttagtttaaagaatgttggggcaacatatcagtgactagtgaatgggatgttcgaaaagtagattgggtgaaatatggaggtctatgtcgatgatatgctggtaaagtcaataaaatgtgatgatcatacaaaagacctcgcagaatgctttgaaattcttagaaaatacaatatgaagcttaacctgaagaaatgtccttttgaagtatcctcgagaaaatttcttggtttcatagttaatgcaaggggaattgaggcaaatctagaaaaaatcaaggccttaatagagatgcttcaccaacgaagcctaaggaagttcaggccttaacaggaagaatggtagcattaaactgatttatttcaaaatcaacaaataaatgtctggcattctttaatgttttatgaggcaataagaagtttgaatgg

SEQ ID NO: 65123 - DNA, 1810 bp, Cannabis sativa
attggagacatccaattgcttgacttgctagttaagagagacaactaatgtgaaaataattctcactgtggctggtttaacaacaggagaaaatgtgtccttatagtctatgccaggtgtttgcaagtagctcttagctacaagccttgatttcagtcggtcaaggttgccataagcatccagtttcaccttgtgaatccacttatttccaatcactgtcatatgtggagaataaggaaccgaagaccatgtacctgcctttttgagagcatcaaattcttgattcatagccttgaaccaccttggattgtttaaggcagttgtagtgttctttggctcagaaggtataagggactcgggtaggggatatttggtggctgtgaaggctttgggttttctaatgccatttagagaccttgtcttcatagaatgagtccttatagatgcagtacccgtgaattgagtgtcaatatcaccactaggaggcacattatgtaaatgttgggtattagtcactgttccctgcaatggtacagtaccatttgtagctgttgggacattggagtgtatagatgggttgaagttgctttcggtagggacagatggaaagatggcagtatgtaaaagattatttaatgtataatgggatgtattaggtaaagggatagcattggtagtagtgtctatgctaggaataggaatagtgttggtaatagtggtcatgttgtcattttgtggggcagtaggaggtatggatcgtggggtagtgtttggttgaggggctgcagtaggttgtccttgttgtgttgtgttgtcaattccctcatgagccgtggtatcatgtgtggtgggagagtgaacaacaccaatattagtatatgaattattgttattagtttgaaaactaaaattaggaagtggagtcaaggacgatatagaggaaacctttggtgagtttgacaaggcagggaaatgtccttcattgaaagtgacattgcgtgagatgtagaccttgccatttgggtgttcacacaaatatcctttgtggtgagaagaataacccaaaaatatacactcctaagatctcaattcaagtttgtgattattgtatggcctcagatggggaaagcagctacacccaaaggtttttaaagtattataatctggtttagtgccaaagagacactcataaggactcatattaccaataattggtgttggaagtctgtttatggtgaaaacaacacaagacatagcataccaccaataatccatgctcaaacctgcatgagctaataatgtgagaccagtttcagtgatgtgtctgtgtttgcgctcagcacgaccattttgttcgcttgttctaggacaaggatgttgaaaatgaatcccttggtcagataaaaaccgagcaaatggcctatattcacccccagtcagcttggacacttttaataggcaggttaaattgtttttccacaagacttttaaactttatgaaaacatcaaaagcatggtttttttgagttaatggaaaaatccaacagtacctactataatcatcaagaaaatgaacatagtatttgaaaccatcttttgacacaacatgggagggaccccacaagtcagtgtgaatgagagctaaaggttgggtagccctactggtagataaagaaaatggcagtttatggcttttgccttgatggcaagcattgcaaaattgtaatgcttttaaagatcctgtatgagagatatgtggtaaaagctttgccaatgtgttctcagaagggtgccccaattttaagtgcca

SEQ ID NO: 65124 - DNA, 591 bp, Cannabis sativa
ttatggaaggcaattcttaaggcccgagttcatctctccaggggtctttgccgaaggattggagataggagtgctacctccatttggtttgacccttgggttctgggagtgaaccccctactccttgggtggaggatgtgagtggtgttagtttggttagcaactttatcaacaataaccattgggatgaggacctcatcaatcattggtttcatgcagaggatgctaggagcatcatcaatattaccttaccggataggcctgtcgttaactcttggctttggatgctagaatccaatggttgtttctctatcaagtcggcctacagggtgataaagaacttgaactcatctaatgacggagatagtaaatggagaactatttgggggtgctaagatacatgataagcttaaaatgttctagtggaaaattctctcagacgacctattaactaaaggaaaactggggcctattctttcactaactgatacaagttgtcctttgtgttgttctgcggttgaatactcctttcaccttatttgggattgtccttttgctcaggcagtttggtttggcttcaactggcatgtt

SEQ ID NO: 65125 - DNA, 622 bp, Cannabis sativa
  modified_base (29)..(68): a, c, t, g, unknown or other
ttatcgctttagaaagttcatatttaggnnnnnnnnnnnnnnnnnnnnnnnnnnnnnnnnnnnnnnnngtaaaataatttccaacaacaaccacctatgctgaaaaggtcgacaaggctcttcaagctaaaggagcagtaaagtttctgcaagaaacccgagaggatcctggtgctggtgggaccactactctccctattttttgtccttgcaaggagaggtgactctaccattgatcaaaagaagaaaaatttcccacctacagggagttcaagccaaaataagaagtttcgtggaaattagagtaaagggggcatcaaacttactcttatcttgagttctcgcgttgtaagaaacatcatcccgggatttgtaactggagggcttgctttcagtgtggatcagttgggcacctcaagaaagattgtcctcagttgaagaaagatgaacctaagccagaagctaaacctgcaccagcgtgtgtatttgccattactcaggcggatgctgccgctagccctttagtggtcacagataagctctttattaacgattccacttatattgtattatttgattctagagttgcacactcttatgtcacaatgagagttcttaatca

SEQ ID NO: 65126 - DNA, 696 bp, Cannabis sativa
gtattggtattataataatcttggcaattacgttcttactatgcttaatattataatactctgattttttccctactgttttgtctattctgattcaaaaataaatgtagacactttgtggcattataaattaggccacccatcatgtatcaaaaattttcttatgaataaatagttgaattttaataacatcatttattctcattttcattgctcaacatgtcactatgctaagcaaaagaaacttcctttttgttcctaattataattcagcaaacattgctttgagcttatacataggtatttagagacttttcacaccatggcacatgaaggttttaggtattccctaaccatagttgaaaattattctagatatatctggatccaccttctcaataacaaatttaaagctaaaacagccataccaataaagggttttaggtttgataatttaaaaaaaaaaaattgcaattcataaatttgttttaagtctcttgagatagttcgctaccatgaaacttgaatttaaatatatttaaagtttcctatatgtatatatacatatatattgtctaaattaagaaaataaaataaagccatctccaattatattgctctaggttattattcaaacttgttattcaggtatatatacactctttaacaatgacgaatccatcccaaaagtttatg

SEQ ID NO: 65127 - DNA, 3516 bp, Cannabis sativa
ttttggcatttttactcccctaactaatgggacggcctccgtccccgtaatagaattgaacagttctagtcatgtgacatcacgtgagtagtcagtaaccattaatttaaagttttattgttgattttttttttttttaatttataggcacggaatgaagcaatatcgaaatggttgggcagatggaccggcttacataacacagtgtccaatccaaacagggaatagttacacttatgattacaatgtaacaggacaaagaggaacactttggtggcatgctcatattctttggttgagagccacagtgtatggtgcaattgttgtgatgcccaaacaaggaactccattcccatttccacagccaaacagggaatttgaagttgtgctaggagaatggtggaactctgatgttgaaacaattgttaagcaagggaatgcaatgggtttgccaccaaattcatcagatgcacacaccataaatggaaagccaggaccactatttccatgctctgagaaacgtaagttaaatttacaccaagctatattaatatcttctatatgtcattttgtatttcacaaaaaattacagagttaaaaaaagaagataaaattattatgaatatttatttttttgaacaatattgatttaatatttattgcatacatgtaaaaaaatatagttttctaattaacttatttgttaaaagtaaaataattaattaagtgaaaatatatatatgctaaataataaattataagaaataataattaagggtaaaaatgtaaataaaaaagtgagtatatattgttaaatatattattaaaataggttgctttgtagtgagtagtataattgttgtttaaatttctaagataatttccaaaataatttggtcttatataagttgctttgcattctaactttgtatatctttagctagataattaaactcttattaacaacaattattattaaatatattattaaaataggttcttttattttttttttcaaaactagttttcaagagatgaattcaaaaatggattgattgtgaaaataaagacttgcttatatatgtgtagatacttttgcaatggaggttgaacaagggaagacatacctattaagaatagtaaatgctgcactaaacgacgaattattttttgctgttgcgggccataacatgactgtggtcgaagtagacgcagtttacacaaaaccctttatgacacaagcaatattaatagcaccaggtcaaacgacaaatgttttggtcaaggctaaccaagcacctggtcgatactttgcagcagctaggccattcttagatgtgccacttcccgtagacaacaaaacagccaccgccatattccaatacaagggtatcccaaacactgttatcccaactctaccccaacttcctgcacaaaatgacagttcgtttgcattgaactacaataaaaaactcaagagcttaaacacaccaaaatttcctgctaatgttccgttaactgttgatcgaaacctcttttacactattggtttaggaaaagattcttgtcccacttgtctcaatgggactcgacttgttgcttcgctcaacaacatctccttcaatatgccacaaattgggcttcttcaagcccattacttcaacattaaaggagtttttaagactgattttcctgataaaccttcaactccttttaattatactggtgccccactcacagccaatttggggactttagtgggtactagagttagcaagattaaatttaattctactgttgagttggttttacaagatactaatcttttgactgtcgagtctcatccatttcatttacatggatataactttttcgtggtgggaactggtattggaaatttcgatcctgctaaggatccaactaagtacaacttgattgatcccgttgaaagaaatactgttggcgtgcctactggaggttggaccgccattcgatttagagctgataatccaggtatgaccactaaaatccaaattaatataaactatcaattttaaatttattttcacaaaattaaaatgcctatacaatcatattttgatggttcataggagagaatcaacaaaataatttaagtacatgaattttgaaattaatgatttataataataataatttaaatataactatttcaaaatagtaatatataaaatttactttttgaatattaatttgactaatcaatgtgggacaagtgttttaaaggatactaaccatttgttttaccaaaatgttctataattattgaaaaatgtaattcttcttctaattaataaattatataatgattttttagttttattgatttatatatttttgatattgtattaggagtatggttcatgcattgtcatttggagctccacactggatggggattgaaaacagcttttgttgttgaggatggaccaagatcagatcaaacggttctgcctccacctaaggatcttccattgtgttaacaataataataacaattaataataactaattgttgttaagcaaaataaaaaaaataattactaattgttcaaaacatttgcttttttctttttttttttttttaaaaaaaaattattgtatgcattcattatatagttttttatgttgcaaaaatggcacaaattgttatgtgtataacctatgaaagttgtaggttgtttgtttataatttagtgtggaatttgaggaatgtgaacaaattgtaagaaagaaaatatttgtaacatttctattgagatgaataaaatacacaaatacctttattgtctattttgaaccttttatcaaaaattatttgagagataattcaattaatttttaaagattattatttatttttgagatattataactagcaaatattttaggtttgtaactaacaagtacctaataaaatttttttgggccaaaattaccaaaagttattaaagttttaattgtgtctacgtagctccccaacatgtcccaattatttcaacaacaataaaattttcctaatatgtctggtggctctttttagtcgcctcaattatattacatgtttgggtttctctctcagtctcctccaatttatttttctcacgtcgcatgagaatcccaaacacaacaacatatgattagctagttcggaggattatcacaacaacaacatgtatggtcaattaagatcattattgcagcaacaacctatgtatagtctatgtatggtcattttttcactctacagaatcaacaacaacaataatagcagactactttggttcatccacagactcgacaatttgtggagattttacctatgcaacaatctcctcaaccatattatctttcacctccactgcatcactctcgtgataattgtgaaggtttaacacttagctctaatgttgatgattttgtggaatttagtgatcaaaataatgctagttagtatatgttttttttttttttttt

SEQ ID NO: 65128 - DNA, 946 bp, Cannabis sativa
taataattatttttctaattattattttttagagtatacattggagaatcacttttcctttttaattacattagaaattataatatatcttacttatttcaatatatataaaaaaataataaagaatttattctaaaaatcttgaacagtccgctttatgtggctcacacgagtttgtcagtacatctaaatccttatggcggatatgtaagtcgtctgatcaaatttgaatgtaccacgtgaattgtgtcgttcaaaattttcaaagtaaataactatactaatataaaaataaataaataagtacactaacaattaaagtaaatatttgagaattaaaagaaataaaacattgaaatgtttgctataagcataatatatgctagctatataaaaaaattaacattgagtttttttagttaggtatattgttttagagtttgttgtaggtttaacactaaaattaacgatttctcaatcatatatgctagagaagttgccatttatactcttttttttaagaaacaattttactttttttttttttgcagtaaattttaataatttcattgtagcaatctcttcttattggagaatattgtctcacatggattaaatgtaaaagtattgtgtcatatataagaacatgagctattccactcgtcattaattagttttgacatggaacctcatgattcttaacatggtatcagagccatatcgcaaagacggtgattcaaaattggtaagcaaaaatagtcaccatcttaaaagaagatattggaaaacattatcccatatagattaaatataaaaatattgaaccatatataaaaacataagttatatcactcatcacaaattggttttgagatggaactctatgattcttacctcttctaagcttttaactatccctcataatagtcttataatagagtattag

SEQ ID NO: 65129 - DNA, 1183 bp, Cannabis sativa
tgttacgtggacctactgaggctgaggttgaagagaaggcaaagtcagaccgtttgatagtagaatactttaatggagatccatccatcagcattggttgactgcgcagtgtctttgagagttgcactgagaaggatgatgtttacaagctgggtttggtgctgtttgtgatgggtgttttgactgggaaagaggagaagatcctagttccaccatttattatgagaatggctaacgaccttcctttttcctaccagtacccgtgggggaaaatttctttcaacttgttgaaagatacttggagtaaggacttcgtagaaaagaagaagcatgtggataagaagattgaaaagggaacaactcagaaggagtcgaagtactctgtctatggatatgttgtagcattgcagtattgggcatatgagtccatcctgaagcttgctgagaaatttgcgatcagaaaatcacacagctttcctagaatggtgaactgggagagtaaggaggcgccactcgggaaagaggaagtcatcagattgtttgcaaaaaatgtaagttttttaattcattttatttgttcacgtttatttatttatttcattttaatccaagtttaataatttttttgttcttatttgcagttgacagtgtactccattttatgtccgcgagctcatgaggccgagtttttgagcaacgtcactggaggtgaggctcctctatttgtagatatggaggaattggttattggtagtgatggagagcctactcaggatagtttgcgcagccaggcttcgaagcttgcacagacgctaaaacaacgagtggaggaagctggaatctttagagctgatacaccaccacactctccacgatcagaggctcgttctgttccaccacctgcatcaatgccccattctgcatccatgcctaagtcagcatctattcccagtacttcacagcctcaggaaccaatatcttctgtcatattgacaagattaaagcgtgttgagaacgaacaacttgctttaaagcaagggcagactgatattctgaaagggcagacagagataatgggctacttgaagaccctatcggctctcatgggagatccgagaaggcccagcgcagaggtagagccacagccagacgccgtgtctccaggagatgagttcattcttcc

SEQ ID NO: 65130 - DNA, 818 bp, Cannabis sativa
taaaataagatactaatattgtttaattactaaaataaaagccaatcaatttggttttggtatcaaaatctagcataggtatatgtgatctcttatagatctcaccattaaataatactggcaatttttatcaaatggattataattgatttggtcaaatgtgtcgaaatgtattttctgtaggaaagaatatgcataatgtatatttaagaaataaatatgcacatacataatgacttaattgatagaaaatatatcatttatccaaattattaatatcatcttttagttttggagtagagatgtatttcattaattggagaaatgttaatactcctcctagagagtaactaacactcatcaaagacaacaaactaattaactctcaactaatctacaagacaaatgttaatactcctcctcaagatggagagtaaatatttctaaatctcatcttctctttaataagcttgagctgtctagggaacaatgccttggtggtgaatatgtctacaatctgttcctttgttgagatatgggttgtcttgatcaatcattgatgcactttctctcttatcaagtgacaatctatttctatgtgcttgtttctctcttaggaaacagattttggagcaatgtgttgtgttaccttgttgttacagtgcattataactggtcccttatgtttgatccttaattctttgagcatggacagaagccaaataatttctaatgtggtgttggccatagctctatactcagcttcagttgagaatttggaaattgaatgtttctttttgcttttccttgaaattaga

SEQ ID NO: 65131 - DNA, 676 bp, Cannabis sativa
tgctacaaacacaacatacattacataatacatattgaactgagatattacagtttaaaatttgattagaatttgaaataataaaagagagtatatttatacataagtaaattactttgtattttttttaaatctatctaataaattttatctctgggcgtggccccgtagactagtaacaatctacaagaattgttgatattacgtacaaaatccttgtgtgtttttattttgtttgttttctaattttattctgcagttacaaagttatattctgtaactactgaataactatttcaatatcatatttattattcgctaaataaatattgtacattatagatgaatcattgtttaaaactttgagctatattaaactatctccaagcatactatctaacacaattttttagctaaaataaggagttagctttgaaaaaaaagacctcaaaccatgtaaaaagtggctcatagatagggagcaatcttagtaatagctacctattttttcaatttttaataacattacaattaaaagtacaactacttttatattatttattaaaataatttatatttaacaaatttaaatttaaaaaaatcatgataacaaaagtgaatagcatgattcaagtgatcggagtaacaaaaatagctcactattttaacattttag

SEQ ID NO: 65132 - DNA, 1524 bp, Cannabis sativa
atataataaaattataaaattaatgaagaatattctgttaagtaatagtatattttgttaaagttaacatagaaaactaataaacactgttaaactaagaatttcgttacatagccacattgtatatagaacagatatatgaaaattctacaataggaacacttcatttgtccccataagatagtgacattttattagccattgattatgttgacttttgaagatttaaactatttattatggaataacatgtacattatataaattgaaaaagtgttttattaattgtctttttttttgttaaaaaaatggaagatatattaaactccttgggaagcacatattgagcatgtggcactcagctagcacctcattaataaaaaaaataaatagttattcgcaaaaaaaagaataactctataatgcaatttcttaatgtatttttttataaataatttttttctataaaaaaaaatacattattatttcttaaaggagttattctatatattattttttctagtaatgtattttttgtttttgaaaatacattaatatatttataataaaaaaaattcttacaaagaaaaatatttatatactaatcaaatttatatatttcattaatcttttttccaattttatagacaaataattttttgatttttaaaataaaaatgatttatattataatattttattaattattatgtatttaaaaaaacgtaaacttattagtaataattttgtattaatataatatatattttaattaaaaaaaatagagtaatgctaaaagcattattgatgtagtatttttctaggtgtcatattgctattggcacaattaagtatcatgtcttatataatttaattaatagtttttagagagtatcaccggcttacagatctagatagcgataagcaccactaatgcctaatgataatgctctataacaagatgtaagtaaaaaattaataaatataaaattaatgcttaatacttaatatatattttctatcttatcaacaaaatatataattattttcttataatattttaattagcacatatataataataatagactatttatgatttttgctcctaacattgacttgtactaaattatactccttgaacttgtcaagccgttaaacattccctttgaactattgagatcgttggactcaagaactttgttcaattttactaacgaaaatcggacgtggatgagagttcaaaagacacaatttggtacatgtcaaagtttgagtgtaacgcctacagggacgccacgtgtgtgcttttacaaacttatatttactaatctattagtttaggaaaaagtgtggtttaattaaaactattgattaaatttaaagtaaaactttcattcataatactgtcgtaatgtggggatcccctgctaataaaattcttttacaaccaattacaaaaccgttattacaaaggtaggttacatttcaaatcatagaaaaagaaggttaatcttgcttctc

SEQ ID NO: 65133 - DNA, 1999 bp, Cannabis sativa
tatatatataaaggagagcctaaacaaagttgatgtgactataaatttttctttgtattttcttatttttttctctatttttatatatatatttttctatatttagagttttttttttttttcgaaaagtcccacgtgatttagaaattattgtggtgatatacttctaggttatatatagatcactattttttttttactttaatttattacaaagataagattatttatttatttttatgtaggtaattgtataacttaattagttatatgtttttttttaaaaaaaaaatgaatgcaaaacataattttgtattttttaatgtgttttattgtaatttaatttaaatatacctaaaaaaaatacacaaaagatgacctaaaaaaattgaggagacatgctataattttttttttttttttttgtattttctctttttttcacacttttttttttatatatattttatttatatctttagaatatgagagttatttttaaaaagttccacatggtttagaaaccattgtggtgatatagatgtaggttatatatagattactattttttcactttaatttatctcgaagttagtatcatttatttatttatttttatgtaagtgattgaaaaactcaatcatgcacaatgagttgtaatatttataaataaatgcaaaacacattctttatattttttaatctttgtcaagtatttcatataaaaagttttttcttaagagtttttttatcgtaattttcttttaattgtatttaaaataattaaagataatttcttagtcacccttatatttttttttttttgaataatcatgaagaaacttcattaattcaagtcttccaaaaccagggaagcaattacagtaggtaaagtatctctactaaaaatacagtcagcctcaataagagaagatcgcgccaacacatgcgcaaccttattagcaaaccgcttaacaaactggaaagaaacattgctaacatcagccaacaaggccttacaatcagaaataatatggaaataaggagaagccataaatttattattttccaaatcattaattactctcagacaatcagactcaacaatcacattagcccaacccatatccttgatccaactcaaagcctcctttattccaattgcttctacttcatgagcttgaaaggtaccaaccttattcatagttttttcttgaataatggctccatcagaagaccgagaaaccaatcctaagccgtacctcttctcgtgagcaaagagtgcgccatccacatttattttgatttggttgaaagctggtggagtccaatgctcaatccaatttctattggcattattagaggcatccatgtcctccttttgagcattataccaatctatgaaatttatttttgctaacagtaacacttcttcatatgttggctgttttgagttccgaaccaagtcattcctaaccttccaaattgaccatagcatcatgccacttccaagctctcggcctcacaccacgtgctcaatccatcctcccaccagctgctgaaagtcattgcagcagtaccaacagttggtactcgggtctgtcgccagcattgttgtgcaaaaacacaacgaaccaagacatgtaaggctgtttcaggagcagccatacaaagaggacaaacagtatcaataggcacatgtttagttgataattggaactttgtaggcaagctattcgtgcacactcgccataagaaatctttgaccttcggggaagctttaactcccacaatttcaaccaaaaaccagagttacttggctgtgagttgctagttttggcctgctgcaacagtacataagcacttataactgtgaaatcaccatttgcttctttgcaccagtaccagtccacattgataccagtattagcaagtggaattttccacaccagctgcacatcacgagctgtaacgccctaatgctaaggcacgctacagt

SEQ ID NO: 65134 - DNA, 729 bp, Cannabis sativa
  modified_base (384)..(388): a, c, t, g, unknown or other
acaaacactatggagactacttttataaaaaaaaaattaattttataaaaatgtacacaaaaaatatattttattcaaattgagataaaatgtagtgttagggatctttttttaaaaaaagagtactgttattaactttattcaccacagactttattaaatattttttattttataatatgcaaaaaaataatattatatccaaattttttttgttaattagattgtaattgcttttcatgtatgctattattaataattatatatttttgtagggtgattataattaaataaattaattaaaatagaatgaaaaaaaaatagtaatcataatgtgaggatttatttaaaaatacctaaaaataacaaaaattttacattttnnnnntcttatttatttttttttatatattttatcgactttttttccttacaaaccgttgtttctaggttgttctagaaaagaccgttgcttaaacgttgcgaaaatagagcataattttactgcaacttgaaaacaacgttgttttccctctaaaaaaattacaaatctataaaaatataaaaaaaaaaattgtaaaattttttgctactttttgtagttgttttgttgttgttttacagttattttcatattgttgtctaggtgttgaatgattgttttctagttgctttagttgttctttagttattttttttgttcagctgaacacaatatttattatagtt

SEQ ID NO: 65135 - DNA, 1232 bp, Cannabis sativa
ccatcaacctttaatgtcatgttacgccgaccagctttatatgacctaaaggttgttatgtcgatatttcattcgtgccttaagtttccaacgaaaaatgaggtcaggtgcctgaagggaaataaaatagttgcacaggagtgtcataaccttgtcctgactaaggctaaaaagcagtatcccctagtcagagtttgggaaagggaaaagacattgccaaatagggaaccgcccaaggcggggatgaagatgtggatccccgacttgggaaccaaacacaaatgttggcctagtggaagaattagaaaaaatcggaatcaagctgaatgttcgaactaggaagctcaaaattgggaaaggtttgctgctcgaagtaaaatcagcattgataaaatttttgagagcaaacctagacatttttgcatggccacatgaggacatgttcggaatcgatccttctataatttcacacgtcctaaatattgatcctaatatctgacatgctcaacaaaaatgaagatttttggacaaggaacgagccctaacactaaaagaagtggtagaaaagttgcgcaacaacaatttcataattgaaactttctacccgggtaaggtgtctaatcccgtactagttccgaaactgaaccaaaaatggcgagtatgtattaacttcaccgacctcaacaaggtgtgcccaaatgactgctttccactgccaagaatagatcaacttatggatgcaacaacaggacattaaatattaagcttcatggacgcctattcggggtacaatcaaatcaagatgcatccaccagactaagaacatacaagttttcgaacaaatatgcgtctatactgttataaaatcatgccatttggtcttaagaatgtcggagctacataccaaagattggtaaataaaatgttcaaagaccagactagatgaaatatggaagtatacgtggatgacatgcttatgcaatccaggaacgctgggggcatatagatgacctggacaaatgcttcaaagtcctcaggaagtacaacatgaaactcaatcccttaaagtgctccttcagagtcagctcaagcaagttttagggcttcatcgtcaatgcccaaggaattgaagccaatccagagaaaattcaagccctcctggatatgaaatcgccaacaaaaactaaggaagtacaaagattgactattcagattgccgcactcagcagatt

SEQ ID NO: 65136 - DNA, 2548 bp, Cannabis sativa
ttgtttaaaatttccatcatgctcatatttttcaatattaaaaaaaaaaaacaaatatttatacctatatatttgaaaagaggaaagtgttgaacagattttgtaaagttatctaatcctaacattggaggtaacgtttatcatctaaatcaactttgttgatgtaccccatccgccttgaatcttgctatagcgaaaagtagcctaacgtccaccctgatttagagtcctaagtctaaccaccttattacttattagctatggtaaaacacctgcctgaatccggaccactattttgtctttcaacaatacgtccctgtcgtgcacaatccaacaaataataacatggagttaaaattacaaacatacgtgaccaaggatatcaccattagcaccattaaatagctaaacaaacatgaacaacttaagacaaactcccaagcagataaaaccgtcttcttttctagtgttttgaatatagttttgagaaaccatgttcattattcgaacaattttgagattctagtgcttcacaattctttaacatttaactaacaaacaccaatgaggaaaatagatatttaaataaatatttatattatgtgtatatattgcatggccacttagaaggttttctacatttttaggtaaattctacttttggtttccagatatagacaatatgaactattttcaccaaattctaacagataatctgacatagtaattaaacttagagatgcagcttttagaagtgctaacaattacttgagggaagaaagaaagaaagaacaaagcaccaacaaattctatcccaattaataattttagttgcaacaaacattagcagagacagaagacagtgcacttaaaacatttttttatataaaaaaaaaacatacctacagaaatggcatgaacagttaaggctaagctgctgagatcacataacggcttcggagagcatcaatggccttctcaacagattgagatagcttggtgatggatttggatgctgcaaaatgaaactgaattaaattatattgaataaattgctgatacaaaaaatattgttggttacccttgtatacacacacgatcattctgatttatatagactggtgataaacttgttttctaatgtatgacttagcttgccaattaaatttagttcttcatatgtgaaacatccgattatgctgatgaagtactagcaagttcttaaatttcttaagaaacagaaacagccataaaacataccataagatgtgctggcctgtgcatcagacgtgaactcagaatatgaagtctgtaaaaataacatccagattacatttcaggaaaaaccataagtagtatttagaatgtgaaatttgactagtaactggtaacaaagtatataccatcattgcttcctgactttcatcaattcgttcagacatcttcttatattctttctctgcttcatctgagacttgctgacattcttgattctgaatctattggattagaaaattaaatccaagaaattagctgacaaaatctctttgccacagaaattgaaacatccaatgaaatgattgagcaagcattctgcaaacattgagctatttcccctattcgatggtgttatctagctaaacttttctctcgataaaccgagctacttacttagatctactatcaataaccattaaatagaggtttcattaacatgtgaaactatttccttcaaataatcggagctagagaataatattacatacgtttaaacggctaaacaacagaaaagtctcccccaaaacatacaaatctttcaaacctacatgttaatttaaacgattaccaaatgtgaagatattgtttgttttccatcataataatcataatagaatgaggcatttcatgtaattaacagcatatagtgattgaaacaagattctgaaacttagaagaaaattgccaaaacttgtgaaagtttcctgtcaagtaatctacatttgaaaaagccaattttaacaggaaagccaaatttaacagcataatcttgcgagttatttatggacgtcgaaagcaattggagcaagtttatgtagattagtcagaacttcattcctactgactgatttaaggatagtaataaatccttattactttactattgcagtcttcaatacgtccaaagaaatttcatattaggattttaatttgtcatgacgacagattttatgtacagaaaactgtgcacaaatatcaaaataaatattgagtccgtttgaaactccactgtttattttgattataagtaagcaattgaactggtagtattttcatacaaaagatcaagttataattaatctgaaaatatatcgaaaaattttatagcaattcaaaatctaatgttgagtctggacatcgaagtaattgactgaggtagcttaatcagatcagtatttgtttgcagatcaattataaaatttgagtaaataatccaatgactctcaatgatcaaaacacgttacaatcatcaatcaattagagcaagaat

SEQ ID NO: 65137 - DNA, 1543 bp, Cannabis sativa
  modified_base (27)..(53): a, c, t, g, unknown or other
acggtaattttatccctatgcaatgtnnnnnnnnnnnnnnnnnnnnnnnnnnnttgggattataacaatggatagttcatagcgtattgtttggggggaaaatcgaaactggaaataaacaacccaataaaataaacaaaaaggcccacgttaaaaggcccatcaaaatgaatacatccagtcccaaggatataaagggaggctcaactcggtgtggtcaagttatcgatcctagttttcaatccttaagggagcactacggacaaaaagaaggaaaacagtaaacgacaagaacaagtaaagaaagtgccggcggaagcagaaggaagaacggttgggaataagtaaccgacagattgaagatcaactataagtgaaatgatagaccggaactcgatgaggcacccagataacttgccggcggaggaagtacttggaacacaacaaaggggggaccaaggtaacaccactaacggaacaaaagtccccgacggaggaaaactcagaccccctcagacgagaactccgacggaaataaagggcctagagcataaagaaattgataatttcaagaatgcgatgccgacggacacgacaccattggatttagggagaataatagcattaaaatccactaaaagtacaaacacgtgtaacacgggagttatctattagaatacgaacacgtggcaggggtaaaaagaataaaagaacgagaatacgtgtcaataaggggatatgaggatggtagatcgtccttgcaaaaaaagaatgtacatataaataaaataaacaggacgtagaaaagggaggagtaggaactggaaaaagaaagatccccaaaaagaaattttgactgttttcgaccaaaacagtttggtgccgtctgtgggaacctttttctttttctcagtaaaagaaccttttcgtaagataatcgatcaacaacaagaaagatatggcaaatgaacaggaggatctcacccctcaaaacaacccagataacatcctcggaacaccagcagacactggcgacgccggcgaggacatattaaacccaaccccgtcatggcaagagatcctcgaaaggctaaaacaccaagaaggaagaatggcaactcagggtacgaaaattgcccttcaaaaggaacatatccaaaggcttgagagccaaaatggacagatgaaagttgtcctcgaagggtaccaatgaccatcgcatgcggaagaaaccggtaatcgccaggtggggggagggactgagaaagagaaccacactaacaataacgacctctcaggcaaccatacccgatgcatgcatgaagaaacaggagaaaaaggaaacttggcaattcaagaggccctgattcaccatcgagatcagcccagaaggaccagagattaggtcgaagagataactgaagcagaggcgctccgcacaacacctcgaaagcgaaccatggatctgacagttgctggaagtccatcaacggcgagtaaagagacggagaggctacaggaaatgatgtggaacaaattaata

SEQ ID NO: 65138 - DNA, 1100 bp, Cannabis sativa
  modified_base (558)..(565): a, c, t, g, unknown or other
agtttcaatacgcctcctcccatgcggcattaaatgcaagatgactgttcagatagaatctgacaccacccggagatgctttgctgcaatcttactctctgggagcatacgagacaaatatgccttctccgggaggcatgtctaaggtaatcctgcgcgttaaggagacttagctgttttattcaaatgctaacctttttccatccacgtgtcatcatccggtcggtccacgtattttgggcaaaatcaggggcaacaatatacaatatagaagcaccctatctaatggaaaattcaagaaaatgcacattttcaaggatattatgcaaccttatctatttcggtatttataaataaaattaatctattttttttatgattatatatgttatatttattcaagtcattcagcaaaattttaaaatatttaaaaaatataacacgcaaaaaataaaatttaaaaaatctattattgtacacgtgatttatttatcttatacgtgtgtaaaatagacaatttgaatattaattctaattataaattattttaaatttctnnnnnnnntacaagatatcttaaataactatttcttaaaattttacaagatattttaaataactataacgtacacgactataaaaaaaaatagactgaaaaattcaacaaaacagttaaaagttgcacaaatacacctattttaataaagtaggttttaaaagcactctctatatattatagatataaaaaagaaaaataagcggcgactaaataatttaaaagaaaatttgcggcaaaagtctttaaaaagttaactatgatacagattaatccctaacctcgaaaaatagcggcaatagtcctcaaggtcacattttttgtgagtccgttagtcttaaatttgacggatccattaagttattcaacatgccacgtgttgagtcatcattggtcaaaataataattttaataaaaaataattaaaaattaaaacatattttaaaatataattttgttttcttttcttatttttttctccttcgtcttctacctccagcagtccaccccaccaccacctcataatcattttctttctccaacc

SEQ ID NO: 65139 - DNA, 1014 bp, Cannabis sativa
gacccattatccccattatcaatcattgtcatcattgtccttgctacaatcatattggcgatttgtacttctactaccaaggggtcgttgtgcgggtattgaacgtgtttggtgtcatcttcagagaacgtgatactcatgttcataccgaggttgcttgacagctcgctcctgaacggccaacacattgtcacctagttcatgtcgcagagaccgagcgtatttctcccgggatttttcggagttcccagcaagattgcttgtgttaaattatatctaatgaaataatataatatttaaatgatatttaaaaatattaaatccttttaattttaaattcacatttttttcaaaccttaaaaaaatatcaaatatataatattaatttttaaatatttaaatttaaattgaattgatatttttctttttttatttaataaatatacataaatatctagttatataacactagtatatataccaaacgtaccaaacctataaactactattttctcatactatacttctcaatcctatatatatacttatcgtctaacttagttctcataagcttcaatcatgtccaccagttcatcttcttcactatcttctactatggctacatcgctaataccttttaaatcaataaggtattatatattatatctatttttcttctttgtttcatttattatttaatttaaatagtttggaaatagttatgtatatatatagcattgtttttaatatttctcactcatagaaatcgtgactttttacctttatatttaagtgattaatctaattaaatatgtaattttgatatttttgttgttcacttactttatatttgtttcaatttatttatttatttttaaaacgtaagctgaagaaaatatacattttttttcagaatataaaatatatatacgttaaaaaaaaactattaatgtataactaaatattttcgaaaaagatagtttattaacatataactaaacaaaattatagatt

SEQ ID NO: 65140 - DNA, 742 bp, Cannabis sativa
atctgattttgtttactaatctttcgtatgtggctccagcctttttgagaccaggcaaaaacgtcaaggtttgctctcaaaaattttatcaatgctgattttactttgagcaacaaaccttctccaatttttagtttcctggctgggatatctgggtcgatctcgatcttttctagttcttccacaggtccaacattttttcttgggtcccaaagttgaggatccacatcttcattccctccttgggaagttccctacttagaaatgttttttcccttgcccgtgctcttgctggaggatacttcctgtctagcgttgactaaagaaaggttataacattccccagcaatctgctggtttcctcttagacaccctaccccattctttgttggaaacttcaggcatgaatgcaatattgacgtaatggcttttaaatcatacaaggctggtcggcctagcatgacattaaaggctgatggaacgtccaatactagaaattgtgccattataggtatgatcatcagagcatgcccaacagtgcagggttggaaaactttccctagaggtgtgactccttggccggagaaaccatacacgggcagaagataggggttatatctttgagctgaagccccatcttttcataggtggtcttgaagaagatgttggaagagggtccattatctatcatagttctggccaccatgtttttggctatctggacctccacgaccaacgggtc

SEQ ID NO: 65141 - DNA, 749 bp, Cannabis sativa
tttatatttaaaataataaaaaaagtacacagtgctcaagaaaaatattttaaataattttttttaatctgataaaataagtaatactttttctttattttattaaaaataaatgaattaaatatttttcttttgttgaaaaataaattgaatgtgaagtttttttttttcattaaaataatataaatagtcaaagattcctttataataaccctagcatcccctttcatcaaccaaaccctcagtcgtttctcattctctctctacagcatctgatttcaaaaaaaaaaaaaaagatcttgccatcccttcgtcttccactggaacgacaaagacaaactatcgaaggaaggccctcgtcttcgccctgggacaacgaacgaaggaccctcgtcttcgccgcaaacgccttcggtctccgtccccttcgatgctccaccgtcggcttcgttgccccaaacgccctcggtctgcgtccccttcgtttcacatggctccctcgtctccctctctacctatctctgatttgtgcaggtggatgggctccaacgtcttctgccacaatctccgcttcctatctccgtttattgtagatcaaagcataatgtcaacgctcttctctatttctcctgtctgttggctcaaagcaagcctctagatagtggcactccaaactgagctccacccttcttgtggatgatttttcccaatctttatctgataattccttattcataaaacgaacaaca

SEQ ID NO: 65142 - DNA, 1142 bp, Cannabis sativa
gtttgacagtgtgcttgattttcttgattaagcattctgtaccctcatgtgattcttcccaaattctagagttctgggctctccatataaaataaagaaggcaaccaattgaggctgcaagccttgtttcttgaatttactcactttagctcttctcatccaccttataagttgtggcaatgaaacagttgcagcatgccattgcagccaagcttttagggcatttaaatattctgctgcaacataacattcaaaaaacaaatggctgcttgtttctctgtgttggcagcataatacacaatgatcctccactgttattcccatctttaacatcctatctttagttttgagccaatttaaattgctatccaagtgatgaagctgtgtttgggagtgttcaatctcccccaaacttgctggctccatgtcacttttccctgctttggctagaggatattatatcctttagatacacaataaggctacattgatacttgctgacctgcagtaagatctctgaattgatcttttaatgttacaagtctcctccaataccaactgccttggtcaagagacttgtaactccacccgtctgcatttctgacgtaaacatagtggatccatttcatccaaaaactatcttccttatttgaaatggcctagatgtactttcccatggctgtcttgttccattcatgtacctttctgaacccgagccccccagttgctttgggctgacacaaattgtcctaagctacaagaccaggaccagttgccatagcctgaccattttacaagaaattcctgcatattgcttcaatattgttcactacttttttaggtaagatcattacctgtgactagtaggcatatattgccaataggactgagtttatcaacacagttcttgctgcaaatgggagattctttgaactctaagttcgaattcttgctgtcatcttcttagcaagagcaaagaattcattctttgaaatcttcttagcacaaattggcatccccaagcaatggaaaggcatttctttcaacgaaaatcctgatgcttcaaggattctattgacttcattactggccatgttgctgcaatacactgcagatttttgagggtttggttgcaaccttga

SEQ ID NO: 65143 - DNA, 776 bp, Cannabis sativa
ggaaatcctaccttatttattaatgtaatagatttctcgagataacatatctaaacataatgctattacagcccttgataactcaataagtgtacaattgggcttttctaagtgtggccttttatatcattggatgctataaggggatgtgggaagagatctagatatgtaaagcccaactaatgtcttgatcttgaacttgaagaaatggccttctttatggcccaattaggggattagaaaattggatatattccttgtttcaatattatatagcaaaataataaaaaaaaatgtaaaattaaaaataccaaaaaaataccactaaaatggtaatgaaagggtgatagagggaaccatatgaaaccgaacttggtaattttgaatcatcatgtaggctactaaaatgaaagatgggcattttttcctagtgtaagaaagtgagaaagaaagaaaaaatacaaatattagggttttttttacatacaattggaatttttcaatcttaattaataaaatacggagaattagagagatattttaaactaaaaacttaaaaaaaatggaatataattattatgcagtataattaagctagtaattacattattttaaaatactaattgtgtttggatatcaaatcataattacatatgagagttggtaaatatacagtaaattaatattgtgtaatatttaatataataataattatcattttatactaaatatttaaaataaattatatctattaaaatatatatttttttataaaa

SEQ ID NO: 65144 - DNA, 1238 bp, Cannabis sativa
tgtttttcaacaagacttttaaacctaataaaagtgtcaaaatcttgagatttcatagtgagaggaaagatccaagaaaacctactataatcatcaacaaaaacgatatagtatttgtagttttctttggagggaacatgagaaggtccccaaagatccgtgtgaaccaaagcaagaggttgattagctctagattgagataaaggatacgacagtctatgatttttgccaagttgacaagccttacaaaattccagatttttaagagggcatgggatattaattttgtgcaaaattttgctaagtgtttggaaagatggatgaccaagtttcttgtgccaattattaatatctttagtagtgtgagacaataagacagtaggatttggaacacaagagtaagcaaaacaagattctttattactttgcttagtacaagaggaagaatcaacattagtacaatagtgattacaacacttagactgatttaacaaaggctgagatgaaatgtctgaagtggccaaatgcacctgcagagcagtggtagaaagactagagctatcatctccaaggtgataaagcccatctttgatttttcctttaagcaagactgcccctatttccttgtccttaacaaaacaacaagttttatgaaattccaagaaaacatcattgtcatgagttagtttagaaacactaactagattcttagttattgaaggaatgtgcaagacagatttaagatttaaagattgagaattagaggagagggaagttgtaccaatgttagaaattagcaatttcttaccattagcaacagtaactgtctcattaccagcaaagggagtagccgactcaagattatcaagagattgagcaatatgattggttgcaccagaatccacataccatccaacatcatctccaaaatcaggtacagattgagcaacaaaagcctgaggatcatactcgaaactctgttcagtgagattaacctgaggctgagcagcagaagccttaggtgtaacccaatttctatcaaaacgatagtggcatgtggcagcattgtgcccaaacttcatacagacttggcacaagggtctgttattattgataggcctggagttatttgtccgattgaagaacctggaggagttttcagaaccttgtccctttgtagaactattaaagaacctgtattgaccatttcttgaaccaacagagagatttgctgccat

SEQ ID NO: 65145 - DNA, 851 bp, Cannabis sativa
ccacatgcactaagtactgctactgtactagtgttggtagggctaaaccgtaccctgagtatccctgattattgtaccacatgcactgcctactcattccgtagtaatgttggtaacactggacgatcgtacccattaaaacatcatatgttataccaatgcactgagtaccgctactatactggtgttggtagcatatgaattacacaaatagcatgtatataatacacatacacatatacatgtacatgttctatgctaatcttaaattgtttccaaattcaagtgtgtcggtcgacttgaatggaaaatcacgcactgaatgaaggccctatgtcacaatcacatatattgactaacaacttactaaacctttctggggatctaaactcaaaactaaatatcgagaaaataggagaaaaacgacattacgggaaaactatcagaataatagtaagctattttctataaaaacggggagtcatttttcaggttctacactagtaaaaacggtatgtcgtttttcaatgcagaaaaaaaagactctcaaaatcgactaaaaataactccaaactccatatgaagccctagatcacctaataacatcacaatagaccagtttcaagcaacaaaacctcaaaatacgtaaaaattcaaaaaccaccattgttgagtcaagtttgagttcttgaactcaaactttctcaacaacacagccatcccctaaaaaatcattatagcaagcttaaaacatcaattataaactatagaaacaccccaaaccaaaccctaactcagacagaaccgaaatcaccattgtgcgtgctttaatttaaaagaaaacttgaaaa

SEQ ID NO: 65146 - DNA, 939 bp, Cannabis sativa
  modified_base (570)..(570): a, c, t, g, unknown or other
cttcaacttagcctctcgcttaaggtgaatgagctcatcctccttatgagctcgttcaggccgggcaccagcagatttccccttcttccctgtcacgcacttagaagaaaagtcctctagataaagcctgtactgcaccaaatttttgtcggaggtcaactggatgatatccctgtcttccgccggcaactgggcaagcttttgagccttatctctaagagtaagggtgatgggaggacggtgatatgtcaaaatctgctgaaaccgagtccgggtgatgttcagatccttcaccatgaagtactcatcaacaaaacgccctattttgttgatgtccttgtggtctgtcttgctcaaccatttgaagcctgaaacttcaagaaaatgaagctgaaacttcaagtctgaaatcgactatttgttgattggattttggaaaacgtcaaaacataaaagttctagttctctcttttatctttttggaacatcttgaatcgtccaattccaagcaatattgagagacttatggccaaaatactatcagtcgacgcagtagaaaaatcacttccnacacgggccgcggcatggctttagcatgccgtggctcgcctccctaaacagcacaaaaattgtatttttctctcacgtgggtgttgggggtttcttagttcgaataagcatttaacgtgtgcgtttttccatctttttaggccctgaatgcctatataaagagcagaagagagttgatttcatcaagtaatttcagagagagaaaaaaagagagaattcagataaagagtggagagatcaactacaatactggacacatactgctcagggttttcgggattcttcttttcttctcttctctattttcatctcttttctttaagttaatatgtgtaattgtgcttcaatgaacatgtgtagctaaacact

SEQ ID NO: 65147 - DNA, 775 bp, Cannabis sativa
cacaaattcaaggatcataaagtaaatatgggattcaattaacctataggcaagtcattcatcttatatatcacaatttatttccacacattaacaaataaacatggaactaactttaatagccttttcatcatattagtcaccatttaacatttacatattgttgtttaacaaagaaaaacatttacccattattattcaaaaacagtcatataagatagcaaagtggatgaccaaaacaagttacatgtatataatatatagttacaggtgaaaccgtgatcatctactatagttcatcaaacaattggaattactttatatatctcttcggttctagacaaataaagttaacacttctgttgagagagattaactaattagctagtgacaatctatacatacgtaacgatgacaatggttgtactaacaattttgataatgtaaaattaaatgtaaagcaaaaatatcaaacgtcacatatatatgtatataataatgttatatatattctataaaggaaaatatattcatttgtacatgtaacatgtcactatataacatttacgtccctgtagcgcaggggaggaggccaactactaaccaatgttgtagctaaacttgatcacattaccaactttctcaccaatctactgtatatatttcaatgtttcttactttagcaatttaaattaggaataattatataaggtgctatttgttttgtaaaatatttatatttttacgtttaaaaaatatttttttacatttttac

SEQ ID NO: 65148 - DNA, 552 bp, Cannabis sativa
gggatcttggagcaagttcctacctttgattatttttcatataataacagctatcagagtactatcggtatagcaccttacgtgattctgtacgataggaatgtcgatcgcctatccactgtgatgagattggagagagacgttatcttggacctgaattggtccaaaggaccattgaagccattgagaagatttgatctcgtgcttgcttcacaaagtaaacaggaaagctacgttgatccaaagcgtagggtattgaatttcatgtgggaaattctatatttctctgagtgtcacctatgaaaggggtgcataggtttgaaagaaagaaaaaaggatattgtagtgtattgtagttgaattaataggtcccattgtattttgtggatatcaatgggagtttatagccactaaaatatagtgtattttaggatattgaaattgacttttaatatgggtcccactcatttaatgttatgtttaattgatgtaaaacatactcattttttttaaaaaaaaattacaaaataaattaaaacactcatttttctt

SEQ ID NO: 65149 - DNA, 1407 bp, Cannabis sativa
ttattgaattgtcagtaaaaatgtgtgatatgactcttctgagcaatacagccgcattccccatttactttactatctcctcattttttttttttttctttttaaaggataacctccttaaaagaaaatagaaaaagaaaaaaaaaagaaaaaagttaaactataactacagaaacggaaggagagtatagaaacggaactgttggaacttgctttaaagtttcatgtgagtttcaaaaaaattaaacatgtgtcatttcctcattattgggatagaagggagacagaactttggtgccaaaagatttttattcattacaatgataccgactaagaaatttacaaagttttagtgatccattctaaatggttactaaaataataggtcaccaaagccaatttttgtactattgctgacttttaaggagtgtattataaattttctcctatatattaattattacatatacagaatggtaaatttacactaaattattattagtgtgttagcaatttttttttttcccttaataaacaactctctgttattgtctctagatgagaattctcgtcctgtattccctgctaaagaataggtggagacaaaacgaggaccaaaacaatagtgagattattttacaaaaaaattaaaaaaaaaattacaaaaatatggttgtatgaagttttagatattttttataattttatttatgaaaaatatgatttcttaatgcatttttatgttatactattattaattttttttttattatttgtatgttattttaatatttcttgaatgttattgtcctgttacttttatgtaattttcttattattttcgtgttgtttttaaaaaatataaaaatataaaaaaattaaaatgtaataaatttaccaaaaaaaaaaatatatattttatgtaattttctgaaaaataataggtaaaggagactggagcggagaatgcattgctcggactgcccatttcccatccgcgtccatactagacgacttcgatagcccgccaacaaaccacctccacatatgaattagtggttaaatggacatataatgaaattacattacaaacgaatcacacgtgtttgacttaataataagaatgataacaaaggcaaaaaaaaaaaaaaaaatgaaaaaaattctgtccgcatgatcatgaattttaaaactaagaatcatgataaatacatagttcatatacgaaatttcaaagaggcgaggggacatgggcaaagggagtcgcaatcaatagcaaaatgtaatgattggtccctaacaatatgtatctataactatataaaaatgagaatgtggctttgggctttccaaagtaaatgacataattgtccttctttttttctatttatagcctttataaaaaaa

SEQ ID NO: 65150 - DNA, 727 bp, Cannabis sativa
cacctggacacctaatgcccgggcaccccagtgctcaagttgacaatctatcaatcttggccacttccaagcatcagatcaaaaatctctcttcaatcttttttttcttcatccaaagtggggaaaaaatgctttcaggaaagaaacaacccatccgggtgccagaacaaggaaccagccctcaggttgacacctagttctggcctagcgcccaagttaaaattttttcaacttaggccaattacaaggagtttgtttgaaaataattctagtcatattctccttcttcaacaaatattaagattcaaatatttttggggaccaaacggaacatccaggtagcttaaaactggacccagctctcaggttgacacctggcatagggcccagcgcccaggttaacatattgtcaacgtgggccatacaaaattagttttctgaaagagtcttataggcattttttgtcattagaaataacaaagatacaagtaaactcggggagaaaaccaaaagtccaagggcatcaaaacagagcccagcgcctaagttgacaatcaacatggtgtgctagtttcaaacactcaaattgcaattctactttgagcattctctccaaatggcgtaagtcaccatggcgccagcaaaaggtcatacgccgacgagccattgccggcgataaatagcaccggcaaagctttgccgccgagcttaagcgccggcaaaagta

SEQ ID NO: 65151 - DNA, 604 bp, Cannabis sativa
ttaatttttgtttatttataatctaaaaattacatatttaagtgtaatagttacataaatttaagtatttatttatgctgcacgattgaaaattaggaattgcaacaaaaaatttacaacatgtacataaacttagaagtactcgcaatagagtagcctcacgtcatattcctatggataaatgttatatttggtaaaaattaacgattaaattttttattttgttaaataaccatttgaactctgtattttttaaattagtacaaaatagaccttcaatttaatttttattaaattaaaatttaataataacctaacctgaatgtgttatgacaaaattagttacatttttttttgcatatgttcgtactaaaagttgactctatatattaaaaaaaaagacgaaaattgagtttaggatctattttgtatcaaaaaatacaggaaattatcatttaacaaaatatgtggttcaatcgataatttttatacaatacaaaatttaaaataatattgaaaaatgcttaggtagagtcattaaaaacgtctgtacatataaatattttcttctattatgtgtcactctcatatttaatactaatat

SEQ ID NO: 65152 - DNA, 1147 bp, Cannabis sativa
gttcaatttgcatgcgttctatattctcagacatcaataacaacttatttttcatttaaatcttctgtttcagtttacccctttgcctgtgtggcatggtcgtggttaccgctccctgggttttcgttttggtaatatttgttacattaggtaatgcttcattgtgccacacaaatctataatataattacaatccttgcacttggatttctttgaaattgattaggattcccgagctaatgcgattcacttgtgcagcgatgttagtgaaatacctgaagaaacttatccactcctcaaggattgtgaaatcctgattatggtgcctccctattctttcatcgaactattctgtttaactcaaaacttttatgaacaattacactcttcaaaaaataagtatattaattcaaaaatagttcaaaagcataataataacaataaattttgggccttgctgatgtttcaaatcatttcctcaggatgccttaaggccggaccggtcatcatcaacacattttggacttccaaaggtaaaatccaattcatccctacaataaaactgtcttagtgagaatcttaatttcaatttgatctcttccaggctttggaggaagtgcggaaaattcaaccgaaaaaaactctgttcactggtatgttttaacttcttttcttggttactggttttatttattagttacaagaaaatttagtttcttttgatctacacctttaatttactttcacaagtcaatcaattttaactcagttataaaattatgtgagatcagggagacaataaggttattgtaattattgaaaatttaataaattatatatttttttcttcttgatttttgcacttgtaaaggtatgatgcatctaatggaccatgagaaggtaaataagtatcttatgaagttgatggagacagagggccttgatgtacaactgagctatgatgggcttcgggtacctataattctctagacttaaaatcaatctcataattaaggaaattgtcttttgaaccacatttgtcaactgatctttcctggactatattggtcttcaaaataagaaagaagaagaagaaaagaaatatttttagcactttttggtgcatcatccaatttcatcacttgac

SEQ ID NO: 65153 - DNA, 709 bp, Cannabis sativa
tgtctgcatcatggatgagttaactaattcattatcttttgctctcaacctcacagagcccgaatgtactatccaaacccttcacgagcctgcccccacaaacactcccgattctgagattcaacccattcctctcttccttgtagtcaaagttcacacggttaaatcctttaaccgcaagaactttatagagaaaatgaccaaaaattggaacaatatctctcggaatcctgtgatcatcactgatcgctccaatggtctcttcctagttgagtttggttgtgacggagataggcgtcgggttttgctgcagcaaccttggacttatctcaaccaagcaatcctcatggaaattcaaaattctttggatgtcctcaatggggatagcttgctcaaaatacctctctgggttcaagtgttcaacacacctttccttaaacgctccgaagagttggcggttcttgtctcatcctgcctcggtcatctcctggaaatttaccggccttcgttccgtgaaacttggggaccctactttcggcttagggtcatgtttgacgtggcccaacctcttccgcgaggattacctatccacttctccggtataaacaaagtggtctggctcgagctgaaatatgagaatctcccagatatatgcttcttctgcggcagaatgggacatagctacaataaagggtgcatggattacatg

SEQ ID NO: 65154 - DNA, 850 bp, Cannabis sativa
taacattttgttgtgactaaaaatcacatttagtcacaaattttttttgttgtgactaaaaagttgtcactaaaaataacaattttttgtagtgtggtgttgttggagagatagcgagatgagggtgatgttggcgagatggggaagcctagtgggtgatgttggcaggatggaaaggccaagagaagaggttggcgacttagaaagagaaggtcaggaagaaagtgagcaagaaagagggtatgtgtgaatgaggaagcggttttgattcttcactcagtatgcatcaagcatgctcattcaacaatcaatgcttagcacgttagtgttaaagataaagtcgttaggccacaataatcaagaacacaaggcaagcacgcgggcaggtacatgtcagggtacaaccacgatgcctgcatgacccgagtacgagtagtggaggagacacgcctgaccccgacaccccgataaggggtacacttcaaccactactactgcaccttaggaccacctaacacccgacaaccactacttggcaccaaaccacctcctgcgacctaacacctacaggagcgaacatccattctgtcatttgggggaccactagagaattattttgtaaacacaagccaatgaagctcacctataaatacctcattttagaatgaatgggaggttggaaactctttgtagcaaaaagaaaattctgaaactatcaatagaaacaacatattagcactataattactctgtgatcttttcttaagttttaaattttatcctcatctctatttttattacaacccgattacattcttatatcgagttctcggccactgattaatgagtt

SEQ ID NO: 65155 - DNA, 705 bp, Cannabis sativa
agtagaaaaactataaaacaacacataaagataaacagactacaaaacaaacaatcaaaattgaaaaccacataaaaaataaacctcattaatatctgcaagaattcccaaattattagtcttttcaacatcattattggtgcattctttaacagtagatgcattttttgcaccaactacagcaacaacacccacctcatagtttctcacatttctgtcagctggctcaccttgcccaagaccatctccaatatcatcaacttcatcatcatcctgactaccatccccatattactcatcaacatcatcatttcctttcccattctaatcttcagcctcatcatcttccttataagtagactcttcatcaccacatctttttcattatcgacactaacatccacatcatcatcattttttgaagtgcagagcacatcatcagattgtgtcccaatttgtgtaggagcaacatgcgagcattaacaataaacaaattaaattttgaaactaaacctaaacaatatataaaaaactacataaaaaaacaaaaaaacaaaaaagttacctcgataagaatatccaattttttgttcatttcagcaaaagcaatcataagaacatgttgctggctaataactgttgggtttaatgccctaaataaaactctatttcaatgtaatttattttattcaatatcaataaaga

SEQ ID NO: 65156 - DNA, 568 bp, Cannabis sativa
tttttgttggggtattttggtagactctttatctgttttggtatataaaacaattttttaataatttttttttttcataattgtagatgttatagttatttaggactatttgtaaaattttaaaataatttaagtagtttacaatactaaataaaatttctattttttgttgtaggcacggttaattttttttatacgtgtgacaattaactgtttaaacttgatttttagcactataaattatttagaattttttgaaaattaaaaagaaaaaatagattagaaattttttttgaatgctgaaacagagaaggagtctacctgaacgaccaaggagtagggctggcaaaatgggtcagacacgataacacggttcaaaacccgcacgagaattagcgggtttaggtttttcgtaaatgggttcgagtcatgttcaggttgactcgtctaacctccttaataaataggttatgtcgagttgacacggctaacacgaaactgatcatttaatgacttatttaaagttattttagtactttaaaaagtcataaacgtgttgaatacttca

SEQ ID NO: 65157 - DNA, 602 bp, Cannabis sativa
tttgacatgtaacaaattatgttctcagaatttttttggtcgttaaaaattccttttgaactattgagatggttggatttaagaacttttgtccaattttagtaaggaaagctaacataaatgaaagttaaggggacatgatttaatatatattaaagtctgaggaatataatttaatacataaacaatcactaaattagtaaaattgaaggaaattagacaaaatccttaaattcaataatctcaatagttcggaggaaatttttaacagttagaaaaattcagggaatataatttagtacatttcaaaatttagaggacaaaaatcctaaataacctaatataaaataagaaaaagaatttgggttagagttacttgagctgcaagagtaggcaaaaaccacccaattttataggacgaaagagtcaattgtcaaagccattaagccaaacataatatgccatgacatccacacgcttcttctaccccaatttagggcgccaagtttcactcttcccttacaatttctatttattttctttacactaacataataataataaataatactttaacaaaatattacgtgtgcacttttttt

SEQ ID NO: 65158 - DNA, 575 bp, Cannabis sativa
gaccacctcacgttgcattgctcgggcaggttggtctcaggactgtgtatttgagcaagggcgtccagaaggtcatccatgggttttgctgctcaaaataaataaaggggtctaaacattatcaaaaaccatgtatgcaagtataacacagtgaaactagtcctatcctgatggtctaattctgtcctagcaaattcactaattaaaaggctggtgtcgtcatccctagaaagctatcagagggaaggaaccaacttgaagtcatatatgaggaatgatccaagaggattggtacgggaggaccagagcccatccgggacgacccaaaaagtgacttaggttcgaaaaataatagctcttggcattgtcaccccaccgtgaatggggcattcagaacttatacagttaattataaaattctactggccttaggccaacataatctcagacagaatggacgcggtgaatagtcaaaggggacttacaaattctagaggtattggcaccgggagccccagggttgggaaccagaaaagggaaacttaggccggattggggtttgctccttccctgct

SEQ ID NO: 65159 - DNA, 1084 bp, Cannabis sativa
aaaatatgtccatttaaatattatttattttctgggatattacaccatgcgttataaaaatagagaaaaaaaagttgtcaacttataacatcatgcgtataaattttgagatattttcttcttctaaaaaaatacaaatcttagagatattttttagaaaataattttagttagtgtatagtatgtttgagctatatatttttcattagattttcttttgtattcaaattatctatgtttctataattattaattgtattaagtgtttttgtcaattatttaacatttagtttaataaaataaatgtatagataattttttttcataaaaaattaaaaaattgagagaattaaggagaaaatagataaaactagttggagttattttaaaatgacatgtcaccgtctcatatctctcctttatatataaatatatagatagatagattaattctactgcgtctgctcttggagcttggaaccataatgtgtataggcgacaccaaaagaaggttaagaatagataaaaaaacgcagattcaaggccttgacaatagttccgaccttgaaattaaatgggacataagaaaaaaaattatttttgggtccttatttaaaaaaaaaaattgtattttttaaaattagtaaaaaatgtgtattttcaaaagtgtttttttggccctgggataggtgagccctgggcacaggcctaccctgcctatgcgcagggccgaccttacttgacaatcataattcttcttctaataggttgcatcatattttagggcgtttaattacttttagggcccgtatagaattcaggagtgaattggaaaagattggattagattggactggactggacaagattggattatgttgaaagtaatcttatatttggtttaagaatagtggactattttatttatttttgttatcccaattttggcactttgatgtggcatcacatactggtgacacgtgaaatcgacttcacatatctgtccgaaagagatatgccgagtagaacaccacatgtatctacacgaacgaagccttcttagtcgggcagtggacagtccgaa

SEQ ID NO: 65160 - DNA, 688 bp, Cannabis sativa
tgtttatgtccagtaaatcctgttcataatcaactcctcaaaataaaaaaaaaatggatgaccaagatcacaccaaatcccatatgatcaatggtcataaaatagccacacaatgagcttataaatacattccccatgtaagtatacattaaactaccaagttaatcattgaaaataaataatcaaaccactaaggctataatttggggatctttatgatttgacttggttagaatgggtggataagatgaacaatccagtgaatctgtaatggtccctttttctcatgtgaaagaaataaatgaagtagatttccatagctagagttgtcccaaattttaaacaagagacaattatgtgtatgtttttctatagacaattatctcaatataattaggattattagacaaaaagcaaagaagaaaagtgtctttctctttccattactgactctcacgagaatgaagagaagtgttcccatttttcaactttttattatgtaatgtaaagccctaaaataaaattagttgtacatctttgttgtatgatacaggaccattcatataataattataataatttgattaaatgaaatgagatccacacaagagctaccctatctttgattaatacaaccagacaaaatacactttcattttcttcctgttcctatcctactcttctcttg

SEQ ID NO: 65161 - DNA, 832 bp, Cannabis sativa
tctttatgtatattcaattcattccctttttctgatatctgtactttttttcattgaagcgtcttagatatacatgtttgagtgacacaagttggaattcgataccaaaaccctccacacacccacgcacctctcactaaccccttttggccacttgagctagccaaaaaagtagtttctatatatgtactatgtactcaattaatgatgtcttctgcaaatatctaagctttgccaagtgaagagaagacaatctttcatagaataattttaggttgttttagcttgaagattttagttaaggctatgtgatagctccaaatgacatgttatattgtgtgaagaaattcgggccggccttaggcacatgtgttaggctcgtgcctagggttacacttttcagggacccaaaatagaaaataaaaagtatcgttaggtttttatttaaataaaattaagtatattgtaaacaacaatagtcatagcttagctggttgagtgtatggcacattacatattgatactctttttaaatatctttatatatatatatatttctgaaagtgatgactctaaaatttaaatacttaggtccatatattctaaaaagtcggctttattaacactttttagctagtactcttttaaagcaacataacttcctttatatatttatagtgcagattttaattgcctatttaagtggacatctgttagattaatagttgagttgatcgaataattggtaactggtaactattgaaagttaaagtatattaaactaagcttagaattagataaagcttataattagatttttatttattatttt

SEQ ID NO: 65162 - DNA, 1532 bp, Cannabis sativa
tagcgggcctttctccaaaaaaaaaaaaaatatttgtgttgacatagcaagctagccttgtaaatagtagttgcttgatattttttaccagcacgaaagtacgttagtaaaagtgacttttgtcagtgcattaataaaatgggctggaaaaaaatcactttcaccagtattactgtaatgcacagacataaattacttttacacgcgcaaaaatatatagctgggtgttttactttttttaggtttatattttttctcagtttaaaaagctcaaaccacaaattcattttcattctcgcgcacaaattcaatatttgaccaaaaaaaaaaaagatttgtggtatttctaacaaattttttaaaatactattatgttctcatgaagtgatttttcttgcaagttggaatttgtatttccaaagaaagaaaatgtaaagagagtttggcctgagaagtaaaagtggaaagggacctaactagtacaggccagtaacgtagctcgagagagagaaaaaatccactcagacctactaatcttcaccacttctaaatacatgtcattttctaacgtattgggcgctttgagaatgtgtgtattgagattgaaaacaagattagcccgcccaatttgaatggttttattattgggatgggcgtcattttttaaaaaaaaaaatacatatttttacatttaatttttttatatatatatttttatagttttttatagaaacaacaaaaaaaactacatgaaaataacatcatataacaacaaaaaataacatacaaagaacaaaaaatcaacaacaaattaataagagtacaacataaaattaccgtattttctgtaaataaaatttaaaaaatcgtaaaaatatttaaaattcagtgaaaccatatttttataatttttttttgttgtttttgtatatttgtaaaataatctctttattattgaagtttttacatggtatattattttttttatatttattacttttatactgtaacaggcattttttaataattttattgttactttatattttgtctcatatttaataggccctattcaagatctgttaattttttaaaataaaaaatattagtaaatgtttggttatcacatttgtgatagtatttcatttttcttattttaattcactacaacaaatttgttaattagcgacggacaaaatccaccgctaataatgttggtattagcagtagacccaatgtccaccgctaattggacggtttatttttttctaaaaaaaatactattagcgacgggcagttccctgctacttcagccgctccatctgctccaaccagtataaccatgaataatgacttcgcaaataggttggatagcattctggcccggttggataaacttgaggcccaacaggaagctgtcatgttggcgcagatggggttagtaaatagtcatatcagtatgaggcggtccttcacagaaagtcagaaaaatctgaaggagacactattggctaagatggaaaagttgatgg

SEQ ID NO: 65163 - DNA, 903 bp, Cannabis sativa
ttttacacaataggttaatcccaaaatcacatttcataatattcacatttgagactccaatactggaccaagtaatagatcttgaaaccagctttccaacgatataaagaacatctaaaatggagtttagagtcaaaagttatggccaaaataaattttaaaacaatctaccttgctaaacacatagcgggccgcgacactcaagaacaggatcatggcttctgggttaaaaatccagaaaaactcattttgggtacccaaaaatgcaccaaactccacacaaaaataccataacttgacaacaagctttcaaactaaaatgaggtattttccaagcattaatacatcaaaatacatgctaaaaacacccaacataaatcatacacaaaattcaatttcactttatttcaaaaattctccattgaagaacactaataagaacccatgataatatctaatatattctcacctcaaaataccaattctaacaacaagagaaatggtaggatccaacctagaaacattgattaaacacaattcaaaactatagacacatctataatttttccctcacaaatcaacatcaacatctcaagcacataaacatacaaaaattccattcaagaacacaaattcagaattcaacaagagattagagttcaaagaaactaccttaacacttccttaagctcaagcatggatccacacaagaaattctcttccaatttcactccaaaaataagttttctttttcattcaaatatcacatgaaaaaaatgagaggtttgagagaagggaagaggggtctgtggtgaggctccaaaacaaaaaagaaatgagcttctcatttatcacttagtcaagtaatggtttatattccaactagggaactaagccgcgctt

SEQ ID NO: 65164 - DNA, 578 bp, Cannabis sativa
tgatacattgttccttcatcaaacttctagttctaatgaattatatgagttaccttctttgttctgttattatccatgaaattatagttcttttgctttcataaaagtcaatgttacaagctattttaaccaataatatgctgcactgactggttctatattattaatattccttgtgtttattcttcattgaaccagctttctttgtcttttcttctgattattttggtagaagattaagaatattccataaaagggatggtcgcattttatttctagcctcgttgtactagctgtctatctctaactagagtgtatttttgttaccatgtgaaggtacattgaaaatttcgttaacaacggctaagaacattgaatgtctagaaggatatatcagtagcttagtcacgcgattggttaaaaggatgtgtgccccagaaaatggtaacctctttcttgtagttagaatctttgaaaacctaggagattatcgtagagattgtgatgaacttgttcataaattttttttttagatggcctcttaacttaactttgtaaccatatgatgacattcacta

SEQ ID NO: 65165 - DNA, 987 bp, Cannabis sativa
gtagaaatttacaaggtattaagacaagtaagtgggtggaaataagaaatgctctaattgaatatctatcagaaatgaatacttaacttgttactaagttaggctagtagatcagcttaggagatctcgtagaaggagtagaaagacataattacgaattatgtactatggggtcttaagattttgattgagtagtaacggttggacatacagagttaatatgttgtctattagtgtagacaacttatactataaatgagaatacagaattcatacgaaggaatagtctaatcttgtaaaattccaaggtggatatttttggccatgatgttaagaattaaagaaggttattgagtaccatgaaggttaaagcgaaaatagtataatgctttattcttgaaaggtgggtaacctgagaagatcaatagaatattagaaatatattgtgagcatatttgataaaggttagaatatcttagaataatatcttccttgatgaggtgtttatttaaaaattgataattgaatgtaccactagttaggtaccttaataagtgtggtacaagagaaatattatatacatgttcactggattaaatagactaggtagccttaacttctgcattgtccggagtatataatgtgttttatgtctccatgttcagaaaatatgtattagactcgacccatattctgagttgtgatgatgttaaacttcagacaaatttattatattggaaaaacatgttttggactagaaaaaaatggaagtactatgaaatgagacaattccacgagttgagaaagtgctatagaaaaagaccaagatagaaacaataatttgagagttagaatcatcaataagggggtaatatcttgaatggtttaaataaaatttgaggacgaaatttctataaggagggaacgattgtaatatcccgataagtctaatggtaaatattacttagggtttatatttatattatg

SEQ ID NO: 65166 - DNA, 1241 bp, Cannabis sativa
cctaagtggacaactaactaactaaccaactgtcataactgtcaagacagttatgacattaaccgatttacctatattacaggacacacaaaatacaacactataaatatacaatgtcatttcgctgagtaatgatcttagagacaatttgcaaaacatcataatgtgcaccacttgtaccaaataataacaatgctcaagctattactgaattgaaaaaatccaatcaaattaaagaagtgagaacccaatattgtacttcaaaatatacattattttaactttatgacaagcttttggtagtatatgtaaagaaatagccataaagctaggaaacaaaataaaagaaagacttattagtggtgacaggtgagactgagatacctatagaaatcaaaagtattaattgtccccacataggaaatgtgggagaatatagaacattgatactagttctctatgtacacctgctctgctttacacactgttactatacttccctattttcttcttacatgacattttttttcctaaaatattcttcacatcctttctttttttctagaataataataagtacacaaattttaccccacatatattactaatttgtagtactaaaaattaatatttaaaaatattaaaaataatccaaaagtttttatttttccaaaaaaaaagttctaaaatatattataaacaattaagtaataaatacaaataatcttttagttaaacaatagtataattcaataaaaaaataaatatcatattatattattgaactaaaaattatttatattaataaagttaataatttttttttttctagtgctcctttttatttcaaaagtgttcttattatatattatctaaaaaagtatgagaagaacatttcaaacaaaaaaagtatacataacttaataaattaataaataaacaaacaaaaaaataaagaggaaatattaaatctaatcgaattaaaatagacaattgaaacactcattatatactattattaaaagtgtattaattgtccccacatcaaaaatgtgggagaatattatacataaatacacaactttccatagaagatgacctggctaagtcttattttatctaaacatatgaccaaaatgagcctttgaatttctgacaaatctcataaatcttttaatatagagaaatgtggtaacaagataagataagtgtaattaaatatcgggtctcatataatttaa

SEQ ID NO: 65167 - DNA, 707 bp, Cannabis sativa
attctgtttgacttcggggctacacaatcatatgtagcgtcaagagtaattaattagctgggtagccctagtgatatctttgaggtagggtttggaaccctactacctagtggagagttggttatctccaaaaggtgggtgaggtctgcgctaatcagaattgagagtatggagttaagtgtttatttggtggagctatcattgaccgattttgacattatactcgaaacagaatttttatccaaatactagaccaatattgactgtaacggaaaaagataacttttcaacctgaagatgaggaaccatttgtttatgtcgggtccattcagggttcttggattctgattaatatagctctaaaggctagagatttactacacaatgggtgtgtaggatttttagtggttatgactctaatagacctgaaacatttgggcttgaggatgttagagtggtgaaagaatttctagatatattttccaaagagttacagggattaccaccataatgagaaatagactttataaaacatacatgtttacaggggtgttcgcggtgcgggttgtgcatgttgtaatatttttttcaaactaaaccgcatatgccttttttgtgatttctcaaatcacaatcgtaccgtgagatcttaaaactacaaaaatgtggtgttgtgttgtgcaatttgagcgttttacactatcatc

SEQ ID NO: 65168 - DNA, 1551 bp, Cannabis sativa
aagactaggtccttacaggaaaaagggtcgtctaactgagcattgtccacggaatctattcactaccctcgctatcagtctcatcttccacctcatgatctggaagataaaagtgttcgcccatctctttgacctccgtgccaaggcaatccgtggatacgcaaaatttccttgggcaaatattgtggagtcgctgtctcacacctctaagatgactagttctactagttcttgcactattacatctattttgtcactagacaacaaaccttctccagccctagctataggagtctcttattcagatagggaggtgggtatgaagctatcactcttttgagactcatatatgaaagccccctcctagagtcgtatctcttgctgtctgataggtcgctcatctgaaagacagatcttttcagcgtggtgcgagtgcaatttgaacaaaaaagtgttctcacccaaattataagagttcaaaatataagtttatagaattgatcgtatacctcaagaaatggctgggcgtttcctagtatcctaagggccatgcaataacatgaacattatatcacagggagacacccaccatttcaagaattcaataagttctgacagtgaataaaaatgcaagaaaatgaaaacttaccacacgtctcaagaaatggttgggcatgtcacagtatccgaaggggcattcgatttcgcgaacattaagttaatgtgacactctcaccatttcgagaactcacatagtttttcataatagattaaagtgtaatgtaacctaaagctagatatgacttaagagttacaactctaaaacaaggttgccctgggttaactaaaagtgtgagtatgcaagaggatattatcatgaaaatgcaagcatccaataagttcatcttggaacctgcgagtattcaagaagttcatcttgaaactcgtgagtattcaagatgttcttcctgaaactcgcgaatgttcaagtttcaagcacatattttctagaaaaataccttattttgcctaaattgtagaattcaatttataggacctatcatttcatacacttgctacccctaagaactcaaatgcatgcaaatattcaaggaagcgacaatgattatagaaaagaaagttacttgccttgaatatgattcttcctggatgtttttgtctgtgatcaaaccttcaaaattttcctgagttggaaggaatttgaaacttcagaaaaatctcaaggattttgaaattttgaataaggggaagagaatgtcaaaaatgagagggaaacaagtcaaggttatttcgtgtccgtggggtttaaatacaaatagtcctcatttattgggatgaagacacgtggcaagggaatgcctaaggtcttcccatccaacaatctccatagaacacgcctgcgcataccccgaagggttattgttgtcgaaggaattttacaacaccaaaataaattataataataataatatgaagaactagtgcgagtactcacccagaatggcaagtattcaaatttgggacacaaaa

SEQ ID NO: 65169 - DNA, 1027 bp, Cannabis sativa
ttcgtaatctacattataacccatacatcaactcaaatcgtaactcaagttcaaaaaaaaaaatatatatatatatataaaattaaaaataaaaatgatataactttccgtaaatatataaatgattaaaaatagatagctaaagtaaatatataaatgattaaaaattcaagattaatagtaattttttataagaataataattcaaaaattaaaataactgtattttaattgtttaaatgaggtaaactgaaaaatagatattattattattagacgaacagactatattcaaattttaaactttcacaagcattatttatctatattagaccgactttgtttatctatataaataaaccaaccctaattaattcattccaaatcaaaatctaaactattaattccttagtttcctattttacacgatccttctaattagttcctattttactctttttctttcttaatttctttttcaactaactatggcttctcctcaaattattggtgatccttattacactatactcccatataatcctactagagttgaaagtatcaatcctatatttgttcacttatttgcaaatttcactcggccttcggtatctactatgcaagatgatcaagatcaatacaatgaatctactcttctattcgacaacaatgaagaagcttctactacttttacaaatgttgtggtgcttttacacgacatgttgatgaataactacacagctaaagatatgttagaaaactcgattgcaggagttaaccttccttcttccatgttttttctaagtgataaaattattgattatggtcgaaagatgtggagtgacgaacatcgtgttttgagtgtgagagtggatgttgatgtttttgttgatgaactacctgttcaacaacataatgacgatgaaggtgattatgaagaagaagaagaagaagatgaagatgaatacagtgatgaagtttatgatatggacatcattcctattaatttcgtagcagcaagtaagca

SEQ ID NO: 65170 - DNA, 851 bp, Cannabis sativa
gtctggagaacatgatttagtacaaaaacaataaaagttctgggaacatgatttggtacatgtcaaagttacaaaaatcctaattagcctttagttaattaatgcatataaaaaaaaaaaaaattcttcaacttctcttaatcttttaagtcaaatttttttttataatcatataagtaataattatttaaaatatctaacaaaattttaagaaacttagcaaaatttatcgacaaaataaattttttaaacactattacaccttaaataactattacatacaaattgcatcgttgcaccctaaatcttaaattgttatcgaatcatcatattcataacagaaataaatgggccttaaaaggaaaaattaaaagaaattattttacaaaaacaacaaaaaaaaattacaaaaatatgattttacaaaattttaaaaaataaaattttttatgttataatcttgttaatttgttgttgattttttattatttatatgttatttcttattgttatttacatgttttatgtaattttcttattaattttttatattgtttttgtgttattattccaaattaaaatatggtaattatagtatttttaaatataaatttgtaaagtgatatttttccaaatcaattttacaatttcatttcaaaaatgtagtacaattgccacacaaaaaatagtgtagcagagcttgttaattacttgaatattacaagggaaaaaaaatatgagaatgttattaaatctcatttgccaatttaatgatcatgaaagtcgactatattcataaatctctaattgtcaattgtaaattagaaaagtcattgcattattttcacaca

SEQ ID NO: 65171 - DNA, 1175 bp, Cannabis sativa
ctcccagaggtcctatggtcacatagaactaccaagaagacagccagtgggcaaaatctattcgctctagcgtatggctaagaggcgatgttgtttctagagctagtgccaccgtctcacaagaaaacaacctatgaccaacaaacaaacaacaccctgctggcatagtccattgacaaaatagaagaaagaagagaacaagccaacctaaagctgcaggcccaccaataaaaggtagcaaggcacttcaacaaacacgtcaagagcagaaaattcttcataggagacttagtgctctgaagagtgttcctgaaaaagtaaagactcagtggcaggcgtgtttggacctaactgggtagacccttatcaagatacagagataactcttaaggaagcctacaagctgggaaggtacgacgagaacatggtgctcattcttttaccaagaaactggaatggagagcacctttgcaaatactatcactaacaagcttatagaactctactccaaagtagtggctctaccaattaaacattagagtacaaaaagcgttagcacccacggccctttttgcacggtctccaacttttatttaatagtggccttcgctttactaggcgagtaggggtagccatttgacatctagaagctaatattatgtaatgtgggcttgtagaatcaatttatgtaagttgcacattagcaaagaccacctaatgaataatatcaatatttatattctgtttactgtgtctatgaaccacttgcttacagatcaactttttaaagttattcttttaggtccacatgcatactatggtaatcttgaaagatagaacccatgcaaagtctttgaaacttggtgaatagcaagtgaccaagagatttctctacattctcacatgggggcacccaaactgtacaatgcttcaaactagcataaagaacttatgctaagaaattttaacacttagtataagctactatacatgcttctaagttgtgcaggcatacattgacttggtaaaataaatctggacccttacttgtcaagggcataagaagatagctatcattaaagacaacattgtcggtcacacaatccatgataaaaaacgaatagggctaaatactagtagtgtcaaaaaaaagagggcttatggccaaagataca

SEQ ID NO: 65172 - DNA, 997 bp, Cannabis sativa
ccacacaacgggcaagtctcgtcatcaatatggattctcctagccagggtatttcagaccggtagagcattcgagaggatactccaccaaacgattttgtgtctcacaagaactttaaagttccaaagtttgttccacaaggccggtgccaccacacaggcaggggctctctcatatgcctgtatcacataagcagacttagtagtgaatttaccgcatccccctttagtccaaatccacttatctctcccctggccgctaggtctaccccctttcaggatgttcgtaattgtgacagagtcgaacagagaccttaacaaggagatgtcccagtccccattactcaacaacagctctgataccttctctaccctcccaagacaggaatagatgggtttcgggtagaaatcatttccatgcaccacccagagatccgtccaaacgttcgtgtcttccccatttgagataagtttacaagcgccttttctgaggatagctttagtcttgaccacatttttccaaaaccaagagtcaaaattgttgtaggtagcatccaaaaaaggcttactttttaggtatttggctcttaacaccctacaacaaagcgactgatcctcagtaagaagggcccatccccactttgccaaaaaagcctggtttaattccgaagcctttcggaatccaagaccacctctagctttaggaaggcagaggtggtcccacgccttaaggtataaaccacggttacttgttcacaaccccaccaaaagtccctagccataccatcaatttttgaagaaagttttttagagagcttggtagtttgcatggtgtacactggcagagccaggcccacagacttgataagtgtggcccgaccagctttagacagcaattttaacttccaatcgtgtaacttcgatacaaggttgtccaagatgaagttgaaatctgcatccttgcggttagatcgaaacagcgggagccctaagtaatt

SEQ ID NO: 65173 - DNA, 665 bp, Cannabis sativa
ttcgtgcttacgtgatgtgcttttgggcttgtcatgtcttgtcgtgcctaagcctatattttctgtgttgagtcatgccaatccgcactgtgccatgtcatgtctaagctcatatttttgtatcgtgtcgtgcttcatcatatatttttttgtggtaggttgtgcttgtgcctctcaggctcgtgccaatttcgtactgtgtcaaaaagtctgacctatatttacaacactaagggcaattctcatgttgcatatcactatcaaattgagaaagagagattaatatgtattgtcacgaagaagagtgagttgaaatgtttttattatattattagtttaatagattttaaggttatatgtggtgtatttaccataattaaagaagaaaaataagacagtgagtgtttgggaagtgtaatattaaatttataatttaagttattgagattttttagggtgggaatttataaagggtgatattttttttcaacataggctttagcttaccctgggcctatgtttggtttgtctatgagtgcatttgtgagaacatgaatttgagtaactgaatttctagaattatcattgccaattaaaactacccgaatgttgtgagttagcacgtagaatatgaacttaactagatgaagttgcagagagattag

SEQ ID NO: 65174 - DNA, 4057 bp, Cannabis sativa
gtgtggaaaataaatagagggaggccttttttttggtgtttacagtataagagaaaaaacaaataagccaagacagtataaaagttatttctgccgtgtggcagtatttttgtaaagattgagccaaaagttagtatttttgtaagttttccaaaaataaagctagtttagataaatatggtaagaaaacttaataggaaaaaaatatggtgttaaaaataaaaactttcgattgaattaccattaaagatattaaaattcccttcatatttttttacagtgattgccgaagttgtcaccggtgctgaaaaaggcaccagagttttcttttggcgctggaaaaattgtcggagttactgccggcactgaaaaagtcatcgaaattggcattatcgccggaaaaatcaccggaaaagtcaccaagaaactggtttctttcttgatgaagaaactagtttatgggtgatttttctggtaatttttccggtgacaatgccaattccgataattttctagagtttgctatcggtatcgaaaaagtcgccggagtagctgccagtgtcggaaaatttgtcagggttgctgccaacgccataaaagttatcagaattagcattgtcgtcaaaaaaatcaccgaaaaaattaccaagaaacttgtttcttcatcaagaaaaaccagtttcttggtaatttttctggcgactatgccaattccgataacttttctgaagtttgttgttggtgctgaaaaagtcgccagagtagctgccagtgtcagaaaaatcgtcagaattggcattgttaccagaaaaatcactaagaaagtagtttattcatcaagaactgatttcttggtgactttttcagtaattttttcggcaacaatgccaattctgacgaattttttggcgtcggcaataacttcgatgaattttccggcaccgacagctactccggtgattttcccggtgccgacagtaaatttcggcaacttacccgacaccagtgacaaataaaactacctaaacaaataaaaatattaaatatgagatttaaaaagctaaatatatatatggcatattaaataaagacctaaaaattaaaaaaaaaatactttaaaagtgtcatatttaacatataaaaaaaaaacctataacacccaatactctacctaatacatatatacatttggtaatatgatatataatcaacctctatgtgaaatatccactatatattgattttttcttcctatgttaaagagcttaaaattacaattggataacaattagtgttgaactactaaattaacgacaaacttaattagaagagaggttgaatgaatatatgtcattatcgcatatatcatcacttcacatgaaaaaatactacgaaacaagtttgaccgggaaaataatggctacactttatatccagatgagatcatatacaactagctacaagaaagatcctaaagcatattattttctagaaagagtcatcaaaattatcctccatataatttgtatagtacccaagattaattaattaattcatatcaactcttatatatatttatatatattaaatcatttccactctcataattatggccactacttctaatataaaaaatgtacgactctaattaatcttatgattaactcgtaatatgttaatggtttacagttgtgaattaagtaatgcctaacaaattatatttatataaaaataaaaaacaaactatttcaatggaataatttttggaaaacagtaagaaagatatttatgtttgggaaataataattcccattcttgtttttattttcattagttactttaagaatctttgatcacttatcatgaatggaaaaaagaagaatcaagttaatgcattgcatgcaatgcataaagccatttcgaagcaatccctatctaatttttccaagtagctagtagaagaataagtctagctagttgctgaggcttcatagtacttttcttttattattttattttctttatttcttaaactaatttagaacttgagtttaatctatttatttatatgtatattttatcattttgcgaaaatgatgattagtggtgcagaatttaatcaactaaattttaaataattaacaatgacaagattaacaaaatgcaaacaataatcagaagaaaaaataaggatgaacaaagtatgaacacccagaaatgattaaagcagtaaataataaaattaacaacaagatatatactggttcaagcccgattaattgatcgatgtgatctatggttctactttagttctagaacaccaccgaatcttttttattgattgaacaaaaacaggtacaatacagttgagaagagtctctaaagagttctatcaaagtattacaactctcacactctaacccaagaatcttcttcatctacaaaagattcttcatacaaaatccaaccccagtctctctctgttctctgtacctttgttttcatacaagtagtgatcatatgctgatggtttgaacctgatttgttgcatataactatcaaaatatttattctattccattggagactgtttcaagccatataaagatatattaagcttgcatgaaaattcatctcctttccctttcacctaaaacctaggtggttgcttcatgtagatcccttcatccaagaatccatttagaaaggcagtcttaacatcaagttgttcagcttcaagctccatttgtgctgccagagacaacatcaattttatcatcttgtactttaccacaagaagatttcactgtagtcctatttcttttacctaagtaaagcctttagccactaagtttgcttctacgaaccttgtcggagggtgaatctctctctagattctatcacacgccaattgataaacttccaaacccgtctatctgaatcattctaaaacctttatttggtcttaattatcttccgtctgagcattgtctttcgattccacactagcttctgtctgtgaaccttatattctaggagcttcattacgtaatccatttccatgcatgtagtgtttttgtttcttatttttctcgcatcacacggagacacactatcttttccgaatgtcaaatgagaatattttaactcattgaaaaccacatttctagtaattacaacctttggtctagccttcttagaaatatagattctatacaccttggtacctaaggcataacctaggaaagttctcttaacggatataggtttcaacttgtcaataaattggtgtgcatatgctgtacacccagatgtttttaatgtgataggttgggggttctattatatcacatttcataaggtatttttaagcctatagctctatttgggcttttatttataagataagttgcagtttttagagcttccctccaaaatagtttttctaatccagaactgaatagtaagcatctaactttgttcaacagggttcggtttatccttttagcaatactattttattttgggctcttcactacagttctatgcctactattttcaaattcttgacacaacttgtcaaatttggagtcaataaactccaacccattatccgccctaaggttcataattttaagatttgtttggttttccacctatgttttctaaattctaaattgttccagacactcatcattagtatctagcaaataggtccaaacacacctactatagtcatcaactattaaaagaaaatattgcttaccggagtgagtaggtactttgtatggcccttaaagatcaacatacacatattcgagtatcttcttagttgtgtgccttgctgaagtgaactttagcttatgttgtttccctaaaacataagctttcacaaaatatgaaggcacaagaatttagctttgcaattataccttgtttgtgtagttccttgaggtcttgtttcactgatatatccaagtctgtgatgccacagtttcatatttttctactcctttcaccatggttgcttttttggatggtatagtttctccttaga

SEQ ID NO: 65175 - DNA, 914 bp, Cannabis sativa
aattttcaattaatcgactaatccactagaaaagataatatagcaaaagtgccaaaacaataaacaattaataattaatattattataagtgacttgtgcatgatcaattacaatgaacaaagtagtacatacataaaatagccccaccacaaatgcttataatgaattcttttcaatataaaataagatataaaaataataaaaaaataaaaaaaatgtgacagtattaattaataatttatttatgaaaatataacttacacaacattacattataacttccatattctctaagaatatttatatgtacagcctataaaccctaatactatataaagagtcataacttcaatctgaaggtacgatgtaaatacactcaaaagaactaagtaataagttttctctcttatctcatacttctcacgtgcaaaacacattcttattgtaatactgaagaaagcttagctagaaattacaaggttttagcctgtaatttgtttggtattatctcaaagttaaatacaataaaaggggagtaggtctttacttgaacaaaggggtcgaacttccataaatctatgtgtcctttacatttattattattctcacgtgactgtcataagaaaaatccgatcgtagtcagactccacgtcggttggctaaatccacagtcaaccttttggtgctttcattgagagcccaaaattctcattcaagaagctttcatatttttcttgacctcttttttgcatggttgtcacaagacatgggaattcaactgaaccacgagacttatggctgcggatcttaatttccaagtgccacctgtcatgaccaatccaaacttggctggtagaccatcacgttttggccagctacctggaacctctacctcgaaggtttggcaaggtga

SEQ ID NO: 65176 - DNA, 1302 bp, Cannabis sativa
ttaagatagtgtccgataatggaaattaattcgacagtgatctattcgcagagttttatgagaggaacaagatcataaaaagtttctcatatgtgtcttggccgcaggctaatgggcaggtagaggcagttaacgaaactcttaaagacactattaaaagaagctcaatgcgagaaaaggaaaattgatagatgagttaccatacatgctttggtcccatcgaacaactaaaaacacaatgctagcattttgctcagaggcaatgccaccggtggaaatgaacatcacaactcatagacatgaattctacgatcaggataaaaactaagaattataagggaatccttggacctgctcgaagaaaaacatttagagtctcaaatatgcaatgcgacatatcaccaaaacatcacgattcattttaataaaagagtttgcgagagacttttcaatgtcagggatttagtgttacaaagcaatacacaagaccctggagttggagtgtttaatccaaattgggaaggtccttatgtaatagtagcagtgataggaccaggggtgtataaattggcttggccaaatggcttgctagtaaagaacacttgaaaaaaaaaacgagcattttcgaccttattaccagtgattaactttcttttgtgtaatttttaaactataagattgtgtaacatatttcatatcaatggaatttatatcttttagttctcaagtgatcataaactttttactttaaaattacttaggggcatactattaataattaaccaactttgtataatcacattatgaattgggctaagggtcaaaatgttaatattaaaatagaaataaaatatttttttgaaaaattgataaagtggcattagtaaaatcggtccagaacggttcatatattgatgtatgtactttatctttaaacaaaaaatagtaagtagtggatatcacaacgagattgccaagaatgaatcttgaaaatggtacaaaagctaaaatgtgaacaaaaagactaattgctcgcatattttaaacaaagacatctaagcaacttgaaatggttgtataagatgttcaagtttattttgttacttgagaaataacaagtaataggaattgagattccctatgaaggatgttaaaatttaaatcattcaaaagaaacagagttctctgtaaaagtgattaaatcatgagttgctttaaaataggaataactcacccaagtttttcacaagtaaagtgcgaataatattttaaccaacatatataagggaaaaagatatgcat

SEQ ID NO: 65177 - DNA, 853 bp, Cannabis sativa
tcataaaatccataataacatccataatcaaatctaaaacagaaattaaaatagaaatcaagagtacaagaaaaaactagttggtaattgtgctccagatcgccacaattgcttcctctgcctccttctttcacttttgggtccaagttctccctccctccctcctaaaacacgagccccttaaatagaaattagggtttctaactctgaacggtgaaagtctaaaattgcccaaaatttccgtgttttgcacatagtcgcgactacataaagcctagtcgcgaacaataggcaagatacaaaagtcaagctctctgcctgctccatagtcgcgaccatgaaaaagggtcgcgaccatggaaaatggtggtcatgactactgaagtaaatttgatagcctcgacatcttttagtaaaataggcataactttcccatccaaactccaaatgatttgattcaagatgcgttggaaagaagaaaaagaaatctgaaacttctatgttttgacttttttcgaaatcggatcaaaacatagtcaaatttaggcttgaagtttcagctttattttcttgcagaattttgtctattctatagattgctgttttccgaaatttgatcaattgatatattccaagtgtgaaacctgaaaccaaagaggaaaagtgtaattctattaaaaaaaaggaataataaagaaggagaacaactttataaagggatcccaaaagtaggctaaaaatagcctaataggaagaaagatgtcccagacttctagacaaatggaacgtaggcaacacttttgtttttgaatcatgtgttttagagaacgacaaatccatttggattgttgat

SEQ ID NO: 65178 - DNA, 890 bp, Cannabis sativa
gcacgatactctgactccgtacttgatcttgcaacaactggttgtttcttggaagaccatgacacaagggtgttcccaaagaaaacacaataacctgctatagatcgtctgtcatcggggcaacaagcccaatcagcatctgaaaaaccagtcaaattcagcggttcatcacagctgatatgaagtcccttgtgcaaggttccctttagatatcttagaactcgtttagctccattccaatgaactgttgttggtgcctttaggaattgactgagtttattaaccgcgtaagagatatcgggtctggtgtgagacaagtactgcaatccaccaattaacttctgtaaattgtgggattagagagcaattcaccttctgttatggacattggccttcctgcagtagcaggtgttggacacggcttcaagttagtgaggttgtgtcttcgaagtaggtcctctatatatcttgtttgtgttaagtacaagcctgtcacatccctgtagacttcgattccaaggaagtaatgcagtgacccgagatctttgagagtgaaccttctatttaattctgaaatgaagcctttcaacttgttgttattgttgcctgtcacaacaatatcatcaacatatatcaatacaaaaattatatcagcaccatgtttataaaagaacaaggatgtgtctgattttgaattcttgaagttccagctaaccaaggtagatcttagcttgtcaaaccaggctcttggtgcttgttttaagccatataatgacttatttaacttgcacacaaaatgctctttccctggttcttcaaagccttgaggttggagcatgtaaacctcttcttcaagagtgccattcaagaaggcattgtttatatccagc

SEQ ID NO: 65179 - DNA, 776 bp, Cannabis sativa
tataaaactgtaatttttctctaaatttgtctatacagaatctgttttgaatttattaaaagaatatttggaagtaatggatattacatgtttctgtctagacccaataatctataatacgagccttatatgtagtgacgaacttagaaaaattacggttttataaatatttagtattttatgccgataaaaataaatattgagtaaatgtcacttacaatcttaaaactttaaatacttataccacaatttatccttataaaaatgtattattgtatagccaacaatgaatatgtgttattttaataaaatagaccatgctaaattgaacataaaatataacattaaggaaaatttggtacaaaataaatttttatttattcatttgcctctaatttattggaatttctttttcatatcttatttattcatttaaataattttttgtactttttcataaataattttactcatattttgtgctaattttgtacactttattagagaatatataattaaaaaaatgagtcaaattaatatagatatttatttttggagccaaatttaatgtacatattttacattatcaattggagatatatatatatatatatgggggtctaacattgatttattaatttactggccaattcctccatagggtatatattcaaaatattataccaacttaaaaaattggctaacgtacctagctaaataaacaaaattaaatcataatattagctgttaatttatttgttttattcaaagttagt

SEQ ID NO: 65180 - DNA, 944 bp, Cannabis sativa
ttatttattattaaatataaatgataaattattttattatatatttgattacatatgatattttattttattgtttttataattttattattttgaccctattattttttttttatttttttagaattatttatttaatattataaatttttattttaatttaagtttttttaaaaaataaataaataaaatagtccaatttattttcaaaccaaatacaaaagtactttgagtataatccaatcttatttagtctattctaattttgatttccaaacaagtcctaaaagaaatagtttggaaaaaattttacgagcacaaaaaagttttaaggggaaaaattaaaatatggtaataattgatgggaaaaaatactatttatttttttttcccctcaaaacactaaaacactatatgaacaaacatgttttctttttccttcaacaacaattaccaattacacatattgagacggatactcttatggtggtcaatgccttgaaagctcccttcaattcaaattcagaattctcagatttaattagtgatgttcttagtcttttatcctttttcccgaatgtaaatgtatcatatgtccgtcgttctgctaacaatgcagcgcatgggctagctaaatttgcattagggctggatgaggcttgtacttggttggagattattcctcggcctatatacttggttattgtaaacaaatcttgattgtttaataataattaagtattttccctaaaaaaaaagagaaaattacatcacaaaccgaaagatacaaaaatattatataaataacactaaataattaaatattgagggtagcgtaaattagtgaattaatgtaagggtgcgcgtataccgagattaaatttatttctttttttttcttatcttgaacaaagttaagttcattaattttattctatgtcttt

SEQ ID NO: 65181 - DNA, 688 bp, Cannabis sativa
agtgcgtggagcattatagaagtaattccttccactttgagactcctctttcacttctgtggtggattttgaaccctccttttggttggtttttctttgactgataagattaacttcaccacttttgttagttctctttgttatcatctttggtctggcaggaataaaacttatcacgaaagatttgtatcactgtgtttggcatccaaaaaagagtccaggcttcaattgttgaattcatttcttggcaggactcggatcttgctccccatcctcggcgatctagtgctttgtttgtcaggtccaatctccctattattgtgaaatttttgatatattctcgatattcttttcgatacttttaagaatttagcttaaatgtatttttatatggtttcttgatggaaagtcgatgtgttctcaatgagttttcgataatatttcatgtgaaggctcaagatattgtcattgaaatttttaaaatttaatgatggtatatcgatatgttctcgatggtttgtacaatcctttatagaatttagtaaatacgttctatgatagtttctcgatagaaatttgatgtgctctcgatggttttttgataatattttacgtggaggctccggatgctgttattacaatttttaaaatttaactttgatgataaggaaaagttacactaattgtc

SEQ ID NO: 65182 - DNA, 645 bp, Cannabis sativa
  modified_base (287)..(288): a, c, t, g, unknown or other
ttcctaattttgtttattttgtcacatggtaataaaaaaaaaaataaattttgaatcaaatatagctatatataaaaaaccccctttatttaattaggtaatatagccgccgtgaagaattttttttttagtattatattaaatacttacttaaaaatataattctaatatacaataaaattattaaaatattatcttatttcatattattattaataattttatttattaaaaactaaatacacaattttattaattattatttagaattatttattaagaagttnnaaatttattatatgtagtattttatattgttttgttaaaaaaatatttttagaaaaataaataaatagggtggtgtagaaaaaaaattacagtatttcccataatgcattactttcatatctcgatcattcaaaactattgttattattatatccttgttgccttattgtatctcacttattttcattatcgtatctcaaccattttcatcacagtatctcatcccttgtaatatcgtggttcgcttgttgttgttactattgtatttctcaaatctatatttgaatcttagatttcatctcaaatgttatacatgtatattttttttttaatatttttaagacaatagagaaaatt

SEQ ID NO: 65183 - DNA, 778 bp, Cannabis sativa
aaaagaggcctggaggggagacacgggccgcggcatgctccacccttcatttagcctgccgcggcacgctaagcaaaaatcgagggaaatagagcttcgtccccagaattttttttcaaattttttgtcttttccagacgcgaccagccacaaaaacaccttcaagattgctaagttctccaatttttcttcatcaaaaaaccaatttcttccaccactcttcatcattatcacttacaaacataacccaacccccaatttcatcaaaaaccacctacactactctaaatcaaccaccaatttcagaaaaatctaaaccccaatattaattgtgttcttcatctttgggaaatctttggtgcaacaaagcctttattcttcaagtaagtgttttctcctcattaaggttggtgttttaagagtaattgattgtggattgtgtgttattggattattgttgaatgtggagaaaaatattggctgtaggattattgttggtgtgtcaattaagtttctgctataaaatagtttggggaaagagaaaaatacaggggaggtgctgcccacaattttttacactagaactagtattttcagctagttgattggtatggcaaccaaaagacgagctaaccgcttcacgcaaggttcatcatcacatacccctaatcttcaagatgatcaaaatcaacaactcacaaggtttgtgaataacctagcagctaaacggtatgagaagttaattaagagaagcatagttcgggagaggggttttgaa

SEQ ID NO: 65184 - DNA, 1183 bp, Cannabis sativa
ttggacagtttaaaccgaccaaactgaggttcaaaacagtcagttttaagataggttctggattgattagtcggttttcgaattgtatcaattcagactgaaaactgaactctggattttatatagaaaaaagttaactagatgcttggccctactcaatacaatgaatatttgattttgaaatataaaacaaactctctctaataagataaaatacaatatgaagtgctagagggagttacaagcacattagagaagataagaataaatttggctcaagtgtgtgtagttggagtgtttataaaagataataaatctttagtttagaacacttagaatgatgttatatgataaataaatactcaataaaccttaattttttgtaagaaaaatcaattaatatagagttagaatgaaatatagttgttagcacatttttcgaggcttcttctaccgcaaactggaagtccatttgtgaatcagaattccagaattaccacaaccgaccgaaattttggttaaggggcagtatgcattttgcctttttttacttaaaatgtgcataactccttactcgtttattcgattttaaaaaatccacttgcattctcttagttaaatgatatgtgatcttaaaataaatttaaaaaatttagatatcatttttgtgaaataacttgtggcacaagctagtgagccaaacttttaacttataaaccctaatgtactaaatcactttaacaagactaaagtaaacctataaccatttaattgtgagtagtcttgatgtagatgcggttcttagcttgatttgcatgttttgatccaaatgtgacttttcttaagagttgactttgactttgactttcaggttgacttttgattttcagcttttgaagtcttcttttggatagggtcttgaattcttgatatctcgattaaattttttctcttgtgaagtataaagtagttgatatactcgttggattcacttttttgattatgtttaattttatcgagcaaatattgatactttgtgaatttacttgcaaaatgataaaaaatagattagtaacaaataatatcaaatatttgtttattgcagacttttgacaattataaagaacaactactctttattaactactactaatcccacttactcggtttggatattaaagcg

SEQ ID NO: 65185 - DNA, 4142 bp, Cannabis sativa
gtgttctatgttatatacaaatagatcttgggtttattattaatttttctaacacttgtacgtacctggtaaatccaagttgctgaaccctttttttgaaatttgttcaaatatgaaaaacacttaatgcattgataatatactatattgaagtagagtatcctatatgacattgagcacacaaatcataaacccaccaataagagtttatactctgctatatctcgcttggtttatattaactcaagcacaaaactaattcaatcaaaaaaataaaaatctaattcaaaacctgtagccaaaaatttttttataggaacaaaaatcaaaatgttagaacatctaggccaagaaacccaattcacaaatggaaatattgctcataaactaactcaaaccataacactattcaataagcaaatttgtaagtaaagaaataaccaaacatgttctcagtatacccacctataccgagaacatgtactcggtacatgaactaaacccaaaacataagcgcgaacattccctctagtgcgaaaatatatagctttaccgaggatatgtcatcagtatacatgttctcagtgtagactaagatttttgtagtttgaaaactactttttctctcaacgtgtctaatagaaaagtaaagcatgcataacggtcttgactttgtccgtatgaaatttcactattttaagagaatactaataagtgtaagaattagaaaaaacttgttaaaatttacctttaaaagaagaatatttttaatttttgaattatgggtcattttaactaaatttaacgctaaagcaatcttcatattcatgtcttagtgtagtataaatttattgtgactagtatggaaaaatatttcgtgaagggtgtgagtcacatgccacaaaggggtaccataataaaaaatgcgagatttttcactatttcaattaaaatgatagttagagcttgaaaacaactttttttctcaacgtgtccaataaaaaataatgcacaacggtcttgccttctattaaaatgacatgcctatttcttaatatgttatatatcaataaataatgactcaatttgcatcctctcaacaaaatgtaaagattaacatatgccaatttgtattaaattaatatatgatatatgtatataatactgtgtcatcttatattagttaaatcatcatgcaaagtcaccgagatgatgtatttgttatgtctcgcattgtataatgataatatgtgagacatatgtttagagattcttcttgcattaaaattcatgataaagttttaaataattcttatataagtttttaagtaagctcttcaaattgtatcatttatgcttcttaagttgaactttttatattgtctcgtttgaccaacaaattagtttcttgtcttatatttttcttacactttcatcatggttgttattgatcttgctagtctacaagtgccagctattattttgactcatctttaatcatctaaagaaagacttctatttatcatcatgactagtactttttgaggagatataaataacatatttaaatttttgatattcaagctggtttatttttcaactcttgtacagtgaccatattactgttcgaaatatggacataaaaaatagccaaatcacttacaaaaagataattaaggttaggatcaactgtatcataaaaatttaattatttaattaggtatattctcataaaacacaaaaatatgttaaatggacagcaaaataaaatagatacataattaactatttatttaattaaatagtgttaaatgtgtcaatgttgtacgcttatattaatatatatatatataatgataagcttgaaactttcatataattaatattaatattattgcataatcaaatattatacctactctgttcatggcgttttctcagtaattattaataaattaatgacaaactctctatgtccaaagaacaaaatatataatattgaatatataaatgattcaatatatatattgtgtcaaaaaacaaatattctatatattcacacataaaatggtagaggtcttggtcatttattaataatattcaataaataattcttttaaattggtagtagtacatctctctcaactctctatacatatatataatccatctataaaaagacaatctttcatatcaagttaattaattcaccccaactacaaaagtattcattaagcactaattatgtttgattttccaaggtttgtggttatcaaatctaaacacaatggaaaatacttgacaaagttaactaaggaagagagcgtggcaaaggggttctcagaaacgtttgtgaattttcgaggagaggacgttacgagtcctttggtgaagttcgaattggagaaagccaagacaaagccaggatgggttcacatacgttattgctacaacaacaaatacttgaccatgcaatccaattattcctggtattttttggcctcggctgaccaacccagtgaagatgatgaaatagattggaaaaatactttgttcaagcttatcaaatttgatattaatggacaagaatattttcgatttcaacacgtcactaatcgttatgcttgtctttccacttggaacaaggattacgagtatggtctatatgctaacgacacccaactggaggattctgatactttcaaagtattggattgggaatcgcttgtcatatttcccaaatctaccgtctccattaggccagcgagtggccaaggttggtatctcagcaacaaagaacaaccatatctgagagtgctcaaggatgcaaaaatcgtcgaccaatgggtaccacatgagatctacacagtcggcgatggtgacatccgcataaagaaccttttcaccaaccagttctggcaaagcagtagcgatggtgtcatagccagctcgaacgacaaaacagaaaagacatcattatttcatcccattaaagtgtccgacaatgtggtggtgctgcgcaatctggcaactacgaaatttctatcagtgaataattctggtaatgatagagacgcacttttttccatttacgagtctttctttgtcgataacacaaagttcatagtggaggagattatcacatcaaggaaaatctacaacatcaatttccgacaagaggatggtagggtttataatctgagtgttatcgagaagagccatacagtggtcaaaaaccctgaggatgtatataaaactttggacttgacgtttgagtttgatgaaacaagatcaattggtcttcgcaacaacatttcactcctatcaaatgttgatacaacattggaagtcgaatatattccattgatagtcaataaggataagatcgaattgtcagttgatgaagttactgcagtaggacagtggggaacaatcaaaactatggaaactttgaccaagactaactgcaccgttagagtgcctccaaagactagaacaagagttactcttgttgtgacacaaggaatgtgcgaagttccattctcttatactcaaaaggacagtttctacgacggaacctccaaaatcacgaaaatggaagatgggttgtacaccgggatcaatattttcaacttggagattaaaaccagccctgaaatattgccctaattaaccactaatatttcatgagcgtagctatataggtttatcaatcgtacgtttaatttcactatctttcattatcagcaaataaaaatgtaataataatcagtagtaacattaatgctacatacaattcatgatcaagaaataataataataattttctttaaattaatcataatatcatgtactactctctctataatagtatgacaatgatggcccatgcattaactgacaaagaatttagggataacttcaaaaaacaaaaataaaaaaaaaattataaaaatacggttgtaagaaattttaaatattttttacgggttttaagattttatttacataaaatagagtcttttaatgtatttttatggtgtattattgttattttattgttgattttttattatttatatattattttttatattgttttccttgacttttatgtcatgtggtttttttttttttttttt

SEQ ID NO: 65186 - DNA, 985 bp, Cannabis sativa
ccaacaacatgtccattagtgtctttgagaacagccccaacaccagtagtattagagggtgaattaactgctgcatcgatgttaagtttgaggacatttgaagttggaggggaccacgggtggggggctgctgcagattggttgtgctggtgcgaagaagttgctgcagaagggctcggctggtgtgaagaagttggtgcagcagccactgtagggtgttgtgttgagcattgcgaaaattctgcaaaaaaacagtagcaaaaatggcaagatcagtcacagctcttgttttgctcccatgaaccaccttgtttcgctcattccaaatagcccaaagtgtacaaaatagttgttccatctcagatttgttataaattgatgagaggtgtaacaaatagtctccatttcgcattgatgtacacgcccgccaatcaaaactgagtttttgtgctctccaaactgccttggcatatttgcaactaaaaagagcatgtcccattgtctcccaagcacttttacaaatagaacatgtcgaatcagtaattacttttcttcgaactagagaagtagccacaggaagagcatcgtggatgacacgccaagcaaagatcttaaccttttgaggtatttgtaaggaccaaaagaatttccaccatgccactgaactgtgcgagctggaagaaaggtcttcttctccaagctgagatgcaaaatgatatccactttgaactgtatagacccctgagttatgatgatgccaaaccagtttgtcatgtgtgccgaagtagctcaagggaatagtaagaattttctcaacatcaagtgggcagaaatcttgttgcaacatggagatgtgccattctcgttcttccgtaatgtagtttgcaaccacaccatgaggagatccagtataacaagttggaagaaaagaggaatgacctaggagccaaggatccgaaccgcatcttatggatcgtccctctcc

SEQ ID NO: 65187 - DNA, 883 bp, Cannabis sativa
  modified_base (813)..(820): a, c, t, g, unknown or other
ttctaaacttacccatgtgacacgaacggccatccatcgcattcttcgtcgtcgctaagtaaaaatcataaaaattgcataattcatatttaacataaatgatactcttagagtttaataaaatctccgaaaatgagaaattataactctaatgcccatttctaaaaatgggacccacaacacaacaatataaaatcatatataattattaaaatttcagttgttaatgctaattgcctttactaatctaaaatctaacatgcagtcattacaattacccgctaattaaggaggtcgaacctctataaaaatccttgtgttctttacttttgagttctaagtgtgtaacacatggcaaacattagattaatactaccttactatcgattggccacttttcgaagtcaacatgaacaatgcaaaaatatacataaaaaaaaaaaaaaaaatcttataacgtaaatgtttaaaaaaattagccaaaatagtagtttatgtaaattttctcatttatatatgtgagaatttccactaaattctcgaccacaattaattgcgagaatatttaacaattaattaggatgtataatttgacaattaaatcaaatgaattggtagctaaaataatgttaatcataatttaaaaatatgttatatcaattaaattaaatattgagaattaacattattattaattctaatataaattataatattcttcactcatataattactcaaataataaataaataaaatacaaaatgaaattgctaatagcatgtaatgttttatcaagattcggttagtaggtnnnnnnnntcaagcttgcggcatacaataagagggagtctatttatgcataagtcaattactttgtatttt

SEQ ID NO: 65188 - DNA, 796 bp, Cannabis sativa
gtttccataaatccgctatcatatgaaatatctgaaaatcagatactttcccagtcaataatcgcccgacaagacaccaacgatcatcaaattcaatcacttcctcttcctcctcctcgtaagccacctcattttcttcttcttcttctaaacaaatgtctttccattgttgttccaaaccagtggtggatcggctactagacgccatgataagattcaaacaaaaacacttgacacaaaataacaaaaaaactctataagaatagagacaaatcacatgtcagaggacatgacttagaatagatacgaatgccaagtccaagttgaacactagtatttaatgaagaaaaataaaatgaaaaggcaataaataataattgttttggtgatactcgttagtgtaggtttgtcagtacaaaatgaatttgttttattatgctatgaaggacaataatggtatttcacatctattaacaagggacaaaaagataatttcactaaaattttggtggaatgttgaataaatatctaaattctaaagtacatattttgaaacaaaaaatcagaaatcaataccaatgaacatgtttaggtgtcgtgtagttaactttgaaatagagtgattatggttgggcttgagcactgggttgggccgaacagtgttagtatagattgcaaaaatatttataggataattgtaggggtgttcacaaagtatccaatctaatccaatccgcacgatccaatctaatccaatccgcaaaatacggatatccgtacttgtgcggattagatt

SEQ ID NO: 65189 - DNA, 856 bp, Cannabis sativa
acttacactgagcacgctcgccggaagactgttaccgccatggacgtcgtctatgctttgaaaagacaaggacgaactctgtacggattcggaggttgatggatccaatctttgtgtaatcttatgtggttagggttttgaatttggggatttgggctgggttaggtgatttgatatgtttctttaatgtgattagatttagattattgtggttttagtgtaattgcaatataatgaatgaagctaattagaaatattatcaaattcaatcttgagttcttcaaaatctttctcctctctttactgttgttctataattcaacaaagcttctgtctttaattaaatattaaatttcaattgtttaaaaattttatattttattattaattttctgtttgaaaaagatgtaatttgtattaataatttagattagtattaagatttctctataaatttcgtattaaatccaatcctaaggattcataattgttatgatacatatatactaataagaattaactaatcaaatttgtggttgaattggtttaattggagaaaaataaggattcataattgttatgtttaggattctaagctaatattgctagtaattgatgatgaatattggaaaccttgttctttgattgcactatctcttttatcattatactaagttagaactcaaaaataaaacaaaattgttacttttttatcaatgaaattttgtataacataaaaaaacatcgggattaatactcaataaattagtaacaagtttatgtgaatttttatattcttgtaaattatgtaaattaatactcaagagtgtgtgaatagattagtgtttgttttgtt

SEQ ID NO: 65190 - DNA, 773 bp, Cannabis sativa
cagaggcagggtgccttgggcgctagatgggtgagtcctccgtccaaaatcattgaagcgcgtatgaaagacttggaccggtctggttatcttggcagacttgaatgttacgtccctacttcaaatcaccgagccacaaacctgcggaaggggatgtgtgccaggtcgggtgcccacactaatcaaggggcaatgctgcctttgcactcatacttcaagaagatgggggactattttcgtctttgtcttacctagtttactcccaaggtcattaagtatttgtctgccctgttcatcctttatgccatctagaagtggggtgcaccttctccgcacgagatcagttggttttttgaccagtagtctacccctaagcaaagcaggtcgggctacttctacttctctcagccagatttcaagtggttgacaggcaccgtggacaaggtcttgagcaaaatcaggaattttgttgacgagtattactttgtggaaggcatgggcaccacttatactcggtttcagtagattcctatatattactctccaccccttacagtggttcttagggacagagctctgaggattgttcaactatcggatgatgcttagaatataaccttgttgacctcggaggccaactttgtggagtacaggatttatccaacatattttatacctcagcctgtgaatgggaggaagaagaagtccagtgttggctgggctaagggagctgagcaagagaaggaggtcattcaattgaagtgtgaggctaa

SEQ ID NO: 65191 - DNA, 4952 bp, Cannabis sativa
aataagaaaattatataaaattaataaaaaaaaaacatccaaataacataaaaacaacaacaaaaaaataacatacaaataacaataaattaataagaatataacataataaaagactgtattactattttttgtaaataaaaaaaaaagaaagagataattattttttttaaaatgatttatttaatttattttaaaatatttatttacgttggtcaataaaattgtgccacgtagacaatctaaaataacaattaacaattaaatttgactaaaaactgtatgacttgagggttttacccaaaatataagtttttgaaattagttattaatagagtaaaactattaaaagtttaccacaattcatgtcaaaaaaaaaaagtttaccacaatttgttctaatcttattatacttttgttaagttggataaagttgaaggcttatgtatatagttaagaactatttttaaagagaatccaaataatagaacttatataattatagctcatccattttgtctgccatgtcggttgcagcaaatactattgttttcatatttgtttgaaatttcttataattgtactttttatttgcattcacacaaaacttttatttcactgattggatggaacccatcaagtagtggagctaataccattcacaccacctttactctgtgctacaattgcaatatacaaaataaccacgtttttcttgctgtctgtccacacctttggtctattaaatatctcaccatctcatcacaataattattaacacaccttcatcttgatcttgttcttgatctccttccacacgtttacatcatcaccatggctgctccttcttctgattccataccttctgtcaacaaagcttggatttactccgattatggaaactcctccgatatcttgaagcttgaccccaacgtaccagttcctcaacctagagatgatcaggttctcatcaaggttgtggctgcctccattaaccctattgatttcaagagaatgcatggtctcttaaaagccgtcgatgacctacctgtgagtttctctctatttctaatctgggtcactctttattttgtaaattaattggctatgactatagttctgttgtaaaggtttttcctttgtatcaaaatctgtaccaattggcttattatgtgaaatttcccttgtatcaacatgtatggtaaaagatctaattaaggacaaattgaatttggttaaaaggggctaaaaagtgtttagcagattctaatttggttttagtgccttttatctacagattgttcctggttgggatgttgctggtgtggttgtaaaggtgggaagccaagtaaagaagtttaaagttggggatgaagtttatggagatataaatgagacaggaacagtaaagccagaaaagtttggtactttggctgagtacactgctgcatcagagaaagttttggctctcaaaccaaagaatcttagctttgtggaagctgctagtcttcctttagctatggagactgcctatgagggtcttgaacgaggtgagcttgctcctggtaaatctgttctggttctaggaggtgctggtggagttggtactcacattattcaggtaaagcttcattgttcttttcttcttatatttatctcagaaaccagagttgataattctgataagtatgtgctctttcgtttaatctgaggcagcttgcaaaacatgttttcggtgcatcgaaagtggctgctacagccagcactgcgaaactggacttgttgaggagcttgggtgctgatttagctattgattacaaaaaagagaatgttgaagatgttcctgagaaatttgatgtgatatttgatacagttggtaagattatcttcctcattctcattgattaattttgcagtattaatgttttcctaaaatgggttagaatgataatttgtttgcttccaaaaacaggccaagttgaccaagctgtgaaggtcctgaaagaaggtggaaagattgtgacaatagtaggccctgcgcctgaagcaatcttcttttttctgacttcaactgctacaactttggagaagcttgagccttatttagagagtggtaaggtgaagccattgattgatcccaaaggccagttccctttttccaagacagtggaggcatattcctacctcgagacttccagagctacagggaagattgtaatccaccctatcccttaagtagaaagctcgaagctatttgtttgctatttcaaaacttcaagtccttgtttgtttattatgtacatcagcttgagaagaaaataaattaaagctagttgtaactttgtgaagatgaatttttttttatgtttaaaaattcaaaagtaaaattttacacgaaacaccctaaaatttcacattataaaaaaacttggggactatttctaacgagctatgaacaacacaatatgaataagatttactgccgtaaacaatttattgctacatttgtttataggtatacacatatacaaagttatgaaaagggcaggaggttaaatgctgccttaaactttgcatttgaaactactaaagagcccatagtgtaaagtgcaagcacttttgagatcaaagtgccaagcatatcatccaaaatatgacagaagttctaaacatcagtatccacataaagtctagcttaactttccttctagtcctttaaacaacactcgaaagaaagaacacatcagttcctcaccttctttttccaccagtaattggtccaatagacttcttcaatttcgaaagtatcgctgtcaactgcatctgggtaagaatctcccttcaaaatgagatctttagtctctcctcgcagttttaagctcccacatctgtgtatcaacattgaaaaacacaataacctgtattatgtacctatcaagtttccatgtttttagttaacaaatagtttttcaatcattcaatttatgataacagagttatcattgaaaacaaatgtgtgtgtacattgccaaacatctacaattctatgattaacaaacacatagttaccttgtattgacattgagtatctcaacattattattcccagcaaaagtgtccctgagtgaaataaaactcggagtgtgaactatgatttcgtaccttgttttaagaccacaaaaatcaatgtatgtgggatcggaataacagagtgtgggatggaaaccaactaatgagggatcaatgaggagtggctttttgtacatcagttgaccgttattgctaagaaaaatcaaaagagctccagaattgaaaccatgaacaggttgatataaaatatatggccaatcccagtccatggtaaacaatttactccaagcttttgtatcagagctaaaacttttcagtatccaaacatccaatgaaagatcagatctatcgcatagacaaagatcaccacttataactcccatggtgatatctgttatccatgtatcttcacattcttgtggaacattgagtagctcaaatttctcgttgtcgaaatcaaatgaaatcagataatttggtctcccatggtcgacataaagcccatacagagctccattaagataagtgggaaatcctagcttaaactttgagtgaggagcattatcaacactacgccatgaatctgtgccaagagtgtgtaccactgcgtatgtgttagtatagttggaaaaggcattgcaatggtgctcagggcgtcttacataagtgtttcgatgaaaaaccctaatgactttgtattgattactctctggactgaatcccaatccacaatcaacggcatcgttgagattttcatcatcacaattgctcggtggaaggttcatgaactctccggttactggattgcacactgcaacaggatcatttcgcgacggctcggacaagcaaagcaaaccgttacaagagttcacaatcttgtacttgtgatcttttggcttcaaattaaggcaacgattcttcttcttcattacaggatcgtcctggttttgtaacacaatttcggcattgcgtaccgggatcttcaatttggcattaagtttcatgtgaggagaaatataatagccatcttctacatccaatgaaagcctgcagagatcaaaataagattcaaaaccatagccaccatgaatatcaggttcaaccaagtacagagttctcgaaattcgaatggaatctagagtccggatcaagaattgaggctttgcttgagcgaaatgcaacttagcgaaatgagattccgatatcagattgcgccatttcttgcagactgatttgcagaaaacaatgcttatagttgtgagaccaaagaaaatttgaacaaggatttgatcaggaatatcacttatggtgaccgaaccagacatttgaatcagctcatcatcaaaatgactcttgtcgacatcacaaactatagatgttcgttttcttttcacggccatattcttcttttgatttgatcaatgttacaagcataatgcatacacacaaacacattcatcagatacagaaatacagaatatatatatatatacatatatataaaatgaaattcttccaaaaaaaaaaaatatataaaatgaaaatgaagaagatagtggattcgtaagagttaatacaaaatggagaagaagtaagagattaccagagaggaggaagaagcagagtcgatagcagttgcagagagagagagagaagagtgagtgaggattatatgttgagagactcaaatggttgaattttcccgctcgatttattaatctcaaattgattgattaaacaaaattctgatttcaaaaacaaatttgtgttggttaccttgcctggccccaacctctatttcttcttttcaattgtttagtagttaaataatttataaattttttaatcacaaaaataataat

SEQ ID NO: 65192 - DNA, 941 bp, Cannabis sativa
  modified_base (82)..(83): a, c, t, g, unknown or other
aatttgatagtctatgacaacttttgataattataaaacgtgtggtaagacattaatatcatccaaatataatagtttattnntgtaaaatttatttgctatgtaagtatatacaccggtaatttatttgctatgcaagtacacacagtaaaataaaactaaatatttttttgtacatataatttttttcccttgtgtttgttattttttgttttatttattttaatttgttgttggccacataaaataacaataatttatttttattttgttgttagttatatgaaaaaaaaaataagaaacattaagtaattcaatattaaaaactaaccaatccaatccgcacttttgtggattgaatttgagttattatgtggattagattgaatccaaaatataaaattctcacttagtacaaatcgaatacactcaaaatagtgcagaatgaattgcatgattatcgttattgagaatgataaagaggagataaaaaaactcttcaaaaaaaaatgaaaaaaacgaaatatgaaaaaaataaattgtataaaattattaaatgaaggtgtcaaggcttgaactcatgcaacttaacaagagataggataatgtgcattaacccactagtacatgcataatttatatagatatagtgttattaaaaaagtaattaatttaatatttaaaaattttaaatacattgaactaagttgaagaaaaaatatattatgaatatgtattatttactattttatgcatgattatataaataatataattatggtaaataattaattttatatctaaaattttttaatacattcaacattataattttataaagtaaattaattaatataatatgataaaattttgaaattattaaattaattaaaatcttaaatcaaatataaataaagaaaaaaatattacttttaaaggat

SEQ ID NO: 65193 - DNA, 905 bp, Cannabis sativa
  modified_base (68)..(70): a, c, t, g, unknown or other
aatataatttttttcatattcatgtcgttatagctatttaagatatcttacaaaattttgagaaattnnnaataatttacaatatagaaaatgatgttcaacattctattttacacgcttataaaataaaatagtcacacgtgcaacacactgcttgaacgcaattttcggcgtgttaaacttttacgaatttcttaaaatttttgcaggatattttaaataactataatttacatggccataaaaaaaattaattaaaaaattatttcgaatgctaaaacagataaaaatgtatcgatgtatcttttttaaggaagtgcattatagaatttttcaaaaatatatattaaattaatgttatggctgttttttagttactattataatttagtataatttgagttaattattattattaaaaaaaaaaaaagtgagatttgcgtctaaatcactagtggacggttacgaagggatgaaataataatatgtgactaacaaattttaaagtagtttattatgtttttataagaaatgaaaattgtaatattctactcattgcaaaaggattctctttttattttttctaaataacaattatctttctatcatttgctaaaagaaaggtataaaataatgaatatagatgtataatattattaaaaattatcaataatatattttttttaaaaaaaaattatttttagagttttgagctgagtgggtcgtaagcataaaccatttggtccgtcttaacaaaatatttgtttttgagtccttaagtttgagttgctctaggctcaaatttggtaaaaattgtaagaattaaataaacaaaaatatcattgaaaatgaatggtatggtgcattaatgatttatgttgacatatcacaagtacaattaaaat

SEQ ID NO: 65194 - DNA, 1283 bp, Cannabis sativa
  modified_base (1033)..(1035): a, c, t, g, unknown or other
tatctaggtccgagtttaggttttggatagggtcccaagtctaggtatgggtccgagttttggtccgggtctcagtgttgggctgggtacacgacgtctcagggcccaacttcaagtcacgttttgggtctggggctaggcccgagttcagttctaggtttgggtcaacttcgtagtcacgatcctagtctggtcctgagtcttggttttagtccaagtcgcggtcccgggttcaggtccaggtctcgatcactatctttgtctgggtttaggttcgtgtccttgtcagggtctggatcctggtcgttgttgcgagtctcaggatccggtgagcgtttaggaccaggtcaggtacaggtcccggtgagcgtttaggaccaggtcaagtacaggtcccggtccatgttcaagtcttaggtctcaggtcccagtcctagtcaaggtctccgtccaggttttggtctgagtttgagttatggtttgggtttggttatcgtcttaggtctgggtcctagtcacaattccagttctgattctgggtccgagtttggttctcggtccgggtctgggtccaagttggtgtcagggtaccgagtcttagttcaagtttggttacgggtttttcggatctcggtctggatccaggtctgagtcaaggtccacgttcgggtcttggttgtgggtccctagttcgtgtctaggtctgcgtctgcgtctgggtcttggtcccgtgtttcaatcccggtctaggtgtgggtcggtatttgggtccgtgtatgagttcgtgtccatgtctacgtctgaattccaatttaggtcaggggcttggtctaggtctgggtccgggattgggtctgagcccgagttctggggctaggttcggtctagttctgggtccgggtcaacgtccaggtcacggtcccggtcttgttccgtggtcttgatcaccttcttgttcaagtttcggttttgggtcctaggtttgggccggggtctaggtcgttgtcaagcttcgggtccttgtccgagtccnnnataaagacatcgactatgggtcttgtccaagctccgattcattgatcacgggataagatgtgcatcccaatcacgggtcctagtcttgtttcaattcatgtcccaagtcagggtcttggtttgggtctaggtcctcagtcatgttcaatgttctggtctgaatttaggtctttgttcgggtctcaagtcctggttcgggtttggatttagattttggacccaatcccagagtggctctttgaccgagt

SEQ ID NO: 65195 - DNA, 1309 bp, Cannabis sativa
  modified_base (109)..(111): a, c, t, g, unknown or other
ccggcgagctatagaggcagaggggataccatacacttatgtgtcttccaactatttcgctggttattttcttcctaatctcgcccaagttggtgcctctgctccaccnnnggataaagttgttatcttaggtgatggaaacaccaaaggtaatactaatcatcaaactatttattattgataagcaagtgttttttttttaattgtttgcaaaataaaatacatttttttattcgttgtaatatttggttgatattgaattgtgcagtaatttttaacaaggaacaagatattggaatttacagcataagagcagtggaggatccaagaactttgaacaaaagcttgtacataaggccaccagccaatatttactcattcaaccaacttgttgcattatgggagaaaaagattggtaaaactcttgagaaggagtatgttcctgaagacaaacttctcaagactatccaaggttggtttttgaaactagacttgaattttataagatatttttatatatttattattatattaattagcttcacaaaaaagagctttgttctgaaataaaagtgtttaaaattaatggcagagtccccaattccaatcaatgtgatactatcgatcaaccattctgcttttgtgaaaggagatcatacaaactttgagatagaaccctcgtttggagtggaagcttcacatctttatcctgatgtgaaatacaccactgtggatgagtatctgaatcagtttgtctaatattggaggttgagttattgaggttgagggctagaggagccacccctcctcttgtttctatctttgattattcactaataagtgataatacacaacatgttagtttttgtactcaacatcttttagtaaggcaaatattatttagtaatcaagtttattagattttgtatgactttatatatccaaataaaattatatattatatggagtacttaccacaaatgatattgtgccacctcatttaagattacacatcacacttatggcatgtttactaatcaggattgggagtgataagtatggtaattactccttttcatttgtttattttatttaatggttggaatactctaagggaaagacataaaattaggagaaaaaaataggagaagttctcctcccaatttcttcaggtataaaccattacggataatgctactttttaattttttatttattttttattattaaaaacaaaaagacactttttattctcttcccttttttttgcagcagccacttttttttttttttttctgagaaaggaaca

SEQ ID NO: 65196 - DNA, 692 bp, Cannabis sativa
taacaacgaaacatgttcccattagttctagctgtccgatgtgtatggctgctcctgaaatggcacttcatgttcttgttcgctgcgattttgcaaaagggtactggaggcaggttcggatccccattgttggtactactgctatgacattttgcagctggtgggaagaaggtttgggtgcgtggaagatggctgaatgtctagaggctgggatgatcttatggtcaatttggagagttcgaaatgaggtggtttggaatgctaaacaacctacgtttgatgaagtgttactattggcaaaactaaactttgatgattggtataattctcaaaaccaagaattaggtactcctaatgaatccaatcggattcgaaatgagcattggacccctcctatttttcctttattcaaagttaatgttgatggtgcacttttttcggatgttggaagttttggtattggtttggtggctcgaagtgcggctggtgcggtcattcaagcgaaatcttttaagaaggctggtgcatttcaacctcatgaagtggaggccattggaataaaagaagctctaagctggattaaaaataataattggtcaggtgtgatcgtcgagtctgattgtcaaagagttgttttggatcttcaaagtaataaaaatatgacctctccttatggtcatataattttagat

SEQ ID NO: 65197 - DNA, 1167 bp, Cannabis sativa
taagggtgcatcaatacatcccttaggtacattgtagaatcaccctaaactttttattatttttaagtatttatgaaataatctcataaattaacgtttcataaaattataaaaatatatggaaacagttagggcactgtacgttttttatgcaaaacatgtacaatatataattagtgttttctttaaaaaaaaaaatagtgttttgtaaagtcatgtgaataatgttgtgatatatattttaggttttttttttttttttgaatatttgtgatatttgaggtttgttacaatattagtcaatctaatattcttaattttgttgctattctctttattattatatatatcacacacacatgatgaatacaaattaatacattgcagaattaattgctaatttgttgaagttttaattcaagctaattaactaagatcatgatcattaattgattatatgatcatcagtactgattattcgaacttatttataattgtaatatttgatcaaaggcctaaattcgttaacatcatgaattagctagtgaccaataagtgaaaaactatacattttatgaatttttatataatatttacaaaaatatatatggttcttttttcctttcaaaatattatttattttatgaaaaaaataatttaggtaacctgccagttgtcccttgtgataaataattatctatattattttttcaatattatttttatttttgaaatgggattcttaagcaaaaatttttttatttgttttagttttccaataaaataattgttattttttttaaagaaagtaaatcatattttgtaagaaaaaaaatttatttacttcctaaaaatttataaaatcactcaattttaattatttttattttatataaagtatatatctttaatttatatgtataaatatatattatataaaatcaaaccaaacacaatatttatccatttctattaaataaaaataaattatatttcaaattttatgacaaaataatttatataaaacttttattagaaaaaataaaaatttattgtacatgatttaaaaaaaaattataaaaataaatatgaaaattaacacacattaatatgaaaaaaattaaaaaaaatattattgagaggaattttaaaattatttttttaata

SEQ ID NO: 65198 - DNA, 1027 bp, Cannabis sativa
  modified_base (601)..(602): a, c, t, g, unknown or other
  modified_base (958)..(958): a, c, t, g, unknown or other
aatctctcagatgacttttttgtgataccaattactggtgggagctgcttcttcttcttaggccgatcattgaagaaagccataatcaccaccaacaaaaaaaagctaatgtagaaaaaaaaataaaccccttttaaatattaaacttagaaaattaatcatgccgtagattagacgaactccttcgtcgatccctgaccggaggtctggtcttccacgaatctcggcgaagattagtggaaggtggctgaggtggaattcgtggtttgggtctcaggcgaggcgaggaaggaagagaacgagagacacagaggcaacagtggttcaaaattgggaaactataaaatatggtattttaaaacttaattacaaaactatggcataaaaatgtaaaaggaacaaaaaatccataaccccactacattaaaaaaatatgccataaaaaagtaaagtccttaatttttctcatatttagtgtaatttctacataataaaatgtcacatttgatagttttatttaggcccaattagtattgtgcttgtttaacaattatttaatgaaaggttaaattcctttattttgagccttgtgtgagagttnnggggccaatagtagtgggtacgacatactgaacccaagcgtccctcacatgaacaaccccaattgtgaaaactcattttccttgtttaaataattgtattaggctaattatactagtttgacctaattaaaattgaattagcaacacaattaattttaaagtaaatgaaattaatttctcattggattattttaaaattaatttagataaatacacttaatttaatgaaatattctagatagtgatttctaggttctaatttatattttctaatatttaattaagtagaaaaatatattacgttgaaaattattttttttaattaattttgcaccaacttaaattagaatattttncttagaacttaaatagaattaacatataagttgattctattcaagatacttaattatttgtttctattt

SEQ ID NO: 65199 - DNA, 1831 bp, Cannabis sativa
  modified_base (45)..(66): a, c, t, g, unknown or other
tttcattgttttagaattcatgttaggttgttaatccaacatacnnnnnnnnnnnnnnnnnnnnnngtaaaataatttccaacacttggtgtgattcttgacaagagttatccccaaatttgtagctaagtgatcggccaaggagtcatcaatcttacatcccacacacatttcagttttctcaaggtttatgcattgcccagataatgaagcataatcctcgagaattccttttagagctaagctgtcttccatatttgcgtcaaggaaaataagtctatcatccgcaaataagagatgagaaagtttttgctccatagacccaagccgtaagccatgaattcttccagcccgttcagcttcaaaaattaagcaagagagaccttcagaacacaataggaaaaggaagggcgaaaggggatcaacttggcgtaagcctctttcaggaacaaagtaacctttggtagagccattaataagcacggagaaggagaccgaacgaacacaattcatgatcttagtagtccacatcttatcgtaacccagacacatcatcatagtttccaagaagtcccattcaactctatcatacgcctttgacatgtctagtttcaccgccattttctttccatttccaaagcgccctttgcgcatacaatgaagactctcaaacccaataatggcattatcttgaataattcggcctccgatgaaagcactttggttggctgaaattactgaattcatgctttgcttcatcctattcgctaaacactttgagatagctttgtaaataacattacaaagactaataggacagaattcagacatcacagtgggcttttgaacctttggaatgaggcagatcagagtttcatttagtcttctacagtcggcattattgttaagaacatccaggcaggccgtggtgacttcattgcccactatactccagttttttttggaagaaaagccccaggagaccatcttttcctggtgctttaaggggatttatttagaatatggctgcctttacttcctcactagtgaaaggttccagcaaaaattcattttcagcattacttaggcgatgaggaacacatctgtggagggaatttaacagatccgaacctctattagctttggtaaagagttgctgaaaatatttaattgcaatggattcaacctctttctcattagttctccagcggtgagcatcatcaaacagccctaaaatggtgtttttctttcgtctatgagacgccttaaaatgaaaatactttgtgtttcggtctccatgtttaagccaaagagcacgacttcgttgcttccaatagatctctcttttttcctccacacaatttagatccatctcaagtttatgtttagtaacccaatcatccctactagttgagtttgcgagactctcaatctttcctttgagctctttagttttagcaaacatgtcctttttctgctgcatgttccaagtgtttaattgttgtccacatgttgctaaaagccgagagacatggagaactggagtatccttagccttgctttcccacaccttttcaataatcttttgacaatcttcattgttcgcccaagcttgttcgaaatgaaatctagtgccccaccttttattgaaagtttccacctttgtccccggactagcttgaagcaatagaggcctatgatccgaattccaccaattcaagagcgatacggtattctttcgaaatctgtttttctaatcggggttgcacaaaattctgtcaagtttctcgaaaatcaagtttgcggtcctcccgttgcaccatgtaaaacc

SEQ ID NO: 65200 - DNA, 2682 bp, Cannabis sativa
agatatatacaaaatccaatagaatttagtaacaatgcatatacgtacgattaagaaatttatgtagtaataagttttaaaaaaagggttgagataatttatataaaagtccatcctgtacacaaatatatatacatatatatataatataattttgttgttaaaatatatatatatataattacgaattaattaatatatagtccaggtacggggcatgctcatataatatagggtttttcatatatatatatagttggtgcatgatagttccaacctgtaaagaagaaaaattaataatagtataaactatatatataatatatgataatataacttcatttaatattaatcttctattctatctagatatacacatataattaaaattcattatgatatattttatattaatttgaacactattctatctttgttttatcaatccccacgaacaaaattagtgcagctagctctagctatatatatatatatagattatattatataaatatatataagttcatgacagtatgtactgttttcaataataatatcgtacgtacacactgcataatgataataataatagtagtaattaaaagattatcaaaaccaataccattttttatttgttcagtactacattagtttcgatcctaaactaataagtaataatgaatttaataagaggtactggtcaatttagaaaaatgtgatcatccattccaaaaataattaagtcggccaaataaattattatttatattatatatatatctatatttttgttgacaaaattatatatatttgtcttttgtttcacacttaagaatatgtttagttggatggaatgagaattgtaatgaaattattattatcattacattgtttgttttaacttttaaagttttataataattttacaatataattatgaccattacatcatatattgtaattcccattattacattataaaaccaatgtaatggtaattacatagttagaaaagacatattttgccattttttttttacttttatttaactttaaataataaaaataataaaattaaggatatttttatcaatatactttttactttatttaattacaatgctcattacagtgttaaaccaaatatcataatactattcacattataattcttattccattacattaccattcatataccattctcattacattacattgcatcaaagcaaacatcacctaaatgctttgaggatttctttaaatctcgaataatgcataagagtattattgtgacaaatgttattctcattcctaaagtagctaatttaaagagagtttctcagtgcagacctattactctttacaatgtggtctataaggttatctcaaaaatcattgctaatagaataagatcagtgctctccaagttgatctgccctactcaggcggcctttgttccgggtcgtcgcatccatgataaaaatgtgttggttcaagaaatcattcattcatttaagctcaaaaaagggaagaagggtgtatttgctatcaaaattgaccttgctaaagcttgtaataaactaagctggtaatttttagatcaagtgctccgcagttttaaggtccctgataagttttgcaactgggttcaccagtgtatttcgactactacttttaacttacacctcaatgggaaaaaggtgagcagtatagtccctgagtgtggtctaaatcagggggatcctctatctccttatctctttattttggctgcggatatcctctctcggattcttgagaaggcttttgattttggtactattagaggcatcaagttgagcagagatggtcccaaactcacacatctcttcttaggtgatgatatcatccttgtaggaagtgcgacgattgtataggccaagggagtctagcagtgccttgaacggtttgtgcttggtctgggcaacgtgtgtcaataagcttaaaacgtctatatttttcagcaataatactacggagggtatgaaaagaggcatcatacaaaatcttggactcaatatggcctcttccaacattaactacctgggcctcccgctatttagatccaagcttaaggatgctaatttcaacttcattcttgagaacctagtctcgaagcttcaagagtggaagctgaaatctctatctaaagttaggcgtgctaccttgatcaagtcagttgagctggctatgcatatctatactattcaaactactaaactttcaaaaaaacttacctctacaatagatggaatgatcagagacttctggtagggctgtgaacagggtaatcaagttatttgcttgaaggcttgggaccgcttttgccttccaaaatcaaggggtgaacttggttttcgaaagactcttgagatgaatcaagcgttgcttgccaagtggggatgggctctcctcaatgaagagcaatgcttatgttgtaaagtactaaatgttaagtatctaagacgaaagccattctcgtagtgctcatttaaaagttcaaactcttggttttggaagaatgtggtgaaatcttgaagaaaggtgcgtgtaaatgatttctgatgggaaagagaccaatatctgggcagactcgtggattttacacggtaaggggttcttgttgggttttatgcctta

SEQ ID NO: 65201 - DNA, 914 bp, Cannabis sativa
aaatatgaagagatgattttcataataactctcaaaaccgtacaacctccagaattaaagggtgcgtttttccaagaaaagatcctgacaaaaattccctgtgtaattattaaaaagctgtgtttactaaaaaataactttttaagcggcaattgttatacctaaaattcggctggaggacacgtgtcaagataaagagaatgtgagtttgtgtaatatctttttatggaataactcattaattacataagtatcagagtatatttgtaacccactcactgtaaggtcttaggcgaggaattaatgtacaaacgacatatagtgtattaatgagaaaccatatctccctaaaggtgaatagcgaggcaccggagaaaagtgacaaataccttagctttcaataagcaaactaagtgtaaaagtcggatcggctcgaagaacaagtatgcgagatgaccatctcgctatgaggagatttcctatagcttcatccaactaacaggagcgaggctcataaccctggcaagtccgaagatttctttatacccgcaattgacgtaagacatacattgtcgacctcataaagaagaatggtcccagctcgctattgggatcactacaatcaagtttctatcgagacatctccagattcaacaaataaagatgcgtttaatacacgatattttttgacccagtaaaagcgggaaaatcacagcaatacgattttcaaaataatacagcacatatatattttgtgatatgtaatcagatcccacgattgtagggataatggctgtgaacatattctggtcaactcagtaattaactgtccactatgtacttataaatagtagcaaacaatctcaaaaaagggacgaaaaaactgatatgaaagaggccctaaaaaaaactct

SEQ ID NO: 65202 - DNA, 644 bp, Cannabis sativa
  modified_base (486)..(492): a, c, t, g, unknown or other
tttaatctgggactgcttgctgctttgattctacaatcttaggacatggatgaagtaatcaattttagctgatacatattatatggagtgttgaagattttgttgattgtgatgttaagttcagtactatatcaatataatttgttgttttagattccaacatataactggagattcaagtttttgtttgtcaattttgtagttttttcacaaatatatgccaattagttccttttttctttccttaaaactctaaatctaataatgtcaattttgaaagtactgaataaaatagagcggaaaatgtgattctttgattgtactataataaagtcaatcaatcaaaactaaagagctattcatccaaaaaaaaaaatgaaggcattttgacaaaacaacaaatggttaaaaagaaaacaaataagaggaattcacaagaataagcattgaatagagccttgaaaatatgagagagagagagagagnnnnnnngagagagagagagagagagcaagacagagagagagagagagtggttgccgacatgagaagagacgagagagaaaagtggacggcttacgtaagagacgtgagagagagtggtcggcgtctggtgagatcaaaatattagagagagagagaga

SEQ ID NO: 65203 - DNA, 5507 bp, Cannabis sativa
  modified_base (5176)..(5183): a, c, t, g, unknown or other
gagatgggggaagtgtttttcgagaaagactttttatctcagttatttagttaaaatcgggataaaagggtttcacactaaacccttttttatcctagtttttaactaataactaggacagaatatttccctaaaaactttaatcttcgtttggctaacccataaaaatcgaatcttgaacttatttttttacctttgatattttcttttaacattctaccaaacagggcccttttctaaaaaaaaaattttgctgcatatttgaggaactaaatctaaaagtgggatataaagtcttcaattatatcttttatcctgtttttttatatttgttaactaaaaaagtaagataaaaggtccattttcttgtagtgcttagcagacagagctgggtgggcttcaagtatgtcagcaaccctgggatggaccctatacattcaagaagtaggcagataactcctccaaactttctttaatgcccagatgaagcacatgtaaccttctctacgtatttggtcagggtactagtgatgttgcacctcaggctctggagatggtgtgtgctcggtactcacttcccaatctttaaagttagaatttaaaaggttgtcgctagatgaagataaacttacacagagtcgaggatgatcttcatacaagagtttgagtaagtcttggttaatatggtgcttgtcttcccagaaatcaccaagattcatctacagaaagatgggtgacaagaaaatgagagttgggcggatggaaagttgaaaatctagttttatatgccgaccaggcaagattaaagacaaaaagaagggattttattcaaaaatagaatttccaaacccagaagttcaaaacctcaaaagatacctggaaatctttagaatcccatgaacgggtgaaaatgaatgactttaggtcaaaattgatacacaattagagaataagaaattataatcgaatgttagtcaaagttacaagtcctaatttcatctatactatgatcagccaagaacaattcaagaatagataaatttacagcaagaaatccagaaaataatacgtacattcaacgaatattacataaagtagagggaaaagtaacttactcactattcgaagcttttttaatatgctaagagggtaatgtcaattgattttctaacatcctttcttcaaagatttgagagtaaaatataaaaaaaaaaaatgctctggttctttagaaatgaaaatggataaaaaatttccacgaaggtttaaaccccttttattagcacctaaaagaggaagttaattcatttaatgttcaaaatttggggtttccccccaaaagtgtatgttaagtattcattatggaagtacagacgtcacgcatgcagtatcactcaactgtcagtgcatgactcgaggtacaacttttaagaggtatttaatgccccagacaccgaagagactctcaatcaagtcacatcggtcaacttcaacaaccaggacacacatcacccatctggacaacttcctagtcaaatgaagtccatgtgcaactaggaaagtctcgcgtagacttgggtggtaaatgttatcctaatttttgcattgtgacatggcacctgactggatgacacatgtcttgtatttctcaacctgggcgaatggttttactcctagcatgcaacccataaagattgatatgatgatccaagttatacgtacatagcaggatgttcaatcagagtcattgatggatatctgaccagcttgatcgtgtgatcaacttgcatgcagcagccaggggatgcgaattagcaatttcaaaagtggtcgatgctatctccaaactttcatgtaaagaagcaatccctacatttgtggggttaattcgtaccttcagagaataaaggtaatcagtctagatttcctaattttctcattgtaattatagaaacatgcaaatttcctattttatttcttatagattaagagaaatcattcctatgtaattagcccctataaataatggtctcattttactatttagggatacgaaattaatcagagataacattcaaaagagaaactttgatgtaagagtgaattactcaaatatctttatatataagagctttcgagaaggaatactttattcttcatctcacaagttaatacaactaaaaggggagtatgctattaccactatcttgggactgaatctctataaattctagtgttttctttacttattactctttactttctattatttatttaattttatcactttaattaagactcactgtcattggctaaaagtgaggtcagcacttgaaataatgcctaatgttaggaactggttcttgagaggtgaatactcttttattaagtcagactgtatgcttttaattttgatttgaaactgtctttcaacaaaggcattgaattaaataaatagtgatgacgcttcaaactactttcataggaaaaatccacacaaacttggtaaaatcatctacaaaacttaggtaatatttgtaactatccatggaagtgtaaaaagagagaccccaaatatctgtatgaactaattcaaaaggagtagtgttttattttcagtggatttaaaactgacttaatacaatttacctaattgactagtaatcaaaaaatgtcacagatttacatttgaattgaggactaacatgagataaaaatttggctaaaactagctaggaagagtgtctaagcctacaatgctaataaaaaatagttttacatgattactagtagtagtagtacaattaagagcagagggaatacaacttttacttccctagtttgacttgattcttaaaggaaatatgactttggaagctgcacttggagtttatacaggccatcactgagggaacccttcagaagaacttacctcgtcgtcttgtccttaacaaaacaacaaacatcattaaactctagagtaacattattatctctagtaaattgagaaatgctcaaaagaattttggtagtattaggaacatgtaagatatctttgagaataagaaaacgattagaaactttcgttaagacaaaattggaaccaatttgaagaatatgtatagaagaaatacaaccaacaactaatttagctttgcctttgtagtccactgtgttatgcaatttctaagagtctgtggtcatgtgatgcatgactgcaatgtcaagaaaccatgcaccagaaatgtcatttgttgttggagtttctacaagatttgcttgaggattttttgtactaacattgtttgagtttcctgaggaataagctctagtgaaagtgatatcaaacctacggtaacacttttgagttgcgtggccagttctcccacattactgacaaataggtatgtttccttatcatccacgattattggtgtagcctcttcctcccttgtaatttcctctttgaccacgaccattgtaccctcccctattgttgttgttcaaggaaatattggcaagattagcttgaacattggagagagtattagtggtgtgcttagttattcgaagttcatgattgtgcaacatgaactctttttacaaacaaaggattctcacgagaaatgagattaacaatgacaacttcatactcttgtcctagtcatccaagaatgtacaaaacaatcggttaaccagcaacaacaagagcatttacatagctcttcattttcaataagtactctttgattgaggacgatcctttcttggtagcttgaataatgccacaaacttgttgaattttagctctcgatcttgatggaaaaagttgtgttaaagtagtccaaatctcaagtgaagttcgacagttgatcacgtgtcccagctttggttcagacatagaatttatcatctagtgcattagaaattaatcaaaccttaaccattgaagataaacagagttagaaagattaccttcaataatctgaggtggtggaagaattgttccaagcacattagccgttaagattgtaagctcttacgacagctaagacgagagatctccagaatatgtaattgcatctgtctaatcgtagatttaatagaagaaggttgttgtttggaagacctgcttgtggagcatcttgagcaagttggattggttgagttgtgataggaagagcaccattgcctttgacttgacctccattgttagaggaattagctccattcgatgccattttggctctgataccatgaaaagatttggaacagagagagatgaaatggctcacacacaataggaaagttagttacaacagctggtactaagaacatgaaacgagaaattagatataacagaaaagtaatcgaattgttagctaacaaatcaactaacttatcttgacaaacctaattggagaaagttgtgtcattagaccattccattttcaattcagcttaataattaataaaaaaaaattgaaaacccgaatcacaatcacaaggtagataggatttttagaacacaaggttagttaaaaactaatagtttaatttctcaaatagattataaatatataattgttattcaactactttcactaactacgtactactaggagcattgttattaaacactttaaaagtatcaacaccgtatcgatgtggcacattgtgagtgattagcggtttcttatattatttattacatcaaaatatatgagatttaatattaaattgcattaataataatattacttgtaccataagatgtctctttacatttctcccactactaccaatcattcattagatcatccctttctcaatcaaattctaaaaccttggtataaaaatataggaaaacatatatttttttcccatttaaactttgattgggcactacaaaaaattttacttttaatcacaacaaaatttgtgactaacgataaaaaggttgtaattataaattattattattattattctgttgtgactaaaaggtccgtggttaaaagtattagtcataaaaattacaatttgttgtgactaaatatatttttaatcccaatacttgttatcactaaaactaaattaattaatgacaacttgtaattaaatactatgttttagtcacaattaactttttgttgtgattaaaaataacatttannnnnnnnaaatttatgttgtgactaaaatgttatcgctaaaagtaacaattttttgtaatgtggttagcttgagccgagttggcaccatctgaccgtctagcaatataaataaatggtcagttatgaaaagtcactctggtttttttttttatttttaaggaattaatactcatcaggatcattgaagttgtattttattttggtttagttttttgaatttgtaatgaaaatttattagaaatataaagagtggtatttgagacaccggccatggcattattaatgatgagagtaggagggagccgtcattgatagatatatagcgcgcac

SEQ ID NO: 65204 - DNA, 793 bp, Cannabis sativa
tctccaagatagttctatttagtctttcagctaggccattctgctgtggatttcttggcactgtattatgtctagcaatgccactttgctcgcagaaagaactaaacaaatcagaacagtactccagaccattatcagtcctgagtcttttaactttcttccctgtttgagtttctactagtgctttccattccttaaacttactcaaggctttatgtttatgctttaaaattgatacccagaaatatctagaataatcatcaattatagtgaggaaataccttgctccacctcgagatacaatcctggaagctccctagaggtctgaatgaacatagtccaaagtgccttttattgtatgtctccctgtcccaaacttgacttttgtagacttacccaaaatgcattgttcacagaagtccagatcttgtaaagcatcttttcccaacggtcctttcttgttcaacacttacaatcccttcaagcttacatgtcccaacctcctatgccatagagaaatcgaattagttatttcttttgaaacaactgaagccaggtttcttgaggtgactccttgtagtatataaactccattgatcatagatcatttcatcatcaccattgatccttttagtactttgagaattccaccctcaacccttatagaacacccttctttgtctaacattgctacagaaattagatttcttttaatgtctgggacatgtctaacttgatgaattttcatagtagttccttctgctaactgtaattgtactgatccaatcccaat

SEQ ID NO: 65205 - DNA, 799 bp, Cannabis sativa
gccaatatccttgatccgaggtataaattagaggttgtgaatcgaggttttagatttgtgtacaatccaagtgaggctgaaaaaatgataaagttggtcactgatacaatggcatagttatatgtgttttataaacaacaacaaacaactcagccatttgaagctcaacaatcccaagctcaaccatctcaatctcagtctcaggtatctcaatctcaaccatctgagcctgttattagtgcaactacaggatcatttcttcttaggcagctacaagcctacaacttagtgatgacattgaagaagatgatctcgaatactacttgaatgatcgtcgtgagaagcttgatcctacatttgatattctccaatggtggaagcataatggattcaaatatccagttgttgctcgtatggcaaaggaagtcttggttgttcaaatgtctacagtagcatctgaattagccttttctgcaggtggaagaatcctagatgcatttaggagttctttatctccgaggatggtggaggctttgatttattctaagaattggtatacttgtgagtatgaggaacccattgtacttcgacaatacatgaatgaaattgaaggcttaaagacatgtgtacaagttattccaggtaacaaattactcaaccattatatattaattattaattgaaattattttgtagatgttaaattttatgttaatgaatattttttatgtgatggatcatgtattactaatgttgagaatcttgacaattcttttggaagtggaagtgggacagaaaa

SEQ ID NO: 65206 - DNA, 558 bp, Cannabis sativa
ttttttttttaattaggtaatacgtactcattttcgttttgaatggtttttttttatatacatttttaattacatgtcgactatattttatatatttactgatttttttttttatttacatatataatatattgttttgaaaacaattggagaaaatgacattgtatatactatatacctattttactttatttgttttaatttttattttatttccatattctttaagatatattcatttttataaatgatgttacaattatatacccatatccattaagttaacgaaattatgtgctaaatttaagtagagttagaatatattaggtaaccctctcacagaagtataagataagagtgtttttgattaatagatacaaaaaaaatatttctcaacttatcccgttttccgttcttaaaataaataagtaggtaaaaatattgaaaacatttattttatttttgaaaaatacattttattcatttttttttttagaaaaaatatcatgttatcataaacaaatgtcatttacgataattgtaaatccatttgtttgt

SEQ ID NO: 65207 - DNA, 1913 bp, Cannabis sativa
gtatatttgtgaaataatcccatagaaaaaattaatctttttaattaatatttcaaaaatattttataataattcttttcttattcgcaattttatgtttatttgaaaaacttatagttgaaataattatactaaacatataagaactttcaaaataatatgaatattataataaaaaaaagtaaacatactaagatgctacattataaaaattagttctttatgcaaattatttaataaaaactataatttttaattacgataattatatcttttattttctataccttaatttgattgaagactatatataaatatatattattgattgttattatttaaatatatatataagatcttaacattttaagaaatttgtagcataaatattttatattttttgtttgatatacttatatattacatgtttttttcgacatattaaagggagttacatttttattatttctgtcactattaatttgttaaactctattaaaaaaaagggtattttgagcataattacttaaaattttcgatttcatacacttatatgctatttgtttttttttaaaaaaaaagaattaagtacctaattaaattacactattttgaaataaattacacttatgtactatttttttttttatgatatttagatatttaatttgctagaaaaaagacaagtgtataaaattaaatatattagatataatttatgctgcaaatacttctttgtttgaataggaatagactggtaataacaaaaattaagggtaaataccattttagactttatgttttgtaaaagttactaattggactctctatttgttaaatgacaatataaattatattttctaaaattgtacaaataggaccctaaactgattttttgtcaaaataaaacttaaaagtataatctgctctagaaatgttgtgacaaaaccggttacattttctgtatctgttagtgttagaaattatcttaattaaattatattagaaaataaaattgttaaaatttaagctcatggtcctatttttactgttttggaaaatataggatctgttttgttagtttacaaaacagatggtctaattaataatttttacaaaatacaggatccaaaatagtatttatctcaaaattaataaaaatgtaacatacaatattaaaataatgtgatatataagtgtatgaaagtgaaaatataaaatatttatgccgtaaacctactaaattttaatatagtgaggaaatatcagtttattgcaattatcatttattattaattttatatggtggtgataatctcctagttattatgtcaccttttgcttttgctcctttttggtatatatgaaagtgtacattggaatctaagcatattgaacattgaaaatgttggtgatgatgatcaatttgaaattaagggtattgatgcttccattattctctcattatgaaaaaagtattacaacttacaaggcgtttgtaattaatagtatcacggactttaattaatttctaaaaccaaacgtacgtaattaataataatttgtagtaataattttatcgccatatataatattggcatacccatacttgacaaaatggtgtccacatgcatagttagtcctaaggaaaagttggacacaaacaattacaaagctaaaaaaagttaaataaataaataataataaaataaaataagaaacaaattatcattaagagattagagcagaaatatatggtcatttatattgtgggttgaagtcttcgtttggattaagtatagtaaaatgccttgttaagtacgtttgtgcaagtattatatattattcctttcctaccaaaattaacctatcaaattaattataggcataaatcacaatttcgtttggtcaat

SEQ ID NO: 65208 - DNA, 1124 bp, Cannabis sativa
  modified_base (85)..(89): a, c, t, g, unknown or other
tcttgaagtgacaggggcaaaattggtaaaatgtttaaaaaaaagaggtaaaaatgatatattttaaaaaagaaggtaaaaatannnnnggacaatataaaaagggtatagatctagagtgtaatttcctctataaattataatattatttgggcctagggatgcacatttttttttatggtgatgggtctcgtgggaacccgcccctaatagggcagggattttccgtctaaatggggaacagggcaatgacgaaaattattttttgtctttgaatgttaaacggggtagagacggagatcacactccccgctccgacagggacccgtttagtattttattttataatttataatttatgtttgtaaatatttttagtatattagtatcatttttatgaatataagttgtgttttggataataataatgagtttattgaataataattaatgtataatattttaatttttatgttgtttaatatttttatacatttaaatttttataataaactttatttttttttattaggggattcccacctcgtccccgcccctattaggagatttcctaccccattcacatcgtatatttttagagaaatgttaaagggcatccacggtgcctaacacccttatgaggtgtaatattgctattggtgtaattcaatatcgagtgccacttactttattttaataaatattataaaaaattgctaacaaattataaagcagcacttcatcgtaatgttaagcaccataattacctcatagcaatgcttatatttttatttaactttggtggctcataattaataataaagaaattgcacatgatatatatattaaaaaaaaaatagagatggacgaatcctaatttattgtgtaaaattgagtttattgatgaagtattataacttattacataaatattacgtcttttagacgtcaattaatatgaatcagcagactaattgaaaaagaaaattaaaacaaatcaattgatgtattttgaatgtattgagttctggatcctcttattgtggcaaattggagtagttggatattctctcgtaatgcatggtttgattagtagccccttggtggtggtggagacctgtagt

SEQ ID NO: 65209 - DNA, 1148 bp, Cannabis sativa
aatcacataacttactaaacaagtaaaggcttactgaactgtgagtcgagcttatctttgacaatcattttacatgtcttgacggtcttcggtacataacgtggcagctctgataccaaaattgtaatcccttaatgattaggctcgctatagtaattttctaattacagtgcactcctttgataaccaaaggcttttcttaaaaatcatcataaactaaaattttgatttaactttaaactttcatcaatatatacatatatttatacataaagtcgagatcccatttttaaaactttacatcaatattcaaaatattttttatagatatgtcgcacagcgactacaaaatgaagcccaagtcgtcctaagactgaactttccaggtcgtaccatcttgatatgtacaatcatccccaagctttgaactcacttctattcagctttggctttccctttacctacacataaaaacaatatctgtgagtcaacacactcaattagaaaagcatataacgtacaatatattaccgatttatatttaggcacccgtacgcctatctacaaggcttgatagatgatcaagaatgttcttaataaaattacgacctctgtaccacatgcacaaagtactgctaccgtgctagtgttggtagggctgaacaataccccaagtacccctgagtgttgtaccacatgcactatgtacttaaccatagtagtgttggtaacactagatcataccctttgaacatcatatattgtaccaatgcccccaccaccgctaccgtactagtattggtagtatatgaatcaccaacacagcatgcaatttacatacatccatatatacatatatatattatgctagtcttacctcatttctaaatttaagtgtgtcggtcaaccttaatggaaaatcatgcgctgaatggatgccctatgtcacattgatataaatgggtaaataactttctaaaacctttttttggaacctaaccgcaaaactaaaaatttctttatcgataaatagcatggaaataccctaaatattgaggaaaaattgaaaataaggctttcaaaactacccaaattgataaaccaaatttcccaaatggataacaagttcctagggtcctgcctagtga

SEQ ID NO: 65210 - DNA, 2223 bp, Cannabis sativa
  modified_base (760)..(774): a, c, t, g, unknown or other
  modified_base (872)..(886): a, c, t, g, unknown or other
  modified_base (2079)..(2086): a, c, t, g, unknown or other
gaaggtttaaaagctggaatacagcgtcgtttgagtcagttaatgagcagtctgaaaattgcagggaggtggatggccttgtgcaagatataagaactctgctgcaacatccacaattagtttctgatgtaaaatttatttttagagaagccaataaagtggctcatagtttagtcaattacgttttggtaaacaacgtctgtgctatgtggataggggtttctccccctttgtgctagtcatgccattcggcttgatcagtcaccaattcttgtgtaattgctctttttataatgaattcctattaaaaaaataaactattcacattattgtaaagtagttattttatcagattttgtcactcgtggcaaataacatgatgacataatataattttattgtataatttaaaatttgtattttttaaaaaattattaaattaaaaatcaatgaattattaaaaaattacataaaactaaattaaatttttttaaaataattatacacatgacgcttatgtggccattgtctgtacagtcatatcataattatgtttgtcacttgtgataaaatttaacagaatgattaatttacaacactgtaaatagtttaggaactatttttaagaggctgaaaaattcaagagcacaataatacatattatagttcaaggggcaaaatttctaactagtttgaaaaatataattttttttaatcactacaaaaaattgctacatttagtcacaacataaattttttnnnnnnnnnnnnnnnttttagtcacaacaaaatattaattgtgactaaagcatagtatttagatacaaattgttactaatttatttttcgtcacaataaattgtaatttttgnnnnnnnnnnnnnnnacggactttttaatcataacataaaaataatgatttatagtcacaacattttcacttttagtcacaaattttattataactaaaagtaagatattttatagtgaatttgggttaatgtagctacaaaatggacttaattcaaacaaaataaaaagtataattagttcaaatttgatgtttataaggtctcaaaaataaaattatttattgtgaattatttcagattcaaagattaataaattggcccatatggttttaaagtcttttcaaattggcccatatggttttaaaaagaaagaaaaattaaatggattctcagaattttgaaaacttcttcatttttttttttttttttgagaaaaacttcttcaatcgaacttagagaaacattacaatgaaaatgaagaacactatacaaaattcttttctccatatgaagtgcatgaaaaaaataaagtagcatttttgttttttaaaaataatttcttaaaaaataaaaatatattttatacacttttattttctaattttaaaaaccaaaaataaaattgtgttttgtaatttattgttgtttttattttagtatggaataagaaagggtaataaataccattttgaactctgtgttttgtaaaagttatacaaccctattttgttaaatgataaaatagatcttgtatttttcaaaatagtaaaaataaaactctgagcttaattttcgatattttttttaatataaccaactggaataatttctagcacgaacagatgcaaaaaatacaatcagttttgtcataatattgggttattattaagttttattttgacaaaaaaattagttcatggtcttatttgtactattttgaaaaatacacgatccattttatcatttagcaaaacaaatggtcaaataaataacttttactaaacacatggtccaaaataggactctacataaacttttgtaaaccaacctaaataatacgcccaaaccaaaccaagataacccgacgaaagatacaaactgaaaaacccgaaaaaaatataaccccacccaatctttatattgggtaggttaaaaataataccaacccacccaatcaacccgaactaacccgaccaacccgattaagaatatttttttttatatatatttatatattattagtatatatatttatatatcatataannnnnnnnactatttaaaaaatataaagttgaaacaaatatattttttttatatagtagttgatttgaactttaaattcaatatatatagatcatttcttaataggtattacccatgaatggttattaaataaatttaactataa

SEQ ID NO: 65211 - DNA, 572 bp, Cannabis sativa
aataaacatgataattcttattccgttgttgattctatagtctttacaaaacaaaagaataaaattccatttcattccattcttaaacctatttccattcacattcctattccattttcacttagtaatcaaacgccacctaaaaggttatttagaacacccgaaaagttaatgttgcccttaattttgtccaaaatacgtggaccaacacgactgtgacacgtggatttgaggagtagggttttgagatgattcaactaagttttttttatcaagaggatcaacaagaaacatgcctcccggagaaggcacgagggatccacacactcccggagggcaaagctataacaaagcacctccgggaggtatcaaaccccatctgaacagtcacctcgcatttaatgccgcatgggagaagacgtattagaactgccataagtattaaaatctgatgacggcgtaaccccctggcgcagctattatgctatgattaataagcctagtgacgactactttatgaggaatcacatcagtcaagaaaagataatggattactgttgggaattatttta

SEQ ID NO: 65212 - DNA, 1120 bp, Cannabis sativa
  modified_base (1053)..(1075): a, c, t, g, unknown or other
ctaaaatattttatatttaggtattgtcaataaaagttaataccacatatagttttaaataaaatataatttaatataatactatacaatattttacgatgtaataaacgaaccctaaaaaataataaaataagaaataatattcaatatatacacaagaagcactaattagtaagatagaactgtgtgggagtcatttttcaattttttttcttttcatttatagtttgggttgctttttaattgctatatatgtgggttgatatatagatttagattacgatttaagttgtttggttaatttttatgtaaattactagataaaattcaataaaagtataaaaataaattattttaaaatataaaaataaaaaaagtaaatccttatacatattttggtaggtcatttgcgatgtgatgatataggaaacaattataatgtgtacacgtattaacaacgttaaccaataatcagctaaaaaaatatgttattactcaagttaattttttttttcgagataatatattattacttagcaagtattggatcgattagttataactcttatcatttgcttaaaagaaaacaggagtaaataggaaagggataaaaaaaatttggcaggaattagttttttttttacttaattgtcatgaaaatatatatacttattttaaataaaaaaattaatcacttttagtaaatttatttaatttgtaaaaatttaactattttgaaaaagatttatcaatttctttttctttactattttattattataattattttaataaaacaagagtatttaatatttttaagtaagatttctttttgccccagctggtaggaagtctgttatttcagtggtccaagtactggacatgtgtcatctcctcattgtcgtgtcagtaatgttaaatttaagattgattgagtcgttagaataaaatgatgattttattgtgtatttgtaatgccctaatgttaaggtacgctacagtgctatttttttttaattacagtacaatatttgctaatcaaagaattttctnnnnnnnnnnnnnnnnnnnnnnnttttatattaattattaaactttgtaatgtaataaaatatttaca

SEQ ID NO: 65213 - DNA, 1409 bp, Cannabis sativa
  modified_base (123)..(124): a, c, t, g, unknown or other
  modified_base (650)..(666): a, c, t, g, unknown or other
gagcacccgtgagccaagcccagcaagacagtataaaatatcgataataataattatcacattatataaacatttatgccattaacaatttcctataggacacagacctgcatgttacgctcnnatgcctatttatgtctatgtgacatagacctacgtgttgcactcatacgtctatatacaataaggccttagaacggttcatctcgattctaactatcgagttcaacctgattatgccttgaacgcataatctttaaacttaatataaatatacatcatggcataacaattacgcatttacaattcactagggtaataaccctaagccaataaactcctcatttagggtaataaccctaatcccggtttttaattgcctacatatatcacatccaatataagtgccactgcgcataactctacatgctaactactgtcttacctgatgtcctgcaagcgaagagattccaagtcccccaggtgctcctaactaaatgtcggtaatcttagtcacaaatttcgagatttacaagtatagggttaatccctaaatccattttcacataatataaacatggcattcaaaacaaagataataaaatagatctcggaacgagctttgtaacgatataaagaacgtcccaaannnnnnnnnnnnnnnnnagttatggccaaaacaaaatcgggaaaaacagacattcccactgccaaatacagtcgcggcgaccaaaaatctcgccgcgacgactgggttcagaacacccaaaaactccattttaagacctaaacatgccaacttttccataaattcaaacctcaatcatactgttatcccaatttttgcactctggcgtggcatcacatgatggtgacacgtggaatcgactatgagtatctgctcacagaatatacacgtaaatcttgcgttcgaggaacaaaaatgcatgtttgccgcagggaggaacaaagagatggaagcgttaagggctcatcatacagagattgaaaatcgtagtcgacaagctactgtgttgatacgaaaagcctacaaaactgtcgggcagcaacccccgagtgtcatccccctgggtgaaacagacgaagatccagcgatgaatacttcccaaatcttcggccataggttccgcctttgggccaagtagtaggcagaccttgtctagtaattcatttagagaagtcatacccgatggttccaaccaagccaatggtgccattccacctgtcaacaaagtcaatcaatcactaagttagtcaggcgtttctatattcaaaaggttagggacaacccatgatcttagaaatgatctgaatagaaggagaggagtagacgatcaacttggcacgatgatcgtacagcctgaaacccgcgctcaaattccagctca

SEQ ID NO: 65214 - DNA, 816 bp, Cannabis sativa
aaaaaaaaaaaaatgttgcaacaataataataatttttacaatattataataaaattatttttaagtaaatataatatttatacataaattataatttaaaataaaattattaattatacataaataaacttataaactgtatgtatatattttagaaaaatacttaaatagagtcacgaaaaatatttgtacatacaaatattttatttcattatgtgttagttttatactaataattatttaattcttttttatattttttatttattttttttaataatttagtaacatttaataaagaaagttactaatattcaacattctaaatccttaagcctcatttattaaaaaatcttcaaatgagttgtcttacaggagaatttttttttaaagaaacactcctgcaatatttttatttgatatttatagtgaaacttggaaactgaacattatgaacacattggacatataaaactaaggtttaaatatttgactgtataattaattaatcaaataacactaattttttttaccacggttcatattactctgttagtatggctttcaacaaatattattcacttgaaggttacttatgttatatcagcatacatatgatttgttcaccaatcaagatacaattaataaatcctaataatgtatgactcatcctttttataatctacatataaaagagagacagtgatatacatacatttcacattgatcaaacgaaaaatattgtagaagtgtttctttaaagaaaatattatttgaagatcttttagtaaatgaggcttaaggatccacaatat

SEQ ID NO: 65215 - DNA, 598 bp, Cannabis sativa
tattatttgttatttaatataatataatctttatataacctaccaaacaatacttactagtagtgttgagtaatccaactagtacaaaataacctttccaacaaattaacatataaaaaaaaatagtatagctattaggtatcagtactggtgcctagtactttctagatgtgtcactttgtgattaactagcggtactctctaaaaactattacattaaactatataagacccgatacttaatcgcaccaataacaatagtaacacgtaaaaaataaatactagacactactagtatcttttagcatttttcaaaacaaaaaaaaatactggctactacaaaatacaaacacacatgtattaatgaactgtgaaaaattaaatgtgaatgtaataataaaaacatcgacatattaaattatgagtcatatgaatatgatagaaagttaaagattaaatcttcgatctagctaattatatacgttgaaactcgtgatataaaaatatataaatatataatatatattgttcacaaaataaatatacatttgtcacgcattaactgtaatatattacctgtttatataagtacattaat

SEQ ID NO: 65216 - DNA, 545 bp, Cannabis sativa
gtccccaaatgaccactcactgtttataagaaatcaatcaggcattttcatggctttactcatatacgttgatgacatcgttgttgttaccaacaatacatctgcattacaaaacttcatcaccacactcgatgcaaggttcaaattaaaagacattggtacacttcatttttttccttgctctcgagatagcccgttgttccaaaggcatatccgtatcacaaagaccttttacagtccaactcttgcaagattcaagttgccttggttcaaaaccggtttccacccccatggaaccaaacaataaactaagtagtgactcaggggaattgttccaaaatcccacacaatataggagtctcatagggaaactcctttacctcacaatcacatgccctgatatcagtttttccgtaaataaactcagtcaatatttctgatcccctcgagtaccacacttgcaagttgcaactagaatattgcactacctaaaaaattctctaagacagggccttttcttttatgcttcttcaccagcctcgata

SEQ ID NO: 65217 - DNA, 911 bp, Cannabis sativa
taacagcaaagtaacaaacattaaactgttacaatagaatggctaactgtcaaacaactaactctgacacttgtttatcatcccccctcaagcgaaatggtgatgaacacactttgagcttggctttgaggtaatgaaaccgatctgtagatagacacttgatgagaatatcagcagtttgatcaagagatggcacataacgaacttcaagagttttggccagtagctgatcacggatgaagtgttgatcgatttcgatgtgcttggatcgcgcatgaaagactggattagctgcaagagatgcagcaccttggttgtcaacccaaattattgggcaagctggcagatcgatgtggatttcattgagtaaatgacatccagttcacttcggcagcagcattggttaaggcacgaaattcactttccgtgcttgatcgagcaacaacttgttgcttctttgcggaccatgatattaagttgccaccaaggaacactgcataaccaccggttgaccttctatcatcaatacttgttgcccaatcggcatcagaataatcttgaagatctagtcgagcagctggttgaatgaatagaccctcatgaatcgttccctttaaatacttgaaaagtcttttgcaggcatcccaatgggttgtagtaggggcatgaataaactgacttagtttatttacaatgaatgctatgtcgggtcttgtgagggtaagatattgcaatgcccccaatgtacttcggtagagtgttgggtctgaaaaaggatcaccaatagacaaggataacttgatagctgaactggtgggacttggactaggtttagctccatccatcttaagctgagaatttcagcaatgtatttcgactgtgagagatgaatgccagctgatgttctctgc

SEQ ID NO: 65218 - DNA, 3436 bp, Cannabis sativa
  modified_base (3014)..(3016): a, c, t, g, unknown or other
  modified_base (3138)..(3141): a, c, t, g, unknown or other
  modified_base (3171)..(3176): a, c, t, g, unknown or other
ccaataaaacttaatgtaagcccaaataaaaagtctaacaggtactagacacgtgattcgagaattgtaataagtgttttttttgcataaatacagtaactaattaattaaatcatatatacaaggtatttttagaaaaaagaaaaaactaatttggtcaatcaacaaatgatacaattccaaaaaaacaaatggtctaagcttcacgtacaatttcgtcttcttaggcttcagcatgaaagactaatcatgtatttagagtcatttatagagattttagcatattttggtgaaaacagtaaaagtcagagagctcagtcgtatgactaatctaaaaataattggtaattttgacgactttaaaagcaaaattgaacttggagctcaacataaaaattgtagatcttgttctcaacttttaggaatatcttgagtcgtccaattccaagttgtattgaagaagtccagaagcataaacacgtccctacaagttgcgaaaaatcaattgtttagttaaatttaaatgaacttttatggttatataaataagaattttagggtttgttttaacactttgcgtttttgagagaaactcatagaaagcggaaaagagtgagattacatcaccaattattcatcattttagttctttttttctccctaatctcttaattttcaattatgattatagttgtgattatggaggagttttttttttagttaaggtttatttcaaaactctaaaaatataaattcttgattagtgataataaatattgttcttgatttctctcatattaaattttttctatttttttatttgaatattgtgaattctttttaggtgtacaactaattagggttttgcattgttctatcatgtcatcttaaatttacttctcacctaatagtttaggattctaagtagagtgataatttccaatcaatagtaatgtcaaaaatattattaattgtacatgaaaagtagaacctagattaaatgaattatatatatgcttaattagtttgttgactagattaacttatctttatagaaattaatgactttcctaggttaaatagattgcatgcttcgtggatctattacttagtaagaatatttaattattaagcactttgccttgattaattgtaatatgaagatagaaaaattgattgtttcagcgttttttgcaaggttaatagtttgattgagaaattgaaataatttttattattattgatctcgaatgactgttgaggatggagattgactcttaactatttattaatagtatatattatctatctttatttaatttctaatttatgtaatttaatatttatattaaacccctttgtttaattctttgttctaattctttaataataaatttataataatcatcgtcggttcgaaccgttatactaaagttattggtgttccacctatatttccaacaataatatggtgctgacatgtgtaatgtaacaccctactagattaggcgtgttatcgtgatttcttaatattatgcacacttttactaatcaaagggattatgaaaaatgtgaatgatttaaaacttcataattaaactttaaacttgaatttataaatactttacataatcccgaatcccatttttaaagttaaaactgctttacaaaatattaattgcaaaagatgtcgcctagtgactatcaaaataaatcctactatcacgaagatcgaaaaatccaagtctaactgtcctgataagtacaatctacatccactcgtgctcacgctattcagcgttagctttgtccttacctacacaagtataattataacataaacataaattggggtataacaaggtacacatacacccaattactatcctatcccgtgtcccacacgtactaagtctagaatattcttacgacggtactatttataataatatcaacctatactcggtactctagtcgtaccaatgtgatagcatcaatctatactatgccaaacatatatccgtcgatattcagtgcaactctatgaacatactgccattactgatatgttatctaacagacatacataaatatgcacgctaaacatgtaatcacatatgatattattatactaatcttaccttgattttgaattcaagtgtgtcggttaacatccataaacatattccaagcaataatagtagcaaaaacccacataaacaaaatccaccattaaggacctagatttgaacttaaaagctcaaacattgatctttctcaataataacaacaaaactagaataaatacagcttatacaactcataatcaaccccaaaaaacacttctaaacactccctaagtggtttcaatactacttggtagcttctttcacttggtttcattggtgagaatgcattattggcaaaaatctcacggttcttcttcatggccgaccacttccatttccttgtggcagtgcccatcaaattgatgagcacatccatttccatatggcagtgattggctagggttagccatagctggaaaatgatctctatcacttgttttgcattccttagtgttgaggaaacacatttaaataatttttcttcatggtttgtaaggagcgaccactgtcattcccttgtggcagtgcccatcaaaattcaagagtactaccatttcctcatggcagtgcccatcaaaattgatgggcactgccatttctatatggcagtgggtgcatatgccttttttcttaagggtttgatgctatattgactatatgcacaaacctaagtcatatttttgtccaaatgagttaattccttgttagtttccttggcagattgaggtttttaaggtgaaaatactcgcacgggcccatgaaccctagtttgggcacacttggatgtgcgagtcctagtaccaaatggttggttgatgtttttgagtcctctaaagtgtcatgggacccttaagaaggacgtcttaactcatttgacatttatannncttggtcaaagtcacaaggttgactttttctaatttttttgaaaatcgagtataacaaaacacataaaaaattaatgaatccttacaatgatggcaacagaataatatgactccttccattnnnntctctagcccttgattcctatctatagcannnnnntatcaagatctgaacctgaatcttctccttcagtttacagtttgaactacacaatcttcctcactatcctaagtattgcttgacatgtgtgggtatattttcactcactataggcttcaaattattgagaagagaagaagaagatttcaaaataataatagctctctttattttttaattgtctggcaaaaggagtttgatcatcatctgaaaataagtgtcatattattctatttataaggtggctattaaggataggt

SEQ ID NO: 65219 - DNA, 864 bp, Cannabis sativa
  modified_base (29)..(34): a, c, t, g, unknown or other
aaaaacaaaatttttaaaaacaaaaattnnnnnnttattttgtgattaaaaaattagaaaatcaaagtgttaccaaacgacacctaaattaaacataatgaacttatttttttcaaaagaaaaatctaatttatattaattttaatatataaaggaaaatttgattaattatgcttacattactttaaaaaatttcctctaaacttataaaacccaatatttgtagcatatgtcaacattagtgttatccccaaaataccctccccatttacatcacctccctctctcttcccattccctctatctaattttcctcccagcccgagcaccactccaccaccacaaagaacaatttttccttctcttcactcattttcgtcacttgtcttcactgcactacaagctactacactacaagctacactacatattttctctcattttttggacagagcaccatacacgaagctaatatgtaattttttttttgtgtaatcttattggtatgtttagtttagaatgttgttttgatgcttgatctgtgggttgttgctattattttctaattttttgtgttgaaatggttgcagtcaatgaatactgcatttatcctggttctgcaattttttcgtcttgtccgatggagtccgatgtagccccgatggtggttcgatacaccacttggtatcaagatagggatgaaagcccgatatgggtccgatggggcccgatgggttgtccgatttggggtgggggactttaattttggatgggcccgattgttgggttttctgtcctaaataaaacatattttaatattataaaattcactaattaataaaaagatcataaattattttatgt

SEQ ID NO: 65220 - DNA, 1802 bp, Cannabis sativa
  modified_base (373)..(376): a, c, t, g, unknown or other
  modified_base (406)..(409): a, c, t, g, unknown or other
aaatattataaaattagttaatttttctaataaaaaaaaaattatatcaaaaatattaaaatatcaaaatttaaaatttgctatttttataacataattattactaaacaaaaatacaactacacgcgaagagtggtttgtttcctagtttataataaaaggctaagaggttacactgatagtactttcaataaatatggtaaaatttcttaatttttaaattacacataaaaaaaaattacaaaaaatagtttctttgtaatgagtgctttagttactttacatttttttttttttggaaaatttacaaaaattgactaaaaagtcttgattttttttttttttggttgaatacatttttttttcttttttnnnntgaatacatttttttttctttttttctttnnnnttttttttttttttacttttatacggtgtcactgtcaagtagtttaggagagaatgactgagatgtgtgtgggccccgcttgctgttgatgggagaggacgcgccatttggcgcgttgggatgtcacttaatgagtagttcagacttttattttcaaaaaaaatataaaaaaaaaaattggagaaagaaaaaaaaatcctttacaaaaaaaaataaaaagaatagtgttaggtgtgttaatgtttgaaatttggaactgacgtagagtaatattattattattttaacattttattttatttttttcttaaaaaaaaatttttttttacgtaggtctttattttaattctaaagaaatatgtcatatgtttttcttcttttctttttctttttttttttttcaaatatgtcataaatgttatttatttattttttatataaaaataactaacaaaaaaatatttttaaatgaaaatatatcatattaatttataaaaatattagatgactttaatttaatttcttatttttacatatagaaatatgcatttttaaacatttaacataaccaccaactagcttattactaattcttaacaaatcaaataaaaaaaatgtcaagaaaatttacacaaaaattacttaaaactagactttttttaggatttttttttttttacattttatcagattctatttttcactttttttcaagaaaagaaagaatattagttctcatagcagtaagtaacatgaaaacaacaacaaaaaataatctttcctatttttgtaaaacaaaagctataaatttctaaaatgtaaactttgtcaattttttagtatttataaaataatcctaaaatataaccaagataaaatatcaaatcagactatattaaataagtatatatttaatttttcttgggcacatacttttttgagttgatgtacaagttattagtagttgtttttaattttattttaatttgttatttgttttgtgtgtgtgtgttttaagttaacacaatttgtcgatttctaataatttttcatattacatcagggttgttatctcattattatttagttgttcaaccaaaagaaaattagtatatatttatttttccataggtatgtatgtttttgagttggtgttcaagtgttttatagttgttttttttatttttatttttgtgattaattagtgtcttttttttttagtttacgcagtgtattgatgtttgtttaaattgcttatttttacattgcttttaggttgtagacaatatttattgatttttagttattttgcttatataattataaaaattattgtgtagttgtatttttatagttttttagttgaccaaaacattcattaaaaaataatttt

SEQ ID NO: 65221 - DNA, 1165 bp, Cannabis sativa
aataaataattggattggattggatgggtccaaatccattggatgtaatccaatgaacacccctagttctctctcaccatgactaatcttatttctcacataccataattgccaagaaatgattaaaaagatatcaaaatcttcattattgcgtcaacttcgaagttgagagatgaaagacaatgggtctgactctttacaactcttgattttcgaccaacaagtagttttcttccaaaattttacattagacaggcaactccaaatggcgtgcatcacattgtcaaccgcaccactattgcatctaaaaaatctaccatcctcaacaacttttctgcaaaacaaagcaccattagttggtagtcacaagtggcaaagtttccaaaaaaaagtgatttaactttctctcatattttaaattgacatctaaagtgcttcgatttacattgtatctgaactctcagttactttgatttggttcatggcaactcgaaactcgctttgcacgctatactctctattcttagagaagttccagatcaatgtattgtgtacaagggagttttactgcggagactagaaataaactttgggtcttctttgctgaacactgtttttgagaaatcttcattgcattgactattggcaagtttaaggtcaataaccttcaacccctgggctaggtgtgatttaatcacatatcttgaaagttttcagccttgggatccaaggatcactaagcacatcaacatcattaccattcccgattctctatctagtacctttgcgaagaatttctttacctcatattctccaaaaaaaatagagctctctgaaccacacttggaattcaaaattgacttgttggggaaataagaagcctttagaatttcagcacagagagagagtctgggttctttaagaagcgctaatattgttttgctaacatggctagattaaaaaaatacagatctcaaaatcccaactaacccttctccttggatttgcaaagcacatcccgtttacaccaatagattttacgttttactctgtaaatcccacgataattatgaagctcattttgtgcattagattgattttttttttttttgagaaagtttcactgttattataatcaaccatcgtttacaacaacagagaaaat

SEQ ID NO: 65222 - DNA, 911 bp, Cannabis sativa
agttattgtcattattaaatctcaaccattatcatcgttgtatctcacatattatctcaccgtatctcactcattgtcatcaatacattaatcttatgtctcagcttcccaaatctcaatattaatcttagattctattttgaattttaaacggtcatatcattgtcttatgttttatttttatataaatatatataaatagatttacatagatatataaattattactcattcaatctaatgatatattatacggagtacaaataatattcaaataatataatttacaaattataaatagtctaatatagaaaaaaatattaataataaaaatctaataaaaacaataaatgaggagtgaaacgagttatataaaattgaaaagaaaaaaaaaattgaaacaccccatgtcaaaaaaaaaaaaactattatgcaacttttaaaaaatagtaaagtatttataacatgtcaaaaaattgtcttgaaattgttgtacaaccttaagaaaaactatttttcagtatgagaaagtaatagcaatctatcaaggtaactttttatgttgtaaaaaaattcacatagaaatttaaagaattcaaattaatctcgtgtctctattttattgcttggttgtggcatgtctttcgattatgacctttttagccacatttgctgcacctattatgttttttttcttttgtttctcatccacctataaatctcttttcccttggtcttccgaatctcactttctggtttggtggcagaacaataatatctttgatattttgaggtacatctcatgttgtgtgatcgtgtacagaatatattgacccactatatgtttcaagccatgttttgattgtgtaatactgtgaacaataattgtaaatatttaagttcatctcttt

SEQ ID NO: 65223 - DNA, 767 bp, Cannabis sativa
caataagcagagagaggcgagagaaattgacaagagagaagaattgaattgaattaattaattggaatgaaggttacagaggtatatatataccagtacagtaaatagcaaaagaggaaactaaccaagtaactaacttaacagactgaactaatcaacctaataaacacttaactgaattaactgtcaacagaaataacagtaagctaatatatattatatatatgcactttattggatagaggttgaaattcctttgttttataggaaatttctcacttatcaaaagtttgattatattgtgttgtctaaatattattctagacatttcagctcaaataaatttgagacagaatagaacgacataaaattaatttatattgaaattatgcaaacgttatttcaatttccaatatatatatatatagaagatgatataatattagagtgctgtgtatgacataagttgaagttttcttttattaaaccttacctcaaggacaaaaaaaaaataggaaagtatgaagacaaagtagcaagaaatgttgactaacttatgatagcttatctatccaactaagcactactgaaactttgttattacaagaactgttgacgactgattaaaaaaaaagtactaatcgtatgttgtaaaaactattccacatcttcgaaacacaagagctgatcaagaagggcgctcgacgggttgttggtcctggtacaagtattagtgttcagtttgatccgtggttagaagatacttc

SEQ ID NO: 65224 - DNA, 879 bp, Cannabis sativa
ttagtgtacttgatgatcttggtgttgttagtaaaattgaggcaggtacaatcaagttggccaaggggtctatgactatcatcaaagggcacaaaaatgatggtctatactacttgtaaggaagccccgtagcttgctgccacaacactaaagagcatgttatagaagacactaaggctgtcctatggcatagaaggttgggacatattagtgaaagagggctacaacttatgagtgaacaaaagctacttggtaaggacaaggtaaccaaggtatatttttgtgtattttgtgtactaagaaagcatcatagacttaaatttcaaactggcacacacaaatcacaaggtatcttagattatgttcactcagatttgtggggtcctgagaaaaccctaacttttgggggtagtgcctatttcttatctattgttgatgattattctaggaaagtttgggtttatctattaaagcataaaaatgaggcttttcaaaaattggtacattgataattacttgttgaaaacctaactaataggaaattgaaaaccctaaggacagataacgacctagaattttgtaatgatgagtttacaagttactatcaagacaatagaatccaaaggcacaggacagtgaggaaaatcgctatgcaaaatggtgttgctgagagaatgaacagaaccatattgaacaaagaaagatgcatgcttttcaatgctgggctcgcaaatggattttggggagaagcagttgtcactactacatacctaatcagtagaagttcctctagtgtaattgaaggtttgacgaaaggtcgactggtaaaccacctgacttgtctaatttgagagttttttggatgtgcagcttatacat

SEQ ID NO: 65225 - DNA, 811 bp, Cannabis sativa
agaaaggagtttcaacctgggcagcaagttttacttttcaattcaaggttgaaattgtttcctggcaagttaaagtcaagatggtcgtgaccgtttacagtggtcaaggcgtttccctatggagctgtagaactaaaaggggaaggtccagaaacgtttaaggttaatggacagcgtttcaagctctacttgggaggtcaaattgactaagccaagtcctccattattctggtgcctctctaaaaggaacaactcgtcgtccgactagatgacgataaaggcaacgctcttgggaggcaaccccagtgtttttctttactttttcaaactttttgcaattttttttagtttttgttttagtgtttttagtattttaaatttttggtaaagtaccagacattatatttttccagttgaatcgtgaaaaacgtgaaaaaataaaaaaaataatttttttcgggactcagaacccaatggtcacgaccatggtgttcctgggtcgcgacccttttctttggtcgcgacctgggcaattacagaaacccaggaattctttagctccagtagtcgcgaccagggcataagctagtcgcgaccctttttcatggtcgcgaccatggcagttttcagaaaccacaagaatttcaaattcaagctagtcgcgacaaacccatgggctagtcgagaccagctgacgaatttctataaaaaaaaccccaattttcaccccattaaacctaaacctaaactaatttttctcagtcgtttccacctttttcctcagcagaaaaccaccaaaagtcaccattct

SEQ ID NO: 65226 - DNA, 715 bp, Cannabis sativa
attataaatttgtacttatatcaataaaaaaaaattgtatttaattgttaataatacataaattttgttacaggaaatttatatattatacctaatctataacttaattttttttttatgaataatcataatctaaaatagcataaataaatataagaaatattgatatatatacagatttttcaaaccaatttgaaaaataaagtgaacgatgtcatataaaattaaaacaaatatatttatttatatatacatgtctaatattgtagcacaaaatgatgagagtgatgatttttaaaagaaatcttaacacaataatacacaatattatataagaatttattttgtattgtaatatatagcataacatgacaatatagttgcacttcaatgttgctgccctgaatcttgatcaatgttggtgaataagcatatattgttatctcattttgttataatctatgagtttttttcttcttgtggagtttcatcccgcttctttataaaataataattatgttttttcgttctttcttgactgttttgtgagtcaaagacttattatgtgtgtatttatattatagaatggtctaaataacttgctttaagaacgttagtagtctgatcactcagaatcaaaatttgaaacaaaaaattccatatatatataatgaagacaattaacatacccacaacatataaaataatttaaatt

SEQ ID NO: 65227 - DNA, 639 bp, Cannabis sativa
tcataaattcctagcagaggtctggtatgacgtcgttttcaaactggtctataaaataaagatgaaaatgtcgggcctttgctttttgggcttaatcagtggtagttgcaagaatcttcatatgggctcaaggcaaagggttcaagggaaaaaaaataaaagttgatatacttggcatctaaatttaattgtacatgacatttttttgaaaaaaacttaaaaatataagaaaaaccattatagataaagaagaatgccataaaaaaatttaaaattgtaattctttttttgtgaaaaaaaaaatgaaacactataaatttctatataactgaaaattttccaaaaattatgataaaaaacgtatataaataaaactaaataaaacaatcagtattataaaatataatataaatatcataaaaaactaatgataaaaaattgcataagaaaactaaataataattacaataaacaattacaagaagttagaaaatatgaataaagaaactaagttgcatcacgaagcactgtttaagaaaatataaatgagatcataaaaaataggcaaaataattaaagaagaaaaaaaaacctacttaaagaaactagttaaaataaccattacttacacgaggcact

SEQ ID NO: 65228 - DNA, 775 bp, Cannabis sativa
cattacaatatatatttagatttcagtagaatatatacgtgtctattactaaaataaataagctagtatatatatatttatatatatctaaatttatgtgtatgtgtttaggtgaataaataaaatacaccaactcaatatattactagaaacaattaaggagttagaaatttgtgtcattaatttaatattactagaaaattaatatatattatatattataactttttaaataattaagtgcggatcaaatttgatcgattacttttggagattaaacaacatccaattcactcaagtgcgaattttaagttttttaatccaatctaatccgcgcaagtgtgaatatctgcattttgcggattagattagattagattgtgtgaattaacttagatcgaatactttgtgaacagtcagggacagacccactagtccaactaacaaaaattttgtcttttaaaaagttaaatgtaatatttttagtttgataattatagacagaaatagtagaaaaacctaaaataaaaaaattaaataaatctagtaaagagtaattataatgtatatgtaaatattctttaatgaaataaggccccacaaagtaaaaattctggatccatcactgtgaacaaccctaatttatattgtattcaatttaatatcaatttcgtacattttattttttaaaaaatttatagtacacttttaaaaggcgtgttctattacatcatttatctatttcaaaaaattaaaaaaattttttttttttttt

SEQ ID NO: 65229 - DNA, 900 bp, Cannabis sativa
gtaatcaatggaattaatttgtacaaattagtgaagggtctaaattttgatattgggggttttattaggggcaaaaaatgaaatttccctttgcttattcgaatttgatgtcgtttcgaccgtctgtcgagttttgcacaatgacaaagatccatgaagtcaaattcacaactttacatttctcatttctagctcacccgaaactgaagagtttcgagtctctcatgtctacaaaatagcaacaactccgagaactgctgaccagctttgccatgacactaaaactaactaaatgatggcaaaatatcacttaggcattataaagtacatcccttggatgtttttacacttacccaacatccaggttgatgtcatatgtcaacctaggtgtagggtcatgaacttccttaagtaaaacaaccacaactcactcaattttgcatcacagttgcataatcgttttgctaatgctctaaaacttgacatgtcaattattacaaactgataacgacgcaatgaatttatcacatttacaggtgtttcatatcgtcaatacaatacaaaactctttaaagaaacttttataacatagttagttttattaatatactaaattagttgatataaagttggttaatagaagtctaacaattcttctacatacaactaaaattgaaagaacatgacttcacaagatatcccttgtgtgtgatctagaagatcaaggaaaagaagatttttaggtgcatgggatacaaaaacacagaataagtgcagcaaatatggccaaaaaagtcacaactggaagacatgccataactaaacaattagatattgagagaacattaatttaaattatttatttttttttctatgaacttttacaggcagaaaatgtta

SEQ ID NO: 65230 - DNA, 580 bp, Cannabis sativa
cttatgctccaataaactcaaatcaagcaataaaacatcataaacagctctaaaattaaaaacaccattagagagccaacttaagctctctaacttcaagtttgagtaatccttagcacaacaagctatctcatctcaaaatcaactaaaataaattatcttaaccccagaattcaaacccaaaatagttgccacactacagaacctcaaatcactaaaatcatgcaattaacctatcttgagctaaagaaaaccatagagaagaaagctaagtattataccttgaattggaactcctaatctttggttgaaatctcttgaatttcagctaaaagctctttccccatgatggttctaggtgtttcgaaagagagaggaatggtacagagtgaaatgtgtttcaaagtgttttctgattccttcaaggttaagcatccctcatatatagttataatctaatattcaggttattggtgcacaaaaagacaaaaagaataacctagtaaaagacctttttgcccataaatgataatcaaaagtttgaaattatccaagggtaatttggtcattaatcatttca

SEQ ID NO: 65231 - DNA, 1210 bp, Cannabis sativa
  modified_base (249)..(253): a, c, t, g, unknown or other
aggttgtttcgatatggtctcctctgttggctggttctatcaaggttgaaagtgatgttgctattgataaaattggtgcttgtagaggccttgatatggtggtgcgtgatcattttgggtactgttcttgcttttgttgtttggtgcctagaaggttgtcttgatcctaaagtggcagaagctttggtgctttggaatatcatggtccaatgtcattgctttgggtatgataatatcatctttgaaatnnnnngcttgaatattgtgcaaaaagtagtgaacaaagtttctgttatttcctttttggattttgtcttagatgaaattggtaatctttgtgatggttttaaagatattttttttttttacattaaactatagatttaaatgttgttccccacaccttagctaaaatcgctcttacgacgtcgaacactatttggtggtcggattcttcaagttgtattcagaacttatttatagttgatgttactcaatattgtgttctcgccccctccttggagtttcattactcttagtgtggtagttgagacatttttctcaaaataaataaataaataaatatctcaagcatcatcataataatctagcacataaccaaacactgtaatgctttcctaattttaagattcgctttaccactctcaaagcaatctcaaatctattctcataaaataaaacctgtataccaaacgatccttcgagattagagtttgtcatgtataatttgtttagttttaaatattctaagattaggcaatttgctttataaaggtttcaagtgctgtaaaatttccttaatatagtgttctatattggaataaactctataaagtcatagttcataatttggattagttcttccttataaataatttgcattaatctacatattgcaaaggcatatactatattactttaaagtttaaaagaaaataaaatgtgaatttgatggcgtgagatagtaatttatttccttagtaattttatttaaacattggataagtacataataactttttcttttacagatttcaattacatattaattcaattattaaaattctatataaaaatgttttctgaatttatattacatccatagctactatctttaaacctatagagttttaataattggattaagaaatttataaaataaaatgtgtgttttctctcacatagaaca

SEQ ID NO: 65232 - DNA, 1707 bp, Cannabis sativa
ctgaatgcaaattaataaatgtcatagaggaatgcattagtaattaaattttgtcaaccgaaaatataaatgaacatatgatttttccaaaactttatgttatgggctgtcaacattaaagtaacatatttctatacaaatctagacttagagaacacaaattaagcaccaatttctcatgagtcatacaaggtaaataacatatttttataccatctacaaatcacacttttccaaggtgataatcttgcatcattcaagtatttccactaattttattttttccaaaatcaagattagctaataacctagaattggtgataagcaaaactaggtagataaacattaagcatccttgaatgaacaaaacttcattaccaaaaatattcataaaacatcaacgaaatttacaatccaaggttcattgaaagttctaacaaaaaaaaaaattagttcatgctcaaaaacataaaaatacccaaaatgaaaataaagaagtataaaaaagacataccaaagattaaaggagtagaataaactatgtggatggctcctccttcttctttcttccttatgcattccttttcttcttcttctttttatttattcctctagctattttcaataataatggctccatggattgtcttcccccttttcttttaagctagggtaaaatcctatttttacctttcaaaaaataccctccacatggtcccttaattcccacttacagctctaaaccacttgtcttttgccacctcagccatttttcgccacatcaattaatgagttgccacgtcatcttttttctacattaatttcaacattcagtccctgctacttttgctatagtaaaatccctgcgaaacttcaacaaaacttgcattttctctattaggctcttttcttcaccaaaacctaaataaaacttaatgaactccactaacaactccaaattacccaaaagaacataaaaaaaatacaaaataacatatattttcacaaaatggaaggaaaagaactaaatataagtaaaatacatacaaaaattaagctaaaaaaatgacaaataactctttattaagagttatcagcaccaatggtgccctttagcaattctcaaaaagaaagtaaaatctcaaactaaaaagtaatatcattagtgctttcaaaaaaaaaaaaagtaatgtcattggttgttggcaacacaaaataatattttattagtgaaacataaatttaatttaatgttacttttaatattatttgaaaaaaataatcaattggtcacatcatttctacttctctttatttcttatgctatacaaaataagtagtcttttaattaatattacatttattttaaaaaaacatttggcaaggtccaaaagatagattttatttaaaaaaaaaagacaaaataatttccaaatgcacaatttggcgcgtcctccttccaccactagcaagtagagcccccatgcatcaccatttgtactcacatcgtataaaagtaaaaaaaataaaagttaaaaaagaaaaaacatatcaacataaaaaagtaaaatagaattttttaattaatttgtgtaaatatccttataaaaaatgcctatataattttttagggataataatataaattattacatggaaaatacaaattgacactttatttacaaaaatatcttcataaggtgtgga

SEQ ID NO: 65233 - DNA, 820 bp, Cannabis sativa
tataataaaacttatacacattactaattacataattagcttgtttatataagaccgccaaataattaaataaatattataaaagatgaaaattgaaaagatcatgctatgtataagacaaatagaaataattttcttatagatacatatataaatatatatttatatagactcactattcttttttatctatgaaataaataatagaaaagattcaaagatcaacaaaaacttaatatttacaacaatctattaactataatgtacacatgaaaaagataaatcagaattattactatttagaaagaatttgataaagttataaaattaaaaatgaccatttagtctaaaatctttaatttctattatattgaaattatacgttacaaaatataaataataattattatatattattattattaaaattaatatgtaaatgctagaattcaaatattataatatattattactattagtaactcttatgactacattaaaagccataatttacttatatatatttatgtaacattatttatttatttgtgagttatgagaatgaaaagacactaactttaattaattactacatattactatgaaataacaaaataattaataaaaatttaaaaattgaggaaaaaaatgaagaataattcatataggttgtcatattatctttttgtattggaagtgccttttttttttctagaagttatttcatttttttttagtaaatgagtgttctattgttgttattgtatagttgatatgttttagatgagttggtaaaaagtataaaattactaattaaaat

SEQ ID NO: 65234 - DNA, 1113 bp, Cannabis sativa
gtatttgaatatgatagtaattacgtataaattaatatattgttagccaaaatattaataattatacaagaaaataatattttttagtaattaatatttaaaataaaaaaattgtagtaattacactcaattctcatatgggtcagagaattaaagagtgtaattggagcccctcaattacctcaaattacacatttatactgtaattacacgaccaaataaaaattagaatatctattttgtttggagaagtattatttgggataaagatataaatttaggagtcaaatgacgggtgagtgatggtactcaaattcatccttgtatagatcggcttatgagattaattactttctgatctatcacaagccttcatggtcttggtcctctatggcgtgtggccgatttcattaaagatgggcgttgaaatgaaggtcatctgaagcaatttttttgggaggttaattacaatctcagacgctctttgcagtgaggtggctactgtttgtttagctttagaggtgacaatggaacaagaaagtaaatttattattgtcgaaagtgaatccaaggcagtaattaataccatcactagggtggaccctaggtgggagattgaaattacttaatttttttgtaatagagtcatgtcctctttttcgctagttgtatattttgtaatatttctagaacttgtaattatatggcacataatgtagctaagtatgagtttatccactctgtcgtggataaatttcatggctcacaatgctgcaaagtgggcaaagttcaactctgtcgtgggggaaattgatctaaatgtgatggagccggaggtgtttgaggatcataaggaatggtatccggatccaggctaagggactatgttcgtggttattggttgtttgaggttggtggtcaggttgttttggatgctgaagttcatgaccatagggtagtttagtgttttcttatgtttagaatttgtgtttcttctttttttgtagttgcgtctgtggtttgttactctaggcgtattttctttgctgtttttagtttttgtgggactatacggttcttgttttcttgtccctgcggggcttttgttatcgt

SEQ ID NO: 65235 - DNA, 1197 bp, Cannabis sativa
aaaaatgaagtattttatgtaaaataactaattgatttcttatcaacactattagtaactaaaaagttactttaaaaatacaagaaaataaaaaaaaatgtcagatttaactaatatggcacgttgtaatattattattgtaaattaaatgtaaaaaatatatatatctcaattaggtattcattatttataaggaaaatttccatatttataaacaaactcctaaaaccaccctaatatgacctatttgttttatattttcttgtagaaaataagaaaaatacgaaaaataaatcatttctcatacttaattaccgactcaaaatttgaaaaaaggaggcaaaaaatgggcgtgtgatcagtttcagcctgggagttgtcgaggacgtgatcgacgtgatggagtgacgtcatcaactacgaaacacgtctcagacagctttttttctttttaaaaaaataaaaatgaattaaattgggaacggtatactaaaacaatatagttttagtataaaaaagaacccatcacttttttgtaaatttaatcaaattaatgtacttagttgtaaattttcttataatatactccattttgaaatcataagatttattatttctattattaatgtaattatttatttaatttttaaaaaataaattattattttaactgtcactaactcaaaaaagaaaagagaaaaaaaaattgaaagtatgaagttgtaacaacaaattccatgaaaaaagaaataatgtagtagtacaaaaaaataaatcaagttgtcaaaactaagtaaaaaaaatcgtaatacaaaaccatattggggagttgatattattttgcatattacaattaggttattatttattatttttcggttgttttgtagttatctttgtattgttttatatttgttttcatattgtttgttaagttgttttagagttatttttttattttattaaaatatggtattttttgtaattttaaaactttaatacagtattttaaaaaacgtggtacagtgaaagtataaaataaaaaagtgtgacattaaaaatgtaaaaataacaaaaaagtgtgagtattttaatctgtacattttcttttggactttatcggagaccacaaaggcccgtaatgtattgaagggatattcatatgggcctataatgggccggactgtgttgtattta

SEQ ID NO: 65236 - DNA, 840 bp, Cannabis sativa
  modified_base (616)..(636): a, c, t, g, unknown or other
aaaaaatttatttttagtcacaacaaaatttataactaaaaataaaaaagttgtgactaattattaattattattcctatggtaggactaaaatgtcagtagctaaatgtattagtcacaaaaattacaatttgttatgaataaatatagttttagtcacaatatttattgtgactaacagtaaattggtgacaacttgtgtctaaatactatattttagccacaagtattttcttgctgcgaacaaaagtcacatttggttacaaaaaattatgttgtgactaaaaaagttgtctctataaagtaactattttttttgtagtgactataaccaaaagtaagagcaaacgccaaatatctattaccattcatggtacatttccaaaaaaaaaaaaaaactttcatttccttcgcagctgaaattgaaactttataggccatcattaattaaatatagtggatgctctataaaactaattgcactgttgaaaattatgggattccatcttaaaattaattggcaatgagtggagtagcccttgttcttatatatggctcaatacttttacatttaatccatgtgggataatgttctccaatattccccctcaagatnnnnnnnnnnnnnnnnnnnnnatcttgaatcaccttatcacaggctatgccatttgctcgcttatttttgttcggatctcaagcgtctttgcaccatctggatctcgtgcggttgactaaccatttagacaggtgtggattgaaagcctgctaaggatatgtctctgataccatgctgaaaatcatagggttccatctcaaaaccaattggcaatgagtggagta

SEQ ID NO: 65237 - DNA, 526 bp, Cannabis sativa
  modified_base (26)..(48): a, c, t, g, unknown or other
  modified_base (178)..(179): a, c, t, g, unknown or other
aacaaaaaaaaaaaatcactttcaannnnnnnnnnnnnnnnnnnnnnnttaatcaatcttttggattacaaccagacccggatccaaatcccatttccacgaccttggcgctgaacccggcttctgacttaaacccgaattcgaccccggacctaaacccaacttaaataaaatcaannaataaaaataaaaataaactttattaaacacacttttgtttttcaaaaataaatttttcaaaaaaaaaaatcttacttttattttgtgattaaaaaattaaaaaacataagtgttgccaaacggcaccttaatatttcatcgcaagggtaactccaaacccacccaaggcaagcaacgaacatcaacaataataaacataaagaaaaatggcatgcatgagagcagagattaaaacactagtacaaaaactcaaaataaaatcaataatccaaccctaaataacggcccctagatacaataacaagtagctgtcaattcaaagacaatgacagaacacaatcagaga

SEQ ID NO: 65238 - DNA, 3696 bp, Cannabis sativa
gacaattaatcatatgcaaatgcactaaagtactatatttgccttaatcagatgtgattgattaacaaatatttttagtttagtgtttagatacatattttatatacatactattatattaaagagaaaatatttcatatactattataaggcctaaattcttgatcattgggtctagatagaaatatgtagtattagttatttctacatgttcttttaataaattcaaaacagactccgtactgacgaaactggaagaaaattacaattttacaaacattgtgtacttatgccgctaaacataaacattgggtttatgccgcttacaaatataaaactttaattacttatgacgatataagtgaaactcaatttttactttttttttttttgctaattttttttttcaatcaataaaacaatctcaacccattataaaagtgagagacatttctaattagatagaaaaactaagcataaaaactcaattttttctaattttatccatccgtgggtaatacccattaatagtgcactcatacatatatatattttaagtataacaatataaaatctaaactcatccaaactaaataaaagtactaattagtttgattagatgttggatgtattagatttttagacactccatccaacatgcgatgatctaacatctaatgctatccaattgaatattaaaaaataacatctaatttcaatcccatcacaataaaatgttcaatatttaacagtcggttataattaaatcgatcaattattattagattcaaaacatccttaagtcagttaccaatggttactaattttacaaaatttcatacccttgcctttcaacaaagatataccaataacaagattaaaaaaaaaaaaaatacattccctttggttcaaacaatattgaagtttgacattcctcaaagaagacagcttttacataatgagccttaaagaaaatgaaataaaatgtaaagctagattctgacccacctttaaagccttttcataagagtagggttcctcagttccaacatctgtgctaattaattattagtaagatttcaatagaagtacaagacacaccataacccaaaatttcattggtacaatgccacgatacagtacaacagtaattttttttttagaaaaaaattatatagcaaaagactgaaactaacttaaggaagaaaaaaaaaatagaagaaaaaattagaatagaatagaagaaaaaggtggtcgccaccgaatatttatataagcagacaataataacttcatttaataatcgttatgatgatattctacattatgtataagagaagaatcttattggtggagaacagaggccttacggtagtgtttggaccaccagatcattattaaaattaaattacaaaaaaaataatttaactcttctttccctcctcaccgccatcaaccaagtaagctttcttcctcctctcggcgttggcgcccaaacaaataataaagaaacacgtggcgtaaattgcgtggaccttccaattggtcttgggcggttgacgcaacactaccctatgaaacaccgacacgtagtaatgaagcccaacagcgaagcccacgaatgtctgggccaggcccaatattttcgatcccagcccacagtcggtggagaacacaaggatcaggtacatcaacagcatcagaaggtacaatacgtatcccaaagtttggagcacttgtatgcagacgtaggtggactgcgaagtagcgtagaaaaacttcaatggctcgagccctgtgacaatggccgagagactgagaatgccgaagtagatggagaggtagacttggatgaagatgagaagcttttggagagagaaataagcttttatacggttgaagatgagagagactagcagaagagggattagtatgaatgcgaacgagaccaccgaagctatggcgggggcgtacttgttacccacccagggcttaaacccttttgtcatttctttattggctctgttcaggtaagcttttgaggtagtggagattctctcaaggtctggaatcagagttttttgaaacttcatgggcaaatcggagaattcagagactaaatctccgtcttcctcatcgtcgatccagctaggttgtactacagtttgttttttcacaatcttctgcttattgggtttttgatcttggctgtttttctttagggattcgatcttgcccgaatgagaattcagatcgttagtaggagagttttgggtcttcttagttgtggttgtgggggttggttttgttgttttgtttttgggtgagcttgatttggttagatctaagcttttattggtagatgttactgaactgggcttggtggaattcaactgcttgatcttggaagtagtggaattcagcttcttaagatcattaaccttggtaggcaatacattggtatttatatttttaccagtactcttggtttggttcttacttgattggtttgaggttttggcaagtttggtctgatttttagatgaaaggctgtttttaatagttttgctttggtttttggaagaaagggtatctgcagccgcagttatttttttcttgggctttataattttctcttcactgtcatcactactactactactaccactttctactcccaacattttccttcttctaccatcaaaacgtgagcttcgaaaagggtccgaagaagcacaaagaaaaacagagacaaaaaggaaacaaactagataaagaagaagtacctttctaaaactgaagtgctgcatgagttgagccatttgttgttgataatgaatttggcctgaaagatctgatatatattcagatctccaaagagtgtgaataggagtgggagagtgagtgagtgtgtaaaggaaaactgagtgtgtatgtagttttataggtagtagaagtagaagaatgatacgagtgtttcagatgtgaagggaattagaaggtaggaggagactttaatgctcaagagtcaagactttaatatattaggatatcaactccggtcacatggagagtgacaagtggagaagagtttaacgcggttttaccacctttgctctctttgttttgctttgtttggtgagctagctcgctctggatttccgttctttttcagaaaaaaaatcttaaaaaaggaaatttatatttcttattattatatttatttttaatattactatatcaatactatattttaatatatcattaatgtgtataatttatattttttttttgtttattatataaaattaacatattttaaactgttttgtttatttaaaaaaaataaacatattttaaattatcttatttattatgaaaaatgaatagattttagagtgttttatttatctaattgatgattgagttttatactgtaaaatttgagtttttgagttgtttttgaattaaaaaataatgaataaatgaacatggaattaatataattttattaataatatatatttattaaataatttttcaataaaaataatacgccataaataaattattactattaatatataaaaatttatcaaattaatcatatataaaaaaggaaaattttatgttcatcaattttctaaattatcttaccttatcattattttaaaaatagagtaaatattatacata

SEQ ID NO: 65239 - DNA, 1344 bp, Cannabis sativa
ttttccctaagaaaaagaaaaaaatgtaatgtttctaaatcctaattgatagtttaaactggtattttattagagtgaggactaagcatggttgttgctcattggaaatagcctatgtaaatgtgaatatattgattaattcttcgctcaactattgagggattgtaggtctatgtttcttgttgttggtggaaaaattcgattagattataacaatttaattacacctaattatcatgcattataagtacacatacagtttttttttaggacaacaataactaagtgaaaattataataataaagaataatttttccatcatttttcttttgtattgtgtgtttcttggtccagttgatcaattttaatacattgacttgttttttcaactatttgcatatcttggtatttggtcttaaaagttctttatcttctaaacactctgtgatttatactcttttgttttaatgaactttatagtcccttattcaggaaggtcgaacttttacccaaaaaaaactaccaaaatatattgttgtttcagtctctagctttttaatttgttcttttttaatgctcttttttggatttagtcttttttttaattgtgtttgacttgatactagttgtttctccttttgttctatgttattttggactcgaaatctgtagtttgactgaacttttgtaccaagttttctctatgtgatgtttaattaatttttgctctcttttgaggcatattctatcaaaacacaatgtatataatgtatgaaaatttgttaattcctgagtggtcttgtagaagtaccatatcaaaagtaaaatttgtagtgaaactgaatgtattaactgaccttcattttgagagtatgtaagcttttgtgagatttgagtttgaacttttaaacactcaacatgagtagagaaagagagatcggaagttgtttagggatattgatgatactttggtgaattggtagggaacccacacatatttgtatttatatatgaatgagtaagttacactgatgagtgtgtgatgactgtaaatttcattaggtaaccattaaagacaaggccatttgtaaagtgttctaaacattaggtaaccattaaagacaaggccattacttaatatacttcttaaagcgtgataatagtgttctaaactttagggaatcaatttttctagttacaaaggtaaaaaactgtatgtggatatagtgtccctctcaattggtgtattgtttcgtgaatttcttagtgtacatacctccatatatcgtgtatataggattagtcaatctagcttttattccttaaaaatatatatacacctt

SEQ ID NO: 65240 - DNA, 798 bp, Cannabis sativa
ttttatttattaccatgaattgtaatgaacattcctcttttccttagtttccttttttcttagtttcttaatatctcactcttcattttttatttttcttcttcttagaattaatccatgcacatgcattttaaatatggtgaataaagtctatctgtcatgatttatgattaattatttattacaatatagtggtcctctcctcgatctcttcaaaaaattgatcatatgtataatacggcaacgtattaggaccacaagttcagagtaataattaatttttgtacgtgaaataattaaacatgcaggttcatttgtattcatcaaatttaacttctcttgtatccatctgacaaaatatatatattaagatttgatgtcgggaggtaattttacggaatgtatttcgtggtacattagatgtgtctcaggatacattactattttttaaccctaattacacctagatcaacagatcaaataacttctccatctaatggcgaccgtacatcatgaaatacattccgtgagagtacatcacgggacaaaatcatgtccctatttatataataataataaaaaaaaaacttcttgtaatttttttataggagaattactttatatattattttttaaattttttttttcaaatttacgatttggatttttaaggtggtctctccagtggtttctatgtggattgctatacgattttttgctgagatttttaggtttctctgctagttgcaataaatgtttctatgtaaaattttgtattaatacaaaaaaaaaaaaaaa

SEQ ID NO: 65241 - DNA, 1874 bp, Cannabis sativa
attctccatctaaatggggaacggagcacggacaggattactttttgtccccgaatgctaaacggggtgaggacgggaatcatactccccgccctgacagggacccatttaatttgtattttattttatatttttaataatattttacaacttataatgtatgtttgtatttttttagtatattagtattctttttgtaaatattaagttgtgttttgaataataataaatttattaaataataattagtgtacaatatttaaatatttttatatatttagatttttattataaattttatttttttatcaggagatttcttgctccggccacgcctccattaggggattcttccatcatatccctgatgggaaatataagcgaggatggagattaaaattcttaacagggatgagtacgtacgggaggaacactccccaccaatttttcgcctcgtgtgcatccctagactgtcaatactctttttcaataaaatagctaggtagcgaggtaggctaattttaaaaaccatataagaaattaagtaggagtaactactacgtacttatacaaatatttaaattattagaatatatgacaaaaaattaatggaaagttaagcatagttgacttttttaatgtagaataatttggtttcacatgtataattaaactactgtgtttccaaaaaacaatataaggaaagtgatttcttctttccttcctcttattatcactttatatatatatatatatacatgaatatatctccatttatatagcagaagatagctccaaaaatctcagagctagccaagcatgagtaacaatgctaatctaccctctcataggccaatacaaagaactttgtcttgtaagcttttatttttgctttcataatttatttttatatataattataaatatatataataaaattatacatttatatatatatttcaggtaaatcggctgattcacctaagatcttaaaagatgtacgtaagaataattccaagacttcaattgaagccattgccgaacttttgtgtaagcttaattcataataataataataattataagctttttctttttttataatatttcaatattatatatgaaacacttttcctgttttgttttgaaaatataactacaaatatttgtaatccttaatatttcaaaaatggatgtatatacattctcatcaaccttttccaggaaggaattgaaaattatttagagtatttatttatttatttttgtttgagtacagattcagaaaagtcaaagtcaacaaattggaatgatatgttaataaattgcttcttgacttacttaagtggatctgggaaggaacggtttcttcaatatgctcattctgtttctcaaatcattgacgataaaagtaagtataatttatataaattatttttatcattcttcttatttatttttcaaaattaaatattaataatttcgagtagtgtcaaacattttttagatcttattttaagcatcttaaattattcaaaattttttaaaaatttacagacgtaaaataaactcgataataacatatgtatgatttaccttgatttacagtgccaaacgataagaatccacagagtttgatgcaaatattgatgatgggaatctatacttgtttgaagagtttgattatgaaaaatcctattacatcaactctatggaatgtctttgaaggagtcatatctactattttgaatgccctaatcaagggctccaacattgatattgatgaacccaatatcaatgttgatgatgatgatcacaaggaacaacccaataatatcaatattaatgatgatccttatgaggattataaggta

SEQ ID NO: 65242 - DNA, 600 bp, Cannabis sativa
catttaattccgctacaatcaatgtaaggttactcaaactttatatgtgtttaaattttatgattttagaaattcatattttaaatattaataaacatacttgttagtaaatctaggtcctggtaaaatatattttaacatattgtgataatcaaagtaccctgcacttgataaaaaattccatgttctataagagatccaagcatattgaaacaatgcttcacttcattaaggaagtgatcaatagccaagaggtgaatgtaaagaagataaaaacttatcataatccagcagacatgttcactaaaccaatcacccaagctaagttcaagcattgcttaaacttggtgaacatcagaaaagatgattaggcctcttcgcgagacatacaggaacaacttaatttggtgctatcgttcaaatcactcaagtgtcaagctactggatcaagatggattttgtggtattgtgaccaagttacttgctacctcagcagccaactcaacactcaaataagaaggtagttaagtttgttgtctagttgtttttccttctctcttacgatcagtaacaaggcctatataaggcttgtcttaacta

SEQ ID NO: 65243 - DNA, 1096 bp, Cannabis sativa
tcatgtttatattataatattttacaaaagataaaatatttcataaattgtaattaataattttttaatttgtaattaatttaaagtttattataaatagttcaattattatgtgaaattatatttataagtaataatttactaataatataataattattatataaatctaattaaataatttagaaaaattattaatttaatattataaataaaaaattgtactttttatggaaaaaaaatgttattatagtataatgatggataaaataatttacaaattataattttttttttccattggtaattatttttaaagttcattgtagataaataattactaaagatagaatagtgctattgtgaattatttttccaacattttctgatttagtattgtgggtgttagttttggctagaaaagtgcataagaaataaatgttgactcaactaatttgaaaacatataaaggtgggattgactttggagaataaatgctaaattcaacgcagtatagtatgaatgagatataaatataaatctttgatatcagactacataccaaccaaaattgaaaacaatgtcaattcttggtcgattagcactaagagttacctcccttaatcatcaattatctatatataatggaaagcatttacactcagccttcacatcaccaaataagtaccaatttataaacatacatatttaatattgtcttatttctctactccaagaatggcaaaaggattaatattgggattgatattattaggttcgatgttgggcggatgtatggccaacagggattggaggttgggtttcaactacacagattggcttcaaaaacatcgcaactggtatgatcaacaccacccaaacaaaacccaacaagtttccaacaagattattgtaggtggttctcaacactggcgcttcaactttacctacactgattgggctttcaagcacggcccattctatctcaatgacgttcttggtaaaccttttattatataataaattcgcagaaaatatattgtatgaaacccatcataaaattcaaaacctttaatgtattttggtgtacatgcag

SEQ ID NO: 65244 - DNA, 1075 bp, Cannabis sativa
taaatcatgatatagtgacgctttttatgtgtgggtgttatcagaatataattaaaaaaaataaaaattaactacagtgacacgctatgagtgtagttctaatctttagagtctaacaacatgagattttaaaaggctataatgacacgcaatgagagagtccaaaatattttagtcacttgccccaaagagtcagtaattacttttcttgacgtacctacattggtgatccacattgaagtgtcactaaattttttagagtcctttaaaaagggtcactgaatcccatatttgtggtagtgttgttttgtgttattaatgtatttttatcatttttatttaagaagttatttatttgacaacacttttcttaattttaataaattaaacaaaattgcaacaaattatcttactaattgattaaattgattataactaaatttgagacgatcataagagaaacgttcatattcttcaatcattgacaaataatttgttggacaatacttaacgcaattaccaaaaaaaaaaaaaataatataaaaattatgaaattaatgttataattaagtaatcatttcttatgaatatcagtttcaaatttttaatcagtaacgaatagatctataaaacacacacgtaaacatatacttcacatgcaatacatttattaaatttaaaatggattccactgtaaatatatttttcacgtacatgttacatgtctttttattctttttagtactatagtaatacgtagctataaatatatatatatatatatttatatttctggtaaaaaaatatattagttaaatatatacatgtatttttttttttcaaaatttcacttaaacatcttttttttataaatagaaaaattttaaggataaaaatattaaaaaatttctaaaccgacatgaattattttttttttgtcgccatctttttcatgaattatttttgacgaactcaaagcttaatcatctttgttttgcagatgatgtttttttgttatgtcatggtgactttaaatctgtccatcaaatgtttcaaggtctcaagctattttctc

SEQ ID NO: 65245 - DNA, 2513 bp, Cannabis sativa
gagagagagagagagagataagcaaaagtgtactgaaaaagtgtttttaaaaatttttaaaatcatcaaaaatctatttttaaaatttacttctttttaattttaaattttaaaaacaaaaaagtaaaatagtttaccgaacataatttctgtttgtatttataaattttttattaaaaaaacaaaaaccatttttaaaatggttaccgaacggggccagtaattcattattataataaaattctcacaatttagtttattaaatttataactaaaagtgttcaataaagcaaaaaaataagaaaaatgctatggatccaaagcttttttttttttttaagaaaagcgtgcatatataagaagcaaaagtagttagacttcgcggtcattacaaaacatgtgttttgggatacaggaaatcggaatacaatcgaatctctggtggataaacgctcatttagccacattatgggcgataaaattacagttcctactaattttttaaaaaaatacaactaacaaaataaagagacgatctaatataaaatgagacatagttctcaatctcccattcggagacctccctattgagagcattgataactacccttgaatcactctcaacaataataaattttaaaccatgatgcttcgcaacatccaaagcaagacaacaagccgccgctacatactatttttttgtttttttgttttactttttttttttaaatggaaacttcattcaatgttgatcaaagggcaaactcctacaagtctagtggataaaccgcaatctcactaagaggtaacaactgccggccaaccacatcgattcgaaaggagcattaagctcaaagctcacacatgagcataaaagagggacaaacaccccaaaaaaaagccactaaagacataaggtgcaccacacccaaacaactcaaacaaactaaaaaactcaagaaaaaaacaaacaacaaagatagaacaacctaaacaaccatcctcctaacgcacaaggaggcaaaatgcgagcccaagacagaaagaccgaggcctcggagcactgccaacttctgacgagaaacaaccacgctcgacctcctataatggttttgaacggtgaaggtgatggaacaaggaaagcacatccctttgaggtaaaccccaatcccccttctacatctacaagactctgaaagctcatgacgagccattgcgcaccgaagcaaggacacctgaaaagtaacccaacgaagtaacccgagaactgagaaaaaaggaggagcagcaccccaccaaggccaaagcacatacctgaaaaagaacatcgcacaatgccaaccccaaaaacaagagaaagatggccaccaaaagcccactgttgtcactagctcatagcccaaaaagtcgattccatttgtaatccctagccaaggacgacaggcatctcacgagagatgcccaaccatcaagaacagggaccactcgcctgaaaaaccagggacgacggaactggccccaagatgtgtgacctaacaccggcactcgccatccaaccacgaacctcacctatcgggaccttcaactttgcacgaaacagaaagaggcaaggtaccggggcaccaccagcccagatccggtcggcgaagcccacaaaaacatagaaaccctaagagagaccttgagaggaaaagcaaatcctagcagagagagtaatagccccaaaccccctttgcattctattttttttttcttacctttttattctaacacgaaataatttataattttattgccttttttaatactatgtaccaaattttttttaaaacttttattttgtcaattttattactagttgtctctcaagggagactattattcgtttttattgtataaaaaagtgtaaaagtgattgagttgatgggtaatgtcacatttgtgacaggtttttgtttttttttaaaagaaaggcacgtttgtaacaggtttgtgattaaagctgaggctcatgtgtagggttccctcttccctcacatcactgccatcttttttccttttctttttttaattttttttatgtattaaaactaatgatgaaatacttacaaatcttctcttgcacgttttacccaaataaagcttctcttctctctcaataccccttctttttgtagtaggtattagataaaaaaaaaaaaagagtatgtgaagaaggaaaaagaagaagaagaattagaaaagataagagtttttctctctctccaacttttcctctgaaattaaacaattctagttctatctactcttctctctcaatacccttttctcttgacaatcagtagtcccgtgattcgtaagggaaaataccgggtaagttgtacaatcccacactacttgagaaaggtcaagtgggatgattctgagattgtgtaggtatggggctgcatagttgaaggaggcttaaatggattgattggtactacctatattaataaggtgcatcttgtttt

SEQ ID NO: 65246 - DNA, 1530 bp, Cannabis sativa
aatactctccattctaagttgagtgttcgctcttttttattaaataattatatttttatttctatttggtgttgtcaaaattcctccaacaacaaaattttattctgaactatgactaaatgtgcatgtaatgtaacaatgtgagctacgttcaaatttaatttgtcattaggatcggaaccaaataatatttttaaaattaaaacatgtataaagaaaatatactatatcatgtggttctttattacatgtcacatttttatcattttattttgatcaagaagaaaaaaatttcattaatcaccaacggaagaaatctgtacaagaaaacaagcaagggtcaaacccccaatcaaaataaactctctagaaagtttctctcatgccccctcaaacatctatttttaacaacttgtaatctgtaaaatataattctttttacatcatttacaatagagttgacaaatttagaatgcctattaaaaatacagttttttctattagtccaaagactatacattgttgcggcaaaaacaacaacatcaactctatgcactaaattggtatctcataacaagagccaactcttccaacctgttgcagaagtcggccaagcctgattaccaagctaagaaaatatttccttcaccactctgctcgacaaaacacaatcaaaaaataaatggttatgagtcttagcttccatttcacacactgggcactctaaagaattaagaataatattaaattgtatcattttgttacacgttaaaagttgagagttaaccacttgccaaagaatgaacttgtgtttaggcaagtttaaagtgctccaaacagctttgttgaagaggaattgctgctgaggtaatcgattattgtataaccaattaattttgaatttgttgcctaccctgccttttgaatatctcctcttgaaaacttttatcattttcaatacatacattataaatttttttattgacaaatatatgttattaaattttagatggcaaactatcatggttctctattttgttttatacatgaattagtataactttgccttcaaatcctccctcccaatgtaaaaaaataaatatacataaattatatatgtattttttaagaacctgtgaaaattgaaaccaaacaaaactatgttactctttgatcacatccacgtacttgtaacatcactatcttttagtacatctattgatctataaacttgccaaattatggttcgccttatgtgtaaatcttaaaccaaatggttaaagaatagaataacatatgatcgcatttattagttgatttgaccaaaagacattgaattttaattttggctcaaaattaatccaatgtgaagaagaaaaagatatttttatacaaatgatataaaataaaaagtaatgtatgcttttacaattgaggacattacgtagaatatgacattttttccttaaatttcatagatatggaaaaattagagatttacttaacttatggttttttttacaatttaag

SEQ ID NO: 65247 - DNA, 1105 bp, Cannabis sativa
ttttttttttttttttttttttttttttattgtagtagtattatttatcattcaactttctttctatttttattgtttactgtgttgttcattagacatgtgatacaagttttgagagatgtcttgttttgaagtctttcatcgaaggaagagtgcattcgttgttgctttgaaggaattccaacacaacaacatttcaaagaattgaaattagtagagtggaatacagaggaaatgcgataatattaagagggagccttaggttgtataagtcaaatacatttgtaactctttgagactttgctaatagatttcatcctctcgatataacacggtagactagctgtaatatttgaaagaatattaataccaaataaaaaaatctcgtgtataatttttctttctacattattattttgaaactatgtgaatggtttctaaagcatatttttatttagataaaaaaaatttacatttctacaatatttaaattatttgttaaattcatttggtaaataaaaaaaaaataaaattttaagaataaaaaaaatgacaaaaataaagtggttgaggagttgcttatccacacttgtaacattactaggttgatgttacgtgtaatgcacgtataattagttttctttttaattatgtttaattaggtgatgttaagtgcaatacatatatgtttattttttttaattaagtaatgtatttttttaaaatttttaaaataaggtttgagattttaatttttaagaattttgttttaactattactatattggtgtgtcatttgaatgtgattatatatacgtattttttaaatttatttatttttaattaggtaacgcatcaaataattcatatattgtaatttattatattttttatcaaaactcatataaccaaatttgagtgtgtctatatatatatatatatataggttgaattcataaatttgatataaagattttttattctcaaactttacgaaaaatatggtgtgtgaatcggtttactataactaaaacggaaagcaattaatttcttattagaactattttaatttaaaatataaaataaataataataaaattaaaaa

SEQ ID NO: 65248 - DNA, 985 bp, Cannabis sativa
taaaaataaaaattacatttatatctttatattaaaaacccaaaactcttaatcacatttaatttgcaattcttcatccttaaacccaaaaccgtactccatagtttgtacttaattattgcaattttaattgatcttgtattcggattctttgaagaaaattgctttcgatcattattacagcgaatataaaaatggctttggtgttctggctaacctcttttgaccatattccaactccttaatcgatcaaaataattaagctttacgctaagttatgaatgggcacccatgaatctgttattgtttctaatttgcaatatgaacaaagtaatgggtatctgttatccacgagtgtatttcgagagttctaacgtgcttcaagaaaaattggtctaaaaaaaagtgataatctccctttcttatttaacataactgtaagtatatccaatatatttttaaagcaaataattttattcttttaattaatatatgatttcatcatcacctttttcatcaagccaaattaaagtccccacacatttaatgaatttagacataaaaaatttagttatgtatgtaaaatttgatagctctcctctcaccttgaggtatcatgagaatttcagttgacaaaacattgtcaatacaagttgagaggaaataaggaatggcctaccctctatataaatatataaatatgtatatttatttgtatgtaaatttataattccaaataccaaaatttaattttagctttctttgcttagtttttgaagtggttgtccaatattaagaatggaccaataaaaaaatagatttttaagagttgacagagtaggctcgtgcctagggcccccacccacaaggggcttcaaaaataaaaatttattttacttatatataataaatataatttatcatttttttcaccagcgtagcacgactttttcactagtatatatatatatatatatatatatat

SEQ ID NO: 65249 - DNA, 930 bp, Cannabis sativa
tggggatcatattcatgaggcaatcttttatttctcttcatccttagccatggtgactccaaaatttcaattgcttacaactcaagaaaattcttattgatttttgatttttataaacttaaagcaatttcaaaggaggagaagaagaaaaaatttcaaataaataaatggcgtcgattaagaaaaaaaaatattttctaccttgtaggatgaagagcgcttgaagaactgatgaagaaatattccaaaggcttttctaaaggcttgggcgtggagagcttaaatgggaagtgtgagtaattttattgaaagctctcttatttatagatgagttcaatctcctaagcctagagcaattgagagtcttttaagtttaaagccttaaagaaaaaaataaatgataagaaaaagataaaaaaaaaatatatcttttctcttctcctttggcatataatttgaaattcctatagaaataagaatatgatttgtgaatttaaaaggtaacatctattcctaatgctattaagatgaaagaaaaatctagagtttcaaaagaaaaagatatatgataagcaaaagatcaaagatcttttctcttcttctttttgctctaattttctaatggaacttctatataggattaggattcaaatccaattaatcctagtgcaataagaaatacatgaaaatttcaagttttcaaagaaaaagataaaagataagtgaaaaaatgatacatttttcctctttttctttgactacttaatttttgacattttcctacacaagaatgagggaacttaaagtcttaattatattgggaatagttgaagaacagaaacaattgcttaagattgtcaaacttgatacccatctggtagttttgagaaaaacaggctcgattcacgtcatcaagtcaactccacacaa

SEQ ID NO: 65250 - DNA, 2219 bp, Cannabis sativa
aaccgaccgattttcacccctaaagagaatatttagaattttttttagaagtatttaaaattacccaatagaagataattttatttacaaaataataattttttcatacttaaaaatagaaaaacatcatattaaacatggtaatataaattgccatgaaaagattataccaaacagcctctaagtaaaataatacaaaattactatgtttagtaacattgactaaaaaaaaatagtgtttgtcagtttattcaacaaaagaagaagcctcttcattcacgtttcaattcccaaaaagatgcaccaaaattatcagtatctgcgtcactatcagtttttgtacctttaatggccattaccaactttccaaaatctgactacttccatggataactcaccctttttctttttcttcttattcccttaaaaaacccaattctcagtttgtacagataaaggcttgtaagttgattacaagaggagggagatggagctggatctggaatccattgcagaggcaacttcaggagctattggagctttggttagcacaactgtattgtacccacttgatacatgcaagactaaatatcaagctgaagtccgagctaagcatcagcaaaagtacaggtgaaaattgaatttgatttgagcccattatctttgccttacaaaattcaatttcgtgcttgcttatatttgggcgtgggttttgtaaaagctgagatttttatctgtatgcaaatgctatgactctaagattttcgctgagtcattttattgggctgaattttgatgtcttggaattgttatgtataactgctcttcattgtagagtgaagaggataatctgctctgaaacttcaatattgtagattaatacaattgcagtgtatagattttcgaaaaggaaatgttagactgcggtttttgtttgtaatttagaactatgagagatgatgcttctgtatctcgtgatgaaaaggcttgacataactttttgctttcatagttaacttggatatagctcaaaggtttgaaacaactgttttaggtgatagtgatacaaaactaaaaagatattttatttatgactagtaaatttatgcgtaagcaagaggcatattggtttttgcaggaatatttctgatgttttgtgggaagcgatttctacccgccaagtgttttcgctgtaccagggcctcggaacaaagaatctgcaatcctacatttcacagtttatctacttctatggatacggtttctttaagaggttgtacttgaagaaaagtggaaatacaaatattggggctaaagcaaatttgcttgttgctgcagctgctggggcttgcacagtcatagtgatacaggtcagatgattcaatcataggtagatgtccagatatggaacatttacaatgatagtaaatagcatgagaaaactgataaaagaatttaatcactgctatttgttaaagctttctttagttctgtgaggtagtgatgaaggagaatagtcatgaatatactataatttgttaggctagttgcttatttcatttatgtggtttattttatgttatttctattatgatgtcatatttattagtgggctatataagcttatgagtaggattgtaatggacattattgaagattgaatagtaaagttgagtgtttctcccaattagtagttttccccttgtttgccattgatttggcttgagctttgctcaccattccaattttctacgtcaagctgagtgatacaaatctttctaggaatatttcttattcagatgccatcgaaaggaaattttcacttaaatccttgtatcaacatacacaagcatgatttataaaacgtattttgattcttaaaagttgacattggtatctctgattgttcatttgcagcctttggatacagcatcttcaaagatgcaaacaagtgagtttggaaaagcagagggactttggagaactctttcaaagagcacttggagggaggcatttgatggtcttggcatctctcttcttttgacagccaacccttctattcaggtacctttttcattcttgtacatagacatgcactacaggatttgttaattcttatcttagattgtagtcgagaaaatcaattttcttccgtatttcggtggagtgtcaatgacctatctgtaagtatgctaattgctaaatgccttaatcacaaa

SEQ ID NO: 65251 - DNA, 663 bp, Cannabis sativa
ggatgtaggctgtggagtgtgaaaatattgagtgggggttactccataacccaccccacgaacatagcctcgtgtctcaagattgcccaatgccatagtcagcacatcatcagaaccttcaggttcccatttaccctctacttctagttgtcggtaatgatcctgccatataagatgcatataagttaattaatttaaataattgacaatgatgaatatcatagtatgcgtttaaatttattttacttacaattctttcttttacttgtgatgcattaccatcaagctctcctttcttgttttttcgacctaatgcccataaatcagctctatccaatttagctgctttgtccccaagcaactctctagcacgttggtatcctcctcttgataggtggtggttatattcatttttgcacgaagagcttgcatcttctcccttaattctatccactccggagtcaatcttgaattaacaaatttaacccaatcctcttgtgtaatgacaccctcatatccccttggtcttgttggtggaaattctcctggttttttctccaatttcttgtgcacatgttctcttgtaagatttgtcttataatctttatatcgttttcttgcttgttgcaagaattgctttttatgttggggttgtaatttaaa

SEQ ID NO: 65252 - DNA, 708 bp, Cannabis sativa
agtattgccttcaaattcgccatagctctttctctttctttttgtctctatgtttctttctataacactataactaaactaactattgaatttgatgcgtctctctacgactttgattggaacagagagtaaggagttgtttgcagcaccaaactaatttaccatttttgattgtgttttgattttatataatatattgagagagttcgcttggttacgtgtttcgatgaatctgattggtgaaaggggagaatggtgttgtgggtccgatgttttcaaccaatggcgttcgagataacacgtctaaaaactatttttccttatttcgaaagtgaacgtagaagagtagtcagtgttagagtatcacattgttatgttacattgtcaaggtgtacttctattgcaaattagttttgggatgtaatcatacactttaattttattttatttttagttaaaagagtggtttctaattcggaaataatgaactaaaagtaatggcaatctgaaaaaacgagtcaaaaaaaattatttgtgatccgtaccactagtaattgagccgtctaaaataataagtaaaaattgaccattttaaaagaatattagagtcccaactaaagaaatattacaccatatttagatacactttaatcccaaattctaacgctcaagagactcaaagtgagagatgcattacctaatgtcatg

SEQ ID NO: 65253 - DNA, 865 bp, Cannabis sativa
  modified_base (53)..(56): a, c, t, g, unknown or other
cactctttccctacacgacgctcttccgatcttacttgtgagtagatctaagnnnntggtaaaataatttccaacacgcgagtccttaaccttgatccatttggatctttacatgagccagcttcttgtggctattctcgcattggccttctctattagaagagattcgacacatgacccctactcaagtaagtgtgtatattgtctctatcattgcgattaggcctttgtggatgtcttaggggtcgacctatcacaggttgattttctggatttctcgcatcatactagagaatttcttagtttccaagtcgtgtttgcctggaatctgtattcatgcgagaagactctagtactttaggttgtacattcccttggtttgtaaatccatgggaagttcttggattgtcatgtcgagtctcctaatttcttgtgtttctaggattttgtggattttttccatccattaggatatctctccaagttgttcttcctgagtatatgagggattcccttggttgttcccctgtctcctagtttcaaagcctcagggcctctcccgtggtcgtcttacagatggaccaagttgattttgaggggcctctccttgtacgcagtctttgttgtcgccgcttcgcgctctaatttgacattccttttatttgattcagccaggcgttgccgaagttgcctattttctagttccaccactagaacgtatctggttggatcataaacatcttcacttcacctttttgggatctattccccagtttgattaaagtcttcattgtttcttccagacggggagttttagcagtgttcattctttacaaagcccgaggctcctttcccggacgatggg

SEQ ID NO: 65254 - DNA, 579 bp, Cannabis sativa
taattggttgagttgtgtgaattgggatatctttattttcttcattataattgttaaaattgaatttctgtgtaggcaagtgagatatttgactcagaattattggatgaaaggcttataccttctctacaacatgccatatggaatgttattagtggaaaatctatcaacaattccataccaagcaactactttggccaagtgattgagtccatcattgtggttgtactttgtttcaacactttatctcttgtcaaattcttgtatcaaaaatgaatgttaaaaaaatgaaaaaattaattaactgaaggcataacatgccacttgatttgtgttattttatttccattttgattgaagattttgaaacaattatatcagttatgttgcttgatataaatttttgatctttcttgagctataaatatttaaaggctttcatgttttgttgtgttctagatttttgtttcattatttcacattcaacctcagttggtagaaagctcattcttgtggagggttcctgatttttataacaatgaagcaaattgacaatgttattcaactgatgttgatagt

SEQ ID NO: 65255 - DNA, 922 bp, Cannabis sativa
ggcaccttgtgcctaagtctggtcattttgtgttaggtttttattagtattatttttagattaattttagtgtctttttcaataagttttactcttgtttggtgtaattttacgctttttggtagcttttattttgcaggtttaaaatagaagaaaaatagaaaatattgaagaaatatagaaaaaatggctaaacaaatcaattctcggggcaagaggacctagaaattaattcaacaaaaaaattaaaagtgatggtgcgattggagcttttgaggcaaagaaaataaataatttggaggagcgcctcaacattaaaaacccatgccaaggcatgaaaggcttaaaaactggcagagaaggtcgtattggaccaaggcatgggcatacctaggcattggatccctatgcctaggcaggaattcatagaatgctcactgcccaaacaatggggagtttttcctaggcatagaaattctatgcctaggcctgtgtctaggaatcactgaaagcgtggattttcggaaacacgggccgtgacataggatttcagtgctgcggcctgcccctttaattttcttatgatatctttttatctttttttggccataaaaagagtgggagttcgatattttttatcaaacaatctaggagtacgaaaattagagagaaaaaacaacatagaaggctttttcgacgaagttttcaatattcttttcttctttgattcttaattaatatgtgtgaagtgctacgatgagcaaaagtagctaaatagtctattagaatattgatggatatagtttgacatcaatttatagttttaacgtgatttaattatctcccaattttctatgtattctatttcattcgtacttatttcttttaattgcccaaccatcaattaattgtctatgatttt

SEQ ID NO: 65256 - DNA, 6468 bp, Cannabis sativa
gatttatggggtccatctagaacattttcaagaggtggagccaggtattttctcaccttcattggtgatttttctaggttagtgtgggtctttattttaaagaacaagaatgatgccttcatctgccattgactttaagactccaatggaggtctgaacaggaatctcagctaactatgatcacttgaggatctttaattgtcttgcctatgctcactcaaggcaagacaagcttgaaccaagggcaaaaaagtgtatctttttggggtaccccgagggagttaaaggttacaagttgtggaacattgaagatcaaaaaaatgtcataagcagaaatgtgatttttgatgagagcacattgtgtagggatcttaatgctcgaggagaaaagctcaacacagctagtaagaaaccaccaaaagaattcaatttgaggtggagttggacaaaagaaatgagggtaattcaggtactgatgtagaaccagaaatggaacttgaagagaagaatgaaactgatgaaatgcataaagaagatgatgatactcaagactatcttctaacaagagacagagagaagagaaccacaaggccattacagatgtggttcactatgccttgaacattgctagtatggactattaagagccaaagtcctataagaagcaatgctatcagaagacatggaagaatgggacaatgctatgggtcaagaagtggtgtccttgaagaagaatagtacctagattcttgtgataaggcctgtaggaagtaaggtaataagctgcaaatgggttttcaggtataaagaaggaataccaggggttgagaagcttagattcaaagccaaattagtggcaaaagggttcacacaaaagggaggggattaactaccatgaaatcttctcccctacagtgaaacacacttcaataaggttacttctcagcatagttgcaactgaagacttagaactagaacaactgcatgtaaagacaacctttcttcatggagatcttaaagaacagatctatatgaagcatccaaaagggtttgaagtcaagggacaggaggaccatgtctgcttactcaagagaccactatatggactcaagcaaagtccaagacaatggtacaagagaatcgatgactttgttctaaaatttgactttaaaagaagtgtctatgacagttgtgtgtaggtcaaaagctctaaagcagttgtgtatctccttcaatatgtggatgacatacttattgcaagcataagtatggaagaaataaacaaagtaaagaagattttgaacaaagaatttgaaagaaggaccttggaccaggaaataaaattttggggattgaaatcatcaaagacacaaagcaaagaaggatcaaattgtctcaaagtggatacatctccaagattttgaatagatttggtttcagcaatgtgaaactagttttcacacccttcacacagtcatttaaactcaccaaaaatcaagctcacaaatgaagacctcggtcatatggagaaaataccctacactagcatagttggaagtatcatgtatttgatggtatgcaccaggccagaccagacctatgctatggggtaagtttggtgagcaaattcatgagccaaccaaaacgagagcaatgggaggcaactaaatggattaagatatctaaaaggcacctcagaggttggactattatatggagcaacaaaaggaggaactaatgtaattggatatgtagattcagactatgtaggttatcttgatacacagaggtctcaatctgggtttgcattccaattaaatggttgcactattagctggaagtccaacctacagtccattgtagctctctcaacaactgaggcagagtacatagcctttacagatgcagtgaaagaagttgtgtggctcaaaggtatcactggtgaactaggaattgatcagaagtgtatcattgtcctttgtgacagtcaaagtgtcattcatctccaaatgttccatgaaagaaccaaacacataaatgttaggttacatttcattagagacataatctctagtggcaaggttcaactctcaaaggtttctatagaggacaatgtagcagatgcactcaccaaggctttacctgctgcaaaattttgtcactgcctcaaaattttgaatatagctactgattgactaaaagcttgtaacgtacagaactcaagtcaaggtggacaattgttagatatgtatgccttagcaatgtttataaaggagtatttgaggcgcgcctcaacttgaggcattcaaaaactgcactagggcgtgtaccttgttgtggagggaagaggcgtgcgcctcaaatggtgaggtgcttcgtttttctttgaagtgtgaggcagaagaggcgtacgcctcaaaaaagtatttaaaaattggcctatttgagccctaaaaaaatgccaaatcactatttttcttttgttttctgtttgtaactcaaaacacttaaaaaaccaaataaaaattaataaaagcccaagtcaaaataataaagtaaagcccaaataaaatttaaaaccctaattctatcttcttcccccctttctcttctactacaactgctctttttcttcttctttccaaatagcaacgaaaaagcaaagcaagaaaaaaaaaaaaaaaaaaaaagcttgctgccttgttcatccttaggtgttctaaaaatattatttcaattaattgtgccttggtcttgtacacgtgtccctagtatttaagtcaatatgttagttagtttagttagtagtcaactaactgtcagtagttagttaagtctgtttcttaaatgacgtatcttgatgtccaagttcattgtcaacagaggcatttacttctataaatacctctgtttctacccattgtaagtagttcatcacattgtaatacaatagacacttttcagatcaataaagcttaataacattcagattaatttgccttatgcatgagtgcttttgttctgtgagttgtgagtgttctcggattgttcttggagccattcctggcatgtgggattgagttcgagattcaacaaattcagaatactacagttcattactcgttttgaaaaattacaaccttaaaatctgtagcagagtaggaatgacccaacccaaaatataaaaatgaaaaattacctcattatagatttccaagtatgagacacggagaagatattctctgtttggagtctgggccaaaagaaaatgtcagactccacagtttttccaatttgagaaaatatgagacataaagagctaagtgtattttatatagagttccagcagcatacctcttggattatgctgaaagcatccttgacagccaatggtataataccaggagacctttgatcaccctacatcaggggcagaactggtataagcacatcaatataatttataactaacctcatcgcctgactttctacatttatatagtattgcaatgacatttatatacagtatattaatactattgcatcatgcaaactttcaagcaggctgcaaaagtaagatattagaagatgatagtgtcctttaaagtcagattaaggaattctacaaatcttaaaattattgcctcatacgaaattattttctggaaaaattaaaatctacaattgatgtatgctaaccagttctaccagttaacagaaacaaaatcattaagaaaaaaccaaaaacaacagagaaaataaagttatacactagtggacactagggtggatgaagaaatgttatctcacatgcatagtgtgagttttcccactacttgtcactccatatgcaaaaatagtgcctgccagaaaagaaatcatagtctcagtaaataaacaacataatgccacttccacaattcagtcataatgccaaattgttattaatttaaatcagccagtcagccatttcccagcctatctacaattcaatgccatgggcagactgtggatttagtcctggttgtaaatcatataaatacttcaattggtcatgcaatataatgggaaagggcaatgttaacccaaaaatcattaagttttgatacctaagacaagtgagcaagccaaaaataatccaggaattttagtttacgtagatggagccatgggatttaaggtacataccattgatgccttccatagcaccactgacaacatgctgagaagcaacatcatagacttgtcttgttgtagtagttgggccaaacaccttatctacaatattttaacaaaagataataaatagcaagatgattttcctcaattaatatactagacaaatacctagaatgacgtttcccagatcttacttaaataaaagttttaacttacgatgtttcttatcaagtaattcgtaacttaaaatgagaaatatactacattctccatgatgccacggaaaatgtacaatgcagtagccaacagtttttaattttagtgtgcatgctctaagaatgatctttgcttcatttttcacatagctaaaatattatttagggaaaaaaaaaaaggaataaaactattgcaattactcaagtaaatccaaaatgcatggccttttgttttttttgaaaggaagcatgcccatattgttagttgtatattagttgtacttagctttctagttaccctaattctagtttttcaacagttccctatttctagtttcccaattgtattgtttccaaatatagattcctagttgtgtacggaccccttttgtatatatatgtgtatgacttttcaataaaaattacgttgaatatcattcttttcatttcaaaatagactactgcaatttaagtagaattttgatttttgctctaactactgaaatctttcataaattcataattattgacacaacaggaaacaacataacttaccatatgcataggctattgatgggttgtgttcactccgcacaatagactctccatcggcataccatgcaatttcctctccatggcgaatttccctcggactaccaaaatatacatcaagtatcaacagtaagaataagtactcaaaaatctcagcaataaacttttaactgaaagagaaaaattcacctgagtggacgaaaacggactgttactgtaacattttcttttgatctctctacttccaacggcacattatctgagtggaagtactgtggcttacttcgggctgaagaagatgcaggagagctatgaccatcaatagatgtttctaagaattgttttgaagaagatgtagtagaagatactggagaattagcagctttattgctatttgaacccaattttttgggttttgatccttgttttgatgccattacctctcaaagtcaatccttcaaaacaatgagagaaaaattctacttcaatatcactcatttcacttctttgtttcgtgaatgaaaaatgcagtgaagattgagcaatagcacaatttccattgcccaagtaaaatcctttaacaagttgaaaggaagtatgccaaaataaccagctcaaacaacgtttaagcgactcaattgagtcaccataaagcaattaggaaaaatatagaaactaaataatgttagagatggggattatagcttagcttataaaccccattggaaggacctcatcctcaaggccatgaaaaagtaaaaagaaaagaatggcccattaattagctagcctgtattgttcagtaactgaaataatcaagacaatgactgtagaaattctggtttactttacttttcttcttttctcagcaaccaaacaacataaaaaatgcctaaaacaatataataataataatgtatatatttacacacacaaacacatagatatatatagaaggagaaaaaattaaaaattgcagttagttagtctacttcaaccttttcttaaattattgcgaaaatggtaacgtgagtagaaaagaaaaattgaacaaaccaaaaagagctaagcacagcactacactctaatgtcagctcaattatcccatttactttctttactttcctattttcccgcattttcccgagagcaaaacagagccctcctcaggataagattagaacattacctccaacaaaatcacactaagcattatatatctcgagtcgcacaatacgaggatcttcttcaaaattggagagagccagatctgtgagcatttgagaaagtaaaaacaaattaaaaggtcatcatcatcatcatcatcatcatggccaaaacaagagtcaatgaaaaagaaacatagagatactaagcttttctaacttgccttggaagcgagcgatacccaccatcaaagggaaacggcatttctcaatcccaacctttctcttttagctttctttttctttttagagagagaaaaagagaatatgtacttaatttattatacacctataca

SEQ ID NO: 65257 - DNA, 2110 bp, Cannabis sativa
gcacttagtatattaacaagaaaccgtatgtcgctaatggaatagcaaggcaccagagaaaagtaacacataacttaacttgcaataagcaaactgagtgtaaaagtcagatcggttcgaaaaacaagaatgcgagatgaccatctcgctacgaggaaacctcctatagtttcatccaactagcgggagcggggctcataaccctgccaaatcagacgatttctgtatacccgcgaccgacataagacatatcttgttgacctcggaaagaagaatggttcctgctcgaatttggaatcactacaaccaagtttctgtcgagacatctccagattcaacaattaaatacgtgtttaatacacggtatttctgacccagtaaaagcgggaaaataggagctatatgattttcaaaatcatacactgcatttacattttgttcaacactatttttactcaactgatccgaacacacacaagacacaacaccagctttaatgtcaatgtcaaaaacacacaactcacttacataaaaaaaaaaaagaaacccccacacaccttacccgaatactaaccttcatttaaaaaatatttttttttctgaaaaaaaaaacaaagataaacatatttaaaatatacaattgacttggaaactagggagctgattggttcatgatttgaaaactatattttaaaaatttgatattctgaaataaaaatttgaattttgtaattggaaacatgtttccaaaaatgtgattggttcagtgtttgtcaacaatttttgaatgttaaattgaatctgattggtacagaatttgaaaatataatgacatgtttacttaaagtgaatgagaatcaatggtatcatattgattcctatacactagtttattaaattttagaaagagaaaaagtagtgggacccacacaaaatagggagaaaataaagggaaatgttcttcccccatttttgtagggaatacatttctctttcctaatttaatttattttaatattaattttattaattaaaaataaaaaagaccaataaaatacctatgctctaactaagttgtgttaatacctatgctctattgttgtaactatactgtgttaatttcaatattttctatctaacttttaattattcaaataaaacatatatttttttttgcgtcatagcatttactattgaaaaattaaaatttaattaattcttaaaaattaattatcttaatatttcctatttttttgtcacattattatgctaattggtatttattttaattttattttcattattttttaaaatcatgaatatttatcataaaagttaaaatataatttatttttatttgataagaatttttttttgacaaaattaatttgattgaaaaagatattaaaatttagtacaatcaaacaaataaattttttagatgatacaaattattaaaatagtgaatttttacaattttttgtggtgtatataaaatttctctttcttatttgttaaagataaaacttttacaatatctttagtcaaacacatgaggaatattttcttttaccaaatttggtttgtttgcaattggttgaaaactatcataattggtactatattttttttttgggtaaaaccgccattaatgagatggttaaaagtccaatctcattaatgggtagttgaacggccggtttcaactcattaaccccttaataaacaccaatccacaacaccacctgaaccctaacaaatccaaaccctacccatcgaccaagtccagcaccgcaccatccaataacacggttttgacgacggttgatggagtggacaacgatacaaacaagtgagcatcgtcggcagttgttttttctttagtgtatagatataggttctcccatttctattatattttttttcggaatatattatgttttggattgtgtttttgttcttgattgttttgtaataattgtgtttcaaataaatggtaccatatgcatgatgttacttcccacaaacactaattttgtttggtatcttatctttgttgggttttgtgccctaaataaaaccctttgcaatctgattagttatcaatata

SEQ ID NO: 65258 - DNA, 555 bp, Cannabis sativa
cgggctaagctcgtgcctagagcccactcatttgaggggcccaaataaaaatatacattttaaaaattatacatattttttaaaataatttttaaaaatactatttatctgtatagtaagggccaattttttttttcttgcttatgacccattttaaattagggctgaccttgcttgttttgtaccaacaccaaaccattagattcgataataatgacactcgagaaatcatgcttcaaccacgaaaacattttcttgagagctacaatatcaacaatttttggcaaacacccatatcgcaacccagaaatcccaaccagccacaacccgtccacattaatttcagataattctgccaaaattatgttttccttcctcgttaatataatttactattaaaattaaattttattataaatgaataaataaaaaatccatctaaaaaaattatatttttttaatcacaaaaaaatttatgtcattactaatattcacctcatttaaaataaatttatatttttaatcttttataatattataaataaatgtttatat

SEQ ID NO: 65259 - DNA, 871 bp, Cannabis sativa
  modified_base (498)..(509): a, c, t, g, unknown or other
  modified_base (592)..(593): a, c, t, g, unknown or other
taaattatatttttaaaatttttgtaggtacctgactgtgtcaagttaatgctcacgtgacagtccctaattagtctaggttattaaatttttatttaaaaattaatttaaatataacaataagaaaataacatctatattggtcagtttggtcgggttaaatttttattattttttttattaaacgagttacaatgtgattgaatattttaggagtgtttataaaatagtcaatcaaatccaattcaattagcgaaatacggatatctgcacttgtgcatattgaattggagtagaaaaatctaaaatttgaaattgcaaggattagatgttgattgacatgtaaaagtaaccgattcaatctaattcacacacctttataaaattgtatatacaatacacattttaaagtgaaaaaatagtaatttaaaattttaatacatataatacaaatatatttaaaaattaaatatatcaaatgtacattccattcttatnnnnnnnnnnnntctatatacaatttaaaataaaatcaaacattttttttacatacaaatttttttctttcattgaattttttattttttatttnntttattttaatttattattgaagatataaaatatcaatactatatttattttgttctttgtatgtgaaaaaataataattattaaataatttaatattaaaaagtaaataatttaaaataactaatttaatttgtacttttgcgaattaaattggattaaattcataatatgaaatctgcacttattgcgaatcagatgtactatgagaaaaataatacgaattaaattggataaatagtcctatttagaacaagatatttatattaagttagtaaaa

SEQ ID NO: 65260 - DNA, 2371 bp, Cannabis sativa
gaccgagatctttgaacgggaccgagacctagaccaacccccaaacccaaaacaagacccaggctcgaaccctactcgagaccgaaacccggacctgaacctcgccccgaacccataccttgtgacttgaaactggaaccgaaactagaagcagatcagcacccaggaacaagaccaggaccgggacatagacccagtcccaaaactgtaaccgagccaggatccagactcgaacacaaacccaccctgggattgggtccaaaacctgaattcaaactcgaatcgggagtcgggacctgaacccagacctaaactcagacccgaacattgaacatgacttgggacccagaactgggattgagaccaagaattggaccccaatctcggtcctagtcttgttcaagggtcttggtctaaaactggaagtagacggggacccaaaaatgggataaaaaccaggacttggacttggaattgtaaccgtacatggacgtagacccagaaccgtaaccggaccaggacctagactccagctcaaaccttgacccgaaccggaaccaacaaccagatcccaacccaaacttggacttgggacccgaactaagaccaacatggaaccagactcgggacacaaactggggccaggacctagaaccgcaccccagtctcgatcccgaatcaaaactcagacttgggacctaaaccagaatcagaccgggacccgtgacagggatctagatctggactcgagatctgggaaacagggcttggaatagacccgtaataggtgtatggatgtgggactcagactaggttctgaacccggactaggacccaaactcgaacccatacctagaccccggacccgaaactagaacctgacaaggaccttgacccagacttaaaaccgaactcggacctagccccagacccaaatcgagacaggaactcgggccttgacccggacctaaatctgggacctaatctcagacacaacctctgtcatagattttgatctggatacgaactttgactcggacccagtcccagaccgggattggaacccgagacctagatctggatagacatcttaaccaagaccaaaacaaggacccgcaccagggacccaaactcagacctggacccgaactcagacccagatcaggatccaaacctggacccagactcggacccaaactcagacaaggactaagaccctgacccagacccagacctggacccaaacccagacacagaattcgagtgttggtctgtgttcgagttcgggtcctagtccgattacaatttttggtctaggtcctcagcctattcttgggtcccgatccgcttcttgtttcggttctagtttccagtcacgaggcacgagtcgagtccaagcatcgcgtcccagatcccaagtcccgaggtgggtcctacgtccaggtttgggtatagggtcgggtcccgaatcgcaatccaagttctgaggcccaagttctggtcccggtttgggggaacaattcctaggtctaggtcccatctatgtttgggtcctaggtcgcagtccaggtcaaagtttgtgttccggttcgggttcatgtctcaggttcctgtccgagtccaggtcccgatttgggtttgggtcccatcctagtctgggtttaggttttgggtctgaagtccgagtttggttcttgggtcctgggtttggccccaatttttaggtttgggtcttggtctgggtccaggtcccggtcttggtttaggttccaggtcatgggtccgggtcttggtccaagtactgatatgtgttttggtcaaagttttggtttaggtttggctcctgtttcagtccctggtctgggttctcatcccagtcctggtctgattccaattctgagtctgagatcgggtctagatcccagtttgtgttggggtccgagtcttggtacggatctgggtttgggtcctaaattcaaatactgactatgggtcaggacaaagccttaggtctagattcatatctcggtcttggtttgggtttgggtttagcgttgtttcccagtagtcatttcctaggtttcgggtccaaggttaagtcctgtgtctcgagtttggggtgaagttttgggtctcagtccgggtggggcccagttatgggtccaagcccccatctaggtctggatccttggtctaggtccttgtcaaggttcgggtttggggcccaggtccccaatctaggtcacggtttggttctcaggtcccaggtatgagtcttgagtcccatgtccctgccgcggtcccaatttgagtgctagtccctgtacaggttcaaggctcgatccaggtccgagtcccgggtttaagtttg

SEQ ID NO: 65261 - DNA, 823 bp, Cannabis sativa
atatataaatatatatatattaagcttgttttatgtggcaaatttttaagtttatccacaaattaataattgaaaaattatttggaatttcacaaaaaaaaattgctaggacgtacaaaagttaatgcaaatatacattcataaatatatatataaaaattataatttattcagagtctagaagtagaaagggagacttcatatattgtcgtgcctatttttttatgaacagattaaattgttatatggttctcatgcgatattatattcaatacatttcaaccaaatgcatgcgcatgtatgattgcgtaatttctttctaatacaataaactacgtttcttctgagttattcatatatatttttccaataatattatttagatatatatagtttgttctcgacacgtattattacaagagtttgttaattaatgaatgaggtaacatattaatatattatttaatatttagtgcgcctcaaaacagtagtgagataacacaactaaattaatttaattagtaattaaaatttacatttagttactaaaaatttatattatgactaaaatatagttattaagtagttttttttgtaggtgaccttttattttttcttttcttacataagatttatcaaattttcttaaaaaaaaatactacatcactaaaaaagttatccattgtctcgtatcaaattaaattaataacttttagataaaaataactttttttaaataaaaaatgacaccatatatatagtaagaccactttaacggacaaggtgagattgattattattacaattattatatatatatata

SEQ ID NO: 65262 - DNA, 609 bp, Cannabis sativa
tatatatatatattgtttgtcatatgaaacatttgaatattcttgaatattatatatataatcatcaatttggtgtgtgtgacgagaatagtaacgccgacgaaatgacctcatcacttgattatatatatatatatatatatcttaattaattattaggtgcaacatttatatatatatatatatatataattatgtgccacgtttttttttttttttctctctactaattataatagaatgatattaagtacgttgcaatcacgagaaattggttaccactatagaattttagtagaataaggaaattaacttcatcatatatatatttatatatttgtatatatatagagatagatatattcactacgtaacgtttaaattaatacatatatgtgtagtcgtttttgcaaaaaaaagttgtgtatatatataatccaaaatagtgatcaaatgagattcagtatatcgatcctagattcagtattattaattattggctaattttaacttaattaatatattttgccgttatttatttatttatttttatgttaaaaatatttgggaagcaaaattttctatcttatatatatcaatatatatata

SEQ ID NO: 65263 - DNA, 1382 bp, Cannabis sativa
accaaaatagttgataatttggtctcgatcatttactcctttcgttgttttgctcttttttattctttcttgaatcctgaagataaatttgaccagtctgggatttatgaatgtgattggtatggatatggcttttgtttttgtttaatttgttcattttagtgaccaaaatagttgataatttggtcgatcatttactcttttttattctttcttgaataatcctgaagataaattgtcagtctgggatttatgaatgtgattggtatggctatggcttttgcttttgtttttgtttaatttattcattttggtgaccaaaatagttgataatttggtccatcgatcatttactcttttttattctttaacttgaatcctgaagataaaatgtctgggattctttaaactcttttcatttaaaatttggtttactagtactgaacccaatggtaaacataaaaatttatctggaccatttttcgtgctttatggggaaccaatatttgagatccattataacccttcacacacatatataaatttcctcacccaatgtttatttggtacattattttttactattattttatttttatttttttgctttattttgtgttgctacgatttaaatagttaaatcaaataataagagtatgatccatatatacttgaattgaacaaacctcaactatatggcatgtatatatatcaattgatttgaactatatatattattagggatgtaaacgggacggggcgagtgcggggattgccccccatccccatacccgctttttaaattcactccatacctgccccaatacctgtttgaattaaagcgggggcggggcggggattaagggaaggattcccatcaagtacccattacatatatatattttttaaaaaaaaatgatgtctcaaagagaatatttttttaaaaaaattataaaatcttagtaaaacaataaatttaagtggaatagtgtgtatagtaaaaaaaatagtataatcaatcaaaagcctaaaacatgaagttattttaattgtagtagttatgattttaaaacttaaatatatacatatatcatatcgagacggcactactacaaaatctacttttggtgtcagttttaaattgacacctatacttttagtgtcagtttataaaaccgacacctattctacaatcacaaaaagtcaactattggtatcggttttaaaacgacaccattgagttttggtgtcgttttataaccgacacttaaagtatacacatattttttctattagtgtcggtttaaaactgacactattgagttttggtgtcgttttataaccgacacttaaagtgttttttttggattttaatgtcggtt

SEQ ID NO: 65264 - DNA, 1260 bp, Cannabis sativa
  modified_base (1197)..(1216): a, c, t, g, unknown or other
tttatcttttctggaatagttgagacttttccttagataaataaaattcgtgtctaaaagttgagaagcttctagagattgccatgaaaaaagaaaatgcttcatcatcttaccgaagtaagcttcttgccctagagtaagtaggaaacttcatttattttcccctctttctctttaaccactcctttcccaatcaatgaaaatacttcaccttccctcttacactcaacactaatcatccaatttaaactcgatcttctgtccatttgttgtttcttctgtgacgaagatcatattaatactctatcatttcacgccaccattgtaggtattaattgctctcagatattgtcaatcttatcactcttctacaaaatggtgaataatgttttagaagtggctccatagtggagattttatacaactttccatgggtaacatactcataacctgttctttgatgaacctttagcatgattcaagaataaatattgtgccttattttttttattagcattctcactaacttcggaaaggtaaggaatgaattagataattattagatcaaaccttgcatctatgcaaacacctatgtgccaaaaggtaaacctaatacaacacaaagaaaaactacacaaaaaaaattcgtttctagccacctaaacataaattgacttaaaaactaaaaaattaagtactacatcaaagcatagacaaccaatcaaattgtaagcttaaaactttctctcctttagtgtgggttctgcgatatcacatgtattaggatgcaattgacaaatagtagttcaaagacaaaacattcacctctaaggctctccatcactccaatgtttgtcagctgcaattttcaatcttgactctgctttgtccttcaagatctacaaatgttagcataaccaaatatgagcaaaaaataaatgaacaagtattctcctccaagtaagccacaattatacatactgtagcaatatgatgaaggaattctgctttcttcttcacattacggtcatgttttatagtgtcctcccttgctctatctaccaataaaataagaaaactatgaaatcatagcaacctaaaaaattgttgttcaaaaactgcaccagagacctttatgacccggtttaaggcactaaccgtcaagcttaagaaactccgtgttgggttttatgcccnnnnnnnnnnnnnnnnnnnnataatcagatttacttattgatatagatcagaaataacatttaa

SEQ ID NO: 65265 - DNA, 3622 bp, Cannabis sativa
tttggttagtattgtgcttctaggctaaatagcgatacaaatagaagtactcaaagttttaagtttgtaaatggcataaactcatacttatttttaacaatataagtatccaatatttataaaactgtaatttttctctagttctatgagtatgaattctaatttaaactgatgttacatatttgcttaacctaatgatctagtatctaggccttaatagaaactgtactgatgaaattagagaacaattacagttttatatatattaggtacttatcctgctaaaataaacattaatttatgtcacttacaaacttaaaactttaagtatttagaaaaaataaaagagagcatagtaatgaaagcagaatagtaatgaaagcagaatagagtgaataacacaaggtaaggatcttcccacacaacaatactttttcctctaattacagattccatccacatatagttttacttttaaaacaatatatataaagatacaaaactgggacctcgtattcctattattttcaactttctactactactttctcccttctttttgactacaacctgatcttttcgggatagatggagatttggaatgacattatctagtgatgaactcatgaataggatttgaaagttcttaactttaaaatccttgttttacagaaatgagattttgataatgatgataatagttttgtatccaagtttatgagcttctgatattagaattgcttcccttcataggtctgaccgaattgccagcccgccggagcaacattgtaagatgcaagtgttcttccggtgctagccgtcacctcgaaagatataggctgccctttgaggttgatattgctttgccagttctgtccccagtttcttgccattggtatccaacctgttcttgatcccttcactttcacagctaccacttctccatccaacccaacattagtgatcaagacttggtaaaagtgagagtttccactcatagtgaatctcactccacctcttctatcacatttcaccctacatccataacacaaaggttttcactcaaaagttcaacataagaacagagaaagttaaagatttacaattttagtgtgttacctcctatactgaacaggaacaatatctgcttttttctctgcaatttgagagaatgctgcctctgacatctcaaaatgtttcttggggaaattacaccaaccaccatattcagctgaaagcccataatttggaggacagaaatctgtagctgtgagaataatagatggacttccttgcaggcaccacaagatgtggtcaacacatcttaactcatagcaagctccacaggtactacctctgttaaacaaaatgctgcttagacctgcactatactccccataagtgatttttttgtgaagatctccatacccacaagctccttctgtaacatgaaaaaccagaagttagtgtaagaaaaaagaatgaatgcaagtagtagaagcaaaaacacttaccatcaatgatggaactatctgaatccatagtataggttgcagttgcagttttccactgtcctttctgggcaacagcagtgacccatatttgaagtagaatcaagcacagaagagtggtatagaaggcagccatggcagatagatacattattaatatgaaagctcctatctttactcttttttcttttcttttgatgcaatgtgaagaaagccctccttttcttttttttcttctgagacaaatgacctaaatcatgtagctttagctgagtgagagatgaaggaagaagactttgagggctggaatgaaactggacccttaagtctgtagtaaagttggtaactttgtcaaaaacccaatagtagtgtgagtagtgtcccatataaaccatagttcacatttgtggggggagctggcacattctgcgaggagaagaaagagaaatgagggtgtgttggtccacaactgcacactatggaatacagtaatgtttcctctcttttcattctaacttagcttctttttctagcgagaaactaagtcactaaatataagagcacttagttttcttctttattaaaattcaattttatctattttagttcacatttttacattacatcttacatcaatttttttttttataaatttctttacaacattataatattatattgtaaatatttttttattaattttaaaaaataaacaaacaattaatgttgaaataaaaatagaaaaatcaataaaaaattaaagaaaaatatttgaagaagctcaacaacttaaaaaattatctctgcatgtaaaatagtactattttatcatttttcagttaaaaatttaaagatgaattatttgaactacactaaaaaaaaattactatttagctttgtaaggtgtctaacactatcctaatatggtatcttttgattaattaatggttcttcatgttatttatcaaatcaaaatgaataggacatgatattgatatgcatcaaaaacaatataatacctcttttgatattgggcacctcttaaagtgccccttacaaagtgtgaattttttataaaataagagagtatctagtatgtgtggaatagatagagtcttctattgtatagtgggaatccgatacggtatatgattgaatcgttttatcctgagaatgactggcaattttcgactacttacacatagtgttacgaacgtgttaaagaaagtgacgtagttcgtgactcaattcaaaattttcattcaataatattgttcttcttttattttaataacagtatataaaacacctactaatgatacagtattttcaaccacgagtacattttagatgaaacctactcttgtaaaatacattgaaatcattgaaatattatatatttcgatatataatttgggtgcttactctttgattatgtttatgaaaaataactatcatagtaaaaggtgttcataacaaacacactgatatctaataacaatactatttaactatatctcactcttaagagttgtgagtatgagacttctttttgggatggtggcagacaaacaaagcggaaagccctagaacaagtaatgaagaaactagcttttaatatttgcatatggattgtttatattgagatatgtttggttggtgttgatgaaaaggtcgtttttgtttgtgctcttcttttgataaagtagagttagagacttgagagtagtgttagtgtatcaaccactaattaatctattatagagtgcccattagttttataaatcacattctcttttcagcttagcttagttgagaaattaattaattacctcatcatatagagactatagttttattgcattgggatctaaaccaaacctttctttctttcaatggatggtgaaggaaggtatatgatgaacttcattcaacacgtgcaagaaaataagctctctcaattttaatctccaaaaaaataatggattaatggattaaagtaaaatgatataaaattacagataatatgaagcaaaacaatgtggaaaaaataaataaataccattttaaattctgtgtttgaaaatgttagtgcatgtttggcatcataa

SEQ ID NO: 65266 - DNA, 623 bp, Cannabis sativa
aatgtagtgaaacaaaagactccgtgtctcaagggtggaaggaaaagaaatagagaactcaaaaatctggcttttaacataaattatgataaaagccagaaaaaagagggtccttcaaaagaatcattatgagaatcatgacctggaatgttagaggaagtggagacaagatgaagaggaaagcgatcaaagctacaattagtaaggtcaatccggatatggtaatattacaagaagtgaagaaaacatccgtagacaggatgttcattggcagtatttggagatctcgattcaaagcttggatcttgattccagctattggaaggtcagggggtacgctattagtttgggatactagaagcattactgtattggaatctatggtcggtgaattttccatttcagttcttatagaagcagaaggtcaaaggccatggtggttctctggggtatacggtccatgttcatatagagaaagattagaattctgggacgagatggctgggttaagcgcaatctgtggcgagatgtggtgtttaggaggggactttaatgtggttaggagggtacaagagaaactaaacagcatttcttcgaccaagagtatgaagatgttcgatcaa

SEQ ID NO: 65267 - DNA, 1150 bp, Cannabis sativa
agcttgcacttatcttttaaaatgtcttttcttcccatattcgaccttggcataatgctaagaccatgacattactttaagaaacgcgaagaagaaaaagtgtcacgacttaatgatgaatggagacattaataccaaggtcattttcaatcgataaaactccatatttctatacgtaatatatttaattattacataatattaatatgcttataataagaaatatgtcatccccgaaaataaataagaaatatattattattattattaattttacgtctttcatcagactttgattagacaactataagttaagttttagtggttttactaattttctgagcacatgtgagggttgcccccactaaacttgtcgttacatttgtacagcacatgtgattatagtaagaacacgaccaatcttggtggaccaaaaatgaataaagatatgaattgaaaaagattccaatattatttaaaaaaaaaatatgtaaatatttattaattgatgaaaatatatatatgcattatttaatgatgaactatccatagatttctttaacattaattcggtgcacgtgctcattataatccgaaagatctccatttgtcaaaatttgtgatcttggtgtaaatttgaggtaacagttaagtgtcaaggttaaattaaatgccaacaaagagtcgttctgtgctgaatattttggtcgggtttgacctaaacttaatcaacttgtccggacctgacttacagaacctgcctgtgttccctacacatgatcgagttcgagtttgatttgtaaaacataaaacctaaacataaacataaaaacctaataaactaacagcccccacgggacatgacccctctcccagccagaaccacccacctccctccacagtctcacccatggcctcgacgatgccgctggaaagctgaagatccgcgcccccaccttgacgaagacgacctagccttcgaacagagctgagctctcctctctcattttctctcccagttaccgccggacgaagttctcctcctcgctgcagcctctcgtcggtccaccgccatacgttcaccaccagcggcagcagcagggaattttttttttcttttttttttttaaaatatttttttttttctctt

SEQ ID NO: 65268 - DNA, 916 bp, Cannabis sativa
  modified_base (608)..(621): a, c, t, g, unknown or other
aaaactattttcagtaccagtttcattattccgcatttaattaatcacttaattaaataattaaactaggaatattaaaatacagaatttcacaatgcaacaccttaattagttatacatccaacaagaattcactatattcatagtattgattatggttacaagtttcgtcttctaggaagttaattgttactccagaaagaagttatggaaagtttggtgttcatccaaaatctttgttcgtaaaattatggccagtctggatgtttcttccagatagcgtgtctttcgtaagtagaatcttctggatagcttgtcatatgtttgaagacgtccttccagatagcttatgtcaactttgaacgcctatctagagcatgtgattgttttttggattgttcatacaaaaagtacgtttttgaagttgatgggaataacttggagaatttaaggctataattaataattagtcacgatagaatcagagctaattttaacaactgtgaaaatctatatatagctatcacctttgtaatctattgtgaatcagcccattgaaagggtgagagaaaattgtgaaagtgtaaggttagagagagagagagagnnnnnnnnnnnnnnagagagagagagagagagtttaaatttgcgagaaagttcatcttgtaaccttgaagacactgatatcaataaagatatgactgttattattctgaccaagacgtagagcattgcacaaagctcaaactcggtaaacctggtgttatatttcttatgttttactgctttaattcattacttggttctttgtgatgtttttgattattgttcttgattgcgtatttattagtccagtataattacatcgtgagtcattgattgttatttcacaataaactggtatcagagcttggtt

SEQ ID NO: 65269 - DNA, 668 bp, Cannabis sativa
tgagctttacacccaacatttgcttccaagtacttattgaaccaaagaagctgagtctgaatagactgaggggtgatatcaagagtaagattattcttaacaaaaaactcatggtctatagcagtggaaccagctacagcaaagttgactccattaggtgaatttcccttaacatatttataaggtggcaagtaaggcaatgatagtgattgtgccacaaagtcaatcaccaaccgtccatctgagtatcgatttgttggatggtgaaaaaaggtcattccgtacggagggttagagccatgaagaaagccaccttgcccacgaactgacctagtgttgcccgtgtctgtaaaagagtcgccaaaggcatagattttcttaaagggaagtggatttgttttggttattgcaatggaaaatggaaaagaaaggatcatgatagtgattattatattgatcatagtcatggatgaaaagagaaatttaaaatcacagttgggaactttaacgtattataagtagtgatttaaagaaatttgtgcaactatgtataattttttttgtttgaagagttttttttattgagaatagtgttaactatgatcttgattaaataggtgaggaagttttacataatcatatctcaatgaatacaaatagtaagatct

SEQ ID NO: 65270 - DNA, 695 bp, Cannabis sativa
tcaatttataaaatcatgttacatttctaattgataattgttattgagtattactggtgcataatattttaagtcacactttatgattggttagcgatatttttgaaaaaattatgttcttaaattatattaaacctgatatttgtatgataccgaaaaagatattaggttttaatgatgtattttagcaattttctttataattagagacagagagatacaccactttattagattacagttgcatgttaattattataagatatgattagattggtcaatttatctaacatgcatttatacatgcatatatttaattattataaatgatgcatggacactataaaaattatatgtaattatactttccaagcaataataatattttatattttagagtaaattaataatttttctattacatattaattatttttttataaaaaaatgttatatatatatatatcactcagacgagtcacatgatactataagtttgtcagattcagaactaatttacaattttgtatatcgctcaacaaatctcacaacattacgtaattcaagaggtgacttcattcggaatataaaataattttcctttaagaatgtgaattgcgagtattctttataatctttaattttattatttttttataaaaaaattgttttggagtgtgataatatatataggg

SEQ ID NO: 65271 - DNA, 593 bp, Cannabis sativa
ataaataaaacaacatatatcatcatcatcatcattgtatttaagacagtatataaactaattaaagaatgaaatcatgtatatatagaaatatatgtacattaggattttaatattcatagtataataacgatataaacaaattagaaaatgaatttgaaagaagaaagtttagccagcgaaagtaaagtcaatgaaaggaagaattagataatcacacaaggtatgcatgagagaaagatttagagaaacctaaataggagttcgtaggatttcattaaagaacccaaagagattgagaagcagagagaacccattatagctaccttttattttttcatcctacaaaaaggcaagaacttacttggagaaagaacatgaagttcttgcacgaaagagagagaagatgtgcttagaaggagggaacggtgaagggagagaggtctattttgttctctgggaaggactgatcatattaggtgaaaggattttatgttttgaaaaaaataaaatttactgccaattttttcatattagctttaattttgaaaaatatttaagttgccgctaattcaagggaatttttcttatag

SEQ ID NO: 65272 - DNA, 658 bp, Cannabis sativa
attaagctgaatcttaacccattttagaaaaaaatgttgaatcataacaaaagataaaccagataatttcaaaaaaaacacaaaagttacaaaaaaaatttttttttacaaaaattcggtatgtaaagaatttttagcatttttatgatttctttagattttatttacataaaatgtaattttttagtatatttttatgtggtaatattgttattttgttgttaatctttttgttatttgtatattaattttttttttatgttgttttgatattgttttcttgttactttcatttattttttttatattttcataaaatattgtaaaaatatatataaaaaaaatatttgaaggtaaaatgtaatatttttataaaaagtggtattttatgtaaattgtcaaaagaaaaagccattatccgttagacttttacaaaaagaagagaaaaatgttagtttttttgtgaaaatctagaaattatatgaaaaactttatcttttgtaaatcccaatatacttctttaaaaactaaaactgtaacttaaaggtgactgtaatgattgtagtaattgaataaaaacataaataaattatgcaaaattaaaacttgacacaaaaaattatacgtggtatgagtactctttcaaacactactagtt

SEQ ID NO: 65273 - DNA, 842 bp, Cannabis sativa
caatcaatattatcaatgtctcttactcctcccttttcttttgcttggacgttctagtaaatcttcaataccatcgtcacagtttaggttattaaaaaaatgaacacaaataactcaacacaaataaaaaaatttcacaaaactaaatattgattaaaaaataatagatcacaattcacagcaaatattccaaataattttattagatgagatttatttttcaagcaaagtaaaaatcaagaatcaagaaaaaaaagactgatctatcaaaattaattgagtaataataatttatctaattccttgtaacgattttgctttaagtttccattaggtccttacatttacggaatgatgacttttatgcacttgtatgccactttgactgcttcaactgcttcatgatagactgaaaactgaccctacagatcaatattaccccaggtcaagcacgcacagtaaagttatttcatgatagactaccataaaacaagatgcatattattaatatcagtagtaccaatcaatgatcatttatagtccattacctacatagtctcagaatcatcacacttgatctttctcaagcgatgtgggattacacaacacttacccaatgtttccttttatggatcacgaaactactgactgtcacaattaccccaccttacggggtctgacattctcgtcgatcacacttctggttgggtcaagactctaacacgtaccatttgtaatgcccaacgcttcaagcctctattaggtctttacacccacaaaatgatgacttttatacacgtgtgttgaccgaggtttttggcaaccgatttaataatatataa

SEQ ID NO: 65274 - DNA, 989 bp, Cannabis sativa
aattcttaaaaaatttactttcattcaaaaaaaaaagtgtttgttagaatttatgaataagatgaatggagtttcatctgaaaattaattgacagtagaaggagtagtccattcatcttatatgtcacaatttatttccacacattagaaatatgagactaattctaatagtctttaattttataattaaaacagtaataataatttttaaattcatgtaagtttgttggtcctctttttacttaatttattttgtgcatgggatagtgggatggaacgaaaaagaaagtgaagatgaaggaatgacacttgttggtgacaagcctccaccactaaaatgggtgagtggttaagctttaataaaaggaaaggaaaaaaactactaaagtttttaatttttaaataatttttatgcggtgaactaataaatttttgatacatggaaattttaagaactataaacataactgttaaattagatacctacgaactaacgagaatatcgagtttaggaattataaccacaatttttttagaatagaatttatttacatcaaagtaaactttttaaggacttatctgtattaaagtaaattttttaaaaatttatgccacaatttaatatcaacgaatgatcttttaagaatgaattaattgacatgttaaaaggatgactaatagacttacaagaatttcgagcttagagactattatcgctattttttaaaattaaaaacttatctatattagagtaaattttttgagaagttttactgtaaatttccataaatagaataatagatatatgctttgaattaatataaatattaaagtttatacacgaaagttgataaaaaaaaaaaactagtttcaactttgtatcactgtgtctatgtcactattcaaaagctttttctttgggaggggccgggtgtcactatttaattaaaagttgaaacttaaaaatgataatgatatgcattattatt

SEQ ID NO: 65275 - DNA, 1021 bp, Cannabis sativa
agaagtctggataactaatccagttaacctcatctgtctggtattatttatcccatccagcagggtgggataaataatcccatgcaggtgagatttttaatagtgcaatatatgtaccgcgcgagtcagaattcaggatttttgatctgtgaggacttaattattataaaaatatttattatttactttacattaaaattataattattttataggtttttttttattattttattatataattatttaactaaatagaagatatttaattttttaacactaattttttttttactagggttatagccccatgtgtccgtccctatgtacccttaatagcgtaccataaaagtttttcaaattcagattttgtcatatgaatgtgttactgaaacagtgatatgaattaattgtgataaagagaccaatatcaataaacacttcacacaaataaataattaattaaactcataacaatgaaactcttattgaaaatataaagaaacataaaaacaacaaataaaagaaaaaatacagcagatctataacccaaatcccaaatgctagccaccctttcaatcaatttataatttgaaacaacccaaaattgatttagcataattaaaaaatcttaatgaaattttgttatagtaaaagataattgagttcgtccatttagggtcccaactttctaaattgatttgtttcatcaaatgattgaggagcaactaaagctataattgtaataacaataaattaatactactaataatattatgcctttgattgattgagaagtgaaactatgtgtttttttattgcaaatactaataatattatgcctttgattgattgagaaatgaatctatgtgttttttttattgcaaatactaataatataccttgatatgctccaccaatcttgctcacacaaaatcaaattcttttccataaaaatagatgaatactacaaacaaactagtttactctccttttcaaatatgttccttaaatatatata

SEQ ID NO: 65276 - DNA, 1149 bp, Cannabis sativa
ttaatcattaattgatttttagtttaatatttgttaaaaaaaaaaaatacatcatttttatttttttaatgttaaattatacacatggagctaatgtgacaattggctaagcagctatatcatcattttgtttgacatgtgtgacaaaacttgatagaaagatcattcaatattgtgaatagttcaaaaactctttgtaacgagttaaaaagttcaaaggcaataatgcatatgttatagttcaaggacataaatcctaaatagtctataacataatttatatagttaaaataatgtaaaaataatattgcattacttatgttttatattaaatggaacctatgttaagattatatttgccttgtatatatgtcgaacactacttaaaggtgacattttgtgattggttagcaatattctgtaaaaaatattaaattaaattatataagacatgatacttaattgcatcaacaaataatattaaagcgtgctaagcaccactaataccttttaacatttctcaatatatcctcaaaacctttattggaaccaaaaatattaaaaatgttaaaacaaaatatattgaatgaaaccaagatagtaactagaataaatgtgttattattaattagggtttggaccctttaaaaaaattagggttttggtgttttgtatatagtttggacaaagatgttttgaagttgattgatgtaaataattattttatagccgcctcttgtcaaaacataacaataaatcactaattaattagttatataaatatatcatcatcatctattgtaattgtacaaagcttggttccttttcaaataaaaaatatatatataaacatataatatataatatggttacttatatggaccaaaagcaatgttccaaaagtttcctcaacaaatgaaagattgaaggtggacttaatatgactcatttttacaatataccattgcatgtgaatgtgatgtggtataaatatttatatatttatagttttaactcttgtaatgcctatagctagctacaaccatagccatagatagctttattaaatattaattaccttttaattaaccaatgggtttgggagagatttattctctttaatgagtaataatcaatatatatatatat

SEQ ID NO: 65277 - DNA, 949 bp, Cannabis sativa
agtgccactatattaaatatttttaaaaaaataatataattttctcaaaataatttttataattttatttttagaaaattaataattttttttattagaaaagcaatataatatttttaggttttttatttattctaaaccaaaacaatatactatattttacaaatactatattttattgttacaagcaatctatacattggtaaaattaaataaaattattaagtataaatcaatataaaatattttacaaaggtccaaaatgtacaaatatgttcaataatttttttgatctataccaaaatccaacaaaaaacaaatctggaaaaacacaaatctgaaaactaatgagcaaataaaaatacaacatagactaatcaaagcaaagaaaataaagaacaaaggcagcctcaaccagtagaacattaacaaaaatatcaaaaccaaactcaatgtggttgcattgttctttgcaaatttgaacaattgcaatgcgaaacaccatgtatcatcaacgggcaatgacaaattttcaactgcacttctgtaccattatattatttaatataactattttttttttttaattttgggttatgatatagtgacgcgccaggtgggtcggtacatatttacccaatcacacttaacgggtcactataggtttttttaaaaaaaaaagtaatagaaattatgggagtaactctttagtgacccaccatatttttagtgacactcattgtaggatactaaaattgaatttttagagtcatttgtgtgtgtcactaaaacttatccctaaccgtttagtgacatgcacttttgtgcaggtcactaaacagtgtcactaaaactcaattttgtagtagtgaattatcacaacaaaaaattacttgtgactaaaacatagttttttaaataaaagttttcactaatttatttttagtca

SEQ ID NO: 65278 - DNA, 2343 bp, Cannabis sativa
ttatatacataacaactctcgtccggatattttgaactgtattggcatgatttgtactttttatgcagagcttcatgatgttttcttgccatgccctaccccttctttggtggggacttggaggccccctcctcatgattaaataaaattaaactgtgatgtcagggtgggcttggaaagtatgtgcatagcggtggtagctagaaaccatcggggtgcagtggttcggattcacacggctcggttagactttgcggatgcattatgaggagaagcagcagcttgttgttcagctatttcgatggctcttgagcaaggcttcaagtttgttttggtggagagtgactcgagaatagttatcaatgctctcaatgggacggagtcttattgggcgattgagagctatgtctccttttgttctaggtcttctctctcttttattagttgtaattttgtgtatgctagtaaaacttgtaattttgctgctcataatgtagttaattgggcttttattcacaagttgtatggaactatcccgaatcggttctggtggacctattatgtaatgactgagaggtctagtttatttatttaatggtacgaatacgcttattttcaaaaaaaaaaaaattataaaaaatgcaaatgattcaaataatgaatagatctaattgggtaactaagtggcacgtgaaaagttaatagcttttgggaaaatataactgaaagtcaacatctcttatatgaatacactatatccagtactagtcacaaaatattctcttttttcttttttgttttcttcaaacttagacaaaatattctattcagaactcaaaaatttaataaataaataaaaaaaattccattcacccataataaaaattaagagttttttcatttatacttttaaaattaatttttttttatttatttataaaaaataaaaataataaaatctcaaaataaaataatataatcttaaaatagaaacaatttttataaaattttataatattaaaacaatataacttcaaaataaaattaatataacctcaaactaaaaactaattttataaaaataaaatatatgtatacatagcaatttcccaaataataatgataataaaataaaatttctccactaaaaataaaagaataaaaattcctatacaatttaactaaatcaacccccccaaaaaaattactatttaccttctttttcatctatttttttttaattgaatattgaaattatctaccagtcaaaatccaatttaaatttccaaaaatgcccctctattctcagtgaacttgctcattgtttctctctcatcatcttcaacttcaccaattggaaaccccaaaacgtcttttaaagcctccaaaacgacgtcgcacactccctctaagcaaccccaaccccacgcgccgccgcacttctccttcaacttcccgtttagtccttggctcccaatctccggcttaatcttcatcggttgaagatacgccatagccgcgtgcttaaccagaggattctttatcggaatttcgttccagattgtactcggagtcggagacataaccgccgccggatacgacgacgtttggataaggtccttcaagctcgtgtactccacgacggagtgtccggtccttctgcctaccatctccatgtactccggtgagttaaatcggtcgagtgagagatagtaagaattaggatttgagattgagtttagcggcgatgaatccggtgatgaacagtccgtacctgaaaaattcttgaatatggcggctgcttccatggccgttaaacagaaaggaaaaattaattaagaattaatcataaaataaagaaagaaagactaattaagttttattttcttggaggattttctcggaaagtaggagagaaagagaaaatatataaatatctatttttattctcccaatatttgggtatgtaacacgtgtaaaaaattaatattaagacctatcttttttaaatttgtaaaaatagaaatttagtttcaattttcaataatttgatttcaatataattaattgaaaaataattttttataaaaatataatttgttttatcttaatacctttaaatcaaattattatttaattttattttgataaaaaaaattagtttacttattatttatactattttaaaaaatactgatttattgtataacttaacaaaataaaaagtgcatttagtaactgaatctaaaatagtaagtattttgagagtttctatcgaattatatgaatgttactaccaaagttagccaaaaataaaataaaaaaatgttgtgataagatttg

SEQ ID NO: 65279 - DNA, 634 bp, Cannabis sativa
gatggggattttatactaatgaaaccgcaatgaggctgcatttatcaatactaagagcaactgtaatgaggctgcatatatctacaaatgtaatgattcaacctctaatgaaactcccttgaaggtaccattttgagatttatatatattttatatatatttaattcatatttttatatatttataaaattaagaatttatttttaaaaaaatttacaacatatatttttaaaagtgatgtacgaatatactcttacttatttcgatagttgacagatttttttagtttattttttatacaatcgtgtatattatagttattttaaatattttataaaattttaaaaaaatttaaaaaaatttaacacgctaaaagtaatgcacttctttaaaagtagcgcactaatatactcttacctgtttcggcatttgagagacttatctaatcttttttttccatggtcatgtacattatagttatttaagacatcttgtaaaattttgaaaaatttaacacacccaaaataaaattgagtgttattatctttaatcttattagtaaatttatttaaattattagttcaatatagtaattgtggtaatttttgcaaattaatatgatattattttttat

SEQ ID NO: 65280 - DNA, 666 bp, Cannabis sativa
tgagatacttcattgtcattgctgcctatgacaataatatcatctacatataccaagatatatgtagtatgttaaggtagaattctaagaaacagagaagtatcatttttggcatgactaaatcccaacttgagaagagtgagagacaacttttcaaaccaagcccgaggggcttgtttaagtccatacaaggctttttggagtttgcataccatgtcaggatgttgaggatccacaaaacccggaggttgacacatgtagacctcttcttctaaatctccattgagaaaagcattgttgaagtcaagttgtcttagtttccaacctttagacacagcaatagtaagtaaaactcgaatggtttctggtttcacaacagggctgaaggtttcattgaagtcgaaaccactttgttgatggaagcccttagcaactaatcttgctttatactgtgttgtgtttccatctgcactttcttttattcgaaaaatccatttacagcctatacactgtttgccagggggtaaccgaaccaagatccatgtattatttttcttcaacgcatagtactcggttcccatggctttattccacttgggatcttgaagagctgtcttaacagtggctggaacataagtagcagtgagtactttaggctttcgaatt

SEQ ID NO: 65281 - DNA, 567 bp, Cannabis sativa
gttgcagtgaaatatgacatcttaaatttgctaacagttcaatagtttgtagggttttaccatcaaaatttaaatttagaagattaagtgtaagtggaataacaattaagagagtttagcagcaagaaactcaaaaaaatagcataacaaaagccaataaaaataataataacaaaaaaatctcttaattagaagaaaaagtaaaaaaaaaaaataataataaagcaatgtattatattacttcattacaaaagaagatcaaattttcacaaatatatactggatgaccaaaaaatattgggcattattttatattaatgaggtggagagtatttttacaaataattgagaaaacttatatcttgaggtaatttttttttttaaatactgtttgtgtcgtatcatactacaaaataatataaatcgtgccgtattgtgtcaatatttgtaaagagtaggctcgatatagcatgtagactcgatattttcgtgccgtgctcaaattcatattgtgctttaatcgtgctagcccatattttttgaactagccaatctattttatatttg

SEQ ID NO: 65282 - DNA, 2029 bp, Cannabis sativa
  modified_base (26)..(35): a, c, t, g, unknown or other
acaacaagtattgtgactaaaaatannnnnnnnnncaacaaattataatttttgtgattaatacctttagttatggaccatttagttacaacataaaaatgataatttataattagttacaatcttttcacttttagtcacagtaattttattgtgattgaaagtaagattttttgtagtgacgatctctagtgtgatatttttttatttttactcacaagtttttttttggctaaaataaaaatgtttatagtgtgactgtctcgggtgttgatatttcgtttctattattaaccctgtcgtgcaccctctcctctatctatatataaaattatatataaatatatctcgattaaaaaaaaaaagacatttattggacttttgttgttgttttatataaatcatcactgtcttccaatttcactaggtgtaattttatctctttcttttgattgttttcatgtttgagaataatagaaaaaggttccaatggcaaatgtggtccattcacacacacattatatatttattttgtgtccactagtcttctgagtattataccctacattagatatatatcatttgagtaataatattaaaaaatatatatttatatatataatgttggaaaaaatagataaacacatgcaaatgatacaacaaataccttaacatgaaaatttctcataaaaaaaataacgaacaaaataggaaaatttatacatattaaaaactcactgcatgtgactgtacaacacaaacttttcggattggatttcaaactaaatttgggtaccataattttcaactttagaggtcttgttattatatattattcatgtacaatactagggtttggctatagtaccttcattaatcaattgatagtgttgttggtcccattgaattatgaggatccagctgtttctcattaattcttcaaattcctatatacataattggtttttatattaagatataacttcttgttttattataatattggtataaaaataattaaataatgtacacaatttatagccaaattaatttaaaagacttttataattaattaatgtgcatgtatgtgtgttatgtttgaacatgcaatcgaactctttaattaataagtcattcaattcttaccattttgtagcttttttaacaagaaaaaaaaaatagcaattttagtatagtatctaattttggaatgttattgaaactaataaaaattaccactttattattaaagaacaaaattaatttaaaatgcactatatgataattattttagaaagatcaatgacacgaaattaatgttagtacacttttatagctgtataaattttgcatgtctgatgtctttatcatattatttgaaatttactagctagtgtttgctctggtcaattttatattttcatagaaataatatatccaccaaattgaagaaaaatgtgatctctttttcgtttatttataactggtctgtcatcaattaacgttatgataattattgaaataattatcactataaaacactattcaaaaatttgacaatatctttatagctagaataatattctttcttactgtggaagaaaatctttctatcatatatatacataattctataccaagtatatctgtcaaattaaatggaccacaaataattgaaagttcatatttagccacgtgtttttcatcactaataacttgatagaaaagcatacacatttttatatatattggagacctagctagctaattatttgaattataaaaatacaaatatatttatttaggttttatgaaaaagaaagaaagagaaaaaaggtgtgagatatgattctcctttatatatattttcctcttttcatgaaactctttctataataatattatttttagtttttgtttaataattatttggcttgcttaatttttaaatgtatgatcatttggtttaggaaagcactcagcaaccaaaagagagagatataaagaaaattatatatatatatttata

SEQ ID NO: 65283 - DNA, 1435 bp, Cannabis sativa
gggtgtaaataaaatttcccatttatttatgggaatatttcaaaataaaatacaaaaacaattaaaaaaatttataataatacggtggtacagaattttaaatatttttattgttttaagattttatttacctaaaatatggtcttttgatttactttaatgttgtattcttgttattttgttgttatttgtatattattttttatgttgttttaatattgttttcctattatctaatttttttttgtacttttatagaataccgtaaaaatataaaaaaaaaaaaatctttgaagataaaaatgtaactttttatcaaaaataacaatttatgtaattctccctttaattatttatttttgctatgtagaaaatagtttgatgtagctagtgggcgcacgtactataaacacaatatagggctagttgaggcccattaacagccgtaaagggtcaacaagagttggaaacttgaattttttcattaatgttgctagtgaacaccatttttaggttaatctttggtggtggtggtgattgtttaaaatagtcgggcgacggttttaaatagtcggctatactgtttagtattcctgatgattttacacagtcgaaaaaagttttatcgacagttttttactgtcgtctattctgcctaattttctcgacgattgaataggtgtctatcttagaaattaactaaaatactttacacgattgttttaaagcgacaaaaaaaaaatcaattttatagtagtgaactcttgtcgcttattataaatttaaaatcttaaataattatacagctatttatctatgttatatgatttggagtttataaaagtaaagaaaattgtagatgagaaatttggagctaataataagaggttgtgaaattgtaattattggatcaatagtcaaatgacatgttttatttatttattttatttcaaatgacattgttagctatatacacaacaagtaggctgcttatatttttaataattacttaattaataataatagcaactaagaggctgccgaagacaatgacacgtgtcagagacccagatgggctggcggtttacttaattaatctcaaatagtaatgataataataattgtttaataattaatatataaatagacaaatttgaaagcattataagcatatgcatgtgtataacgtaagatgcatgacaacgaaaaccccccctttgtttacctaactctacaaaatttgaatttaataatacatgcatacttacatatgtatataaatatatacacacaccatatatcatatgatttttctatatatatattttcaacaaaatagctaattcttgatgataattctagagctatatagcctatatagggcctgtttggcacaacttttggaaaagctaaaaactgcttttcaaaaaagctg

SEQ ID NO: 65284 - DNA, 848 bp, Cannabis sativa
  modified_base (27)..(41): a, c, t, g, unknown or other
taggatgttaatcaaacatacttggtnnnnnnnnnnnnnnntggtaaaataattccaacaaattattccatcagggaactaatgcgaaaggccaataattatatcaaaagtttcgttatgcggcgagtatgactcacaccagtaatcaggaaatacatagattaatagaatttttctggtattttcttctccgaaggtgtcgatcatcaggctttggatactgttctagctactattcttacaactattttagaagcttcaagagcagctatttctttgccatacaaggcagatgaggttttccaagacttacattcaatgtcaagtgatagcagtcctagtttggatggaatgtcagtaacgttttacttaaattattggaatatttttggtcctctggtctctactacagttctcaatgtgcttaacaatggttgtgatccttctcttcttaataaaactttaatcactctaatctcaaaagtgaaaaaaccgttacagctcactcagttttgaccaataagtctttataatttttgtacaaacttgtttctaagacaattgtgcttcgtctccatccttatcttcctatggtgatattggaattccaaagttcttttctctctcaaagacttatcacggataatggtcttattgcatttgaagttctacattcactcaaaaataggaaaagaggttccaaaggatatgcagttatgaaattagacatgagtaaggcattcgatcgtgtagaatagcactttcttgagcatgttatgctaaaaatggggtttggaaacaccttggcaaagctgatacttttctgttttaagactgtttcttattct

SEQ ID NO: 65285 - DNA, 791 bp, Cannabis sativa
caacaactaccagctagctataactttacataaatgtgcatcaagcttgcttttgctagtacctacaaagctcatacacctgtatttgacaggtttcttaatagccatgctaatacaagagactgatttgcaactaagctcaaaaatacaattatttatattaacccaaatgttatagacaatagccaagcaaacaacattgaacaatttttcttgcaagtttttgaggggtttggaaaaccaatcataccagtctttggagctcttcggccaatctaatctccctaaccacttgttaacatcagccacaaccttcaaagtaaatggacaatccatgaagatgtgagcatgagtctctttgtcatctaaacacactggacaaagttcatctgaaattggcatgatcttgctgatgtggtctcttgtcaagagctgattattaatcgcctgccagccaatgaatctatgtttcgggatgcatatcttatgccaaattcgattagcataatcaactttttgcatggggttagctgatatgtaaaatatgttagttttgaacttaccactcttactagcattgacaatatctaacctgtcaatagtgtttctcagccgcaaaagtttcttgaaataccagctcgcatcaggtttaaattcaacctgccaaaaatctttcccttttaagtaaataacatttatccacctgaccacacgttatcttgtttgctcgagatggcccaaacaaattttgccatcaaggttgtattccattttctcccctcacgaaagcc

SEQ ID NO: 65286 - DNA, 688 bp, Cannabis sativa
ttagaaccaaccctttcatcttttacgaatatgtcattaaagtcccccatcacaatccagggatcaagagtggccatatccattagatctttccagagagctttccttccttctacctcattgaaaccatacacaaaagtagtaaagaacttcttaccatatgaagtagagacttcgaggtggataagttgacttgtgtatttgagtatgttgatggaaaaggaattaggattccaagctactattattgtccctcctttatgccaatctatattactagtaaagcaccatcctgagaacatatttgagtacaaggctccaagcttggaagccttgagtcttgtctcgaggagctcaactaaaccaaaattgtgagaatagatcaattgcttgaccatgctttgcttttgttggttgttgactcctaggacattccaacttagtagcctatccattttgtagaggaggccctccccctcctccactctttcccatttctgtctgaccattttcctgctcctcacctggtattgtcactgcctcatcattgttgttcccttgttgatcatctaaacatggaaagaattcccagtcattgtaccagtaacaggaggcttaatttttggtttccaccgtttagtaacaggcttaaagtctccagcagccgtatctgtgtttgtggcccctg

SEQ ID NO: 65287 - DNA, 1372 bp, Cannabis sativa
ggtcccggttctacccttttgggtccaagtcccccatctaagtcacggtttgtttcccaggttccatgtccgagtctcaggtcctaggccctggtcttgaaaactgggctctagtcccagtctaggtttagggctccatcctagtctgggtctgggtcctagtcctaaactcggtctgagtcccgggttcgagtttgtgtcacgagttcgagtctgggttctattacgagtccagctcatggttcgggtttgggtatgggtctaggtctgggtccaggtttaattttcggtcttggtttgggtctaggtcttggtttgggtccgggttctggtttaggaatgggttctggtctaggtcccaggtcacaggtgctaggttcctagttctgggtcacaggtgctggagtaagtctgggtccgggtatcgatcctagtctaggttttagtctgtgttcggctttgcatctagatctcgttctttgtccaggtccaattcctgtttcaaggtcctgattctgcttgttgtttcaatttcgggtcccgagtcaaagtctcggtttgggtcctggtctggaaatggttccaggtttgggtcttagtagattcaaagatctaaacactgactacgagttgggtctaagccccgggtcgtgggtcaagatctggatcccaatctttggtcccagtcttgttcagatttgaatcctgggtcccggtccgtgttcctgtccgagtccgaatctaggaccgaggctggggtcgggtttggggtcccagtcccagtcctgggtcccgattctggttataattttgagtttgggtccccaatccaggtcggggaccttggtccaggtctaagtctccattcccggtccgagtcctgcatccagatctagatccaagtccgtgtctgggttcgagttcgtgtctagagtcccgattcgagttttgaattgagtctgtgtcccggtccaggtctgggtctgggtcctagtcagatttcagttccgagaccgagacagggtcctagtcccttggttgtgttcccgagtcccggtctacttccggttctgcttctagttttagttcacggggtccaggtcttggtccgggtctgggtttgagtgcaggtatgggtcctagatccaaacatcgactgtgagttaggtccaaggccccagttcagatcaggatcccggtctcgggtcctagtctagttacactatcctaggtcctggtctgggtcctagttctgggtctgggtccaaggttaggtcttgggtctcagtgccagttccaaagcccgggtctcgggtccaagttccccatccaagtcccagtcctaggtctcagtccgtgtctagggcccatt

SEQ ID NO: 65288 - DNA, 686 bp, Cannabis sativa
attcattcagaatttggattaaagagacatatatccacgttgatgtgctgaccacaaataaaaccaatcctttctgcttcatgtaataagcaggaaaatgcctctgaataaatgaggaacatatgaggggataaggggtcgccctatctaagaccccgaccggtgcggcagaaaggagaactgagaaggaaactggccttatacagttcgtaattttctttatccatcggggatcataccccaaacaatccatcattgcagtaaggaagccccactccacgcgatcgtaagctcttgacatgtctaacttccaaaccattttcttgccatttcagaattgacctttcttcatgcaatagagaatttcaaatttgagaatagtattatcttgaattaaatgccccttaatgaatgtactttgattatctgaaatgacccgagatagactttgtttcattcggtttgctatgcatttgaaaattattttataactaatattgcacaaacttatagaacgaaactcaattacttgagttagtcgcttaacttttggaataagacaaattgaagtctgattaagctccccacaatctgcatcattattaagaatcatcaagcacaactgactcagatcatctccccaatatatctcaatgatcttgataaaataatctcgggagaccatc

SEQ ID NO: 65289 - DNA, 820 bp, Cannabis sativa
cgttgaccgacgtgaatagtaatcaaataattggggcgtctttttaaaaatgacactaatactatgttatttgcgtcatttaggtaagtgacgctaaaagcaaaaacgacgagaataagcagaaaattaaaaaatttacatttcattttgcgtcatttattaaaagtcgagtattttattagcgagtttttaaaaacgacacaaaatacaataatgacacttaataaccaacacaacaaaatgtgaaaaccctaaaattaaaaaaagcaaaatcctcagccttctctctcgtgctactcttcagacgcttcagcctctttctctcatgtgattctcttctctcttcggtggtctgtggtctctcttcagacgacggcaaggagatatatcggatgcaaagatctaaaggtttgtagagaatttttggttgctgacaagtgataaaagaaaacttaatagtgactaaatcttttaacttactagagaggtatgtacaaacaatggtcgaaaattgccttcaaaatctaaatcatcagatcgaagatctgcctttttctatttctatttctatttctatttcttgctcttctttcttactctcgtgtctgaaattttctttcttcatctttttttcaacagccttctcttctattttcgttcgctttccactactgctttaacctcacacatatatgtttgtcactgactcaaggaccccagaccgtgcctctctttctgtaagttcttcacagctgatttaatgtatatacaggttttcttgttctctgtgtaattcatttcttgttattgtactcattga

SEQ ID NO: 65290 - DNA, 1021 bp, Cannabis sativa
accatataagtagtggcgccaaattttcaaggcaaacacgactgctgcaagttccaagttatgagttggataacgctgctcgtaatcctttaattgccgtgaggcataagctataactttgtacgcttgcatcaacacacatccaaaccctatttggatgcatcacaatataccacaaacttcttttgattggttggcagggctaagactagggttgtaattaaccgttgtttcagcttttggaagcttttctcacacttatctgaccacacaaatcactgattctttctggtcagctcagacaatggcataacaatcttggagtatccttccacaaaacgtggataataacttgctaagccaagaaaactttgtacctcagtaactgttttcggtataggccaattttttcactgattcaacctattttggatctaccataattccgtctttcccaacaatatgtcccagaaaagacacatgtgacagccaaaactcacacttttttaatttcacatagagtttatgatctctgagccgttgtagaaccatgcaaagatgttgttcatgttactgcttctcaccgagagtgcacaaggatatcatcgataaacacaattacaaagttatctaggaaattttttaatactctattcatgagatccataaaggttgttggagcattcgttaacccaaaaaacataactaagaactcataatgactgtacctagttcgaaagactgtctttagaatgtcttcttcccgaattctcagttgatgatagccagaccgtaagtcgatcttagaaaaaactgtcttaccctgaagttgattaaacaaatcatcaattctaggtaaagggtacttgtttttaatggttaacttgtttagctctcgatagtcaatgcattcgaagagtcccatattttttttcacaaacagaactggagctccccagggtgatacactaggttgggtgaactctagatccagcattccttaaagttgtatcttttgctc

SEQ ID NO: 65291 - DNA, 828 bp, Cannabis sativa
ctaccggaatgcttcaagctacattcgacttttcatgttagtttcttgaagaaatttcatgaggacaaagaggaaggaaggcagcaggtggtgtgggctacgcctactgtgaggaaataatttgagaagaagctgtcaaagatccttgatcaccgtactgttggagccagcaaaaagaaccagagaaccgagtactagattcaatgggagggtgaagatgtagcatatgctacatgagaaaaagctgtgactttgtggcagtttgaagacaaggtgcagagctatatcaaaagtgtatcgacgaggacgtcgatttcttctggtgggggtggtttgtgaggccctaacttgggtccactcagcggacctcgacatcaggggtagtatgcagcaacatcataggcatgcagcagcattggaggatgttaactggacttggctacgtgatggtcttaagatggacgtgacattgcatgggaatgcatgcaaacggtttctcagacaatgtgcatggtgacacacgtgaatgacggttgctggaagttatcaatgtttatccaaagacatgcacgtgggctgaagacatctgttggaagacaatgcatggaattcaggctcagggcttggatggttgacacgcaggtgtgttggtcatttgcatatgctatgctgatgtgtaatttgctggcgagtccagcatggcctaggcagttggggatgtcaaccgcaacctattgttgggttatataataggctttgtgcgcttgataggggtgttcattggatcacatctaatggatttggactcatccgatccaatccaattat

SEQ ID NO: 65292 - DNA, 672 bp, Cannabis sativa
  modified_base (42)..(56): a, c, t, g, unknown or other
  modified_base (613)..(641): a, c, t, g, unknown or other
atttctgatctttattaataactaaatctgattatattgaannnnnnnnnnnnnnnggcataaaacccaacaagaaaaatgaaggtggatgccaactcctgctagccaagtgtggagacacaacactaactatgactctattacaagggggtcacctttgacccacaacctagtctcccgacacaaaaaaagagaggggcgcatgaatggacatgattagtggggggactcaaattaataaacctgtagtgggtgttattataaatatgatgtgtgttgacgggtatggtgggtgtataaatataaaagaaaaataatacaaatgaagaaggtacttgacaaagttggcgtgagtaagaagggactcgctacgtcagaactcgaggagaagacaaactttaaatttcttggaatgtaggaggagattggaagaaatagaaaacaaagatggatgaaaaatgatgggaagtaagaatgagaaagggatagatgaaagtagaggagtgaaagcctatttatagggttaagaagaaaataccaaccattggatcaacagatggggattagtcatatggacagatgagaagcaacatgtgttggaaattattttacnnnnnnnnnnnnnnnnnnnnnnnnnnnnnttattaacatcctaaataagaactttctaaa

SEQ ID NO: 65293 - DNA, 844 bp, Cannabis sativa
tccaaacaagccatagtaaaaggacaagtaaccataagatgaaatgtagtctcggcatctccactacaaagagggttactagtcacattcacccgcttagttcgaagtgaaacaagagtaggaagacaattagagagggcccgccaaaaaaaattcttaacttttagagggagttttaaataccaaaactttttccaaaaatcaaagttgtcttgagaattctatctcccattaagctcttgcaacgcagggactctattcatttatgttaattctacgtaataaataatttaatatgcatgacagccaagaccatacatataaaataaaagattgataatttggcatgtgcgcgtgtggttaaattcggtacattcaattcaattttttatttttgaaaaataacaaacttttttcaataatataaaatataagaatatttaaatttgaagtatgatattttctgttttttcaaaaataaaaataaaaaatgaagtatgatattttcaaatctatatatatgcttatagtaatacagctatataatttgtaaatatatttatcgatcgaaaaaaattcttaaccatggaaattattgtttatgagcggcggaggaaaaaatttatgtccctaattttcattatgagtgatgatttactattagaaatattacaccgacttcctattttcgaagtatagtagagtgtgcttctgtgtgtaaaaattggttttcgattatcaatcattctaaatcttatttgaggcgaaaatccaattactatcatcgtcaaaaaagacttaacaatacactttcccacctatcgacttgttcattttcctatga

SEQ ID NO: 65294 - DNA, 709 bp, Cannabis sativa
cccagccataggccaatgggcaggtggaggtcttcagcaaaatcctaaaaatcacgttgaagaagaaactccaagcttgcaaggctcactggccaaaggagcttccccgagttctctgggcctatcgaacgatagaaagaacttcaaaaggacacatgctatatgcaatggcctatgggtgcgaagcagtgatcccactagaaaccacagtctcctttcatcgacgagatacttatgacccttaccgcaaccattccttactccaagagtcactgaacaaattgtccgacactttaattcaaatgtgaaaagtggtacgtttgtgttggtaatcttgtcttgagaagggtattcccagcttcgctataaccgggggttggggtacttagcccaaactgggaaagcccctacaaaatacttgagaaggtgggccaaggtacttttcaactgaagaggatttatggatcaagagtccctcatgcctagaattcaaaccacttacgtcgatactaccaataggcagagaaaacaagaccttgatgaaatcccaaagttttgtgtaaagattaatataattaacttctgtatgagtagccctcgggtgtaatgaaatgaggacaaaaacagtttacatttgagtttacactttacatttttaggacacaaactatgttttagacaagtggcgattaagttggagacgtccaca

SEQ ID NO: 65295 - DNA, 965 bp, Cannabis sativa
gagtttactggttatcattatgaagatgtaaaataattataggaagatgagattattcaaaggaacaccaacaaagatgaaattcaacaacgcccacaaagcaaattatttcaattctttttactttgttttctattgaaaattcttcatgcttttttactgagagataataattcatatttattgggcacactagtgtacctactagaatcctcttcaacacttctaataaaatttggctccaagtttttaatattctgccaataaacatatcctaaaatggatctattactaaggttgaagaagaacgagtccttctgggaaggagtaaaaaacacaaataaacacagactggatatttctttttaattatagttttaattaggtgaaccaatcatataataatttaggggttccatagatacaccccattttaacaaagttcttatccactacattaaggtccataataacccaccgttcatttgttacttgttccaattataatcttaaatattaggtgtactgatgcaactgttttaggggtatctattacagaattttccaattttttatattcgatgtagttattttagacattaaataaaattttcaaaaattcaaaaaaaaattaatacatcaaaaacaaaactcaaaaagtctgttgcaggcgcgacttttttttattttatacacgtgtaaaataggtagtttgaacatttatttttatattgtaaattattcttaaatttctcaaaagtttattgcatatcttaaataactataacgtacacgactacaaaaaattttgaaataaaaaattcttacaaatgccgaaacagtttggacaaagaatttttaacatttacaagcaaatcatcaaaaatactattatttcaattataattactaagtgactgcaagagaaacagtcttggcttcagcaaccacaggagcaaccatac

SEQ ID NO: 65296 - DNA, 3536 bp, Cannabis sativa
atatgaactaatgttacaaaaattatatgtataataactatagatagtgataaactaatcactatactatactatatatatcctaataaataaaattaaattttcttattttcagttttcaaaggaccctctcaaattatcagtcaaaattccaatttattattgttataactttccaaaaaacttatgcagaaaattaaaattaattattggttttctgttacaaattttaactttattttttttgaaagcacaaattttaacttttaatttgacttaacgttacttttgttttcggttgaaaagtgattaaatattatcataaatataatgtcaaatattgaaaatttatacaataaattttttcaaaacgaaaatacatttaataaatatctaaaaaaaagttatgttatagattgattaatgaaaaaataaaataatatatatataaatataataatgaagtaataagttactagatacaaaatattatatatacatatataaaaaaaataatatattaatttattagataataatataatactaacacttctaactgaaagtacaaaacgttacattagtttttttctctctctttttttttctttaattttagatacacagttaatttaagagtaatttgtctcataaatagttaagcttaatttttagttataaataaatatctaaattatatttttgtaattccgtaaatacctaattgttaaatatcaagtcattatccatatgttattttttattggtatatttaaactatttttttttttaaaaaaaataaaaatttaagcacctgaactaatcaggaattgtcacgtgataatttactcaacacttaacaaccaggtaatcacaaaagttctaaaattataacttaggtattattactgcaaaaaaattaaatttaagtatttatttacaacctgaagttaaaattaggtatttatcccgcaaattactcttaattcaatttatagcattatggccaattaagatttttagcccctgaactttgacatgtaccaaataatgcctctgaacttttaaggtcgttaaaaaatttcccttaaactattgggattgttgtatttaagaatttttgtccaattttagtatggaaagtctaacatggatgaaaattcaagagttataatttggtacatatcaaagtttgagaggatttggtagatattaaagtttaaagaacatgatttagtacataaacaatcactaaattagtaaaacttaatgtaaagtatttaatctaacaattttaatagttcaagaaaatttttaatagccaaaaaattaaaaatataatttaatatatattaaaatttatggtacaaaaatattaattagtctaactttattattccctcattaaaaaacaaaaaaaataaaaataaaagaaaattaaggaaggttcaaaactaataatgaatgagtcacatgacatgtgggggtgttctttctctcttaccccaccaaaaaaaatcccaaactaaagtcatgtgatctgatttacatgacttttaattaattaatttataaataataatagcaataataatattattaaaaatatatatgtagttccattactattataatttgttgtataagatacaatatcaaattacatatattttaaattagagaaatactaaaatttattaatattgttttggatgatttctctttatcttatgtaatttttttattagttttggatgatttaaattaatgaaggttccattattattaaaaaaaaaatgtattagtattgtttaatattatctaaaatatcatattattattagtaaaattaattattagatcctgctagttcacaccagttactatattaaatattttgtattgtaaatactatatttaacaaagtagttatttcataatatatcgggtctcatataatttaatttaataattattataaaatatcactatttatttgtaagaccaacgttttctcataatagtactaaacaccactaatatttaaaataacattctttgaatcatgagaaattactaaccatttaagaatttacttatgatagtgttgcaccaataataatagagtattattattgggtatcagtaatatgcaacaccttctatatatgacgttctacaattgactaacaatattctctaaaaattatttttttaagttatacaaaactcgatagttaattacactaatagtgttataacaccgaagagagtgctaattaatagtggtgtattttagcaattcaaataacgatattaatacctcacaagagtgctagacactataagtatcttttagcaattcttttttatattacttataaaaatatcgagcactactcgtacctaataacaattaacgatgcttgtgatttgaaaagaggaagataaagacagaattatacaatttgatattattattagaatagaattatcataattggaaatgaaagaaaatattattatttttattgatttatttagtatattatgtcttttttcttgtaagtaacaaaacaaaaactctctctttgcattgttttagtgaaatccgccttttaaggcattggcctaatcgctttctcatcattaaaataccattctttcttcttcttcttctttcttttctttcatggttttttgatttgtttaaacaaaaccaaacaaaaaaaaaaaaggaaaatggatcctcagcttagtccaactacttttgttcagcaattcaaggtaacccctttatgcttcttttgcaataattacttcattttcattttttatttgttgaactgagattgtgttcttctttattttggctatttgaactcattttagtgataaagttaagatcttttttgcaatgtgatgagtatttgaactcatttgtgtactctgtgtttgtcatttgaatcattttggtgataaagttaagatatatttttttttttgaaatgtggtgtttttctttttggggttttaagataattgaatctctctgttgtgtaatagctttaaagttttgatttttaccagtgatttggataatttcatttttaggatctggtgaataatgaacaatgattcagcacacttttggaagattatgtagtgaatatatatatatttatagttttaaggaaaataaagtcatacccttatacttgaaacaaatgtaattatggttaataatgaaaaaaatagatcttaaaggacatgatatgttggaaagaaatagtaaagtatctaacttgttctatcaatcttcaacttaagaattagctacattagatatgtgattcaatctgataattaatttgaatctgaaaatcaacttgttggttaaactccgatattagtatgatattgttcgttttttgtgctactctgcacgaatttgtttttgggcactttaccaaaagacttcattcatactaatagagtaggtgaatacttatattattgcttatatttcccgaaca

SEQ ID NO: 65297 - DNA, 687 bp, Cannabis sativa
gatttaattgttgcattcacctctaagttatttgtgtgaccttgcagcaagtaaattccattctctttgactcccttcatggctatcatagaacccttgacaatcttcatgacctcgttctctatcttgattgaacatccttcttgatcaagcattgctactgagataagatttctctagatctcaggaacatgcctgatttgtcttaactcagcaactccaccatcattcaattttaatctgacagttccaattcctgtgatgttgcaggatctgttgtcaccaagtctgactaaacctcatttaatttcattgtagtcattgaattgggattaatcagggcaaatatggaaagagcaccttcagttaattacccaatttgatgaagaacaatccttggaaacaaccagaacccctgcactatcataaccttcttcagatgaggctatgtcaacactgcctgagttattgttattgaatttcttccacagtggacaatctttcttgagatgtgaagttgcgttacatataaagcattttcttttattctttaaagaagaatacttacccttgttttgattactcacatctttattctctttctttggaaatttccctcgaaccaacagtccttcccctgaagtactctcttgaagctcagatttccttttcatttcctttgacatc

SEQ ID NO: 65298 - DNA, 1056 bp, Cannabis sativa
attatatcatttaaatgggtattgagacgttgggtaaagatttaactcggagaggagttacattttgaattctctggaaacagttgttttatggttgttttcgaacatctggaactagatttttgaaaacgtccagatgtttgaaaacgttcctaaacgtatataaattaattgagcttgtttccagctctcttgtccaacgtttttatcccattaaacaccaattaaagtgttggtaacagccatgtgatgaaaggatttaattttcaaatgtgatcctcaaaacactataaatagatgtcttggtttcaccttgaaaaaaaataagtttctatcaagagagcacattgctagaaacactataggcttgataaatccaaaaagctattttcattattttcttttcactaagtgcttgtggtagggggaaataagcttttagacaaagatgtaagaccttgttcaagttttgtgattcccctattatacacttgtggtgtatgtggtgttgagattgctctcacatctcttatttatatatatatatttatatatgctatttatacattgtgtttcatgtgtagcttattgctttgagttgtaattcttctcttctctccatattctctatattttatgtgtatattttgtttggtgttgtaacattatttaatctatatttttgtcctttgtattatttgtcatagagttgtaatcttgtgggtttggtatttctatcggagcacaacagttttccaacagtcaaaagcttatcctttcctacctcgcttcaatggaaggtaagaaatcaacatgtggtaatacaagggtaagaattatgacattttgtgatttactattttttatatagtataatatatatatatatatttacatatttttctatattgagatatggattgagatatatgtatatatatgagttatatacgtatgggtgtatatatcaatagagtgatatataatatgatatttgaatatgttacatgttaatatgtatatgtgagatatacataatatataacatatatatga

SEQ ID NO: 65299 - DNA, 659 bp, Cannabis sativa
acacatacataagatgtataatatatatacctgccaatgcatcaaggagagtagatttgccacaaccagaaggacccattatagccaacagctcgcctggcttagcatagccagtcagaccccgaagaattggtctgttactgttctttccgctagaaactgtcacccacaaatcctgccatgtcaagaaaactccctgatgatcttccactactggcaaactaacttcatgatcagccccgaaaatcgaactacgataactcgcattgcgattattagctgtttcaatctctaccactgttattctagggtttccatgattagtgttactactacttgtagtactactagttcgtgaaatggtaacttttttgttatgataatggtcttggtcaatagtagttgagggagtaacagaagccatagtttggttaatggctgagaatcaagagagggactgatgagaaaagaagaatgtggtaaagaattggagatggaagtggttatatattgattttttgtgagcttctcgtggtagccatagagctgccataatttatatagagaggctataaagtataagttggaattttcaatatgtttgttttaataattgaataattgatatgacatacgtattaaatatcttacgtacaata

SEQ ID NO: 65300 - DNA, 1510 bp, Cannabis sativa
agcatatcatccacatatacttccatattcttttccagcacattcttgaacatcgattcaccagacactttgtaggttgctttgacattcttgagcccgaagggcatcactaattagcagtacacacctttgtgcacctcgaagttggtatgctcttgaatcgctacgtgcatttttatttaattatggctgaagtagtcgttcttgaagctcaaaagattatctaaaagattttttttaaaaaaaaaaacatatgaaataaaattaaagcaattattaacattaacaaaaaaaatattaaaacaataaatttatttatttttaatattgatgtatacttaggtaaatgctattttgaaccttgtgttttataaaagttactcactgggccctctattttaataaatgacaaattgggtcatgtatattctaaaatagtactaaatagaactctgaactgacccaatatagaggtgttatgacaaaattagctacatttactgtatttgttcatgttaagaattgtcttcaagttggttatattaaaaaaaattgtcaaaaattgaggttagagtcctatttatactattttagaaaatatgtgatacattttattatttgataaaacagatgattcaatcaataacttttacaaaacacagattctagaatagtataactagggaatcaaatttacacctgaaaactcgctcacgcggcaaacccaccagacccaaaacctgaaaaacccgaaaaaaaaaataggtttaaaaattataggtcaggttcgagtttcattaattcgacacctaaaatagaactcacctacttttattaacattttttgtacttaatttatattccaaaaataaaagttaaaaccctacttctctgattatgtgtgctctctcacttgcattctctcttctctcgacaacaccacgcaacagcgccaacagcacgtacctcagtcactcccctttctcctgttgtccgctacaagcaccatgtccaacccaacatgtcaatattttcatgcttctcatcttcgattttcatatacaaaaaacagagatgtctgtatcatttaatatatttttttgttttgctcgacttatttagttgcaaaaagtttttgagtgaaaatcgctaatttaagtaaatactaaatactactttctttcaaccaatatttatattcttcaacttaaaaaaggtactaatagaaaaaaagataaaattttcttattgtgaatcgctatttatgtctaattcatatcgcttttttaactttaattccttgtgcaactgattttttttttttttgtgacatttttaattacttgatcagtttacttatgtattcatttatattatatcttgtataagccaaatgacctctctctctctctatctctatgggtgacttttaatttatataataaaataataataaaacaaatctcattaatatttgaactgatatttgggtgacttttaatttttattt

SEQ ID NO: 65301 - DNA, 1863 bp, Cannabis sativa
aattatttaccattaggcttattgggatattacaaaaccagaatcagttctttaagggaaaaccaggatcaaatcacctggagccataggggtatgatagggattgactctaaatatcaaaacccattttatcaaaaccagatgcttctggaagattgataaaatgatcgattgaactgagagggtctttgcgtgattgaagcggtagtaaagatcgggggttcacagattagctaggctaaagagatcctcgatagagaattactgaaatatggaaccattacgatcttactaccaataaattaatgattttaactcagatcactgatatattttttttcaaacttcagccgtgaataaagttaatcatttcttttttcaagttatgataaagcgtgaccctttaaaattactggaggggcatatgtgtatgattaaccgaaatttatctggaaatatatgatataatgccaacccatcactttaaattttttttaaagtttgtgatctaacctttttgatgagaaagggatcaaactattataactttctgctcaaatatttctaacgagaaagggatcaaactattataactttcttattaaaaacttatctgatgagaaaggataatcaaaagttataaatgagatataactataacttccgtgtgaagctgaatactaatggctcgcactgtataggaaagtattaaacgagacatcaaggaatcttgaaaaaagtacttaaacctaacatatgaatagaagatctaactattcatgtaaacaataaaaaatatacaaagtgacaagatcattgaaagtatattcaagtttgcttgaaacagattataactgttattgcgaggaaggatcaataactgctcgaaaatcaagaacatggcagatgataaactgctctcgcatatagtagacaattaactacttaatgtcaaagggacatacgagcaatggaaattcctaaaatactttgtgtatgatcaaaatatgattgtttaaattgtgaataaaatgcaaacaaacaagtgcgtattaaagttcaaacataaaagtacaaggcatttaacaaagataaaataaaaagcaaagttcgccatccaactttacaaatttgtctttacaaataagtgccataagaggcaaaccattgtctcggcttcagggccattttcctaaaaaaaaaagagtaaaatcaagtctacattaatatggaggacttggtcggaccttcttgctctacttcaatctcctcttcctcgcttaattcttccttttgagttttctcgcaagcggcaagcatgtcttcagccttgtcgcctaaaaagttgaagtttaactcgggattgaatgaccaaatctgataaatagtgctccggccaatattatcgaccctctctttagtctcaacctccaactctttgagcttttggtcatgatcagcttgccttttagcaaggtcagcccggagggatttaagagaatcctcaagttccttgatcttctgctagtcggcttgatgctgtttctttgcttcttctttttcctgtgaaacctcaacttcagaatcactccactttttgacaacaacatccctatgttcgctaactttgcgaagctcggtctcaagcatttcaatccactgggatggttgatgatgtgtggcgtgaacgagaaaagaagcctgagaagaaaagacaaactaaagttagtaaaaaggtaattcaaaaaaaaaagttagtaaaaaggagagaataaggaagggtagagacaaagaaattagtggcttaacctaatacagaagctcacaacatcttttggccaagtcttcagtactgcctcggat

SEQ ID NO: 65302 - DNA, 1030 bp, Cannabis sativa
ttaattatgattattgataattatactgtcttgttgggcttggctcacgggtgctctactctacaggaaatgataaatctgtttcttattagccatgagtgtgggagctaggcaatatatgtacatgttcaggccacactagaccaagcgggttggggtctaccagtgttgaaatttttgtaactctgttttcctgcttacgtcggctaaggtgaaaagacttataatattttgtgaattatttttgggatcccgaagcatgtaaacttttgttgtaaagttaaaattgttacaagttcattttcttttctgttttatttaaagtttaatttcctgcgctaatttttttagtaatcccgtttacgggattaaggtttcttaatcatattgggtagcgtgcctaattgctagggcgttaaaatttggtattagagggccaatgtttttaaacttcctataaactggccgaacatgtacaattatcgtcagagacaagctcggctcatggtgcagtaagtgctgagagtaaatgctttactgcttatatgatcatttatttgccagttttccattttaggcagtaagcgagcatctagagtatttatgtgatatttgatgccattctttagaggttatatgttaagtatttaattatatggagtgaatagttgagttagggtgtaaggcaataagtgcataagtgtggtattggtgcttaactcgctggggttgttgattacatgggtacttgtaaaaatcgaccctccagaattatctagactatagtgcaaacaagtagagcctagggttgaccaagccaatccatcggcaccgcctgcacctccataaaattcaggagataatgcgtgggttggtaatgctaatctacctaccgactggcagaaaatgtttctcaaaatgtgaagtatcatacttcgtcaagaagatgaattgcgttgattagcaaccaggaccgacagctccggttgaacaagtattgccaccagctcctgttctagtggtgggtaac

SEQ ID NO: 65303 - DNA, 925 bp, Cannabis sativa
ttaaggctttgtcatgctatttatcgagaaaaactcttagttgcgagtttagatcctcgaaaggttttagaaagttgtttacccattttacatgattgtgatttaaggcctccgttcagtacgtaactttccatttaggtcgacttacacacttgaattcaaaaacaaggtaagactagcacggatggtttaatatttttaaaattaataattatagttaaatttatttagtacccatcaatgggtaatacccattaaaaagtgttccatatatatatatatgagtttttaagtttcttacataacattcttttttacctatgataattccatcaaaaaaattagctttttcatcaagaaattaattttttcatcaaaaaaattagttttgattttatagaagtgaaatttatatgagttttaaatttttttatggtattctttcttatatatgatgatttatcacatattttaagttttttctttttaaaaaaatatcatatttggtacaattaattttgttatttaccacatacatttaaaaaaaattccatatttttgtaaattatcccaatataataatttataggagtctacataaatataataatatatcataaatataacaaaattatatttagtaatttgcggcaaaactcctttatgttttaatttttatacacttaacccctttatttatttatttatttttgtggcaaaacttccttatgttttagtttttatatacttaaccctctttttttttttttttggcaaaactcttttatattttaatttttatagacttaacctatttatcttttattttagtggcaaaacctccttaagtttatttttttttttgtaaatttaaagttttagttagatattaccgttaaatactaactagattactactgtatcg

SEQ ID NO: 65304 - DNA, 2218 bp, Cannabis sativa
tgaggatgattctataactattgggggtaagttggtatggagaaatatcgtaatatcagaatcgctttgataaatgaataaaatggaaccgtgacaccacatcaaatgatggggactgaaacctcagggacgctagtctggataatcaatgggttggtgcatggtcgatgcggacattgtatggacacaggttttgtacaacaagtattgattaatttcaatttttggaacgtcgtcaagccagacttccttactcgtgaaaccaagtcctcataagaaaaagatttgtccaaaggtgcgtcctcaacaaagttcgcaccatcttcatcatcatctcttttatccccacgagcaggcaactcaaaatcttttctcatttcctcgacttctacatttggtgtagtccttaagcaaattcggtggacttgcttccccatatctcgatagcagttggtgcctctaactcttggaccatgcaacctatctcgccagcagaccgcgagtcttattcatctactcttgatggacccttctcttctaacagggatgtttggataaagttgttactcttctgaggttcatccacaaattctccaccctcagatttgaatatctggctactgtctgagagattgctcatatgaaagatagaagatctttttagtgtgttgtaagtgtaatttaaagaggagtgtcctcacacgaataacaatttcaaatggaataaaaatgccgacaaaagcaacaaaactaacaccaaagcaaaacatagtagttcagtgtttcacagtgattacatgtttgtgtgtttgaagaaacatttgatcactgtgaaatacccaaccacttggtgaacatttcatattttgtcaaaatttaagatcatagtttggtgccaaaatatgtgaatactcagtgtgttctaactaaaagtgcaagtatccgaagttcgtaacgaagaaaatgcaaacattcaagtgacaggtaagaattttctagaaaagttccccttttgccttattttttcttaagattttatttccagaaacctatcctactattttcatgaaatttctagccaaatagcatgcaattattcaaagaaaacacattaaacagagaaagttcttagaaaagaaccaaccttttataaaaagcttatttttctgaacttaattatcacttcgaaaagcccttcaaacttcaaaacaatcttcagccaaaggagattgaaattttttgaaaaaagttctcttgaaattttagagagaggagcttcaattaggaatggcaaacggggcgggtctgcctcgacctgccctgacccgacaaggcattgccccgccccgattgcctcgcaagcttaatcgggtctgacccgacccgacccaacagagttagatttgacccatttttttttttccaaaaaacactcaataatagtttcattacccaaaaaaaaaataataatttatatgtgttaaaagagaagtatactaaattaccacccactactactgcaaattatatgtacttgactttcaaataaagattaggacaatatatatgtatatatacgttctaggattttttttttttgttttgaatgagcacaactttgctcaaaatgaatcttataaactccaccacttaataacaataattatattgggttatagaaaagcaatatatatatatatatacgtgtagcatcaatttatataacttttgtgtttatatatatcgatcggataaacttagtctgtaggtcatctcaatatatgagatgtaaattatatataaattattatctattgatgttatttatttatttaattattttttgaattgtaggtattattttgtggtggataatactttttgccgacgaactattcccaacgacttttcaccaacgaaatgtcctcattgatagataatactgacaaaaaaggagctttttacccacgaaatttgtcctcattgatgcacatatttcttgtagtacttattatagctgatctctctagctaattgctaatgcggcgaagttgccactgaaattcactaattcaatattatctatatatataatggccacgtggatgttgatatttttaagttaatgatattaccgaatcgagacagctccgaccgaaaacaaacataattggggcagggcggggcaggacaaagacccgattatcctggggcggga

SEQ ID NO: 65305 - DNA, 1429 bp, Cannabis sativa
cttggcactgtggagacaggtgggatactgtttcgtggcactgtgttgctgatggaaggatcaggtggtgttgttgcagcactggtgtgatcattaaaaccagtagcagtgggtggtgcactaggaacatgagatgagcaatcggtagattgaagaacttgatcttcagggacaaaaggcagctgatgaggggctgaaacacagttagttggaaggatttgagagctggattcctgcaacatattacttggagcctcatcagagagatgagaacaagtagtgggaaaaacagatgcatcagtcgacaaaatagcattatcatcaggaaaaagagagccaacagtgtagagtttagatgcaagaggtattgtagcagaagtggcagacaaagtatgagtagatgaattaggttcagtgctaatggaatgatgaggaaatgtattttcatcaaaaataacatcacgagaaatgtatagtctgccatttttgtcaatgcatttatagcccttatgatttaaactatagccaatgaaagtacaaggggaagatctaaactctaacttatgcttgttatatggccgaatgttgggaaaacatgtgcaaccaaaggtcttaagaatgctataatcgggtttaaggttgaacaagacttcaatgggagatttttgagaaaggacaggagtgggaagtcggttatgaagatacactgctgtcctaaaggcttcatcccagtattttagaggtaaattagcatgagctaagagggcaagaccatgctcaacaatgtgcctatgttttcgttcagcaattccattttgctcatgagtagtgggacaaggttttctatgcactataccagattgctgaagtaagtcagtaaaggatcgatattcacccccccaatccgattgaaacactttaattttggtgcctaattgtaactcaacctcagctttgaaaatctgaaacactttgatggcatcatgtttatttttaagaagataaagccaagtgaatctagagtaggcatctataaagtgtatataatatttgtagccattatgtgaagtggtgaatgagggaccccataaatccgaatgcacaagttgtaatggagcattatagcatgtgtcagacactttgggaaaagggaatttgtgtattttgcccaaacaacaagctttgcaaatggaatttgaaattttattgatatgaggaaggttacattgagagagaacagacttcaccaccctttcagaggggtggccaagccgattatgccaaagttcaaaattattattgctactgctacattgaaaacaaagagaagattgaacatgatgtggctcgggttgagaaggatcagcagtgaccatatgagcagatggtatagcagtttgtggactgtttggggaggaggtggcagaca

SEQ ID NO: 65306 - DNA, 846 bp, Cannabis sativa
gtttctgtagaagcttgaggggcaatacctttgtctttgtcttgtttcttcttgtccccataacaaggaggaaagccatgaatgaagaagcacttgtcaaccaagtgaccaggtttgccacagttggagcatgatgatcttggtttcttggttcttgggggatttttagatgaagaaggacgaatcaaggaagcaaggggtgaaacatccgagttgcaaagggtcctttgacgctcttcttgaacaatcatagataagagattggacaagtttggaataggctcattgaggagaatttgagcacgaacggatgcataagattcgttcaagccagtcaaaaattggagtacttgactctgattgtaatagtcaagaaagactttcattgcaccacaagtgcatggtgtattaggttgaaactcttttagttcatcccatagggatttgagtttagtgaagtatgaggtgacagattgatcaccttggtacaaacgagttagctgtgtttacaattgaaagatctgagggccattggcctcattgaatctttcaacaagatcttgccacatttcagcagcaatatcaaagtacataatactttaagcaatatcaggggaaatcaaattcacaagccatgaaattaccatgttattgcagcggagccaagaattgagaagattaccagcagtaggatgaggaagagaaccttctatgaatactgttttgttcttggcagcgagagccatggtgataccacgtttccatgactagtagtttgttcttataagaattgaggaaaccaacacgaggcagggattatctcttgagttgaggaagtaagggctg

SEQ ID NO: 65307 - DNA, 1513 bp, Cannabis sativa
  modified_base (1270)..(1272): a, c, t, g, unknown or other
catagaacctagaattgcactctcagttatatggaatgctctatatgttctaccatatagatacactattaattatccattgttataatccctatttgatatccaactaatgggctttaatcttctatttggagcccacgtgcagggccggccctaggcataggcgggctaggcccatgcctagggcccacactttcccagggcgcaaaataaaaaaaaataaaaaatttattaggcttttatttaagtaaaatttaagtatattataagcaaaaaatattcatagcttagttgtttgaggtggacgacataatgttcaaggtcatgggtacaaatcccatagcactctttttttgatatttttttatatatttttgagggccccaaaatttaattcatcttgggcccatatattttcagggccggccctgcccacgtgtcccataccggaaacatggataacaagtacaaatctagattggttacaatgggatatttgcaaacacaaggcattaattataaagacatattttctccactacttaaacctgctactgtttaaattattctctctctagttgtctctttcaattgggaaatgaaataacttgatgtttatagtacttttctcaatgaaaatctaattgagatagtcttcatccagaaactagagggctttgttgaccctactaaacccacacatgtgtgtaaacttcataaggctctttatggccttaaacaagcttctaaagcctggaatgagcttaaaataactctaattgagtggggttttcagatgtcaatgtcaaatacatcgatattcattttttgttcaagtttcaagttgatgatattactagtatatgtggatgatatacttgttacagatcaaaattcttctttcattaatcaacttatatcagacttgcatagatcccttttcctaaaggacatggtcttatacactacattcttagagtagagattttcaaagatgccacaggaatgtatctttctcaaataatatatatcactgatgttcttattaaacctcacattgaaggtgctaagagttctccaaatccaactagatctactacagaattgcctttacatgaagaataaccctttgatgacaaagcactcgaaataagtactataggggccttgcaatatctcagtctcaccaagcgttatgctgcctttactatcaataaactcagccaatttatccatgctcccattgtttgaattattttaccaggatctnnntttactaacaagtatgttattaacgtccaaaacatgaacttctaaaataatatgaaataaacacatataaagtattagaaaccatacagtggtagcagtggaatataatgtctccttccactcagattgctaacccttgtatcctttctatagcagtatatcaaaaagatcggagtccgaatctccttctcttgaaactggattcttcacagccttacacactatgattgagtactacttg

SEQ ID NO: 65308 - DNA, 2934 bp, Cannabis sativa
acttgttagtaaatctagatccggtaaaataatttccaacagcgcctagtatgccatgaggctgttggatgccccatgactgcctgatgttgacatgccctgcatgggcttgtcgtatgggttcttaaagtttgataaagtggtcagctttattaaggaactctttcatgttattggtagagattctccaaatatttttctagaagtcacttaatgggagtatgccccattatggttgtatatcggcctttgactttggtagcttcatccataaacctctagatgtaatctttcaaagtttccccttgtcatagtttaacttcgacaaggtcttctagctgtgattgtaccagtctcgaggataagaattttgtgtaaaattctagtgagaactcaacccaagagttaaaccttcctagggtgagtttaaagtaccattgttgagtcgtctttgacaatgtcgctgggaatatgcaacaccacacataacaatttccttctagagattgatttgtaatgttagcaagttggtcttctcgcctagtatacatcttccataccgtcattttgaacatagccaagggcaaggcatttatgtacgccgagaaaggtgatccccttgaccgatcaagttcaaggtctgaaggcttcggaccaactttgcctttgatcatgtccctgacttggtccaactatgcttgcacagaaggatctattgatttggggacttgactgactgaccctccttggggagtgttatagtgagaattttttacctaaaaactcgagacaaggctccaataaaaatatgacgtggactcactctcctcaaggagagctgagatgtcaaaatgagacctcttgagtgtaaacctcacctgattagattcagcgggatgatgtgaccttgaagagtgtagtcgcattcttatgtctcgcaccatgcaggaccaaagattgaatttaagactcgcatataccgagatatattggagaactataaaggtcttcctgtgaagtagtaaagattgattctctacttagcgagttgctccggatgacccaacgtccttgataacccgataaagactcgcatgtcctaagttatggacctcttacaggatgtctgcatatgcgactcgaacaggacgcagacattctagactcgattagtcttgtatgcattttgagcatacaagcttatgcgaggacatgaacaaacaattcgtaccataaaggtcgcatacattgctgtaattagtaaattgagccgaaactgttcttcatttattgtatttacgttttaattgatttaaatgtttatattcaatgtacaaatgaattgataatttaatcaatctctgtgtaatcaaaggacactttctttgtatataaaggagtgattcaacatgaaatggacaaggatagaaaacccttgcaacagttgactaagttgactgtgatctgactaaacttctatattctctttgtgttatttatagttcccgtacgcctctgtgtccatagtttgaatactcgccattctggctagagtaatcgcataatcttgttcatatttttattataatattttattcgctgttgtctaaattcctccaacaacatttggcactatctgtaggaaagtactttactactgatttcggaggaaaatcataattgatggaaactagcggaacggagataacaacacgggttctttcaatgtcagaacatggaatgttccacacctaggtaatggaacaacacctgtcgataccatcaatggaggagtgggacgtaccaccgttactcccctcaacttatttcctgaaaccacctgtcatgtttgagaaacatcaacaccgacaaccactgtaggacaaatcctacctatcacaccggctgtagtgtctgatgaatcattcaactgaccatagccccatatacgaccctataagaccaaatgcaggctttgcaggctaagatcaacagaagggtcaggacccgacatcctccttgagtaccaaacacgcgttcaaataaccctcagtaaagcaatactaggcgacgaactaataattgcacttgcagggaacaacgaattggatagaagggactcgacttaaactaccccacgcaaagggaacaagtcgcacgaaatgctaatcgcgaggtgacacaaaaggaggatcccgagcgacgcaaccctcaaagcagagcccaactgcaaaatgaggtaaatgatgctgtatcttattcttcatcctcacagagtcgttctcctggtgtttataccaggtctagcttcgtggaggcaccacgaggagggagataccatgttcacaggggtgatctttatgatcaccttaatgcagttttttgggcatggtctcaaatgccctgaaattgcgatgagccccatggtccccaagtgggcgatcaagtcacaaacaatggcaataacctagcaaatgttgtcaacccacctaacacacgagctacgagtattaaggtggtgattccagctaacatagctgcgattgctgtcgcaccagcgacaactcaaaacaacaccgccatgctattgggtgtcgatcaaagcatcctactacgagcgttgaaaataatcgagcagcagagaaagcccatttacaagcttcatgggacttttccttttactgaagaagtatgatacgctcgacttcccaagggattcaggttatctgaatcgctaaaatataaaggtactactaatccgatagattatctagaaaaatttaatacaattatagaagtagactaggtacctcaattagcgaaatgtctcatcctggcggcaaccttggacaataacgctcatgattggttcagctagttttctgaggcatccatattgacttgggagagttttgtagatctattcttgaccca

SEQ ID NO: 65309 - DNA, 1086 bp, Cannabis sativa
attcagcaacctaattttgcgaaatgacactccaaaaacaaaatcttttgtgcgtgtgtgtgtgtttgagatacaaaattacaaattgtcaatcctcgttagctctagctctcttacttttttcaacttttctattctaaagtttaaaaaagcactgtagtgctgtttagtgaaaatctgaatcagtgcacgcaaaaatggcttgacaaatcatcggtagagaagagagtagacctaataataaaaatagaaataaaaataataataaaaaaaaaaattgctgcagccgtggagacacgagggcttgttgttgttcttgtagatgtgtgtagaaaattacactctatattctttttttatttttaccatcttttttaaagtttatcatttttaatttttttttaaaaaattgtactaattttactcctatcacttttgagatattctccatgtgactcttttatgccagagtattttggatacaatacatataaataaaggtatgtttcaattaaatataaaattaaaagtaaatttgattaattgattaataaaagtagtattttatgagaggtgatgtagctagacacaatatgagggctgtatgatccactacagagtcactataatcctaatccaaattgcttagagcccaacccatctttgaaaaaggtctaagactctagagttcaaagcccatttactatatactagtatttttcattatatatagaagtgtgcctccaaaggaggcaaaccaaatctagtcacagaatggttatttgtgtaatgaaataacaagagaaagaaaaggaaagaagctcttcattaattgattcaagaatacagagtaaatatctatacaagtgtagaacaatctcttagagacaatgagctagacaatcgtaactaaccgatcttaacagtatttgataactaacataacaaactctgtacaactaagcttcattttcttttaacattctccctcaaactaagtgaacttgaatacatgacactaggtggcgtttggttggaggtaatgaaatagaatggaatggaaagaaaacaatttttattccattc

SEQ ID NO: 65310 - DNA, 1305 bp, Cannabis sativa
tctctgggttcatatttttttaaggggaaaattgcactttatacctcttttattttaccaattttaatttttacccttttttcctaattctttaatatataaccacttttatatgtcatgttcccactatacccttagggtaatgaaaagaattaattcaatgactccttcaataacaaccacctctgccaccttcgttcctcttgtggacgatcaacgatttcgaaccagcctaccgtcttctgtgggcgcacatcttaggtgaacaacaactcttcccacactcgtcccttagtcgaacgacgactcaatccaatccactgtgtatggttgataaggtgcccaaggactctgccatatttggagaatgtggtaatggataagcatggtgattgaacatggcaaagatactcacacatgtatgtttctcttaatgcttgaatttgatttatatttttttttcatataatagttaccactgtaggaaattgatatgcctatactaagtaccatgaactcattcatgttaaaatcaattaaaagtcatactcaaaatcatattggtattgtgatactctcaaaattatatgttcttttactttttgtagtttctcaattgtttactttattttgtgtgcttaaaatatttttctttatgtatcttttgtgttgttcaattgaaaatcttaaatatttttttctttaaatatacaattatcaagtgtctcaatgcttcttgtttacttagagaaactagagtattcatgcctaatatgtgtttttctttaaatatacaattatcaagtgtctcagtgattctttaataaatttgtgtgttcatagaaagtatttcatcaatgttatcaagtatgactgaaataatattttataataaatgaatctagttgtcatttgaagctaaaagtagaaatcattgattgggaaagaactttttttagttgctttaatattagaaatcaagcttacactgaggtcatgaacaagattataacagcacattgccattaccttgatattgggtaattacttgccacttaattttttttttcattttgtgatttgaatatttttactatttgattttaattatggtattgtgtagtgctggaattggtttgttgtcattgatggttgccagggcaatgggttttggggcctcaatgcaaaaggagaaggtaacaacttgtgagtctttccttccattggtaaagataatgagaagagtatgaggcttaatggtatggaaaagaagataaatatattcaacaaacgctttgatgaact

SEQ ID NO: 65311 - DNA, 1026 bp, Cannabis sativa
aaggttgaccaaagtcaaaggtaaacaaagaatgacattatggtcacatgtgtagaaatccttaatatagtaaaaactatctttgatgattttatttgttaaaaaatggaaagattttattcagaaacaaaagctactttttgatagaaggaccagtacaactagacctagtaaagagaagagaccatattgattaattaaagagcttagtaataatattaatgagaaatcatgttaaaattgaacaatttatcactaatttatgtaaagagagcaattaatgctgcatctaaaacactattttgattaaattatgcccctgaacttcaacatgtatcaaattgtgtccctgaatttttgtcaacgttagacaatgacttattttagtaaaattgttcaaaaaattttaaatctaacaatttcaatagttcaggaggaatttttaatgatttgaaaagttcaagagacataattcattacatgtcaaagttcagagaacaaaaatctaaataaatttaataataataataatatattgttaaagaaagaaaattggtcatctaaatggaaaatttaattaaatttaaaaacacattatttattctatgtttaaacctcaaaaccaattaattaatttaatattattagagattagtgaaacttaataattaccaaagaccagtagaagaacttaatttgctaaagttctgcatcttttcacctcaaattttccacaaatataaaaactatttcattttttgcatttaaaaaacaaataaaccctagtaattaaaatgggaagattttttcagaagaaaataaacaaaaagatacccaaagattttttttttctttttaaagaaaaaagctgttttgtttcattattattactatttactcttctatttgtatatttgttttctcactcataattaatattttctctccaaaccaaccaaacaaatagatacaagatagctacattattaataatcacccatgattaatgactaactacaatgtgaa

SEQ ID NO: 65312 - DNA, 687 bp, Cannabis sativa
accaagaacattctctgtaataacactctcataaataaaaaagactcgtggagtacggttcattaatacccaaaccacgtaaaaatcacctgcattaaagcttccatatagctcttcccattctttcatttaatcggttgccgaaaacctcggtcaacaagttgattggataattttttgttgtattaacccatattgttagtgattatttgtgattattagttgatgagcttcacatctgtgtgtaaagtctctagttgaaggagaagtgtggatttttctagttatctgaagcatttgataagcatgtccagtccaactaaggttatgtaactaagttctctccacaactctataaatataaattgtctcaatatcaaattgttgtaattattatgaattaatcaggtacgcatacttaattatttgttattattgtgttctatattatatacaaattttgtaacaagtatgactttaaatagcatgtgtggttcgattatctgttcatttcattggcttgattgcccctaggtcgattatttggagattgaatctttccctagctatgtaatagtaataaaaactaattgatattgttttatttacaataagtcatagcctatcgtaaattgttatgcgtctctttcattaattataaaaaaattaatggagttcaagttaatt

SEQ ID NO: 65313 - DNA, 1955 bp, Cannabis sativa
caatgcaagctcaaaagcaacatggcaaagaaatttaatcgaaatattacagtaaaaaacacttcacaaaagcaatctagataagtataaatacatatttatcattaccggtagtaatggaggaaagaaattacagaaatgtagggaagaagatgagaatggaatggtttggttttgagaatagaaccatttctgaactttagatatgtgagtctgtgaatgaaggagaagagaagccagaaccgaatgtgtcttaataaaataaataaataaataaataaagtgaaaactgacatgaaaggagaatttttagttttatttaattattttagagaacaaaatttatttgctaaaggccaatgattgtcctgagtcaaggtgaaacgacatcgttttggtagatttttaatatttcttttttatttttgttaatgttgaggttttttaattttgaggttggttgatagtgacatcgtggcggaaacccctccatggtggacgtttgtaagagattctgcattctcatacgcgctgagttcgggctgtgttctacactctccgagtttgttgagccgaaccaggacccactcgggtgcgtactcttaacaaactcggacgagcgagaaatcatgactcgggcacgaactagcgcgtggttatttgaaaggaagtgttagtgttgggacgcgcgtgtaatttttgtgactcggggtggattgatttcaccgacacaaagcagttggcaacagtcaaaacacagactccgaaacagttggctctggctcccacgccacccaaggtatgggctttgggcctgtgaatctcagcccattaatttgagtttcggcccacaaatgaatgtatttgaatgtggaggttgattcaattaattaaaaaaaattatgatgtaaattattccaagcctcaactaaaaataccatcaattatgaatagtaataaggtgaacaaagatagggacttggttatcattaaaaggaagattatgatttgtttattaatattttttcattgaaaatgaataaagtcggacattgttggtgtttcaatttcgagatacgaaaatcactaacatttttgtttactcttatccttatttaaacaacaccataccaccaaactatgcaatgtgacacgtggaaacataatgaacattaaacaataaattaagagagcacatcactatttaagatcatatctcacaacctcatagtatatatttctgaaagtgatgttggatgttgcttaataatcagcctaattaatctttttttttttttttttgataaacaatcagcttaattcttgagaccatatattatattaatacaattataaaggtgggttgggtagatatataattttctctattttagtgaaagcttagaaactttgggtaaaaaaatattttatactcttgtattttaactaaaatacatttagaatagttatttatcccaactaaaactttacatggtacaattttcttttataacttgcatacttttgttgaaggaaaaaagatagataattacataaagtattaatttttgtaaaatttttatattttatggtttggaacactcaaaattaagatgaggcattataactacaaagcaattatacttcaaaactcttaaaatagttattccaataaagaagatataatacctcaaaattttaaatagtacatttctacatttagctaaagtttacctcttaactaaatatttttttttcttcttttttttttcacatcatctatatctataaatacgtgaaataaattaaatgaataaaatatattaaaaaaatataatattaaaattatataaagagaaaatagagtagttttttgaaggaaaatggtaactttattaataagaagattcaaccattacaatagaaagaacatccggaggaacatcctcctcact

SEQ ID NO: 65314 - DNA, 1228 bp, Cannabis sativa
  modified_base (601)..(601): a, c, t, g, unknown or other
ttattttgagcaggagtaaaggttctagcattagtagggttttccttatttttttcgccaacacattccaccaagggatcatcgtctgaatctccctcgtctagatctccgaacttactacgaaggtggaccatagtcctcttcatcttttgagagaacttttcttgatgggctaattttcagtaagtctcaaacaactcattggacactcgaaccactttggggtcttgctcatagtagtagccatctttgtagtaccaatctttaacatactctccgtcgtcatcctcctcttcatcctcaacatctcagtcttcattaacaccatcatgttgtttgtcgaggttggcctctcgattatttggattggatgtatccacttttctcgcattgctcagctaggcgaggcttggagacaaagggtttacatcttccataatagcgtctatgccaccatcttgaggagtcttcttagaaactattcttcgtgtaaaaaccatggtagcagtaagactttaggtttacatctttcttcaactattaatgaaagcacaaaaatgtttactgagattttttgaaactaaatatttaagaactaaanaaataataaaatgcaaaaataaagagatggagattttttatgttgtttgggtgttaattaaccttagtccacgagtcagtctataagggcgtatttgatgtgtttacaatacttttgcagaaaaccctaattttgtactctcaatttttcttgaagaagaagaagacgaggagtaatattgacagagttttagatatgtaggttctaatcccccttcataaggaaatggaatggtatatataggctaagtggcaagtatgcatgcgcccatgacccgcctagggtttctactcaaagcccactaatggggtaaattacatgcaaaggagagctgactattgagtcccttaaaaacaattgtgcctgtgcgtgttgcatttggacaattggggaccgtttgtacgttgttgacacgtggtgctcaaagatttatcctttaaaagtagaagccacgtgtcacccaaagttttaacctttaaaagcataggtttgtaatatctgtctggtaaaaaggtggcactaccatgcttggacgcaggggacaagatctgatcctatgtcaaaaaaagcataactgtcacttagtgtttcgaaaaacagagaaggtagaagatcggaagagcggtt

SEQ ID NO: 65315 - DNA, 2706 bp, Cannabis sativa
aattggtcaaagcaaaaagagaatgagtagtccatataaacactaaaccaatatcaaagagtttcgaaatgagacctatagactaatattcttctccaaagaccctaggatgttcaagaagtcctggaaagaatgtttatttccttctcttccaacaggcttaaagttattggattggaagcaaaaatacagcttaatactagagggagtaaggaaaaactaaaataatgtccagagttttcaaagcctttggagcacttaaagttcaaaacagaatatctttctagaacaattctattctagaaattagatcttcagcagtctgaaacacaagatcccttgaacaagtttttttggatcttcagtgtaatgatgtggaatagacagaatgcaaaaaggaactatcacacaagataaaatttgacatgcaccctattcttttagtaggccaggctccaaggtgacgagaatatatgaaataaaaagcctctctaagccaaaacgtaaacagaacctcaaatgtatggtatttctataattcaaacattacaataactaataagaaaaagatgggaagcaataaaattcagtagtatttgttataggataattgtgcttatacactcacagctgtatgatgaaccaaagtcatcaattgctccataagtgtttctgcgtcttccttcaattgcttctgtggtgtaagttcagaacccagcctatcaatagagagagagcaaaagtcaaattaatgaccaaattgaagaaattcggttaaacacaataagaaataaaagcaaataaaggataatttgacaacaaaaagattacttctcaaaatatcgatccaaattgtgccactgaggatccttacaacgatttccaaaacgtaccacttctccagaaaatacatttaattcttctctgtagaaattgttgaaataaataaaaagaaaaggttaattcctctcctaatttaaaatatctcaaaaccaaaggatctaaggattcgatgaaaaactaaaaatgaataagtggaatgacataacacaatttctctgaataacctcttgtcagatgcagcaattctcatgagttcatccatgtctcgcgatattaaattctccactccttcagatgtcaacacatccgcttttaaacgtttaatgttatctttagaaagggagtccattagattggaacctttaacaatggtattagcaacttcaaaagcgagtatagaaattttgtttcctttcgttgtcacccctgaagtaaaactgctactcagattcaaatttgtcatgctactaccaagtgtgtccaatacttcaactgccttcccaaagccaacagtaccagccctacccaaaagtgagctcacttctgaaacctatatcaaagaattaaacaaccccatcaaattagaaaatagctatggtatctcaatctctacattgcttaagaaaataaaactgcaaaaaatattgcaaccaataccaaactaatttgatgtgattacaagtaacagaatttactgtgagacaataactaacacatcaagttcaaacttacctttgcaacagcggcctgcttagacttggtagatctagatttatgagacaagacccgagacaatcgaggaatcccatcattagtatcgtctgagccaatcccataaggaactatattcacctcttgaaatgaaaagggatcacgtaactgcatatccacactgtgaccagctgaggaaggagcagaattgctctccggtttcatgggaagtgcataagacccattattcgaatgcccattaacatgagcattattactaccactaccaggaagatcatcatttacaatgacattgtctatagatgatcttttcgttcttgagcaaattccccccataattttcaataactaactactattcacaacttccatacaaaaatttgaataacactaagagtaacagaactaattatgtattatgaaaagaatcaaatgcaaccaaaaaaacaataactccaaactcaaaaaagcttacggattcatcaacactgaaacccaagctctaccaaaattaccacagtaccaattatgatcacgactgaagctccaatccatcaacttatctcagtcaacaagctgaaaccaaaccaaaccaaatcaaaatcaagaacaaaaaagaaaagaaaagcccaagccctattcctgtttttctcagtaacaaaaacatacctaaaaaggtagagagaatgagagaggagttggatctgcaagagcataaagatatttttgtctgtaaattcttgttcaaatcaaaaatagggagaaagctaacgatggtgagatactgacgttgacggccatggtaacacccaaaaaaaaaaaaagcaaacagtacaaacatatatatatataatataagaagaaaggaaaggaaagagaaacgtaccgagatgggtgagggagtagaggagaggaggaaggagagagagaagcagagtgactcggtgagtcagggtgagtcagggtgtttgggtgactcggagaagtaaactgtgttaagacaaaagagagaaagagaagaggagagagaaagagaagaggtcaaaccatagaaagtcatcgctttataaatctctctctgtctttctctatttggtttattgctttagacgacttttttttttttttttt

SEQ ID NO: 65316 - DNA, 1061 bp, Cannabis sativa
  modified_base (38)..(42): a, c, t, g, unknown or other
tacatcgttgaagagacgattgaattctgctcagactnnnnntcagaggttacaactgttggctctcgccctactcgggtcgatattggaacaagtagagagaatagaggtgtttctgtttgcggtgttagccgagctgatcgtgaagaagctcaccgacttgttttgcaaaatattgacgaggtccaaccatacattgagtaagtttaagttaacttttcatacttaaaacaaaataataatattcaaatgaaactgaaatcaatcaaatacttgaagggaacattttaattggatcaagaccactactccgactaaggcaatgaatcaaaaatgggtacaagatgaacattatcgaaatttcaatacatggtttaaaaaaaaggtactatttacattattgttttgttacgtatcatattgatttacttgtgctcactaactcacttgtatgttgataggtatatgtggaaatgtgtgaatccccaagcaatgtatctaacacgctactttgcatatcacgaggtccttcgtgtgatgtactcaagtatcaatcgtactatataaatagtactcaattttgcacccaaaaccatgataaatgtaaaaaaaacacagaatagtggtgtaacgatagttgctaagactttccaactatctagttcaaaagacaaaaattctattgaatgtgacatgtctttttacggtgtaattcaagaaatttgggaattagattacaatagttttcggatccctgttttcctttgtgattgggttaggagtgataatggagtcaaagacgatgaatttggattcaagttagtggacttgaatcgaattggccacaagttcaataagtttataatggcgtcccaagccactcaagtattttacatgagcgatccattagatgcacgttggtcagttgtcttgacaacgcaaccaaaagattatgctaaccaagaatctagtgacgatgatctcatgctcagtgaccaaatttatcaaatcattccaccacttattgatttcactgttgaggacgatataatatcatctcg

SEQ ID NO: 65317 - DNA, 560 bp, Cannabis sativa
ttaaatgttcctcattaccaaataattttccatgcttaatcttacgataggtaaaaaaataagcactaattgttaaaaaaaaaacattaatttatgccataacaagataatattaataactaagattatgaataaattcataaattaatattatgcataaaattaagatatggaaatgatagaatgctataaatagaataaattggtgaaaaatggcccaaaatttaaccttgcacgcgcccccacgtgcccattttctttccttttttttataactggcgtacgacgtgttgttttgaaaaaatgacatgtcgttcggtgaaaacgacatgcaacagggacataaaaagacccgtcattttgcgctgctaaggggcttgacctattattgtacgacatgtcatttttgggaaacgtaatgtcgtttgccccgaacgacatccaaaggggcaggaaaaatgaccggtcgttttttctcggtgggggctgaaccaaaaggcgtacgacatgtcgtttttgcctgacagaggcaaacaacatgtcgttttctgtcgtcccta

SEQ ID NO: 65318 - DNA, 790 bp, Cannabis sativa
aaaattcaacaaacaaaatagatattcacgagaaaataaatactaggagaaaaagacatcatactttgtaaattaaaaacagtgtaaaattattattaataataatgacagttatatttttgtcgaaagaaaataaacttttttatattataatttataattattttcttatagattactaaaacacatcatccattattcaaaaagaaaataaataataccattctaatatatagaccgagatttataacagcttaagaaattaaatggttgttaaaaacaaaaaggatgaatattttttatatggttcgggtattaataaactctagtgcacgagtcaatgtattggcttaagaaggcttgatgtattataaatgagtcttacaatttgaagaaccttaattcttgctatagcatttttctctttaggtttttcttagaagaagaaagcttagaaagaacctaaaagtttctcggttccccttacttgaacggatataaagaagtttttacaggcttagatttgaacctcggcatacatgtgacatgtttagggtttttgtacaatataaatttactattgtgataaatacataaaatacatgactttgaggtccattgtaaaattttgactcgtgtggcaaatgtccactattgtagtaaatacataaaaatttatttgtttgatttaattctagttttattagaggatctctcatgaaaaactaaaatagagatgtcaccttgtagggttaaattcttatatttttttagtttattaactctcaaa

SEQ ID NO: 65319 - DNA, 500 bp, Cannabis sativa
ttccgatctaaattctttattattatatatttactttgaacttaaattatatttaacattataaattataaagatacaagttcggaggggcgaggcaagagaggcttgtgggtcacgtcccttaactttctttctttcattttctttttgaattggacgttccttgattttctataaacaaaatttttatatttttatctccataaaattaatattttttatgcatattcttacatattttatttttgtctctaaaaattttatttttcattattattctacacaatttatttatttagtttttttgaaaaaaattattattattaatgaatagaatccattacaataatagagtggattggagaaagaatttctcccgaaccaacaacaattattatccaatcgaagagcaaatctagttaaaccatgagtagctctgttagcatcaagcctaacatgagaaacaacaactctagaaaagtaggatagtaaaagaaaaa

SEQ ID NO: 65320 - DNA, 608 bp, Cannabis sativa
ttccttttgtaatggaaaaaagaaaaatgaaacggcttcacatatccttttagagtgttccagagctaaatctattgtggacatactaatttagaaagtttctattcatctaataggcattgtgacatcaagaaatttatgttaagagctttgacaaatttaatcatgatcaactttctcttctttttggtatttgttggatggtatggaattaaagaaataattctgtgtttaataaacttactcgtaactttgtggatgtggaaggctttgtgcttattttttgtaggattagaggaaggctcaaaaccatggcttgcatcaaaattatgtggctcaaacctcttttagtagcggtgttcattagaattgtaacgatagctgcagattgccttctgctgggaattttaaattgagcatggatgcttccttagatgtcaagacaagaaaaatcggtataggagctgtgatcattgatagtaacagggctgttgttgcagggttatgtttttcttatgcaagaatctctactcctatttatgcagaagccacgacattgcacgttgtcttatctaggtgtgtggccgtgaattttccaatagagttgg

SEQ ID NO: 65321 - DNA, 628 bp, Cannabis sativa
  modified_base (305)..(311): a, c, t, g, unknown or other
tgacctgtaacaactgaagggctagcttttgcatcaacctgagttaaagcaaacacccttgctggagcaggttttaatgttatcttttgttcttctttcttgagttgcggacagtctctcttatactgtccaggcaacccacactgtaaacgtcctcaccctctacactcaccaagatgatgcttcttacaattgggacaatctgggtgggtatatcaagtttcagaaccaccttaacaattgcttcgaccttggatccctaggaacctcttgttctgacttgagccaccaagtgcaaatggtgnnnnnnntttttggtcagtggtcgagtcactaccacccctaccataaccaggggtaggaggagtaggggctccaccaaaaacctgagcccctcaggactcttgggtgcactcaactgtgtcctctgctcttagtgtctttcctaccatatcagcataggtggtgttgttatcagtgataatcataaggtcgtgttttatttttggattcaatccatctaggtacttttcttttttactaaattcggttgtcacaattcttgaggccaacctagccaaccgatcaaactgagttgtgtactcagtaacgctcatattctctttct

SEQ ID NO: 65322 - DNA, 3172 bp, Cannabis sativa
gattaggggtggaccatcctatggtcattaagataagaaagtattttttttcaacaaatactatttttctaagaatatgactaaatatgagaacaaagcagcaacgtagaggagatgttttcaatttcaaaagtgttttatcaattattctatataagatggtctcactacctctgttgtcttgatgaaaccgatgaagataataccattaatgttcctaggtagaaagtcacagtaccttatcgtagcaggagggttttaaagaactcaccctattatgattgggaagacacttgtgataaaaatctagtgttagttaaaatatctataatttcacttggtgaggtaagccatatcttctatctctttttttttttttgagtacattgggagtgttcttacttgagtatgctatatagattcagacattaagaatgttgagaagtaaactccacatcttgccacttcaaaaaaatgagaaaaagagacgaaaatgtatctttcaaaacaaattcataaggtatgtgcaatttttgtgttttttaatcaatattttagcaacaatctcacacatgctaatcatctattaactttgtcgggagtcaggcgttgggaaagatggtgttgccaagtttgtacttgtaaccaagtgataaacaatatgagatattcagaggacctacttagcaataggtaagttattctcatagtaatgtgtgcctgtcatgatattgtagtcttggaaagtttttgatggaaaaataaggtatacctcttatgaataatgaggtagatttgatgacaatacctatgttttcaaaattattttatggcattgtccactggccagtttttcttatagctaataaggctagtttaagaagtggcattacttcattaagctggttctttttctttaccctactttcctactcaaacaagtcttgttgttcacaaactagttttctacaacaattgttgtttagccaggtttgatgcttttagacttaacattcttttgtaagatcagtagtagttgacatgttctatatacaactaacatacttcatgttcaaaccacacagaacaatggaatcgctaagctctttataggagacagatgaggaagctccttcctttcgcagacacattgaacaacaattatttgaaaagtatgccagtaatatgttcatccaattttccttgccggtcaatacaccaatggatgagtaggcgatgaattttgtaaactatgtataggctgattttacaatcaagcatagagaaacaaataaccaacaattgtgtataataggctcgacaatgtgagaaataacaagaaaaaaatgaaatcggtgagttagttatgggtttgattatttacttattaattatctttgaatgtgttctatgaatgtgattaatttggatcttttataatgattaatatcaaatcatatatttgcttcactcttttcttagattctcattgtccgacattgttctacaggtaaaattaaaactgtctgtacaagtattttttgaactacacagattacagaaggaaattaaagaaaattaaaagacttccttgaagaaattagagaagaaggagaagtttatattatgcttatgtaatttggtgtctgttaatttttatatcatatacgtttgatttttaaggtgtttattattataataatgttctgtatgtttttttttttttgaaattgatgttctgtaagttgtttaacaattgaaattattaagagataattttatcaaattgttcacattatacgctttaaaaaggaaaaagaatccaactgcttatgtattatatatatttaatataataataaatatataaatattattattattataaaaatttaataatatttcaaagtactttttatttatttttagtgacatttttttaaatgataccaaaataattatagtaacatttacacttttactcacatcattatatcttacatttgtaggaaatgtcattaaaacagtaaatgttactaaaattaagcaataataacatttttaaatgttactaaattcaaatttttgtatagtgtgtattcttattctattcatttttcaagaaactgtcacaatattaaacacttctttaaagagcctataaagagtctttacagagtgaagttagaaacagaaataagaagtctttggcaaactataaaagtgaagaacattgatctgaaaagttggagagcatgaatatgacaaactttattttgaaaaatatttggtatttatttatagaaggttcttatactatttgattattgataaaatgctttagtgaatttgaattaatcctagtatttcttgttatatgtcttttatattaattattttggattattatattcttattaattatatatatttctagattttgtaattgtgcacgtgtaacacaaattcagtagcctaaatttggttgtaaagactggtcagttttaatttggaattagcagataattagggcttaattatgaaactagattattaattatgatttatgattttatggaagtttattagaatctagggtttattatttatgccatatataaaattttatatttttgcatgttttgtgcccgacaatattggaacgcagtgtttggccaatagaatcacattttagcatatttgtagtaacatggaaacttagttagacattgaaaatatcgagaattactcgaggtagtggaatgaccaccttgaagctttttggctttggtgaggggtaaaatatctttttagccatttgatcccttatcttttagtgagctttattagatttaataatatgaatattcattaattaagtttgatatacattagtttattttattcaacctaaaattagaaaattaagaaaaactcaacttctctctctcacttcactcccttggaaaaccagcagcaagttggcgtttcttcagctgattattggtactttagcaagcttcttagtgattcaacacaaggtaaaactctctagcctgttcctttatgttttcttaatgtcaaagttagagtgtttgcatgaattttagaattagggttatgtggttgttttagttgcttgaatttatgttctgaagttaaaattgtatta

SEQ ID NO: 65323 - DNA, 702 bp, Cannabis sativa
ttcaataccttttatatatatgcatgcatttttctttttcatctttctctcttcttctctttttttttttttttgttaattttaataataattcacgtcgttactcggttaaccctaaaaaaaaccattgtaatctacttttgaatataaacatttcaagatgtgggaaatatatattttttcgctgttttcagaaaagaaactatttagttattaatatagtaattaattactaatttataatttttttaaaatcttagttaacatttatttaagaattttgttagatgaattatattatattatacgataacaaattagttttttaaaataacaaaaaggtatataaaataattggtatataaaaatagtagcttgttatattacatgataactcattagtttcgaaaataatttttaagtttagctaaatatattttaaactataatttaccataatataacttaaaaataactaattaataattactaacatgtatacaaataaattttaatggaaatcaaaatacatctcaaattatataatataaaaattaaattttttatatagaagtaactaattgattttttatcaacactattagtaattaaaaaatatttttaaaaaagcaagaaaatatatataaaaaaaaaatagaaaacgtcaaaaacacgttgaaaaaaattaaaaaacatcaaatt

SEQ ID NO: 65324 - DNA, 845 bp, Cannabis sativa
aaagggtgtgaaaaatcattgggtgtgtgatagacttcaagcagtccttctcttccaggaaggagggttgaagacgtatcaaaccccagtgatctttcacgcacaaaaaaattacatgcttgcaagaataatgttgaaatttaggctacaaatttaaactttcgtgaaggaaggctaaactcgcactaaaattcaagctatgattttggtttaaaagaccaaagggtgtgaaacatcactgggcatgtgacagaatttaagtagtccttctcttgcaggaaggaaggttgaagacgtatagaacctccagtgatctttcaggcacagaaaaactatgtgctcgtgagaatctgcttgaattttatgtggcggaatttttcttccttgaagaaaggttgaagttgcactagaattcaaactatgatttagcattagaagaccaaagggtgtgaaacatcgctgggtgtgtgccagactttaagtagtccttctcttccaggaaggagggttgaggacgtatcgaaccttcagtgatatttcacgcatggaaaaactatgtgctcgacctatccacgctcctagaagcctcagagaatgtgttcaattagtgcggatccacctaggtcctatgaatccgagacttcccaaaaatcagcttcggaatatcgaggacagcttaatcctcgaggggatctcagggcaccccgtagtctgagaactggcatgcttttgggagtaacccccaacttaatacacgagacaagaactcaggcctcttgcactataactgttactcaagtagtgattccttaactagtttataatgtcttgagttgattttttcg

SEQ ID NO: 65325 - DNA, 1061 bp, Cannabis sativa
  modified_base (682)..(684): a, c, t, g, unknown or other
  modified_base (840)..(842): a, c, t, g, unknown or other
taagattgtggtttcaagattcaagggagtcgatccaagaagatggggaatgcaaagtttgatcttgagaagtttacaggaaagattgatttcagtttatggcgagtcaagatgcgtgccttactggttcaacaaggcttgcaagttgcattgttgggggaatcaaaaatgcctaatactctgcctgagaaggaaaggatagagatactcgaaaaggcacacagtgccattattctcaacttgggagatcgagtacttagggaggtttcgaaggagacaacaactgctggaatttggctcaagctagagaatttatacatggtaaaatctctggccaatcaattgttcttgaagcaaaagttgtatgcttttaagatgatttcaggcaagactgttgaagatcatttagatgatttcaacaagataatttttgatctagagaacatagggatcaagatagaggatgaggataaggcaataattgttctgaattctttgcctacagagtgctatgagcactttgtagacaacatgttatatatatggtagggagtctttgacattagaagaggttcaaagtgcattaatgtccaaagaaatgaaaagaaagtcagaacaaccagaagagaatgctagggatggattgctagtttgaggaaagtttccaaagaaagaaaacaannntcagaacaggtcaagcaagggaaatgagaatactaagtttaaaagaaagtgttttgtgtgcaacaaaaccacacatctgaggaaggactgtccaattcttaaaggttatatcaaaataaggaaggaaatgcagatgttgtttcagactgtgatgannntgatggttatgagagtgcaagtgttcttgcaatctctagatctaaatttgaggatatctggatcattgattcaggatgttcttttcacatttgtccagacaagagtaatttttctgagtacaaagaaatcaaccatggatctgtaaggcttggagataacagatcatgcaagattgtgggaattgggacagtaaaattgcagctagatgaagggggtag

SEQ ID NO: 65326 - DNA, 699 bp, Cannabis sativa
cctggtaaaatattcccaacacagggttacctctctctgtaccctcttggtgagggggtgaaggtagtcaccacaaataaaggtcaagatgctggctctcccctagataattcatgtgcctggacaaaataccacattgaggctggggcgacctaaccactacatgattactttcgagatgtggcgaaatactttgacgtttccccggtccaaattgctcctcatgggtacctaaccttatctgcttcgttcataatatatcaccagaagggatggggaaggccttctcctcacaaaattcattacctcatttccttctggacttgcccatctatgaaccattcagaatacttttacttcataaccgagaacgggttcaaccgtttgtttctggtattagtagcacacctcgcggagacaagcatcggtcatcctacttttttacgacccctatggacactacccaacatgctttcaaccatacgggtacatatctcagactagtcccaactgaggagatgatacaacatgcggtagctttgacagccatgccagcagctgagaaacatgccccaacaattgtaactgtgaagatgctcaagttggtagatgctaccgctggtcatgaacttatgtctttcatggatgcgtattctggatataaccaaatacccatgaacgtggcagaccaggagcaca

SEQ ID NO: 65327 - DNA, 998 bp, Cannabis sativa
  modified_base (699)..(717): a, c, t, g, unknown or other
tagaaaagattacattgaaatagagtttaatttagggaacaaagcccaacatccatgacagaacttcaccaacaaacataagcacgtaaccaaatattgatttatgtgaatcagtataaccaatgaaatctaaatttgagtatccaactacttctaaattttcagttcgtttgaatataggtttgtaatccttagtaccatgaaggtaccttataccttttttcagctttccagtggtctatccccattttactctgaaatcttcctaacacttcgaaagaataagcaatgtcgggccttttgcacacttgagcatacattaagcttccaacatcataagcataaggaatgttcttcatttcttctctttcaaaattattctttgagcactggctcaaattcaatttatcacccttaacaatgggagcaatgctctgtgaataatctttcatctaaaacctttataagactttattgaagtaggcttcttgagataaactaaagatacctcaatatctatcactatgagtcttaatgtctatgacataggatgcttcacccatgtctttcagttctttgaaagaaattatttcagtgcacgcagtaaccccttgtcattggatgcaagaatattatccacatagaaaacaagaatgctatcttactcccactgaccttcaggtatatgcattgatccannnnnnnnnnnnnnnnnnnaaaggaagagatgacatcatgaaattttagataccattggtgagattcttattttaatccatagatagacttcttaagcttgcataccaaatactcagcttcactagaggagaatccttctatttgtttcatgtatatctcctcctccagatcaccattcaagaaagcagttttcacatctgttaggaatattttaccaagatctagatttactaacaagtattgggcttattcaatgaataccaattatttaatttaaggttaaatttctctcctttggg

SEQ ID NO: 65328 - DNA, 821 bp, Cannabis sativa
tattcctaaaacaaaaacaaaaccttaaatcagttctctctatctcgcctctctatctccctcttctcaatcggagctgttgctcctctacgtcggtgaccagttgttgctcctctgctcctcttctcgacgaccaatgacatgcttgtctctctccttcctcagtcctcaaagccccaagatatctcctttgtttggcgttgcacatgccgaatgctaactccgacgaacccacaatacatgcctctctttctctctttagtttcagtgtgtctctaaaaaccccaccatgtttctcggggaagaacaccagagctgatgacaatggtggagaataagatcaatatgggtggcgttgttggaaaagaactggtatagatctctctctctttctctctcatatatttgtatgttatgttcggctggtgtggatgtaagattagttctttatcaaatctatcattgtatattttttttaattctttttgtcttcaatgtctaaggattgagctgttggagcttgttctctgtttgtttctgagtttttattgaaatattgttattatttttaaatttagcttctaaatctcatctgttaaattcgaatatgagattaatttggggttttatgtttttcgttttttttttttgagtaattatataaatatgtgtatatataaattgattcttgaatgtgggctgttcttgtagccctccattcaacaggtttacagtcagatgctttccctacctaatctgaagatgaagatgtattgggcaagaccaagttgaagatggtgtcaattgaattttttgtttct

SEQ ID NO: 65329 - DNA, 786 bp, Cannabis sativa
cttctgacccacataatttgagtaaaaatgtcttcattttgcaattttactcactgtaaatgtcggcgatacagctggttcaaaagacttcagcttctcaaatagccgataaacaaatgcaaaacctagaaattgcaaaggcttatactcggcattgcgcttgatgaaaatccaaagcatctgcgcaaaggtaagaaaaagattaggatgcaaaaattgtgattgatacaagccataatctaatggttaatgtacttgtagatgtaacttgtaagaaaggctggaatagtcagtcatccaacaatatagatcctttagaaacagtcataagtgtcaattacttctgaaaaaggtaaaatgctcaactttaagctttctagagtgtattggaacatgtgtctttgtctaaaacgtaagaactagatacaatgtggtccaatatttataatccttactatctgccaacagtaatcactaaaacaaatacagatgcagagaacaaatcactctctaaatcaccactacttacaaagaaggcagatattgcaaggttgatgcgtatatcttgcacagaagacttggtgaatctggaaagaaatcattatacaattagaatgtataagaaaattagtcttacacaaaaatgtttaaacgctatgccagacgtgggagatttaaaaagcttgaggtctaacatttaaagatccacgagttgttaacatagcatacgaaaagccaatacagatttagaaataagttcactagtatattcacaacgattgtgca

SEQ ID NO: 65330 - DNA, 1949 bp, Cannabis sativa
  modified_base (1869)..(1871): a, c, t, g, unknown or other
tttttttttttttcaattttacttaataatagataaggttggaaactaaggttttcaatgaataattgaatttttgttataatgttggaattgtgatttttgttgtttgatttgacaaagcaaatattggatttgtaaaattgggtttggtgagtatatgctatattttatttaacttaatgttaaaatttggttaatttactgtgataatgagaaaaacatagtttaaattaaatttgaaatcaactacatgtatattaaaaacaaattatatatttatatatttattttaatatatataataaaaacataaaatgaaaacctttaattagattaattcggtttaattaagtaggttggatttattttcaattaagtgggttatatttcgtcggatatttttggtttggtttgaatgaattatttagcttattaatataattagagcaatgatatatgtagatatgtaaaggtattgttttctaaaacactttatcacaacttagaagtgattaggaaaaataaaaactttgatgtgttatttaataagataattgttaaaaaaatattgttggtgcctaataatattttttttaacggtgtaattaaatttcaggtttaaaaaaataaattttagaatattgctaactaatcgtgaggcgaataatataaatgttaaatatgcaacttgagaagtgatttgaatgcacatgtacacatttaagtgtttttgcttctattgtcccaaacaaccctaaatccaactacttaatttaatattaaatgctctttttttttttaaagaaaaactacttaatttaatattaatgtcttaatttaatattaatgggctttctttggtcagtgtcaaaaactcaaatatagatattgattctgacctccaccgtccatttcagacattagctgtactttttattattattattattattttattttgttataaataaataaataaataaataaattttatgtttatttttaaatgtttttcaataaaataaataataataattattattttggtggtggccttctatgtatgtagtattaaactagtctattttctttgttgctggatctttgtgggaactagggaccatttatttaatatcatatatttgttttatttatttatttatttctttattataatagtaaaagagaaatcatttgagacttgattacacccttttattttaatttttttttatttatttattccattttagtcattaagaaaatgacttgtctataagtgtttaaagtgtgtgtgtgtgtttgtgttattttttggcttaatctccatcaaaatttgtcacctttagataaatgggatgagtatgacctcatacttacatagttattggtttttatttattattattattattattattttaaatttggaaaataaatttcattgaagaaaccgagtagtcattgggttttgttatttgggttaacttagataaaattggaaaaaaatatttactagtacttctacaatgcattttaaaaaaggtgcatgacatttgaaaggatttttagtatattttttatggtagtttacgttgtaattatttaagatattctgtaaaattttgagagattcaaaaaaatttaacacgctaaaaaatagaatcatatgtgtaacaattataaatattattagtgttttgccacaaatatcccatatataacatagaaaaatttacataacaaaaaatttgaaaaaaaactacaaaaatatatcaacactcattaaattttattttctatttttaaactttcttatttacaaaaatacttctttagtaaaattatttttttgattattttatagtnnntttatagttatattataattatcatgatattgtttttttttttggttgtttttagttaaaggaatattggcggctaaa

SEQ ID NO: 65331 - DNA, 705 bp, Cannabis sativa
gagagagagagagagagaaccatgtatggtgacaaagaatacttgttttagagagggaaactcatggagctatgaagaactaaagggtaaaaaaccaagggaagcaagatcgggctttaaggtgtttcaaggggtttaagcttcaggattaaagctaaaacaaggggatgtaattcatcattgtgttctaagatttgtacaattaaacagtttgtaatcttgccatttatgtcataataaagactaatcctaagggagtacaaaaggggactaggctcttcaccttggtgaaggaagttcgaacctctataatcttgttgtgttcttaatattctgtcatttttttttctacaatttagttggttaatttttgtttttggttattgtttgattgcttgctgaggttgttgtctaaatcaacaaatggtatcagagctaggattcaagtgaaggatcagctaagcaataatcaagaaacctacaagatttaacagagaatagaaggtgcttgatcactattctgaatcataagcaagaagttcaagatttaaattaaaagttatcaagaaagatgttacaacaaagatggacattgagaagttcaatggcaagaatgacttctatctatggagggaaaagataaaagctcatcttggaaacatggggttggatgaagctctcaagggagaagacaaaatgtctgaa

SEQ ID NO: 65332 - DNA, 969 bp, Cannabis sativa
  modified_base (247)..(247): a, c, t, g, unknown or other
tgggagctcacgttcatgaattctgtcattaatgtagttccttaaatggcctccacgaggccttactttctcacccttcgccttttcctgttttgcattccagcaatccttgaggtccattgttgacatgcatcttccgggtccaaattctccataggaatgctatggttaacagaatttttagggtggtttatccatcttcaaacgttaggctcttgtacctgagtacatggtccatcgtttcgcntgactttgccccacaaattgatcgatcggcctagccttgggacttgagcattcttttctatccactggggttggtcagttgctctcatgttgtcccttggaacattacgtgtgggttttcttggagggtcgcccactaccccttttcctttatcatttgttggaccgtatggtctaactccaaggtgattaaactttttagcagggggttttctttagggaggttagcttttttcttgcaaatgtgcaagaacttcttgcatttatcttgaaacctcttcttggtctgataacctcttctaggtgtctgcaagctattttgtggtcgcactacttcagggtcttattcataatactctccatattccttgttataatttttgtcatagtcatctttgggatccccatcttggccttcttgttcatcctcatcgatggaatcatcattgatgtattcttcttgattgtggcctttacagactgggtgactctccagttccgacagttctccatctctttctatgcccgcccgagcgttcattggagggggtgggttcatgtcgtccatggtggcattatctccaccatcacgaacaggcagtctacttaccatgtttcgagttgccgccattgttgtaaaggaaaactatggtaaaaatctctttgagctctgaattaaagtaccaaaatatgtactgagatttttagaaactgattaataaa

SEQ ID NO: 65333 - DNA, 712 bp, Cannabis sativa
ttttcttaggacaatgaagaatcagtcttttatcccccccccccaaacttcgatctctccccccttttgtgctttttcaggggtatttataggctaactctcttgcatgtgctgccgtcgttagatcattatgggcaaaaatagaccattggattggtaggtggcatattccccatatggaatttaatggtgtcagattgtaaaatgggcctcatacgcgtgtcatcccagggtatctcctttttgaatttctcttatccctaactgttggatcatttggtcgagtacacaaggacacacatgttctttacgatagtgtgtcatgggaggcaacctctgatgtcgtacttggaaaagcttgatcaccaggtccatagcttgacacgcatgggtgaggcttctgcgggctaaaggcatagcttggtttagcgtatctcagaatgccttggcccttttggacaatccacatttcttgtgagagtagagggcttcagcttctagaacaaagggagactttagctcgctgataccctttgtgtggctcgcagttagggaactcccctttacaaaaactcttcccacaaagttgatgtctttatattcccagagcatcaatggaggaaatcggtcagctagtgactccttaacgtttcttgattaaaatccatatatcattattgcaaaaatgtggataacatttaccccccaagct

SEQ ID NO: 65334 - DNA, 1265 bp, Cannabis sativa
atagaaaaattaagcataaaaactcaaaattttctaattttacccattcataggtagtacccattaagattacacccatacatatatatgcacatatttgtacatacacatatacatatataaaaatattcacacatatacatttatatatatatatatacataataaatacacatatttatatacttaaatacatatatatacacatacacatatataaataggtttaaaataaaaattagagtttaatttatatatacatatttatacacatatatacctaaaattatacctacatttaaataaaaatacaattaaataattataaaagttaaaaattaaaaatacttcttgagatgggcctgcggtggcaccgacggtggtggtgcggaggtactgatgggggggagaagagaagggaagatggtggtgatggtgcggtggtcatgcgtaatgcccgtatttaaaacttactaaacccaaaagataactttataattatatgggtcgggatcccgaattaacaaaacacagtttaaaagtatttttaataatacattatctactaataatatattttttttacaaacagcaagcaactaaattacatttccaaaatattgaaagaccgagaccctccaggttgcactgccgcgatatgtacaatcactgccaagctccatctcactattcctctagcttagctttacccttacctacacaaggtagcaaactgatgagtcaacagactcagcaagataagcaagacacatataagtaaaccatgcaatattggcttattgtttaagccgccctaagctcaataattgggctcaccaaatggataagaacgttcttaatggaagtacgacctctgtaccaaatgcaccaaagtaccaactccgtactcgtgttggtagagccattaatgtactcccgagaaatactaagtgttgtatcacatgcacgacgtatcccttggtactcgtgttgataacaccgtaaccatactgatatcctacactatcctaacactctttaaaacacatacgtaatagtgttagtagtgtaaacatccaaacaagcattcattcacatatatgtaatattcatgctatcttatcttgctccaagctcaggtgtgccggtcagcctgagtggaatacagctcgacgctttacaaggccctaaaccataacattcaaaacttaatgagagacgctctaaaacacttatcggtgatttaagatcaaaactaagaataa

SEQ ID NO: 65335 - DNA, 681 bp, Cannabis sativa
tttccacaagctctctaataaagtgatgacatatgtctatgtgctttgtgcgtgagtgtttaacaggattttttgaaatgtttatagcactagcattatcactgaaaatagctaaagttttcaaatcaaacccataatctgccatcatttgtttcatccataatgattgggtacaacaactacacgtagcattgtactcaacctctgcagtggacagagagattgagttttgctttgtactgtgccatgaaataagattgtttccaagatagaaacatccaccactgctggtttttctatcatctgcattacctgcccaatcagcatcactaaaacaaataagattagacttagtgtctttagaaaatcaaatcccaaaatcaatagtgctatttataaatccaatgattcttttcacagtagaaatatgaggtttccctgatatcgtgcataaacaccaacactttagtaaatgtcaggatgactagcagtgagataaagcaaactgcctatcatatttcgatacaaagtttgatctacctttacttcttgttcatctttggttaatttcaatgttgtgctcatgggagtatttgtatgtttggcattcttaagaccaaactttttcgccaagttctttgcatacctgctttgagagacaaacgttccctcatctgattg

SEQ ID NO: 65336 - DNA, 1031 bp, Cannabis sativa
actttttcctgcttctgtaattacatacaattaaacccattaaccttttgcttctcaagctattcttccttctttcttcagctttctttaaacgaataaattaaatcaaataacacattcaaacaaaacaaaaattacaaaaaataaagaaaaaattactatttatggtcggacgaaaatagatcaatcagcatttcctttgcctccaaacttcaaataccgttaccaaaatatatatatatatatatctcaccaaattctaacagaattattggtaagaaaacattaagatgggagaaatggtcttaatctcacctgtgtctcaataattccctgaaccacgcactccattcaaattatgctttttgttaggttcgttctctgtttcctgccaaacgaaaacctttgaaacaaaagttttctacaattcctctaaagatagcgtataagaaataagaggctgcgttggcctgtaagtgtccacaaatgtagaagagaagagaagacaacaatggccagggagaatgtagtctgtacagaagcaggtgaaggtgaactggggaagaagccagaaatgggctttctgccgctgggtcggacctgctattttccggcccaaaccaatattctgacccttttcttcccgggcattttagaaaaatacaacgcattttttatctaaacaacagttttcttaaaatgttacttttcaattttgagaagcttccatttaatactgctgacagattttgccgtatacatttaacgatttttttttcttttttctttttttttttttttgaaatctttaacgatagtgtttgttctttgtgtagttttgaacccgaaaccactttccatatcatggccggctgctcttttaccaaagcttgtgtggagcgcggattgggtctggtttttaataatgaggaggaggattttggtgcctggtttgaagatttctgtaattctcatttgactgagaatattgagaagttggcaatgattctttggagtgtttggggggcccg

SEQ ID NO: 65337 - DNA, 814 bp, Cannabis sativa
cgagcttcgatccaggaacttgtcccccggcttttctcccatgtaaaacgatagcctgtgagttccatatcattgagtccacactcattaagacaattttggaagccttcgatcaaccaccttgggtacgggtgtcctccttgcttatcctcctgagttaaaacgttgttgagatcacctatgacacaccaagggagtgaagagtcgttggtgatcgtgcgaagaagatcccaggtcttgtgtctgttattcctattcgggtccccataaatcccagtgagtctccatgtttccataccctctcctttgacacacatatcaatatggtttgtagaaaagcccaacaaagttccatcttctttttctttccataaaaaagctaacccaccactaaaaccttgggcctccacaacaaaaatcccttcaaagcccaattgccttccaatccattccattctcaacttattacatttagtttcacagagaaaaacaaatttgggtttcttttgagaaatagtctctttaaggaattgaaaagcccgttggttcccaagcccacggcaattccagctcaaaacattcataatgcccggcgggcctgggaaccagaacccgccccaatgaagtttttttgattaaccccatcattaaagcccatgtttacatcttcatactcaaccccactaacgtcctggaccattttatcatatggcccaaccaactcatcaacctcttccccattataatcactttccattattgtttttcttctttttaaatcaatcacctgaatactaggcacggcatcattatc

SEQ ID NO: 65338 - DNA, 809 bp, Cannabis sativa
aataagctgttttttaactgcttaccaaacacctttttgtcacagcttttttgaaaagcagcttttagcttttccaaaagctgtgccaaacggaccctaaaaaattaccaaaaaactctaaaaaccttaccctttatttcgctaccaaaggtaataaattaatgtatatatatgtaataaattattaattaataatataataatgataaaaaaataaagaaaattataataataaaggtaaataagaaattaccaaaaaaaaaacgctaaaaagcttcatgtaaatcgtcaccacgctcgtcaatggaacaaaggagctcctccaccatctttttaccagaatcgataaaccgaaggctttgaatcctcagtcaccaaagcaatttgaattattacccaaacagtaggagtctcaaaaaataagagtcaaattataaattcaaatatattacgtgttgcatatgatttcaaatttaccaaaaaaatgaaacactattacagccaaaaagtaaggccttgttcaccgtgccttattttcctgaagagacttgtttttcaccatgtttagtatatatttgtaatcagaaaattaaaactggaaaatgaaaaaaataagaaaagtactattcatccatttttctctggctgaaaattaaaagatgttctctgccacgactacattctattccaaggtgacgccaccgagttttggctggagaataactgactcgtctttttcgatacaccggccgatactccatagaaattaattttatttatatctgtatatgtttcaaaattccatacac

SEQ ID NO: 65339 - DNA, 1045 bp, Cannabis sativa
gtggagccccatcaacagggggagtttgtcctagttatggaaaagtccctgacttggatgatgacgcgcctctgtctcggataacccaaaatttggagaggggagatagggccctccgctggctcttgctccacgggggctcagttgctgacggttcagttcgaatcatgcctgaagatatgtcttgcattgaatatttgcggcatggttcagactttgctactttcattttgcagatatgtcttccaggttgagaggtcttgcaaggggaccttctcatgccttcgggttgtctgagggccaaggttcctcggaccactcatggtagagataccactggatcatctcttcctcctcctcctcctccaaggcctgcaccagctgggcagcccatgatcgatgatccttcggctaggagggaacggccttcaggaaggggcaccccaaagcctcgttggggagttggctcagcctcgatgtaaagagccatggaggagactcgcaggcgcctagagagagcccttcgttcaatggatgatgatgagcttcaggagctcggtgacagtgagccagacaggctccactctactaacttttgggatttatctgtggtgagctacacacttaactttcctcattttttggtatttttttaggtggggcagacacagtgatgttggatggggttggcaagcaaacagtgtgtctttgagggatttggccgaccataacaaccttgtagaaaggctggtcagtcagtgttgtattttgacactaattttgaccttgttttgctactaagctttgatgatactaagcatttcacgtgacaactctcggggatcctcacgcgctctttgggagcaggtgaagaccttggaggctgccttcctagcaaaggatcagactatatctgagatggaggctcttagtttaaagaacttgtaatatctcgaaaaataatagagtatttaattgggcatattttattaaatatgcaattgttttggtaatgaagtaagattatgatcttacttaggataat

SEQ ID NO: 65340 - DNA, 640 bp, Cannabis sativa
tttatcaagtaaattccaagttaaatgcctttgtgaagaaataggagaaccgtaataagcagtaaaatgaaacatatccttctcattaaagcaaatattacaatctatatgattacatgaaaaggtaaggatattaacaaaaacagagtccttccacaaaagcataagtcccccaccaaaatatttcctagggacttcaaaaccatgggcaaaacccagcccaactgtaaacttatccacagcacccaaagacatacgggtttcaatcaaaaaaaggatatcaggactatgattttttacaagaagggagaggcgacggaatgcacgagtactccccaaccctcgtgcatttcaacatataacactcatttttctgggcgggtgtgcaaagcatcacccgcctgttcaagatcattagaagcagatgaagcaccctcctccctctcaccagcacgagctctcttcagctgagtcctaacagaaccaccaacaacagcctgttgggaaacaagcgatggtcgcttaaccccagaagcagaggcaagtcccttgccacgaaccatctgatcaggctgactaggagcagaagatactcccataacctccatagctccacaagaaatattaccagaatctccct

SEQ ID NO: 65341 - DNA, 537 bp, Cannabis sativa
ataaaaaaatataaatcgtgttgtattaatattttaaaaagtaagtcagcacggtctgtaagttcatattttagtaccatgcttcatgaacttgtatcgtgctttattcggaccggtctattttttataaatgggtcaacttattttcttatacgggtcgaatttgaactaatgtatttgtggttaagtgttagtgctataataataaataataaaaataaaataattgaaaaagtgaaagcgaaaaccaatatgggttaaatattgtgtccaaagatgattcacatggagagagatttgatctgatcttattattttttcggtcaaagggtagggttgaccatatatccaactgatagttgacacgtggagaaatatgattggagaactgcattcatatttgactggagaatcataatcttaaagatgccgacatggcagtccgacaaatttaaatgtttgactcatgtatatatttattttttaaaaatttcactaaatatttttactaatcatttatagtgtcctacacttttt

SEQ ID NO: 65342 - DNA, 1371 bp, Cannabis sativa
  modified_base (163)..(176): a, c, t, g, unknown or other
  modified_base (228)..(238): a, c, t, g, unknown or other
  modified_base (1181)..(1191): a, c, t, g, unknown or other
  modified_base (1320)..(1320): a, c, t, g, unknown or other
catagtgtgtaaagctgtgaagaacccagtttcaagagaaggagattcagactcagatcttggtgatactccgctacagacaggatacaagggttagagatctgaggggaaagagccatttatattctgttgcacccattgtaaggtttctgaaactttatannnnnnnnnnnnnnttgttttagagattcatatttaggatattaaataacatacatggtagtaaannnnnnnnnnngtaaaacatattccaacaactggtctcaaagccatgttaatgatttactttcatgaaatatggatttaaaacaatgattgtgttgatttggatggtttcagtatggtttatgtgcttatttgatgattgtatggaaatcgcaatgtatgttgtaaagtattttttatttggttttgaaatatttttactggaaagtagacaaaaaattaatgaatttaggcttttagaaaactcaatttgaatttttagtgaattagttatgatttttggaaacttggacatgggatgtctgaagccgtgtcacgctgagctccctcgaccaaacaggctgcttagtgtctcgttcagtccctcccatccgcacgcgcaggggtatgcatgcctacccctgtgcagcaatcttgttttcttcatattttttgattcaaaaatcgtttttcattgaaaaaaaaattcaaattttttaagaattttgtgtggaatcgaaattttcaattcaaaatctaattatcagaataaaattattttttattaattttttttaattaattaaaattagttttagatattagtcggctttgaattttgaaaatttattgttttacaaaaaatagccttatgcttaattttgaaattttgattattttaattcattttaattataagatgagatgttactttattttattattaaaatttgaataatcttattttgacattaattttttttaaaataatttaatttgaatttcaaaatttgctaaccatatcacattttctaaatttgttatttttggaaatatattttattaaatgaaaattataagatttgaaaaatgtaaaaactagttttaacattttatcttattagatatttttttaattaaaattagttttggcaaaaataacatgaaatttaaaaaattggttagtttaggtttgnnnnnnnnnnntagggtttctaaccataaaattttcaatctgaagacatttttattttattttttaataaaattgataatatcctaaccatagaaatattttttcaaattatttatttttgtaatatttaatttattaanttataagattaagaatataatattaggtatatctaaattttaaaattcaag

SEQ ID NO: 65343 - DNA, 787 bp, Cannabis sativa
tcccatttgaactaggtgtattattgtaagacatcttaaagtacctaatactatataagacagtttttttatatctatcgccgactgacacatatatttagtgcgaaaacatattagaaataaactaattaagagaaataaattcattacattattattacctgaagacatgtttaagatcatcttggtatattgattggacaatgttgaaatctagtttagctaaggtaagtagagtagggttcatgtctagtctcttctcatacacatcaataaaccacctactctccaatcttaacattctccaatgaagtggaagctccaatgcatggctcactagttcataaacataatcataatcataatcattattattattattattttgatctaataatgattgttgtttttccatgatcatgattatgtattcctcaagatatttctttgttgtttgtcttgtctcttccaaaatgccatcttcattttctaccaaatagaatgaagcttcacatatataaagataacattcctttgatattattggtagacaccataaaattgcctctttcatctttgcacgtactaaaaatttctgcaatgaatatagtaattccaaacatttttaagtaattattaatttatcatatagtactagagaaacaataatgttagtatgaattagtaggggtgtacatcaaaccgctcaaaccgctcaaaccgcccgcaccgcaccacaccgcaaaaaaaatgcggtttgaaattcttcgcggtgcggttgcggttt

SEQ ID NO: 65344 - DNA, 1490 bp, Cannabis sativa
agcgcatttacacgttgggaaaagtcatttttgccagtactttttattttgtgcttacaaaagttttaataccaatattgatttgctaacccccttttgccaatacatcacaagtaaattctattttaccagcgcaatactaatttttgtcagtacaaaaatatgctggcaaaagtgacatttcttgtaatgtattaaagacataatatatagaactcatttggtttgttttaggttattgaattaggttatatatatatattatatttttatatcataatattgtaaattttaataggctttttttatttacatactaaaaagaaaataatattaccaaaatataatgaattgactcattaaatatttatacaactcacaaataaaaaattataattatacttcttttgttaaacattcagccgcacaaatcaaaaaacacacctacgaaagctttgaccaatcaacaaagaatgcaactgaaacgaaacccaaaaaggtgaaaatctgtcattaattttggtgacttaacctgagaagaagaacggaatcaatccaaacaaatactgtttcaaattgaggaaagaaagataaaaaaaaatggtttgaaattaaaattcaaccatgaattctggttaaatttacaaagaactaatcctcctaatatcactttttagattcagaaaatttagatctcatacaaatagatttggagctcccaaacaatctaaatcaggtatataatccacaaaagtaaaaaaatatatatatatcaatactatagctaatgtttatcccgttacatttatgttgttttttaaatttctaatggaggatttattaatatcaaattcatcaaaaagtttagtaattcttatgaataaaaggtcacatcgaaatataattatgaatttttatgttacattataattgcattaaggttttgctaacactctgaaacttgacataacaatgataacaactgataacaaaataatgatcgatgtttatcaaatttgtaggtgttttatattgtcagtgcaagacaaatctctttgaagaaaattctattacatggttagttatatgagtatattcaattagttgatatttaagttggtttacaaatgtctaagagttctttctcgaaatattgctattaatgtttaattgatagtttttgaacgataacaataaaacatacacaaagtttcttaaaaatgctaatttataaatctgtagttgcattacagttgaataatagttgagcaataaaaataacactgtgtaataaatacaggattcaaaattgacaatacacttgaacagagaaaagtcgatagtaataagtttttttttttttttttctattgcatacaaatttttattatttctcttatgataaatggctcacaacatatataacagttgtattataactttattacaattttcaataagatgatttacaaaaattatacttttgtaat

SEQ ID NO: 65345 - DNA, 765 bp, Cannabis sativa
taaactgaagaacgaaagaaatgaaattctcttttctcctttttgcgacactctcctcctttaatgtactttctttgattttcaacttgaaacctagtatttcaaactctggtagtagcgcgatagtaaatcataaaggaaaaaattaaggtaaggattggtttcgttttaagttgaaaacgattagtttcatatagtgactttgtgatttagactagttatagagattctgatttcatagaattgttcttgggtagatgtaggactagttttgatgtttatttgttgaatttgaggtgattttgagttagaaatcgagtttggaactttttaaagcttaagtttgagctttaatggtgttttccgtttcagggctcgcttttaatttcaattacattaggattgtagtatctatggtatgtatgtctcctgtgaagttttgaatgatttggataggtttcaggggtgtctgggtgaatgcaaaatttgggattttcgtgttagactgtttttagatattccttagagatcagaaatcatatttttgtcataactttcactcgagtgtcagttttggacgttcgtgttggaatatgttttactaggatctagatttactaccatgtatgttgtttaacatcttaaatatgaattcctaaaacaatgtaaataaacacataaagtttgagaaaccttacattgggtacagcgtaattataatggatcattccgctcagatctctaactcttgtatcctgtctgtag

SEQ ID NO: 65346 - DNA, 668 bp, Cannabis sativa
ttcatgcaacaaagaagaaaaaaaagctactgtcagtatcaatctcagagagaaaaacagagagaaaagagaggaataaaaaatcctacaattataatattattagagtaattaaatatcagattacatataatttaatttagaatatgtttagaaagttacagtgtaattgaatttgtgtataactaaaggtaattacacaatttaatattgtctcaccatgtaattatactataactgtgtaattaaaggtaattaaagggttacaattacactgtaaagaccgcttagctttaatttggaaattaacagataattagggcttaattatgaaaattatttattaatgatgatttatttgaattcagaatgcattttgtatgtcatgtatagaaatttcataattttgcatgttttgtgtccggcaatattggaacgcggtgtttggctattagaattgcatcctagcatttttagtatagcggggcaatatagttagacattgagaatttcgagattagtcaggattttagaatttctcagagtacccctaagagaccttttatgatttttagtgtaagaggggcaaaatggtcattttgccaagttatgttttgtcttttgtgagatgagtgagagttttaaatctgatttttgtgttaatgggc

SEQ ID NO: 65347 - DNA, 778 bp, Cannabis sativa
agcttccaagatgtcattttaaggttcttgaacttgagaacgatgtctcttatcttatttttgaccattttggagagaatgcttagagtagaatttgcatttgagtgattgaaactagcacaccaggttgattgtcaacctgggcgctgggcttagcttcgatggccctagaactcttgttttctccccaattttacttgtatcttctttatttttgatgatggaaaaaacacatggaataattttttggaaaattgattggaaatagcctaggttgaaaattttattcgtgtattcggcaagggacacgtggattcaaagtagaagcttaaggccaattattgggcccaaataatgtaagttaggccaagccaaagatctattctgccttctggaagaaaatcaatacgattcgcgtaggcaaggtttcacaagactagtcagcatgtggaagagtcatgacttcgtgtagctagaagaaacttttagcatgtacctagaagccagttatagtttcttgttttctatttcgtacagtataaggaattagtttccttaaatctcaaaaactatacaactagtgtttaagtaattaatatatcattaattacccacaataataggacacggtgtgaacatatttgatcgtgattaattatccacatcagcatacacgtaatgcctcataggctgggcttcactagataagtccaaacttatatattatttgtaaattcactattagagggaaaatgtaactaagtatgacctctattac

SEQ ID NO: 65348 - DNA, 1154 bp, Cannabis sativa
aatttttctatgatttattaccctttttacgattcttattgataaatattgctacttgtgctgttttggtttttgggattatcaattagcaattttgacaattgaatattcctagcatgtgcaaattgagacaagtttaatttttttatgaactgaatttcttgttctgaactgggtatgagccaaaatttgatcttttgtttgttttgatatttgtggttatctattatcgaaacttggaagcaattttaacaaatgaatatttctattgtgttctgaactgggtatgaaccgaaatttgattagttgtttgactattacggttatcaattattaaaattggaaagtaattgtaacaaatgaatatttatggcataatcagattgagacaagtttagcttttttatgaactaaatatcattttctaaacagggtatgaaccaaaaatcgattagttatttgaattttcatttgttgcatttgtttagtgttaagattttggttttgtgaactttgacaggccacatttgagtgtctcttgaagacctatggtttcttgacacctgagttctggagagaaactcgtttcacgaagtctccattccaagagcacacagaccttttggccaagccaactggtaaaattctccacctggaggcacctgagagagttgaggcataagcaactccagttttaaatgatgtttcttttagtaggacttctgttttatttttcttggtatgaaagaacataaatttatttttggggtcagttttacattaagattttgaaggaagttttcataagttttgagtatggatttatattgcaaatgttatgccatgagtcttttggatcatcataatgatttattttacttctatatgtatgttttttttttttttgaatttatttgggttatggattattatatcaagaatgaactcaccaatctattttgtaccataagatgaaaattctacttcattgtgaagcctaaactgcaatagtgagtaaacatgaagttgtgatcatcaattttataaatagaaaatattctaagttacttttatatagaaaagcaaattggaaaatggggaccaagacatagcacattttcattctacttcattgttggcatgagaatgttatg

SEQ ID NO: 65349 - DNA, 1620 bp, Cannabis sativa
aaaataaaacttagtaataatttggcctaaaggtatcatgactaaactgattacattttctttatatattcgtcctacaaattagtttaaagttgaatatattaaaaaaaacatattagatactatttaaaaaatacaaacctaatttgttattaaaccaaagagaatctgatcctaatttttataaaatataagtctaaaataatattgggatttttacatttcacaatctatttttgatctaattatcaaaaataacttaattatgttttactaatatttgtttgatatgtttcaataccttttatatatatgcacgcatttctctttttcatctttctctcttcttctctttttttttttggtttattttaataataattcacgtcgttactcggttaactctaaaaaaaatattgtaatctactcttgaatataaatatttcaggcaatatatatttttttgctattttcagaaaagaaactatttagttactaatatagtaattggttactaatttatatatttttttaaaaaaatcttagttaacatttatttaagaattttgttagatgaattatattatattatacgataactaattagtttttaaaataacaaaaaagtatataaaataattggtatataaaaatagtagcttgttatattacatgataactcattagtttcaaaataatttttaagtttagctaaatggattttaaactataatttaccataatataacttaaaaataactaattaataattactaacatgcatacaaataaattttaatggaaaccaaaatacatctcaaattatataatataaaaattaaattttttatataaaagtaactaattaattttttttcaacactattagtaattaaaaaatatttttaaaaaagcaagaaaatataaaaaaaaaaaaatagaaaacatcaaaaacgtcaaaaaaaaaattaaaaaacatcaaatttaactgacgtaacatgtcaataataataatattgttattattataaatttgatacaaataatatatattattgtaaacttcctaataatattgaggaaattacacttattatagaattttaaaagttcttataataaatatggcacacttaaatttaaccaatttatatggtattttttttttattttttatttttaggtctttctatgatatttgatatgccatatatatctaaattaggttttcaaatctcatatttaatgttttcatttgtttaggtagttttatttgtcactgatgccgaaaaagtccctggagtttgctgctggtgctgaaaaaatcaccggagtagcagttggtgccggaaagtcgtcggagttgctaccagcgctaaaaaatttgtcagaattaacattatcgccggaaaaattactaaaaaattaccaagaaactgattaagaaactagtttctttatgaagaaaccactttttttagtatttttccggtgacaatgccaattctgatgacttttctaacactggtagctactccaatgacttttctggcaccgacagcaaattttggaaaagtcatcgaaattggcatagtcgtcggaaaaattaccaagaaactg

SEQ ID NO: 65350 - DNA, 1798 bp, Cannabis sativa
  modified_base (1471)..(1480): a, c, t, g, unknown or other
gtaatgttatattatttaaaaaaatttaagtgtgatgatcataaaactgtgtaggtatagaattattaagttgaagaagatttaaataaattgatttgtactacctataatgataatgtgtattttttttttttaagtgcctatctcttaaaaattttaaaattaagcgtacttaatttagagtaattttgaaataagtggcctaaagtgtgcgagtaaatataaagtaagttgaaaatactattgttgatttgtagggctaattgtcatttcaataagcagttagaataacaaactcatgtataagagtcataaataaattaattgtaatttattatataaaaaataataaatatataattgttttctatgttatcataagtacttgtgttaatgtctaccatttatatggtatttgattcaacttctttatataaaccattttattgtttatttttagctgtattaataaataaaatatgcactttcttttttcccatgtgttaatgttgtttgattaattataatataattgtagtaaataaaaggtttattatagtagtacttcaaggattctcattttgatagaattattaatgatcatttaattcaaaaagaaaagtgttatattcgaatatgttgcagtgattaaaaactcattataaatttttttttaaaaatttggagaaagacataataattaattggaaaataataacattctattgaataaataggctccacgtaggtgtttacagggtcagttttttacacataagcaggttaggtccttatttagggtctacatttttttaaatccaaaataaaaaaataaaaaatttgactatgtttctatttaactaaaattaagtgtattgtataacgtatttaattcgagtccaatgatactcttttttaatatgtattttttatgtatatttttaaaaatgagaactccaaaatttaattgacaacatacatattttcagagtcatatttattattattattattatttaaagaaattgtatttgcactcataaacttacaaagattgatttttttattatttttattatgtataatatatgtttaaattatgctcatttcttttcttctttctcacactctaaaaaattacatatataatatatggaataaaatatattttaaatgttaggaccaaaattaaaataaaaagatatataaaattttattggactaaaaataaacatatgaaaacaagataaaaaaaaaattattgaaatgaacatggtaaagaaatttttattaaaaaatattaaggataatttacaaattattatatatttttttaatattagtgtttatactttaaggtgagagttagcattgtaatacttaattcgaactgtaatctcgattcttactaactcacttattttgatttcgattaattttatatacatttttttttacaaaaaaaaaaaannnnnnnnnnaaataaaaaaaaaataaaaatagagctctcagccaccaaattaaatggctaaaattcctaggaaagcatatagaagcaaatggtcaaattaaattggtgattttatttatttatttattttatttttgaggttgctgaattgttgttattttttatttatattaatttttatttttgagggtgctgaattgttgttatgagaatctgattcttaattattttgtggtgaacacaaatttagcttatatccactacctagcttaggttctcttgccttttattgttattttgggaaatctcaataataataataataat

SEQ ID NO: 65351 - DNA, 887 bp, Cannabis sativa
cgtacgtccttgtctcgctaaagactgtgtaatttgcaagttataaacactttataaattctgcatttaatgagttattccagttaatatttattgatataattatcaatatattcgttgattcatatttcctatgattgacacgtgtcaccttctgatacacagccgaatttcgggtataacactttctatcttccattttcttaggaacattatctaccacaaaataaacatagcttattatcttcttctacttattctattcaattgcttgtactttttcatgtgttataactttttgttaatcaattatatactcctgataattaatttgcaagagaatatttgtcttgatattttattctatcgatacaattttctctccaagttgtctttatgaataggagacatccgaatggccttaattagccttatattcatattgttctacaatttatccacagaagttacattcataaaatataatatacacatttaatttttttttattaaacttaacatataattatgtaaaagaaaagtaatctagaaaatatgttaaggagtaaattttaaaaattaatttactctgcaacatgttaaagtgcaatttactcttaccataatctttattttttttttttgtcataaaaaaaaaaaagaaaacacaaaaattaatttaagacatttttaagtatcattcttacaacttttttttttggtttttaatacaacaacaacagtgttggtcaaatatatgaccctcattgctttgtctctttctagacattgatcgaggaatacggcgtcgtttggtgtccaaatgtcttacggagtttatgacgtcttatatatttttatgtcgttttattcacatttcacttttt

SEQ ID NO: 65352 - DNA, 1243 bp, Cannabis sativa
aaacacccagaaatctcaaaccatacacaaacacaagatcaaatctaacttgatctgatctatccccaaacacacacaaaaatagtaaagataggcttagaaaacaccaaaatttttcctgaagttcaccaaataaattggctacttctccgttgagctgctcctcagattgagagctcgattccactataaaattgatgtttagagttacaaggatgagattccaagtcacaggtatgaattcgactggtaatctctctgtttttacatgtattgggttttaatccctctttctcacactatactaactctcttttgttttctgtgcatgtatgagcttcttctccttcttcttcaagttttacaaccctggatcttgaagaatatcactcaaccgttgtcatagctggatttgcagcaggtatatatagcactaggtttctgatctggtttaatagttagttagttacagaaattagttaggtgtggattataacctaatccattctaactaatttctgttagggatatagaggtcgaaggccaaattagggatttgcatgtatttactcttttatccttgtaagtaagtgattatcagtgtaagtagaggtttaatccaacaatatgtttctgactaaacttgaaatcatggaatgagctttagagaaacagtgagacaaattataaccctttcttttcttcttctattatgtaattatttacttgaggtgatttcttactgaaaagttggacattataagctaaagactacacataatgagtccttaaattataaatcacattcggactcccttctacattaataatgaataaaaataaattgtttattggaaacattcattgccataagaaaatcattttcttgattcttgaatcacactttaagtacttttagttttacatataggggtgaaacctctcccaattcaccatgtttaaatattatcccaaaagaagaaactatagtcaatttacaaagttaaagaacaaaaacaatatatttccttgacctaagaagtatcaaaaattaaattgcaatctaataacccaaaaatattaataattattaagaattatctgaaccttaatttcacaagccatactaacattataaactaaataagaaatactatttgaaaaattacatgaactgttatccattaattcaatcaaaaattacatggggatggtgccccggggggacccgcccctaatgggg

SEQ ID NO: 65353 - DNA, 945 bp, Cannabis sativa
  modified_base (80)..(83): a, c, t, g, unknown or other
attttattaaataaaaataaaaaagtcacccataaatttctcataaaccaagaatttcagttatatagacacactttatnnnnaatagatatatatatatactaggttctaggtatatatactaggtagatgttaccaaaaaaaaatacaagttttagctactaatactttttttgctaccaaattttttggtagtaaactggtagttgtattatggtctctgaatggtagttgatgctattttcttagctaattttttggtagcaaattatctttattctagtagcaaaattattagtttttaatatccaataaaattattttgctaccaaaaattagtagtaaaactaataaattataatgtccaataaaactatctactaccggtttttggtagtaaaattatataaaatagttatataataatgatatattgtcatgaatagtaaaatagtttttttttttttcttttatataataaaatatatattatagtacaatctttaagtacaacaaattatttttttaaaaaaaagaaatggttaaagttattaaatttgtacacgcattattgagtcacatctttaagtatacacatgaacaaatttagaattaggttggcttcttgttttggaattgtatcttctggtcctgcacttaacgaaactgcagagtttcaggtgaaaatagtcctcagagtatagtatgagcatctttgattcttcaaaatagaatattagaaagagacaacaaactctaacaaattcttggtgatctaattaatgtacagcctaagttatatcactaaaagtaaggttgttcatccgatcaaatctacacttttgtgatcaaacaacatccaatccgcactaagtgcggatcctaaattttggatccaattcaattcgcataacagtttaaatctaatccgcaatagtgcggatt

SEQ ID NO: 65354 - DNA, 1878 bp, Cannabis sativa
ttaaaaattaataaagcaaaaaaaaatattatagtgtgatctatagtaccattggaaatgatttaatgccaatttactttacttttgatattttatcgtgctattagagttggcataactctttagagtaatattatatttattatatttaattatatgagactcaatacttaactatactaataataatatgataccgagaaaaatattagacacataccttttaacatttatcttttgaaaatttcaaaatcaaaatacaataaatttatatgttagttcaaagttacttactctaatttagagtaatattgttctattttagttaggagctttactttcaataatgtgacctaatcaaataatggagttgtctaaaagggttggggaatgtacttagaaatatataattaattaatagtttgattatgtaaaattatatgtgagaacatttgtgtcagaataaactaataataataatgataataatttataagtaactaatgaattattaggttgaggaacgtgctaataatgtatttaataatataatttcgtccatatgtatcaatattaattaattattgtgaaggagctagcttgtaggatagggtttccactaaataatatggcctaattatataatataaattaattgagatgttaaatgttggtgtatgtgcttctaaataattaatcgtacattggttcagtaaaaataaatacataaacttgaatttttttatacctcggtctcctttaacgttctgcttgaaagtagggttgataaaatggatcagatatgataacacgattcaaatctcgcacgagaattagtgagtttgggtttgccttaaatgagtttgggtcgtgttctggttaactcatctaacctgtttaattaacggtttgtgtttgggttaacacagctaatacgaaaatgactctttaatgacttatttaaagttattttaatactttaatacatcattaatgagttataatcgcgttgaatacttcatcaatgtattggttgatatgtttaaataaaatatgcttataaacgggttacacgggtcgtctcgtgtcaatccgtttataaacgagccgtgtttgggttttattttctgccacaattattacacgaatcgtattcggatcaagcatatacctattatacatggatcttgacatgacacgaatacgaccagtaaacacgagttgccacccttgcttagagaattaagtgtaagtaaaacgataatcgtaagggtctaactgccaaaaactctttataataatagaagaggaaagattttgcccttacccaatctccttttcaaagtctttatttactcttcaattattaccaaataatcgaggttaaatatctcaccttttgacattagttgttataaataaatttcttcttttagcataaatagtaatttgttcctatttctggaagaatcaaagattaaccaacgaaaaaatcattattatgtatttaaattaataaatataaattttctctaaaatataacattattgttcaaagtgtattaaaaaaaccaaagtttaagaaccttattgtgtgcctatttttattgtttagaataaaaaagagtaacttgtgtaaatattaaaatttaatttttttacagtaataatacttaagttatattttttgaacttccgtaagtacataagtgttaagttattatcaacatgttattttcttattgatatatttaaattaatttttaaataaaaaataaaattaataacttggaacaaacagaggctgccaagtgattattgatttgacactaaatgaataagtacttacgaaagttataaaaatataatttaagtatt

SEQ ID NO: 65355 - DNA, 1433 bp, Cannabis sativa
  modified_base (979)..(995): a, c, t, g, unknown or other
  modified_base (1402)..(1407): a, c, t, g, unknown or other
aaaatactaggatgtaattctaatagccaaacaccgcgttccaatgttgccgggcacaaaacatgcaaaattatgaaatttctatatatgatgtataaaaagccttctgaattcaaataaatcatcataaattaatgattcaaaattaaaaaataattttcataattaaattctaattatctgctaatttccaaattaaggctaagcggtctttacatttatcctgcataagactgtccagtcagccgagttataaacatactctgctaattatgtttttaacgagttattccacgtcaattgtacttatgattgcatgtttaagttcttcattctttccagctcgacacgtgtcttcttctaatgtgctcgctgaattttgggtataaccattgccccttaaaatgttcttttttaagaaaaagtgatttttaatgattagaaaaggtatttttgtcatgatcctcttttcgaaaagtcacatgtccactgattttggcagttgtgcggtttcgaggtacatcagtattaaatgaccatcttttccacttccgctttgaattatgtccgtaggatcaaacctttctctgatctgacgaagccaatatcatgagtataaagtaagaaaaaaggaaccacctttgccttatttcctccatttgagaaagtctaaaaaaatcttaagcttcttcctcaagaatcaccattgagtttttctgaggacttgcatgccatctttgtccttgacctttttcctacgagtttcctcagacttcatcctctaaaagcgatccttgctacattcaaagatttgtagacagagtaaccagtcattgcccaaagccgtaactctaaatagtaagttgctttcttctttcacatgcttgttacgttgtgtagattcgctacttaatttgtttgtatcgttgtcatatcattcggtgttggtagtttttagggttaaactgtatttaggtcnnnnnnnnnnnnnnnnnaatatgtagattgttttaagatctccaactcattaccttcaggtttgataaaattagcctttatttttatccaacatcgcgattgcttttgaaccatgtgacttggattttgaaattatgcctcccaagccacttacatcaaagaccccccaggatcccaacgtcacctttgaagctgagttgatagaattgaaggtgcaatctatctcaggctacacgggcgatatgttaaagacctgtgggatcaaacttggcaatcatgccaagttagatcagtacgagagggtgagttcagttgtttccctcttgcgcatttttcaagcagtgcccaaggaccagtggtgcgactagtaccagtggttcaactggtatgggcgcctggagccttgaacatatcagtgcagggnnnnnncttcctcttcgagactacttcaagga

SEQ ID NO: 65356 - DNA, 686 bp, Cannabis sativa
aatgaaattaatttttcattggatcattttaaaattaatttcgtcaaacacacttagtttaataaaatattctagataaaaatttctagtaactaattaatatttaattaactagaaaaatatatttaagttgaaaattaattttctaattaattttagaccaacttaaattagaatattttctaagaacttaaactagaattaataattaagttgattttattcaagatacttaattattcatttctatttcaagaaaagtaattaaatgagaaaatatatttaagttgaaaattaaatttttaaataatttttaaccaacttaaattagaatattgttcttagatattaaattagaaaataataagttaattttgttgaagatacttaattatttgtttctattttaataaatttaaaattatatctaagttggaaattttcaatttcagatcaacataaattagaattattttaataatcatttttccacataaaatttcaaaatacatttattatttaaatgtagatatctcaaaattttgaaattagattaaaattgaaaaataatttaattaattttagatcaacttaaatcaagtaattttcattaatgatttattaaaatgaatagactaatatatataaatatattagattaaaaaattagtaattactttatgaaa

SEQ ID NO: 65357 - DNA, 1017 bp, Cannabis sativa
tatttttaaatatatatataataaaattaattttttatattaaatatctacataatttttatttttaaatatatatataataatattgtaaaattaacaaaacaaatattctgttaagtaattgagatattttattaaagttgacgtagaaagtaaaaaaaataccgttaaacctaaaatttccttacataatatattaatattatatatttaaaataaataaattaatatattataatttgaaaaaagtagatttttggtaatgtattttaaagaagtcaatgtatggggtaatataaaagtgtgttgtaaattagagaaaatagaattttagtaggatagcactttaaaaaatctcaatcttctctattcattgtgttttttactttatcgtttaaaagtaatacatcactaaaatcttatttttctattttacctcaattttttttatattgtactatacatcaatttttaatcaaaatacattaccaaaattatactttttcaaattttaataatatacttcaacaaaattaattcacttgtagatacacattaaattgcacacttacgtatgaaaagcataactatttggcaatcgtggtatctagaactttttcgaggtgacaaccttttattggttagcgatattctctaaaaattattatattaaattatatgaaactcaatacttaattacactaataatagtctatcactgatgctagataccactggtaggagtggcaattcgtgttcgtgagtcgtattcgtgtcgtgtcgaaactcatgtataacatgcatatactcgatccgaacacgacccatttaataataatgtcagaaaataaaatccgaacacgacccatttataaatcggttgacataacacggcctatgtaaccagtttataagcatattttgtttaaacatgtcaaccaaatatgcatttatgatcggttaaagtactaaaataactttatataggtcatcaacatgtcagttttgtgttagcca

SEQ ID NO: 65358 - DNA, 1508 bp, Cannabis sativa
tttccccttatggatcacgagactactgactgtcacaatttgtcgaagttggacatgacgaccatggcttgtttatttacttggcctctcagggttttttggaggttgtgctcgaggaccaagtaaatcttcagagtcttgcctgcttctcttcacgggctgcttcttaagttgcttggtgggtggttgtgtatatgaaaaaaaaaatacaataaataaacacaataagttaagtaaactaattaaaacataccgagtgttttctaactggtgtaacatagtctttcggccatgctacgtaactttagatagcttgacatactgttgtgaatgtatcttaggcgatgggacacgaaagcagtgtattcgcaacattgacttcgtcgatgaatacccgacgataatcttcgtatagttattcaccattatgaatcgagaactttccatcttttaaacatttctccttcacaatgtgccccaaagcaacctttagtaccatcccactggggtcctaccgacagtgcatctaacacggaaaggtttgcatattcaaatcaaacaagcaacaattcagtttgtaaattgaccatatttataattttgcattagatcaatttgtaaaataatattaagattgcctcttctgatctacccctagtaggtggcggtggtgctgctggagcaaaaaccttcctggaactcagtggcggtgatggagtagagacattggcaacactcaatggttatgctacgggatcggaggcaaggtcagcatgtgcttgttcatttgatgctcctcaaacaccagaaccagacgcataggatgtacacgcaatgttgttatgcttggaacgaactagatgaaggagctcaaccatttgctcccacaactgtctgttgctctcctcagtctcacatatgcgtctctccaaatttgataatgcctgttcgacccatctgtgttttttcttttagggcatggagtgttaaaatatttggtctgagcgacgctgtaacccatggctcgaacccgaccaccatgctcatctgtccctagcgccatggtcaacacgtccctcttccttttcacatgcacaactctctgttccacttgcttacgaaagtcgtcctacaaacataacaaatagatttaaaaataaattacgaaacataacaatataaatgaattatattttaaacttacaattcgtttaacgattttcgtagttgggccctccacctctccttttgtgttcacgtgaagtctttttcatacttcacatttatcaaaattgataatttggtggcctgcctctttctccatttgttcttgaactattcttacaccaccttgtttggtgcgatggttgtaaatattttttgcgctgttctgttgggccttttttcttcttgccgcaaattctggagtcaacctcgaagccacaaactctctccattgttcctcatcaattatgctttgatatagtttcggtggcttctcgagaaga

SEQ ID NO: 65359 - DNA, 1137 bp, Cannabis sativa
ttattgtctttttttttttttttctgtatttgttattctagatgttttattgatttttatttcagttttttcatttgatctattctcagtttgtattagttttttcatagttttttaatagtgtaaacacgttttgcatgtgtttttttttgggaatatatttttgtctagttgtttcctgtccatttttatatcatcaatgggtgacaatttgatttatcatgaatgttaatgttcgaagaattttttctatattttagtttgtttacatttattttgtaattttattatggttttggtacttgcatatgttatttgattatatttgctttctttgtaaaatgcaggactggggtaacaaatataatcccaatgatttttacagatcgaggtgtgtatctacgagtaatttctttgttattaatagcattaagaatactttgtctgtcaaattgttatctatgttccgtgacacccagtttggtcattatttggatatacctgactttgtttttcacccccaagttgtccatagcttacttttgagggaagtataccagcccaatccaaaaaaaattgggctaaggttgttggtcgttgtatacggttcagtgctgaggagtattacttgatcactagtcttgattgctttggtgattgcaacaaactgttgttttcccaggaattaaactagttaattgaggtttgtttccgtggcataaaaagtattgatcgtaaagctatagaggatgctttcttgggaagtaggtggggacaggatgagtccctaggtttgaaactatctattttgtatttcatccaatatttccttcttagcaatactccggataaggaagtttctaggtttgatctagatgtcattgataacggtccatgggaggagtattgttggggtagagagtcgtttgaattgactattgattcttttaaaggaagaatagagcatgggactaaaataaaaaataaaaaaaaaaaggagaagggaggtcagtcctatgatggtcggtatagagcgttggtgtaataccctagaattaagaaatggattagcaaaatcctaattagataattaagaataattgaggaattatattattatatagttcaatatatgag

SEQ ID NO: 65360 - DNA, 599 bp, Cannabis sativa
tcgttgtcctcttctctctctccgttcctttctccttcttggagtatacagagccgttgtcgttcagcataggggtatacgccggccacgactgaactttgcgagccccaaaaccgccaagtttcgatgtcctcaagcttccctcacccttcttcattatggaataactcgctggagctgagatgtctcagcttagatctgataaaatcccgaccccttcaacaaaaatgacttccatactctttctctacttgttgtgagctttaaaaccaatagctcgaataccctaaaaaccaccatcaggtggtggcaccgctactgtcagtcaccggagcttctgcgtgggtttatttaactgatataattgttgtgaaaattgtaatggattattgggatatttttttttatgtgttttaacaggtttttaaaatgggaaacatctattttacaatcgttactatgttgaaattttaacaaaataaaattcaattgcattattaaaacttctaaaaaatttttttcgtgtgagtttaaaatcgatacttatactaattagtctcggttataaactgagacgataggaaaacactttaagtgtc

SEQ ID NO: 65361 - DNA, 1521 bp, Cannabis sativa
attcctgcggataacattgacagtcaacagataggttgttcttgagagagagcatggcacgattcctgaggaagatagcttggttggactccagtagtgcattcaaagttgcaccgaactctgaagcatattgcctgcctacaacttcaagcatcaatactaatcatgtggtggacatcaaattggttagtttactttgctaaattcattgttatggaattattcattaaatgaaacgattttctctttcccagtttttacctgtctgcttgatatcaatcaatgtaaagactctcaaatctaagagcactaaaactagaaaatagacaaaataaaatacatttacaaggttgggtttagtccattatgtaaagaatcctaataaattgagcatggtttgcttttttaaataggcaggtggcttcaacaagcccaatgcattgtttttttcaatttacaaatgtagtgtattagttagaatgatatcttggcatcattttattgggagacaaaaagttgaatgataatgtttcttctggatagaagtatgaacttttagtgtcatagatcaaaattgttataaatttaccttacttacataaacaattgatggcatgctgattttttgatgagctaaaatgacaattccgattaatcagctgtcaggtacttgttattcttttttttttttgaacaattatatgtgggagtgtcattttattgttggaacaattaaaatgccaacacattatctgttctttaaagtgttaattttagatttttcttttaaaggttagacacatggctaaatattgaatgacattcgcatatcttatttgccaatttcaataagatccttttggtcatatgcagaaagagttgatgtgtagatattttagcataatatgagatataattagattaattttatcaaagagaagaggaaattatataccaaatcacttatatgagagcctaaaatattgatgtggttgttctgttagagtatgatgtagctatttttattacactattctcgatctattaattgtttataattgcagtttattatatggggttttacacaacacttacatcaaatgagagagttgttgatattctataaagttggttaagagtttcaaagtaaacatttagacttttgtgtatgcatttgaatgttgaatgttgttattggcaacgtaaaattttttggattagtatatagtaaaaattgttatttattatatttattaaggactaatatttataaaaaaaatgttacattaaatttataatatttttcattgtatatttacatttaaatgtagagtttatttttttttttttgcttttactttaattttgttcttgaatttttttcatttaaatgtacaatttgagaggatgtaaagtcgtcgaatagtgtagaagcatacatgcatttgaaaattaatttttggtttatttttaaattaatttaagaacaatttacaattagattatcaagattttttaaac

SEQ ID NO: 65362 - DNA, 601 bp, Cannabis sativa
tgtgtcatggattttggagggtcatggagcaagtatttgcctctgattgagttctcctacaataatagctatcaaagtaccataggaatggctctttacgagatgctctatggcagaaaatgtcgttccccaatccatcgggacgaaataggagaacgaaaatatctgggccctgatttggtccaaaagacagatgaggcaatagacaagattaaagctcggatgttagcttctcaaagcaggcagaaagttatgtagaccccaagcgccgagatgttacattccagctgggagaccatgtcttcctgcgagtgtcaccaatgaaagaaattagacgctttgggaagaaagataagttaagtcctagatttataggaccttttgaaatacttgaaaaggttggacaagtttcttaccggttagccttacctccatcattgtcagatgtgcataatgtattccatgttttcatgttgaggaagtacgtgtctgatccaatgcatatcctcagttatgaggcattggagttacaaccggacctatcttatgacgagcaaccagtgcgaatttcgaataagaaagagaaagtcctttgaaccaa

SEQ ID NO: 65363 - DNA, 956 bp, Cannabis sativa
aaaggcagtaacagtagcactttgagaagtaaaagcgctaggattagtagccaaataataatggtaattattaaggtatgatggcctttttatctcttttcctaacccgttaacaggaatagtaggtgtggaatttaaaatagaataatcacgagtaggagaaggacaaatggaatcagcaatatcagtaacaacatgatcatgcacaatatttggaggcactcgaaatgaactggctggagtgtgagaatgctgagtacattcagcatttgaaggttgaaaagaaataccagtaggcacttgttaattctggtctaattcctgctgcacaccagaatttttttttctgatatgccccatactttatacccatcccaattaccttgttcttcataatgtcctgaataacacattttccatgagaaaataaaaatgtgcaattagatgtggctgtcaaagaattcacagacaataggttgcatttaaaactaggaacatagagcacatttttcaaaatcagatcaggagtcaaattaattgatcctatgcaatctattttcttgtgaattccaaaaggaagaaggacagtttttagcttaggattgggatgaatatcataaaaaagagataaatcagggcacacatgatgtgtagcccttgtatcaatgatccaatcaaaagcacgagttttagaattcataccagaaaaatgagataccacaggttgttcattgacagcatctggtgtagactgatcagcaaccttctgagctagcatggccatcaatttttggcattgagaactcgataaacttgagattaagtccttttcaccaggtgcctcatcacttttctgctgttcacctccaataaaattagcagaagcaggcttcattggaggtcccttagcatttctgtttgggaagtttccgtgaagtttgtggcctggaggatat

SEQ ID NO: 65364 - DNA, 1523 bp, Cannabis sativa
tccttcctggtggtgcgactggtccaggttcactgccctcaatcaacgtggaagatcaatcttcacatttaggtggagttatgaccaccaatcaagggataccatcaggtaaattacctgttattatttcaaataaacatgaaggagtgaatattggaaagtcaaatgttcaagatattgatgttaatgctgatcctattcacgtggaaaccattatggaaactattgaggcctctcctttgattgttattgattctaaaagaagaaggaaaaatgaaatgggctctaaggggccggctggagtgggcttgggaaatagtgacaatatggacattttagttggagaaaatgatactgaagagggctcaaaaaatgggctgttggtgggtactggtccccaggcccaccgctcattatgaatattctaagctggaattgccgagggcttgggaacccacgggcttttcaattcatttcggatcttgttatccaaaagcggcccaatattgtctttctttgtgaaacattatgtcggaagaatttggtggaaaaacttagagtctctatcgggtttgagggtatgatagctagtgatgctcgtggtcatagcggtggtgttgcggtgttgtggcggtttagtgatgaagttgtcttattgggttactctttgaattatattgacttaaaggttaccacggctagagaagctccttggaggcttacggggttttatggtgaacctaatcgttcgttacgtgctagaacttgggatcaaatccgcgctttaaagtctgactctcctttaccttggtgcatcatcggcgacttgaacaatgtaacgtcccaagcggataaaaaaggtgggcagccgtatccacaatggttacttgacggattttgtaaagtgttggaagactgtaatcttaatgacttggagctctcgggttatccattcacttgggaaaggggtcgtgggtccaataattggattgaggttcgccttgatcgtgttctagcttcccatgattggtctcaacgttttatctcagcccaactatttaatcttgaagtgtcaatctcggaccactgtcctattcttcttcgtactgctgcgatcaaccttcatcaatcaaatgcccagtttcgattcgaaaatgcatggctacgtgagccattgtgtcgccaagtaatcctagacagttgggaagtttgtgcggggatgactttaattgaaaaaataaagtattgtggcgagaaattgatggtttggggccaagactatacgggcaactttaagaagaggattgccaattgtaagaaggaggtccgaaggctcaaatggtgctctgacgaggactccattgctcaatacaaacaatctgttgcgacccttggggaagtgtatacccagcgtgaagtcttttggcgccagcggtctaaacaactttggcttcgtgagggtgatcaaaatagcaaattcttccatgcaaaggcaactgctcgtaagaaaaacaactccatta

SEQ ID NO: 65365 - DNA, 1672 bp, Cannabis sativa
gactcaccggctaccaaattcatatgtggcgaggcgagtgccgtgtgtatatgtatctatatttttatatataaattatgtgtccaaaacttgactttcaatcgtgtagaaaaaaacatgatttttaatggcacaaagtctcagtacaaaatggtagataccattaatgcagtttagcaataccgtgtagtgatatgtaccacctggtcctgacctggtgctggtgttgatctactcattttatgctttagtacataaatcatggcgagcaagatgccttgtgacgcgtatacgattatattacattacatgattcatgattcatgattcatgattcaagagcctcttaaataaaaaataatgggtaaataatactattttggacttcatgttttgtaaaagttacagattgaatcttctattttgttaaatgataaaatggattatgtattttcgaaaatagtaaaaatatgaccctgaacttaatttttgataacttttttttttaatataaccaacttaaagataattcctaacacgaacagatacagaaaatgtaaatagttttgatataacacatttcgattggattattattgaattttattttaataaaaaatcagtttagagtcttatttgtattattttgaaaaatacaaagtctattttatatattatttaacaaaacaaattgtttaattggtcacttttgcaaaacgcaacatccaaaatagtatttactcaaaaataaataaaaaaaaacaagatagagacttaatgaccatcatctcatctcatcttaccaaatagtagtatcatgtcatcattcttgttacatatttttgtgtgtgcaagcaaagaattctatgtgactagtttatacaaatattcaaatgtggtactcggatgtacaacaattatacatacaaaaattattaatgatcattttctttctttttatgtgcatttcattccatctatatatttgagacattttagggaatttctttttctattcaaaaaaagaaatttcctaaaatgtctcaaatatatagatggaatgaaaggatgaaattttttttttcttcttcaatctgttctaggttggaagcacatgataatttatacaacaagaacatgtttactttattttagagatgttcatacaatcagggagggagggacttaggccattgtaatttgttttactataaacatatatattaagtcatcactcaatttgttcatacccaattcccaattctaaaagcaagcacaataaattaaatcactaaaattttaaccatatctaaaaaacaataatatttttttaacaaaaaaaaaaaatctgttaaaatgcacaaagcttgaaatgtctcatattacaagaagagctcaaaagattaaaaaactaaatttataaagagactcgatcaccaaatacaggacttgtctaaaacaaaagctcgctttgctaaaaaattaataataatattcttagacctcttacaatgcgacaagaatatactatgaaaggatttctaaatatgaaaaatatcattaagtaaaatactaaactcattgtgccgagtgtctttactattcacaacaagcaccaagcaaagacaattagagaaaacagtaataatcttataccccaaccgaaggcaaa

SEQ ID NO: 65366 - DNA, 1383 bp, Cannabis sativa
  modified_base (28)..(28): a, c, t, g, unknown or other
  modified_base (953)..(967): a, c, t, g, unknown or other
  modified_base (1042)..(1044): a, c, t, g, unknown or other
tttagtttcaattattagtttgggattntattccctatttcatatttatgcacacaattcattatgatatttttgagattattaataaaaaattcactttaagaaattttcattatggatgcttttatgaaattgagcttcatatttctttaacttgtatgctaataccaattatatttatatgtttatcatgttgtatgtgtttgagttttattattgatacaaaatttatggtatattattctctgcaaagatatattccgcataaacacttataatttaaattcaatgttaattaataattgttaattcttaagcaattattaagatattgtttaataaaaagatcttttgatctgataggggtggaagaagttaagaaataatatatgcagttcaacgatcttttatatctattgaactttagactatattcatcacaggatctctacaacacttaggggtggaagaagttattgatacatgcagttcaaatatttttaactttgaactctagactatactcaatacaccacattatctctatgacacacatattttgattagacatggatatagtataatgaacaaactagcaaactatttgaatttattcttgatcccgtaattgttccaattaatatgttactatagtaatagaaatagataccaatgaagtttttagacataatatcacagtttcttatctgagtgcgagaattttaaaattccaatcccatctttatttggatgacactagtgatatattactatgttatgatcatgataggaactttaaataaaaatgagcaactaaatctaaccattcatatggatggaaataacttatcagaattttgaggattagataggagaatttcacaatgtctattcgaatgacttagggaaaatccctactcctcacgaaatgttttatggtatctctaatgatnnnnnnnnnnnnnnnagtattttacattaatgttaatactaaaatgctatgttgataacttagtctagaaggaacttatagtttcagacnnngataatatgtcacaacaagatgtccctgagaaccaatagtaagaggctaagtgtaacttaaccagactcctactgttgagtgggaaccatctaagatacaatcaagcaaggaacattaggagacaatcaagaaagaatttctaaaagtgacctatatgttagatgataggggtgtatataattagaatcctgttatctacagcaactaagaaaattagagatggcggctactctaagggtggaggaattattctagaaggatgtaagaacccttctataataatttaagctccatcagtgaagctaaataacttagttgttttcgaaaagcactggaaa

SEQ ID NO: 65367 - DNA, 598 bp, Cannabis sativa
cctatattcaattttatttattgcccggaagacacaacagtaaaaactgttacaataggttcattcaaccttgtagcttgagcactcaattattatgtaaagtatataactgcactactaacaaccatttaatcttcgagaacttcttttaaagtaagaatacaatccgtaaaaaaatagaatggatatagtactgacaatgaacgtcttacacaagttacaattttattgtccacacttaaaattaggtattaatgcatatatcactagaaaatatgtaaaaaaaaatcttaatttatttgatttttaacttatttatttgttaaagattcttaatttattatcatatataggttgcaaagtgactttctcattccgggatgcacacagggtggggaattggcagggagtgctccccccgtccccatccccgtgaagaattttaatctctatccttacttattcctcatcgaggatggggcggggaatcccctaatgggaatgggaacggggcggggaatcccctaataaaataataaaatttttaatatacaaaaatattaaaatattatacattaattattatttaataaactaa

SEQ ID NO: 65368 - DNA, 859 bp, Cannabis sativa
tataaaagagagtatttatcaattaaaattattttagagttatatttaattaatgtgtaataaaaagggatagttttcaacttatccctatattataataatgtatttgtatattataacatgtaactacaatttaaaaaaaaaaaatgaaaagaggaggggtatgggacattcatatcctttatcttatgatttgtattaatgttaatttttttaattacaatatagaattataatgattagaaaaaggtacataattaacatttggaatcgcttacttgaaaaaacagcaatctttgttttctcctcattataatgcacacatatgttaaaactaatagtgaaagagatttgattacaaatatgtatttgagcacatgatcataaagtaaacaatataagattttagttttactttataagacattaatggtttttggataaatgaatatttttttaggtacatacatgtaataaatacatggaactaaaaaactttaagtgcaaaagctttggttagctcaagttgttttcaatttcatcaagattcatggtatgctatgtattttgaccacataatatatatacatatattttttggaaaattttatgggataataatttttgtattgtccgtttaatatttaaagaaattataatttaatatttttaaataattattgtgtatattataattatagtagatactctatttatttttaaaaaatgtaaataatttataatatcaaaaataaattcaaactttacctgtaaaaataataataataataataataataataacaataaaaaatttacttaaaaaactctcatatataatttttttcaaaaatgcaga

SEQ ID NO: 65369 - DNA, 2487 bp, Cannabis sativa
ttaaagagattattacaatcaaggttagatccacataaaagcaaagtagagtatttattgcaattgagttatacatatatttgtaataaaagatatatttatagaaataatattagtttcagggtaatagttaaattatattacatataagataaaagtaagcattaaaatcttaccaattttctttttttatttgaaagtttacttttatctttgttttaccaaaaaaaaaaataacgaccctctagcgtttggttgggaggaatgaaaacataagaatgtgaatggaaatagaaatagacatggaataagaatagaataaaatttaaaatacatacaaaaaagattgataaaaaaaattattaaattttttcttatcattcattggagtggtctttctttccattttaaaatggaatagtcatttcaccaaaatggtagaaaggccattccattggaatgacattcagcattccaatactctaatatgcaaccaaacaaaagaatggaataaaaattatttcgtttctattctattttacttcattacctccaaccaaacgtcacctatcttagaatctctatcaattattacaaaatggtatttccacttggccatcccatttagttttaccttaggcttattatgcattttggatggttttgcttagtttccatgatcaaacgacatgtgggcttggacatgtgcttcgtttgttgaaaggcacaagttatgttcttgagtcgaataaacaatacacaattaggggtttgtagctgtgtacaagctgtatatgaggtgtttgttttaatcacgaatatgtcaacctattagggtttgtatgcaataattttttagattaaaaattgacaacttatgttgtactatttatttacaatatataaaataaaagcgttaacgttatcgttaagccccttgtagtttttctaattatatctggatgtaataagagtaagacgttaaggttttgataatatgaacaaaataaatcaatgattttttcttcaaaaacaaaagatattcaaataatgcaagtcatacaatttttctgtattattttaattacttgtcataaaaacctgacaccaaatgtcattttcgatttctcttcaaagagaataaaaagaaaggccaattctatctgtagttttagaaaatgcaatttgatcatcaaaattaagacatataagactaaaatattaggtaatcaaaaaaccaagtcaatttatatttaaatattatggaaaccttttgggattttcaatttttcgattctttgctatatatattagcttataaattgatattcaatcagaatatcttgacccttcaaagaaaaatttgtctttttcttttgcttttctagagaaattagaatccaaatttaaatagagatgcaaataattttaaaatatttaatttttttgtcatctaaattttcaagtaacaaaatatgggaactagagaatagagatttccaattgatatttaaccaattacaattgatatttgaaggaggatttaacaagtgccttaaatttaaaaacaaaaacaaaattaaaaatcacgagttaagtctataaaaattaaatcaaaaaagaattttatcacaaattatctttagtttacatgtgttattaaaatctccaaaatatgttatctattctatacatatatacatattaataattcaattgacatttaacactaaaatttaattactgtttgaaatttataaacaaaaataaaattaaaaaatagtgtcactaaaaacaaaatcaaaaatcaattaatagtaaaatatttaaaaaaaaaatcgcagtaaattagccaataagctaatatttatcatttttggccgtctaagaaggtgtgattagttggtgagagcagccaagttatcactatcccacacgaaaaagaaagagtcctcttttaataggtggcagaaactagttggcttctcatatatatattcaactaaatatgttaacactgagcttgacatcaattaaataattatatatatattacaattacacttacaattaagcaccacatcatatgggtcgattttttcttgttgtttgtgaccaacaatcatatcccacgtgttaaacgaggatgtaaatttctacgagcttaagaaacaaaaatcaaccgcatgttgttgttcttattatataacatagttgtttttttgtttgtagaagaatgttaatttttatgccacgtaacactgcacactccaaatcatttgcaatttccttatcccaaaacaccccgagagggtaacaactaacaacgagtttgaatgtgttgtttcccattatactatgcctttgctaaaatattacaaatatataaataaaaatatatatttttatcgataggttgtttaacattatacaacattcagtaggtgtgtaagtattttgctcacaaaaatttaatttttttttttt

SEQ ID NO: 65370 - DNA, 1030 bp, Cannabis sativa
ctccgttttggacattcttgatatcgttagaaagctcgtttcgagccctatatgctagtatgtaattaaaatgcaaattatatgtttatgtggacgtgattttggggattaaccctatttgtgaaatcttaggaatgtgtgactaggattatcggtgcctactcaaaaatacccagggatttagaatctccacatacttagattaccaggtaagacagtaaactagcatgtagagttaagcgttgtagcgctcatgtatgttattatgcatatgttaagtgagaaaccgaaattagggttattaccctaaagtaagcgattatgtggtctaggattattacactagcatttaagtaattttgaatgctatattatacttataaatatttaaatttttatatcacaccctataagtaaattattacataatcatattttttttatattttaataattttaattataaaattataatatccagtattatatttaaattttattattatttataattatttataattaataaatacttatcttattattaataataataaattataaggttttttaatatgtcttgccatgttttttggacttgtcgtgtatcgtgccttttgaactagtctattcgtgcttatgtggcctttcatgtttctcgtttcgtgtcgtgcttaaggatatatttttcgtgttgtgtcgtgccaatttgtaatatcgtatcgtgacgtgcctaaactcgtattttttgtacctagtcatgatcgcgccttctagactcgtactgattttgtattatgtcaaaaagtttgatccgtatttacagcattttactaagtacaaattatatatataggtaccattccgccaatagaacaaggcgatatggaatccaagtttggaaaaaaaatattgaaatagtgaacatttatatacgtctattctatataaaatgtggctatataactgaattcttggtttatgaaaaattattgggtgactttttttaaaataaaaaaaaaaataacaa

SEQ ID NO: 65371 - DNA, 650 bp, Cannabis sativa
atttttaattctgttagttaaaccgaaatgtcgttagttagatatagacatttttaatatataaagatattaaatagtaagtattaattctattacttgtaaaattaatcaaaaaatataattggtaacaattaaaataataataaagtattagagatactaaataattatttttaaaatttaatatttttataataattaataaagtagttttttatatatttttttacgtatgaaataaatgcatattattcaaatattcatataaatattaatacacataatcgttagggtaataggataggttataactatactcactatattctatacgcgcatcaggtacatatttttatagcctcaccctaccttaaattttaattcaacatgtaatactttatctatacgagtagagtactcacaagtaaataagttctccagttaaaattttatttattttttattttttgtaaattggcactatttttttttttgagaaaattataaattgtcacttcgataatgccacttttaacttttatgccaaaaattaaaaaacaaccacgtttttaggtttattagtctgtttgtgttgctttgatcttcaattaagagtaaaattcagtaaaagtataaattgtaagtcatgg

SEQ ID NO: 65372 - DNA, 1118 bp, Cannabis sativa
  modified_base (780)..(781): a, c, t, g, unknown or other
  modified_base (972)..(976): a, c, t, g, unknown or other
aacaaaaatcaatatataattaaaacaaatcataattatatatacatttaaaataaatcatgattataattatataatttaaacataatatcaaccttggagttattaatcataaactaaagatattttttttttaaaaaaaaatatctatatatatatatacatttatacgtatatataaagtttgatttaaaatatttttttttgagaaaaaagtactaaaactaattatataaagagcgatagaaatataatgaagaatagagagtaccacatgaaaatgaggaaaaaaaagttacaataaccttttcatcatttttcatgaatttatcattaaaaaatcacttttttacatcaaataattcatactaatgagtaaatcatgaataatgtaaagacatcgataacgatgaagttgtcgacataaagagaaaaggtctgtatgtctccaaattatgaaacaatattgaaaatcgaggtcttgatgctatttattaatgttattgtcgaggtgtcatgcatacatcaaaaattaatagttacttaaacttaaagcaaataaaagaaaaaagagaaaaaaaataagtaggattagagatagatggagaatcttcattaaaaaacaaaagaaaaaaaaaggaagaagaagaaatagtgtgagagaaaggtgtatataaaacaatctttattaaaaaaacaaaaaaaaaaaaagaagaaaaaaaacgtgagatatatagaataatatataaatatacataatatatatttataggtttaganntatatgtgttttaaaaattagagaagatttaaagttagatatttaagtttttaattgatttattaaaataatagtaaaatataatttatagatgctataataaaatattaaaaaatgagagaattaaggagagtataggacaatagtttggagtgatttgagagtgtcacgtcaccgcctcatacttctcnnnnntatatatatatatattataagttgttattcgcgtttctaatattggacacgtagactccaggtcaacattcaagacccataagaccatctctaatgggaaatgtaaaaattgtgctatatttagcacaagaagtaattttgt

SEQ ID NO: 65373 - DNA, 762 bp, Cannabis sativa
  modified_base (699)..(703): a, c, t, g, unknown or other
gaaaatgtagcaaagaaaaaaaaacatgatagactaaaaatataaatatatttttttaggaaaattcttaagtaagagcatcacttttgctctcacccatgagggcattttttaaacctttaatttttaatctaatgataataatttgttgtagtttatttaataatcataaggtatcacacatagaatttttattatttatttttaattctcctataatctaggcatgtgatttttttttacctttctaaaaaatgaatatgttagtttttttttttttttttaaattctccctatttgatttttttttttaaaaaaattatttctacctaattccctatttaaattgtttccaacaaaattatttcaacttgactttctattcaaattttttccaacaaaaattattgaaataatattcaaattattcaaaaaaaaaaaaagaaaaagaaaaattagtatttttaaaaataaaaccaaaagcttcatctatttctaccgctaccacaactgacacttctgaaaccactgaagccaacgctgatactgagactaaacaggttatatatgttaggctctctctcacatttttttcatacacaaagattattttaatttttgttgctgcatgagctctcaccatgttatgacgatagtaatttagtgcatgtttggcatcataactaaaaaattgttttnnnnntttaaaaacagaaaattatttttaaaaacaattttacttgtttgaccttgttttttaaa

SEQ ID NO: 65374 - DNA, 1063 bp, Cannabis sativa
  modified_base (883)..(893): a, c, t, g, unknown or other
acaaatgacggtcaatccagcttaaagcttcttttatgccaacaaattcatctatttcaggttgcacctgccatttcggcataaaaatccctgccatttattgcactgcctccattcgctgataactactcaacgccatggacacccgaacgaacctagaaccaagaactagtaactaacgccagaaactaataaaccaaaaccaataagagaaactatagaaccatgtcaaaagacaagacgaatgggaaaacctaattagttccaaacctaatggtaacccttcttttaatttattttatagttattaatagttgttaatgtaaattatataaaatatgattttttaagcaatataaatttatttgggtaaatagcggcataagtatttaaagttttaagtttgtaagtaatataaactcaatgtttatttttagcgtcataagtacctaatgtttgtaaaattataactttttcttttaattttgtcagtacagactgtgttatgtcttaagcgcccaaattctaaattattgggtttagattgaaacatgtagtatcaattactttcaaatgttcttttaataaattcaaaacgaaatttgtactaataaaactagaagaaaattatagttttataaatattgggtacttataacgctaaaaataaatattgagtttatgccgcttacaaacttaaaactttaaacttataccgctatttatctaatttattttgtgttatacgttgttgaattattgaaattgttgtatcaaaaataatagattatacacttaattgataagaaaatatacactaaaatagtacaaactctggccaaacaagatcgcactaacttctttttttatttatttattattnnnnnnnnnnntattattattattattttgaagattgatagaagaatttggtaggaataaaaatatgaaagaaatatttttctttagtaattaagaaggaacaaagctatataaaaattactatattgtttatataattttaattttgataattattagtaaagataatttaataacttca

SEQ ID NO: 65375 - DNA, 977 bp, Cannabis sativa
actaaaatgatattagtgaaaacagatgcaactaactacagaacagatgttagagacaacaaatactgaacaaaagcaatatctaatttgccacacaaaacaagacacttacagattatatcaaaaaaattagaagaagttttgagagaaaatgagaaaaagtggtatcacatacctagaacattgaagtctaatgatagagttggaaatctctttaacaggaagctagtggtgaagaaccagtagtcctagaagttgtgggtgtatttcaaagtactagtccatcaaatcaccaatttagaccacctttccagcatgcagaagttgatcttgcttcaatttttctgcatgagatttgactttacttggtaaaagtaaagaatctcatatgatgttggaatttccacattttggtctatgcataggacgaaccaatccgccaacaacgtgtaagcttggggaatcatttggaagggcgctatgcccattgctgcacagaaacgtacgaaatagctacaagtggaagatgcgctcctacttttacgtgtgcctagttccagacaccaaatttatctgcacacttacatggcaattcccccagcagcaaaagcctattccagaataggcctgggatgttcttgaggctacattttttttcgtaggatcataatgattcgtagttttgaaactcattagtgtactaatccatatctctttgagataaattatacactacttgtggagcttcgatttcttcttgttctagaagttccaccttcttagcatggactacattgccataatagcatctggaaaagaataaggaaaaaccaagcaattaatacccacactaacggatatagctaaggtacgagagagttctctcccaaatctgcttggagagttccccaccggatcttacatccgaaagcaagatccttaagaaacattgcttcaggacgatcatgtatcgtgaa

SEQ ID NO: 65376 - DNA, 1567 bp, Cannabis sativa
aaagaaataaaaatgggcttggacagtaaaaatgtaaagtttgccgtgtccagtatttttgaaaacatttagtaaaaaagcaatatctttgtaagttttcctatgtatttttgcaaaaacccaatagatatggggaaggcccaattagaaattagaatgaatcgggcctaataaatcttcggcccgcaaatcaaccctaacatattcatgtcgtaatgcaaagcttgataggctttacaataaactgaagcaggtcagtataaatacttattcttcaccttcgcaaactagggttttagggcttctcctctgcaggcgtctctggttaacttccgaagatcacgagagcacaaaccctaagacgaaaaatggttaagggacgccaaggagagcgagtcaggtctgcgatccatctcactagctccacatttttatctctcacgcattcttttgttttgctctcattgtcgtcgaattagtatcattagatttatacttattttcttgctttgattttatcacagactctacgtcagaggaacagtcctcggatacaagaggtaattgatttcaatttcgcaaatgtttttatttcatttcttcagttgaaagaatattgctttgtgcgattgggttttacgaaaggggaaatgggaaatagtgatttagggttttatttgggattgattttgtttgtggttttggattctctggtgaattaggtccaagtcgaaccagtatccaaacacttctttggtccagattgagggagtaaacacaaaggaggatgtttcatggtactgtgggaagcgcatggcgtacatctacaaggctaaggtgaagaaggacggttcccactatcggtgcatttggggcaaggttatcaggcctcacggtaacagtggcgtcgttcgtgctaagttcacttcaaacctgcctcccaaatctatggtatgctaattggaaaatgtttctgctatttaattactttattgcttttgatgggattttgaccattactttttttcgttttgaagggtgctagagttagagtgttcatgtaccccagcaatatataaggtaactttttaattattgtacttcatattctttgcctgtaaatgacattactgtagcttgtacttaatttgtttggtatatatattattcatactcattcttaatgataagttctttgaagctaaaacttgaaacatgttgactacttttaaaagtttgaattagtttgctattgtaatcgtgtaattttgtattatatactacttagcctttggtgacttcagattttctttttttttagtggacaatgcatgtgttctaaaagttgatctttttgtttgctcatttctctcaggacttcttgatgacagagattggtcatttgaagcatctgcattttatgttttttcaaccaaatttaaatgtcatgtttgtttagaagtgaagcagttttgttattttaggatattgaatgaagccactattcaggaactaatttaatgtcgattttcttatttttctgtctcctactgcataattggatgta

SEQ ID NO: 65377 - DNA, 635 bp, Cannabis sativa
aagcttgtacaaaatagtaaggagcaacagatcccttccccaaaggacacttctccaagaaaatgagggattgtgactagtcttagcctccagaatagaggtgttaggaaaatgacaagctttgaggataagactatgcgatgagttagggttgttgaagattctcgaagcttgtttagcaagcatggcttgattaaagtgaataagagacctaaatcctaaacctctttcaaacttagattgacaaacacttagccaacttttctaatgattcttttgtgccttagatgaagtttcccaccaaaatctagcaatcgcagcttcaatatccttacaaagcttgacaggcaatcgaaaataggccatgacataggctggaatagcttgtaccacatcttgaagaagaatttccttactagctttagagaagtgttttaaatgccaagactgaacaatagaagagaccctatcttttaagaaagaaaaggagtgatactttgaacgcggtaggcattgagggagtcctagacacttgctaatgaaaggtctatcctatagattaaaagtggtacaaaaatcatttctaatatcaaggggaacatttgggaaagatagaatggatgattttgcaaagt

SEQ ID NO: 65378 - DNA, 1061 bp, Cannabis sativa
taaatgagaagagtgatgtttacgcttttggagttgttttattcgagataatcactggtcgaccagtgattgcaaaaattaacagtaatgagaatattcacatatctcaatgggttgagaacatgctttatgaaaatggagagattcaaagcgttgttgatcccaggctgagaggaaacttccaacttaactctacatggaaagctattgaattggccacaaattgtgtgcatttaaactccattgaaaggccaacaatgaatcaagttgtggtggaattgaaagagtgtttagcactagagattactccagagaaggataaccttttcacaaaagatgatcttatcagaaagatgactcttaatatagacacacatgtaaaccctttaccaaggtaaagtgactttgcaattcatggatttttaattttttttaactttctagaaagatggagtgatcatggagtaataaaagaagggacagattccttttccattcatttcttttaaacaaattgtaattttttttttttttaacaaattgtaattaataaatgttgatgtgagaatattttatatctttcacggtcaattttatcatcaagtgtaatgtcggaacacaatattataaactaaaataaataaaacaaacttgatataataagttttaattttacgtacaagactcaaaaccagaagtcatccacaagtttgtttagtgaaagctaatttttcttcacaaactcttccataggatccaacctcgaactctcaaactcatggataaaactgatgcttaatgttaacacctaactgttttcagttaatatagttagttgttatgtctgttagagtagttgttagttacttttcttggtcttcttgtattcttgtaacaaactctctgttattataaataaagaatttagtcgaattcgtttgattagcttttgctgctaatctcaattagccttcatgttactttgtttttctactgtcttactggtctacatggtattaatcacttcttgacttatatacgtccatgtcgtcttcaacctc

SEQ ID NO: 65379 - DNA, 836 bp, Cannabis sativa
gtgcttgatttactaattagttcaaatttcataacaattgaaatgaaataaaaggaaattttagaactgagaataaaatcataacaattgaaggtacaagcataagtataaatccaaatgtaataataaataaatggagaaatggagttcatttataaataaaaaacaaaaagagaatataaacttgaagggccaaaagaaaatcttgtttgatataataatgcatgagatgattaatgtaggagatgatggtaaattaccttctggtattagcttttatgatgacaccagaagtttctatacctaagtaaaataagcactaacgaaatcaacagcagaccttatagaacctacatcttgtgagaacagaaaactaatacttacgatgcaaagcctcgaataggatgatggacctaaatagtttagcataggttttaacaaataaaacacattactaaatcaatgtcttagcatgtggcagtggcaccctttgtaatatgtttatgttgctataagctaacaagagcaaagatagacagggaactcaaggatatagatatcagctccaagaataagatcaaatccactcgaatgcttttctaagatatggcaaatctgctcagaatttccccactctagtttctcaaccaataattctgcaaaaagaattatattaaagaaagaatgtaagaagcaatgaactgtaaatacgcatcttattataagaactttctctcaccagcttgagaagatgcatgcagctctacgtttttctcgaggatctgaaacacaaaatccagagtcaaaatgcttgaagattaaaaatatcccagaaa

SEQ ID NO: 65380 - DNA, 1445 bp, Cannabis sativa
  modified_base (386)..(394): a, c, t, g, unknown or other
taaattttatatttatttttgtatgattattattattttatatttttaataaattattagatgaacattacatgatatattaaattttgcatcaatttttacaattattcattaaagcataataataaaatttgatgtaaaaatatcacaaaaccattatttggaccaattatagatcaatttttatatttcccattaaagatggtcttatagcatgatacaaaatatgcatcacaataaatgttatacttttatatttaccattatgtcatttttaatattttattattaaattttagttaagaaactcattcgcattaaatgacttattattattataaagtattttattattaaattctatatttatttttgtattattattnnnnnnnnnttatatttttaataaattattatatgagcacatattgaattttgtatcaaaatttataattatatattggaacacaataataaaatttgatatgtaaaaatatcacaaaattattttttatactaaatatagttcaactttatatctataatgggggacctcatggagagtattaaacaatttaatggcaactatcacctgcaatattatttattgtttatctagtaggctttcgttttgttttattttattttaaccttataattaataataatataagagttaggagagtgaataattgttctaatgagagtgaaagaatatgctaaagaggatcatatcatatcataattagatattggatgtagtatttcgagaaacacgttgcttataatgatataaaaaaattatatatttaatttcaaatgtttatttatatttcagaatagtggttagaaaacaaagaacattaaaaaaaatagttgtccttcaaaacttatccaagttacattgtatatatagtatagtaatggatttacagctatgaatgtcttcataaatatttataataatacaaaggggaaactcatgtgggacaggtcgatcaagttatagcaagcaatcttttgttttttttttctccatgaaactcacaattcgaggcacaagagatgtaaatatatatggatttattatgggtaccagtagtgtctaatatcttcgagacatattaccttgtgattggttagcttttgcattaattaaaagggttttttttttacacttcaaaataattttttttagcatttttacgaaattctacacaaaaattcctataacaattaatggagcaacttaaattgtaattaaaatccgtagcaatctaggtagaaactacaagagcaacccagattatactatatagagtaattctctttaattaaattatatagttatcaataattagttaaatcaatagcaatattaatacacataaacactattgatactttttttagcattttttagaaaccatatataatgaatatga

SEQ ID NO: 65381 - DNA, 1300 bp, Cannabis sativa
agtgctcctagtgtggtcgttcgacgatcattaaaaattattctaaacatgagcatttagtcccatgttcatgttttcttatgtcaaaccacaaaattacctatgttttattcatatttttattcattttaagaatattttatgaataattttatgaaattttataaaacttaatgtgctaaaaaaatattcagcatatcttaatatatgaatatattcttaatatatctagcactatttatagaatttatgtatagtattgaaatcatataaatcttaattgattgcactaataataaatttactaaaataaatataaaatagcaaaattatgatttgataataaattaaatattaaattttataatttgcaattaatgggagatatttttcaaaaataaatagtttagacaataaattacttgatgtggtaaataaatataataattgtataaatttaaatgttaaagtcaacacacttattaaaattacctgcttaaataaaatcatgtaattaattaccaaattatctttttccaattttaatttatacgaaataacatataaattccaaatacatatattttttaaaatagaaaaattaattaaatgtaatttattaaccaaactaacaaaaataatgaaaataattaatattcaaaataaattaaaatttatttaaaaaatttggaattttcctctacttttttttttttttgaaaaaaagcctctgaaaaaatgacatgtcatttttccacatagagtggaaaacgacacatcgtttacggtttaccatcaacctccagtagggtcatttgactcgtttcacagaaacacgggtcctacggacccgaccccaaacccactcggaaaaaaaaaatcgacgaccaaatttcgttttttcaattctaaaataatctaattgaaaaaattaaagatatatgtaggttttggacatctaaaacacgtaaaatatgaactttaattaaaaaaaatatcgggtccgtgtgtgtctttaatagatatgaaatgagagaagaagaagagattagtattgcctaaatatctatgagagaggaagaagagaataataatacataatcatctattttgaaagtctcttttaaattttttagtttccacttttttcattgttacataaagaaaataaaaaaaaatgtataccctgctaagttactacagggtatacatatccttttttgtaattggagttatacatatctgtaatacacggaattaagaaatggactagaaaaaccctaactagataattatgtat

SEQ ID NO: 65382 - DNA, 923 bp, Cannabis sativa
  modified_base (684)..(688): a, c, t, g, unknown or other
tagtagttagaggaagaaaatgaatacttgtttatattcccactttaaggtcagttttttctttttctttttttcctctttctgtcaagtgcattcattcgcattcgcattctctttctcatttcatttcaaattctccgatcggaaggaccgattcaggaaataaaaattaaaaaaaaaaaaacaaccggaataggttttaatctttagagcttttctttactcaatactaattgtgaaaggcaatgcagcccctagcctgcatttgatatgattttatgttataaaatgaagtgtttaataaaaataagtagtagtctatgtcaagggaagtgaaaagaagattgagatagacattacctgaatgatcatgagtgtcatgatatgacttcttgttctagttaagtaggtttttttaagggctctcagcaagagcttcatcaaattcaccaaatatgttgggacattcatcccattttcctcgctcgcgtgcctcccaatagccacccatgtagcggaaaggtccatcttcaccttctctttcgaaccattttggtttccacccactttcttgtaatttccttgactgcatttcccatacaccagatcataccattagagataagagaaaaaaacgtgaatatggacatcttccttagagaggaaatgtcaagtatgtgagannnnntatttacaatgccattttgcaaaaatgtcccatacataccattctttgccttttctctaaacgttgtttctcagcatttgccttctcatattctccattctccaaatgtcgttggtctggtctaagcctggaatccgtaggtggaagcttctccttaattccgtgatcaaatacccgggatcagacaaagctataaaaaacgattagagatgcataagaggaagatgaaaatgca

SEQ ID NO: 65383 - DNA, 664 bp, Cannabis sativa
gaaataaatttaaagagattttgccacaaaaagaaaaagataaaaaaattaagtgtgtaaaaattaaaatataaacgagtttcgttacaaattgctcataaaaaaaatattaaattttaggacgaacaatatttaattggtatggcattactaattgaaaaaagttactaataaaacaaaaatatctctataagttgtactggtgttatggaagttagttgtctcgcagaaagactaacttgtccatctagaagtagtctcgtgaaatgatagttaccaaccagaagagcgttctcgaatgtctatcatgttctcctgacatgtgtgtttctccaaatgactagcttttcgctagaagagagtcccggataattgactctagctggctcttttcctatccaggagttcctttagcatatgcttcagtcctctgtcccaaaagcgtatgtctcgtccggaagcactttatcttgtgctgacgtgaagattctatttcgaggagttgttaagtttgttatgtcgtaacaaacttaataactttgctcttctggtcactgcctttaggatttatgtcctgagcctataaataccaccaacacttagcttttcaggacaagaagttcagacgagtttcgagaggtgatcttgagagagagagagagag

SEQ ID NO: 65384 - DNA, 4303 bp, Cannabis sativa
tattagctagtttagtcagtgagtttgcgtttgcgtttagttcatgtcgcacttgttagatggagtagtgcttgagttgggctaatagatctttagctttgctgaagtatgggatcatgaatgaccttcaggcttgatactcaccaagaatctgattaacaactagctgtgtatcattgtagatctcgagtgactcgacttttatttctagtgctaatgacagtccttctagaagtgccccatactccgctttgttgtttgttgcggtgaactcaaattacaatgcactgcgagtttaaatccctttggagtaactaagatgagtccagtactataaccatactcgttgtaggatccatctacatatagttttcaggaaggtccaaggtcattctgagctgcattatcaggcgtgtggacctggtcttcacaaatcatggaatcgtcttcttcaaggcaagtacatttaacaatgaagtctgcttaatgcctaccttttgattgttattcaagactggtaggtgatctcaaagtgacctagttccactgcctacttgagtaggcgccttgatgcttttggcttcatcagagcttgcctaagtggttggccagttagtaccttgactatatatgcaatatagatcttactctgttcatttcgagtgttgtgtttttggtgtttcatacctgtttttatgcagatttttctccagagaatttgttattgatccattgatcttttcttatgaattttttgttttattcaatttgcctaattgaattgggaagtattgttaggattatgcatcgtgttgttattgatttttagtttcaaaaagcttggtccaacaacaatgacacactgacatttgggatgatgtgtgtatactgtattttttgtaattaaaataaaaaaaccgtataaatgtgtaaaatcccattaagctgcatttctattattattttttttttttactttttttttgcccttatgtaaaaatttctcttattaaagtggggcacatttataagtttttgaagtggaaataaaactcccattcttataaactgaggccctttcaaatagaagaatgaaaaaaaaggataagtgaatatgataattatataaattactatttttctttgtaaaatttttacgttcaaagattttattcttttgttatgtttttacgatattttataaaaacaacacgaaaataaaaaagaaaattatataaaaataacattcaaacaacattaaaaaaaataaaaataaataacatacaaataataaaaaatcaacaacaaattaataagagtacaatataaaaatatatcaaaatactatatttttttgtaaataaaattattaaaattgtaaatatttaaaattccatacaatatttttgtgttgttttgttgtatttgtaaaataatccccaagtaaatactaaatagagccaactacagtaatgggctttttactcagtacaggccaagcccaacaagagtttccatagaatcggatctaattcgggtttcgaacagacgtagccgccccacccaagacgaggttttattcaggtttgtttcttcttcttcttcctctttccctttttccctctcagacaatctggggcttcaaggtctgcaagaagaagtgacccactgccctaaaaccctagccttcttcaacactgtaacatagattcgaactgggtttgtacgaagaggaagaagaggaaaagcggaagaggagaatgccagggcccacgctggacatggagccggtggagccgcaatcccttaagaaactcagtttcaagtcgctcaagcgagcccttgatcttttctccccagtccaaggtcgtatagctcccccagatctcgaaaggtataaattccggatttttccttaattctttgattttttcttttttccctttaatttaattccatggaagtttaaacttagggtttacttcagttggttaagaaactagcattgtgagtgagactaatgtgggttttctttaaaattggtttttttgcagtaaaaagatacgtattaatcacaaggttagtcagttcaattgttttgctatgatatctcaaatgttttctttttcttctttaatttaaatcagagtgattggctatgtctgtactgatttcactaaaacactttaatttactctttagataaatatagagtatggaggaaccaaaaataccagtagccaacccaatcgtcaggagggtcgtcctcaacctacagttccttccaatgtgcttgcacttccaggtacagtttattctgttccagttagattgcatacagtccaattgtggtgcaatgcaagcagtattagctctagttgtcagttatatatgaaatttattatttaatatcttaatttcattaggattttacttgtttcctgttctagcttaagattaccaattaggcttcatattcttgttagttgtaagaagtttttagtgctcttcaaaaacacaattcgctgcaaggctgtacaataaatgttgttagacttcaagctcagtatgaagctatttgtatattagttaatttggcgtgctctagtttctaattggatgaagtttttgagattgtataggtcctgagggttctagtgattcacaaagaggaggctctcaaaatgctttggttgttggtccgtctgtgcctagaacaccgtaagtacattctctactgttttgtttattcaggaaaatctagacagcagtaggtgttttattattttcattatttgggcatgtattggccgtacacattacagaaaataagcatattgatgcatgattttaggataagtaagggaatctaatctacctaggattatagttagataacaatcctgctatgtcgagaattctaattttttgtttctgtcataaacagatcagtttcttatcatatatgcattgaaaagagtgatactagggacacttgaaacttacacccaaagtttgcacgcaataacgtgacataaattgagatattacgacatatcccaagggttattctgctgtgtttacactaaacttcaccctttttctcctatcttcttctacctcatatttgctccaagatttagtggcttttattgttgtactggataagatatttaggattctaatatctagtgtgtagtttttctgaactcacgctaatctgggtattgattttacatatattttcttaatgtagtactattactaaatataattaagaaaaaaaagtacatcctactcatattacatccaagaccctttccttttgaaatattgtaaggaacagactgttgatgaaatgttagtttagtacaaacttatagtgtgtaaaaagatccgtcatatacttatatagaatgcttagagttgttgagttttcatatcaagaggaggtcttttgctggctgtgaaaccttcttacatctattttttttttacttcgtttcaggaatgatacaggagtttcgggcaggagcactgatatcatatcaacttcaggcttgcctgaaaggtttttgttttattcttgtctggtcataccatgtcttattcagtgctaaagtagaaatttgaatgttatttgttaggtgctctttccctctccctatctctaattgaagctgttataattgttatttgttacaggaatttttcaacttctgctttaatggagagaattcctagcagatggccccgccctgtatggcgtgctccttggaagaactacagggtgagaattgagaatcactatattacataaatgtggtaccgaagctttgttttgctataattttttttgtttctattatcagtcgtacagtaacaagttacataaattttaggttcccttttggatcttctacttctagaacatttagtaatagattaagagatcatgtgtcatcgcatgatgagtgttttttcttttgtttctttttctctgataatatagcggtgcattgatattgatattattaatattattatcactttttatgtactggactgacttccaaattgatgattttctagtcctagtttgaaggtttttgcatttggtatcatttatacgttttttttgttggcctagtaaaatttgctacttaagcagactatttattatttatcaactaaattgtgcaggtgattagtggccacttagggtgggtgagatctgtcgcatttgatcctagtaatacatggttttgtactggctctgctgatagaacaatcaaggtattaa

SEQ ID NO: 65385 - DNA, 688 bp, Cannabis sativa
ttttatttattattcatattttttttatattgttaatatatatattttggtgaatagtatatatatataaaaatttttattatacaatatatcatttttttttattatgattctattttttattgtttatttgttgatgtgacatataattttttttgaatggaaaatgcattatgtgacatatacttttattagtatactatatatttttatttttatttattgttattatatatatttctatcgtaaggtatatatattttttgttatgtggtatatatttctatcattttattttagatcatacatgactacaagtttaatttttattttattataaataaatgtgatatataattttgtaagtacaccatattttatggttgtatataatttagttaatatgatatatacaatttttttaataatataaaatattatttatttttatttttaattgtaggtatatattttttgttgtgtataatatatcatttatttaagatgatatttaatttctatattattatatataattttgttagcatgatatagtattgctataatttctttgtacgtactatataattttattattacggtatattaatttttaatgatacgatatatcaaattaatactgttgtatatatttaatgatttaatatggtgtcgtttggtaacactt

SEQ ID NO: 65386 - DNA, 1261 bp, Cannabis sativa
ctcttcttatgaatgttattacatacagaaaacttatatttttatacttaatttccttacctcgaatgtggagtcctagccttgattgtaatgagaatgatccttgagaaattattttcttacgaaaaacctaaatttcatacttattaatcaggatttatcacaatggtacatatatatataaagcctaaccttgaattaatctacacatctcaaaagtaagataacatgatcaacaaaccttaacttgaaaaaaaaactctagtcgaatctatgaacaattattgaccccaaaacttgtagaaattatccaaatcaaagaaatatcgagaaataacataacgatagcaatgacgaggcttgtttaagatattggtgatattgagaggataatgtcgacgtaaggaagaagagtgaaccttgaatgattgtagtatttgactattagagatgacaaaatagaagtaaacactaaagtttagttttaaaatgatgagaggaaaagatatgagaaaagtcaagacttggggatgatactatagttttggctaggtgagctttgggttctgaatgagtgagtaagtgaagactagagtcctctatttataggaccaaaaattcattcgtgcctttttttttcaaactcaaagaacctttattctctcaactattccttcctctattctctccaacatctttgactgccactgataacaaccacatacacactatccacatcactcacctagactctgttcctctattcttgtaactaggttcggtcaaagcttcctcaaaagtaatttctttcaatacttggttaagagcttagaaggaaaactccacctcttaagcttgccatgacacctaagcaataattcaaaatttgaattgtttttcttatttcactacatgtaaaaagaataatgagactaacaacttagtcttattttttgtatctaggttggactatcactcccttgttaccacctttatttaaaagattgaaactaactagaaaatacctttcttatgttaatatgccatgaataaatattcttatttaaatccctatattactcaacaaccatacatgaacacctctaatgattagtattagactaagtctcctctattttaacttatatgtatctccataagtgaacacgtacaagcttattaggctctctgattttattaattaagtcccactaagataatgtaactaagagatttcctcatgctccatatgcatgtccta

SEQ ID NO: 65387 - DNA, 1118 bp, Cannabis sativa
cccatttaacctgatactatactcggttgcgatctgtcagctataatttccttatttatgcgtaggaatcaaaagggaaattggaagagtcttctaggaacacgctgtctcatccttccgatatcatcgtatcgaacatcctttcgggaatagtttaccgaaggcagaaggttttatgattgcagagctgaatgcattcttggaagtacttatcaaatgggcttggcccactttacctttgttgagggacccactgatgagccttggatgctgacctggactccacgtgtccattgccaaaaatgtagataacagtcattgaggttcaatttttctccatggagccgagggaagtactcatactgtcgtccatcagggccacagaaaagtaacgacgccattcacctctttcatctcgaaagtacttctgagtttaaagtggctcatttgtccttacccactagattttgtagcctctagttttgaagtatcatctcctactacttcgttcagcttgagtagcatgtccatttccccttgtagggtctcatggcctggtttcttgagaacattgaggagaacttagtggaggagtcttgttggttctctcattgttgtaaggtcattcaacatcagcgggagagcccattggttggtgctcgcgagcttgagtcctctcgggctcttgcttgaagataccttccctttgggaggtctccacacctagtgtttgcctagtgcctgctcagtcaccaagtgcagtaatggtgttatgagaattaaggattttgtcttaagcattagttcccacgtgactagcttgtcaaaggggtttctccctcacaaactcagaaagacctcttcgggaagtagttcctcgattagagcaatatgcttctctaatccgttgagataggttagctcttcgttgttcctattcaatgtgttggctttcaatattcttcgagttttccatgaaccagcgttgaaactattcatgttgcttatcgagacagtctcccagctgttgttgcaagtaagccatagtctggttgagatgagcaacctgaggatcaacctcctccaggtcatctatctccacatgtggctccttaggt

SEQ ID NO: 65388 - DNA, 1421 bp, Cannabis sativa
gaccgggacacatagtggttaagcatgtctttgcctctcttggtctccgtgcacaataccaaaggtggggcatgggtcctaacttgttcagatccacccctaaccaactaggatctagtcttagcctgcttcagtccatccgaactccctcctgggaacctttggacttggcgaccttcaaggtagaagggtccacagtaggttgttcctcagagagatcaataacctcttcaaccggtgccttctccttggacggagtctcaccacctttagacttctcctgataacccatctgaggctgaggaggaaggagtggtcgaacctccatgctttggaggatataatgaggtcgggaaaccagtatccaagcagggtgacgtcttggttgagtggtgagagtccgtccaagaagtctaaaggtacccctcataatcttctcatgcgatgttattgaagaggttattgatctctccaaggaaaaacttttttagttcccaaataaagcgaccccttctcatgcgatctgcttggagtaagaatggtgttgcactttgggttctagagtaggagaacgtttgctactcacttcccaatcctcgaaactcatgttagaaagtccgtcacttgaagaggagggactggtgggaagacgaggttggtcctcgtacagaagttgaagcaggtcctggtcaatacagtgttcacctccccaaaactcaccagggttcatctacaaaagacaatacccgagatgagtatttggtcgggatatcgaacacaaaaaacaagcaaatatgcgcgaccaggactactcaacagattaaaaagacaaaaaatgcataaagattaagtcataacccaggggtttgaaatttttgggttaaaggataaatttcacgaaggtttgaatgagtaaggtgaaaatcgaacattgcaagattaaggtcaaaatgtcataaataatgaagccatacgaactattacagagaaaattacaaaattttaagcctagattttttacatatctcctacaacaagtctagtacaaccgtactttgtacaatggaaacccagaaaattgaagatacaaagttaaaggagaaaaagattgaaaacttactcactgtttgaagcctaagcgttgtccagacgaagctgtttggatacttctacttgaaatcccacgacaagcttgaaagaaaactccttttttgctcagaggttatttcgtgaagaaaatggtaaaagtaacttatgaaaagtttcagccctatttataagctaaatggcgaaaaagagtaatcaattcaaatcctcagacgctttgatttcccccaaaaagtaaatattgagaaattaaaagcaatcaagtgccttagggaaaaacccgtcaaaagcgtgcaaagggaaacgtgtttcaa

SEQ ID NO: 65389 - DNA, 934 bp, Cannabis sativa
ggagtttttcaccgcctgcctcgaaaggaagagacgcccaaccacaactacgggggattcggagcttggagccagacccacctcatgtccggagccatgctcccgtttcaagattacttcataaactttttagtttttgttggccttgcaccttatcaactcattcccgaggcataccgcctactttcatgcttatttattttttatgtagcccgaggctgggcttcacctagcccggtcgaaattttatatttttatgaacttgtgtctgtccccaagaagggggataaatttaaagacggtattttcacactccgagcccatcctaccaatgagggtcagatcccttataatttccaaaagaatgtcaacgagtaccgtcaccaatttttgttctcttccggttttcaagcagtggaacacccggagctgctcacggagtgggtcaggattccttcgatgcaccgcaccgctcctacccaactcttcctttagcacgctaaggccttctccacatatgacaaagacggtcttaatgtgggggacttagtcacaatggtgagctgtaggaagactaagcttatcacggagagaaaatcggtggatgacttcaacctcttcaaggtcctttgccctaacattcgcaccccagatgctgaaaaggcactccgagcggacattatcgcctcagcggaggaccagtaccagaagtacctctttaggagggaacaagagttagcttacattaaggctcaagccgctgccgggaagactctccgagttgaggctggtaaagtgtcttcccggcctaagctgctgctcccagtttccaacaccggggctcctgacgccagcacgtccggatctggtaagtctcccttagttgttcatcatgtcccttctgctcaatattattctcgatgtagacctatag

SEQ ID NO: 65390 - DNA, 1384 bp, Cannabis sativa
attattttttaatagaattattgttaatattgttattcaagtattagtggaattgaagaaatttataaataaacaatttttttcttcacaaataaataatagttattattatattgatattcttaataagtatcgattataatagttatgtaatatttaaaacaatttttaaattcaaatttgattgattatttaatttgttattttttattctacattttaatataatttatgattattaaatttgtaaattttaaaattaaaattaatttaaattataattttattcaaactatacatgatttaattattaagattaatattacatattataatgagagttgttttattaaattataaatataatattactaatagtaaaaagttactcatatatatatatattttttgcttaacatgtaatttatattttttatttaatacaaatatctatgtatcattttttaagaaaaaaactatttttttggtgaattttatttttcaaatttttagtcaatgactaagaaaaaatatcaataaaaataatctatgataatgaaaaaagaaaatacaagaccatagtcctattatcaactttttgacaaaaataagaattcaaaattttaagttttaaaaataaggaatcaaaatagtgtaattaaaatacatgttcaaaatggtgtagatttttgaactaaacaaaaatttatttgcatacaatttataatttttataattaaattttaacatatcaataacagaaaagaaagattcaaaagttaattttaaaattttaaaagtaaagaatctaactaaatagttgacatggattaaactgctcattaatttaaaaatttttcgccaattctaacagtgtggaagttattataatgttaagaagataactcttaaagaagacatgttcatcaataagatgactattcaaacattgtaagagactgaatggagtgatatggtgacgacaatagatgagatacgatatttaatgaaacaatgatgacaatgagcaagatacgatgagagacaatgggtgagatacggtgataacaataggtgagatacggtgttgaatgattatattttaaaataatacattatattataggaaacacttaaatttttcctaaaccaccctatttaattatttttataataataatattttttaacaaagaaatttaaaaatttatatgtaatatatatacattatagtataaatttaaattttataatatcaaataaactaaataataataatcaataatattgtgaataaatatattttttttttatttttttaataaataaaatattattaataatatataattagatgatacaattggacccatcggacccatgg

SEQ ID NO: 65391 - DNA, 1205 bp, Cannabis sativa
  modified_base (276)..(280): a, c, t, g, unknown or other
aattatttataatataatatataaattatgtttaatagttaaactattttacatttaaagtttgtattttatagtgtttaatttgaaagttagaattgatagttgatatttttgattgtattttaatattgaagttgaaatttaaaatttacatatgagtatatattttttttatattattttttgaaaaatattgtttaatactttaatgtttattcaattcatatttatttttttaacattaatttaaactataactattttaattttgaaagnnnnnactatacatttattttttccaatcaattatttgaataccaaatactaacaataataaaagaataaaaaataaagattggtttaaacgggttaacccgaccaaaccgaagaaaattattgggcgggttacacttttttttttttaattttttcattagacgggttacatttagatatttgtaacccgacatttatattgggttgataaaaatacactataatctgaccaaatcgattgatgtaatcctggtttaacgggattaggttatgtttaatggttgatagtagcgtgcctttcattaaggtattatagattaattctcattaatctcttacttcacaatgattaaaataaatattattttcactaaaataatgtaattctctctttaatattatctaataatgatattatatttaaccaattaatataattttatccgataaaattaaatagctaaatactattgattatataattcataattgtcataattattcaaaataataatttcacaaattactattttgccttgaaaaatttatttcccatagaaattaattctcactcaaaatttactcatcaaataaaaccttcatttatacagtgttgtatagaggtgactcaatgaccatggacctatattttgaagcttcaataaacacttgattattatcgatcttatcaatagaaaaatctaatttattaattctattattactccactataaatatggaattgtactctttgacaatgtagaattatatttacaaattttttacttgtagtctattgatataatgaatataagtagtttaccctctaattattagttcataattagagttggtcaaaattaccattttacccttctaattatctatttactccttatgtatcattaattcagtgtgaacagataat

SEQ ID NO: 65392 - DNA, 2805 bp, Cannabis sativa
gattctgtcatcaggctatcaagcatgctcgagagagagaaagaaggactctgttgcgaactgtaagttcttgctttttatttgaaatcatccgctaactttttctttggtattattcaaagaaagtttattatgattgcgaatgattgctttatggcaaagctaattatttgaaaaatgtatatggatgatttttaatcttgtctatgtaaattttcatggttagtaggcaaacagacttaacaatgcaatggctgtctatgatatcattttttgtccttgatttattttgcgaagttcattcttttcgttatgtcctcctggaacagttgaacaaagaaaaatctagcactccagctaatactacaaccgaaaaaggaaataaggttggggagttattcccatcagcatcactggatgactatgcagaactaaacagagatgattttgaaaatgaagataatgaaaatgccattagagttttgtaatgaaagaggtaaaaacaatgtttgagctgttgcgttcagtataaactcgtatcaataatatggatcatggggtcacttactatgcttcattttgtcagattacttaagaagtgaattttgtctttacagatagaagtgaatacgagcactttatctaatgtgctggacttttttggtgcatgttgtgggagcagtgcctgctttgttgcattctctcaacgataaagaaacattctgaggcagatcattatctctcaccatcttgaaccgtatgaaagtctttgttttcactatccatctatagaaagtactgtaagcatagaaactcaacaaataatttttctttttcatttttacagatatctattgtctttcaatttttttccctgttggaagacatttattaatttgttgagagttgatattgaagtgaatttctgtagcttttttgtcctttagaaagtgcaatctgtttcgtggttgacattcacctttatgttatgaattttgctttttctctggcaaaatgcagaaaaggtggtatgatcatcaagaccataaattaggcttgagcttattaatattatttatcttgtttttagatggccttaagaggatttccacggaactatgattttagcttttatttttcatttcgaaagccttgttatttattactattattgctgttagaaacctaagattgtaaaagggccaaaggacaattctatactaaagataaaaattagtatgaagaaacgtgtctctgatgcatcactaccaaacgactattaagccactagggaaccaaaaaaagaaacaatacacaatcctagagtcaactgctgcataattaatgtcatcgattcatactggttcttctgggaaaacactgctgcttgtagctaaactgattaatctatttggttaatgcattaagaaattacaccaaagccattgaaatgtctcccctcccgcagttgtatacaagtactttcaactttgacactctcttctcgtaggttagttcttgggagtgagttctacccaagtgctatttggataaacgagtggagaaattgaaaaaaattaaggaatttgccaacatgcaaggacttctacatcaattgacagaaattctcaacgaatagcaagacaaataagtttgcaatgaacacactaaaacgaagaatggatggagactagccttctctacggcattatgcacaccaaatgctcatcaaaatactagagggagttgggtgcgtgcatcaatccaatcaattgtacatgccaaaatctttgaaaatcaatttcccacactttgatggacaaagtgacctttctattggttgtttaaagcaaagcaatttttccaattacatgacatttctcgtcatgattgagcggctctggcctcctctcatttggagggtgacacacacctatgataccaattactacaataagagattacaatagtttcatgagaagagttcactgaagggatgaacacaagatatgagccaaatcaatatcttgatttctttggagagcttacactgttgcaacgaatgggatcaaccaagaataccaagacaagttcaagaggttgttatctaaagctggagcattagagcaggctcaagtgagttttttcattggagatcttcaagattctatctgcaccaatattagagccaacaaaccactaactttgtcatctgctattggattggcctgattttattaaattaaagatctcacttccgtccaaggtttcatcaacatatggagaggtttaaaataatctaacaacaattaagaaattaacaaccgatgagatagttgaaaagaggagaaaatgattatacttgcaaacaattattcatgattcaagcatattttaatgaaagtgatgcagatgaagaaatggagattattgaagacaatccttggccacctatgtttaagcaaaactttgaggacaaggttattttcacggagaggagagttgataggagtgttcatcttatctaatttacattattttgcttattaagtagatctgatccgtactaagtgtagatttcatattttggatctaatccaatctacataataacttaaattcaatctaattcaatagatgtaaattgaatcgattattttgaattgattactttctaatattaaattatttaatatttattagaaagtatttttttaagtcaatagttagaattagtttcgaattaactattatatagtattttataattattatttttccttaatagttatcaaaataagtaaa

SEQ ID NO: 65393 - DNA, 2670 bp, Cannabis sativa
  modified_base (574)..(575): a, c, t, g, unknown or other
aatgttctttacttgttctttgatctcaaacctaccaaatgggcaaagaaaataaatacacaaacatatatattatatataggctttgcagctataatagtaataataataataataataataatacccttaggctatttttttcagttttaattgctttgtagactcagtaggaatagcagctttttcttttatggtgtctttattttttttttttctcttttatatttggttgtgttgattatttgagattttgtgagattttgctcatctttccatgattacatccaaatgggttatgttatattttttgaattgctttatggaggagtgctaatgttaatttttctacttaaaaatatatgttagaatatttttttttttttaattttttttatggcggtgtttgttgttataacattatcccagttattttttttaaaaaaaaatttgaatagtttttaatactaaaataagtttgaagttttttgaacacacgtgacagactaaaatattaaaaactttattttcaatactgtaaattattcagaattttttaaaaatttacaaaaannatattgtaactataacgaatatttcagcatgtaattttagacgtaaaaattgactaagaagttgtaatcaacacttttctaactttattttacttattagtaaggatgagtacactttataaaataattatattttttatctgtttcggcatctaatttttttttattattctgtatattatagttttttggtaccaataatttacaatcaaaaaaaattgtttaatgttttgttgactttttaaatttattttaaatattataaattatttaaaaaaatttagatatagaagcaaagtatactgaaaggatgttttgaaattttaacaaacaaattttttcaatgagtagcactttttttcacagtacaacaaaatgagtaaaattgttcttgccatggccaaacccatgtgtgctttttttttcatctttcaaattgtgtacccaaaaaaaaaaaaaatgatagtgacaatcatatatatacatggtggaagatggttaaggggttaaatcatatggttaattatgtatcatcaagattgtgattataattattattataatttttgattggttgagaaaatcataacaataataataatatagattgcaaaagagtcaaagaagaataagaaaaaaaggtgttacttaccatacctatacatgtgggtttaatgaataaatttgtactaaaggagtactaattataatattttattataattttttagtaaatttttatgcttaaaattacatgaatattttttttttatttttttataatgatattctttataattaaaatatcattcatgtaaattttttaaaaatttcgaataatttatagtattgaaaaacagaatatttgatattccagtctatcacgcgtgtttaaaaagcttcaaatttattttcggtactgtaaattatctgaatttttttaaaaatttatagagataatgtagtaattataacaaacaccaccattaaaagatattccgatatgaaaaattaactaaaaaattataataagagattaacggtatattactcctttttgtaataaatgaaatttaacagcttttgaaaaagtaaatctaatagaataatagaatagaataggtgacacttggtttttgcctatacagacatgaaaggcccattcttttttattataaattaggtgtttcttcagacaaggtatagtatcaattaagttaggcatcaaaaaggatcatgaaacaaaattaaaaaaataaaagaaaaaaagaaaagggtaccaatgggattattattattatcatcattatataactttgtttttacattttctatagttttttagtataaagctttactcactcactcactcactcattcactcactactatacattgttttaaataatgctttgagaaatgtgaatgagtgtcttgttttttcttagcagaatcctaaattaacatgatttatgctcctaaatctctggaccaaaaacaatgcctatgatattatcaaagcttaagcctaaacaaggtttgttataagatttatcttattattattttgtttaattaattattacttcttcttcttcttcttcttcttcttcttgctcttgatttttccttatttttttttttatttttttttttgtggttaaaaataaattaaaatggtttatgattatcttgtttattattactaagtaggattattagttcactcaaaaaccatagacttttgcatctcttactctgtttttttttaatgtatcatttctacattttcagaaatggtttttttctccaagagtttctctttttgtgaaaatgtaatattcataataataataataatagatttttgtttatttatttatttgaaggtgtatactatagagaggaaagtattcttaatatttggtttcatgccatttttacattcttaaaaatggttttgtaaaaatgcttctatacaactcaataataatgagaatgaaatcaactctcttcttaatggttatcttatttagttactatatttattgtcactaattaccatttgtttttccattaacaaaaaatggttact

SEQ ID NO: 65394 - DNA, 2843 bp, Cannabis sativa
tttttgttgtggcttgaataagcagggagaccaaggtaagattcatggcactcacagatcggcattcccaaaatttggctaaaaaaaattctttacttcatctaatgtgttgggagagaaagacataattgatttttgagtattaagaaattatctcgatgctcaatgataaacttctaggacatgattgatggccaaggctgaacttgtacatgcttgacagaataagagactgtcatctgcaaacagtaagtgtgaaattaaaggggcacacctagtgagcttcagaccttttagattccccatttgttcttcatgattaagaagtcttgatagaacttctgagaaaatcgatcagaaagagataaggtgacaatggatctccttgtcttagaccccttgttggccaaacattacccacaatctctccatttaagagaaatgaaaagctattagatgaaaggcacctcataatcaaagaggtccatttttgatcaaaccccattttgtccatgacagtaggtaagttattacattctactatattgaacgctttgctcatgtctagtttaagcgcagagaagcccttgctactttgtgtcttgtgtttgagatgatgaacaagttcaaaagcaaccagaatattgtctgtgatgaggcggttggaaagaaaagtgctttgagcttcaaagattattgaggaaagcacatctttaaagcgtaagaccaagactttggatatcagcttgtaaatgacattacaaaggctgattggtttgtaatcccccatcgttcttggtttctttattttaggattacagtaatgattaacttgtttaagatactcatgtcatggccttcatttagaaatcctagtaccacactagttacatctaaaccaacatgttcccaattgtgttggtaaaacattactgacatcccatcgcttcctgaacttttatctggactcattgagcaaagtgcatccaatacttcattttctgtaaatggacgtcgaagagactgattcatttcatcggttactgtggttggaactgaattaagcacttggttcaaagcttcaaaatcagtacccgtagcagtgaacaattcaccaaaataagagcatatgatttctatcatttcttcctttgaacttgttgctgcactagatgaattctacaaggacttaatggtgttatttgatttccttgatgaggcataagcatgaagaaattttgtatttttatcaccacattgtaactaatctacccttgacctttgttgccaatatgtctctacttgtgctagtatttcctctaatctgtcttcaacttttttcagctgaaacatagaagcatcagttcgaatagccacattgttaagctccttcacttatttttgagcctttgagatcttttttttcatgttcccatatttttgattatgccacctttggagagagcttgtgcaagatgcaatgttaatgcagaaattctctattgccgaactagtctggtttttttccaattctgcagtattaaatcagtggcatcataatcattaagccacattttttttttcaaatttgaaccttgaatgtctttgaattgtttgattttggctagccaaagggacaacagtgactgagatagccctgtggtctgacttgaaatagtcgagatggtgtgttgttatcggttgaaaagtcccttgccattgatcattaatgaagcaacaatcaagtctttcctttattgcattcacattatggcatcctttgatccaagtgtaaaaatcaccttcaaaaggtttctcataaaggtaacaatagtccaggacatttcaaaagttatccatttaggtctcattttgtaaagcgccaccaagtttattttggtttaatagaatttcattaaaatccccaatcactgaccacgacatcaaggttgcaacatccttacatctttctaagagcttataggtgtgtattcgattttgaatttctggtgcaccataaaaagcttagaaatgccaagtaggtctattattacacactatgtagcaatcaaacaaatttgcattaaagtttataagagttacatccacattgtctttccataataaaagtaaactcccacttaaacctattctagggactttaagtccattattgaaatgtaaagattgatgaaaatgagtaactacattacaatctaatttagtttccataataaataatacatgaggagttttttctcttctttttttttttttgaataataagtaatactgaaattcggtggtatcgaactcaggtcccaagaaaaacataatacctaccattctttgacaagtaaacgaaggtggcagaatgcacttggattccccaaaccacgcgcattctagctaacaattttcatggctaattgtggggctgaaagacagtctctgcaaagctgtcagtgtaactagatgtatctgcaataatctcggaagcatactggtttgtctcatcatcagtagaaaaatttaaaactgggagggtaggtttgggtcccttacatcgcttaagtgtctttcgcattgacattttctcaggttgcctcttacgcacacggtttggagaattgttttctttgtcgatcccagcaccagcagtcatacaaattatagaatcgaacattttaagataagcaagttgtagagaaactaaaacagagttaggattgaatgtgttcattgttgctactattggtggataagttgcaatatagccaattggatgtccaacacttggcatgtatagatcagacaactcactttcctttggtgatgaggag

SEQ ID NO: 65395 - DNA, 675 bp, Cannabis sativa
  modified_base (100)..(100): a, c, t, g, unknown or other
cgtagtcccataatcccagccatgacccgacccttgtgatccagaacaaccccaccaaacccatgcattccctcctcgtcaaacaatgcaacatcaatantcaccttgagtttttcataacctagtttagaccatagctcagccctatccgaaagataccaagtatcaaacgtagaaaacaaacttctttctcgagcttttctccactgatcaagagtgatatgagccaaatcgacaacgaactccaccaaacttttcctacccttccacaagagttgattttgtgcgaaccaaattgcccaaactaacatcaccgtctgaacactcttgatcagtggagaaaagctcgtgagaacaaatgaagaaaccagtccccaaacgaccctgcatcaactggaatcatagccaaagccactacggggcaacaattctgcgcaaaatcccaggcaactaaatagtgcaaaattaattcacctaccccatgataaatcaaacacaacaaagagacatccatatgtttagtcttcaactaaacttaaactctcgtacgaagacaactactaaacgccctctataatgcattaggtaataggatttttttggaggggtttaaattgattaaattctatataaatttaaattaattaaaaaaattatttatttatttttctagta

SEQ ID NO: 65396 - DNA, 992 bp, Cannabis sativa
tactttggttctccctaaagtttcttacttggattactatggttcagaccatagagccattcttgcaaatataattttttgactcaaattctaatcttgaacatcgatgctctcgatttcattttgaaaaattatggctcaaagaataagactgtgctgacattatttcaagttgttggacttatgattcactggatgatcctacaaatgctcttatcacctgtttgagtcgctgtgcaactgatcttcaatcttggcataatgggaagttcgacaattttaaaagaaaaattactgctgctcaaaataatgtcaaaactctccatgttgttgctacaccaacaattgatcattcacaaaaagttcaaacagcataatctttattggatgaactccttgccaatgaagaacaatattggcaacaacactctagaattgactggttacaatcgggagatcggaacacaaaattatttcatgctaaagcttcaactcgtaatgccacaaataaaatccgttcacttcaagatgaaaatggttatacagtgacatcaaaggatggaatctcaaatattgtgtcttcatattttcaagatctattcactgcatctgaggaggatcattgggctcttttccatgttttatcaaccatacctaccaccattacagttgaacataactcctttttacctaaggaattttcttcaaccgatgttcttgaagctttaaagagtatgggaggagatagaagccctggacccgatagaatgtctactatgttctatcaacaaaattgggatattgtgggttctctattaactaaggttgtgcttcatgtgttaaatgatggaggaaatccagctgcgtttaacaaaaccttgataactttgattccaaaaatcaagaagcccaagacaatgagggactttcggccaagatcatatctaagatgttggtacttcgattcaaggttattctaccacatgtcattt

SEQ ID NO: 65397 - DNA, 1462 bp, Cannabis sativa
tagatttagattcaactgttagcaattctagaattaacactgtaaaggaactaatattcgatcctttcgaaaaagcttggattccagtattgtatgacttgatcctaattactcatgttattaagcttccaaaacagaagttgaatcatcttctctgagaaactttaacgagtgaatcaaaaaacttaatgaacacaaataggagttcatgtatattcaagattcagactaatatactaaatttgcgctcaattttctagctctagaattaacacataaagggaaccaacattcaatctattaagaaactcaggattctattattgtagatcatgttctcaaccatccacattattagatttccaaaacagaagttgtaagaatcatcttctctaaaaaactttaatgagtgaatcaaagaaactaacaacatgaacaaaagttcatgatcactcaggatttaggccgagcttacccgtacacgacacatgacacgaaaaatatgtgaaacacggacacaaacacgactcgaataaatttcgtgtcgtgtcaaaccctgaaaatctcgtgtcgtattggcgagttgtaagctaaattagtgtttttagtgttattgtgtcgtgttcgtgtcatgtggagttcttaaatttcttttacatggctgacatgaacataacccgtgacacaaaaaatttataaaacacgaacatgacccgaataattttcgtgtcatgtcgaacctgtaaaatttcgagtcatgtttgtgtcaaacccacaagtcgtaatctgaattgtcaccctaagacaaacattaagaaataaaaatgctttaaaataaaataaaaataaaaaatcgtttaatcatctgatgggtggtgtatttattctattgttctttaaatgtttaaagaacctctattttaaatgagctattgggaatgctcagttattattatgtatataaatgtgttcatataattatattagaacaataaagctactttttcccactccaaatctattttattgggaaaaacaataattgtttcatgcaaggtattatgacaaaatcggcacttgactgtacaagaataatattagatttggggtacaatgcaactacatcaatattatgtgctgcaaatttttctcaaaatcaaaggttaagccaatgcagcacaatcccaattcttcaactgcgccagagattcattcctctgtagttgcatcttcatcttcaccatcctcttcatgaacttcccatcacaatgctcgtgtgtgctcgcattggtgctgttcattcagtattctttttcgctccctcacactcaccagcaccattattcactaaagctcccttttctttagcaccattaattaaattacttttctttcaggttgtttttgctggattttctgcagaatctctttctgagagtcatagattgcaaaccaaaagtta

SEQ ID NO: 65398 - DNA, 747 bp, Cannabis sativa
ttgcagagttttccctgccacactctcacaagccgcccaacaatggtatttcaagttagcgcccaaaaagttcaactcgcgaaacgcattctcgtcggagttccatgcacaattctcctcttcttaccaacttccgttgcacttaagagatctggtcgaagtgaagaaaagaccaggagaacctctttgagcctacattagcagatttatgagagaggcaactaacgttgcacgggtgaccgaagacggaaagttggccgcgatattggggggcattgaagttcttggggaactttggaaggacatcaagaagaacggactggtagattcaatgagtgacttccttgaccgtgcagaaggtttcattaagcttgaagaagccattcagcgagcagaagttgagcaaaaacctggccgaccaaaagctttctctgctgagacatccgtccagctcctccaatactcaggcaattcaagctcgagcactaaacacaacaacaacaacaacaataggcaaggaaacgggaaaaagggaaagtttgctggagaaaccgaacaagcccccagggagaattctaccaagtttactacattttttgtcctgacagaagatatagaaagtgtgtacacgactactcaatcattagccccgtacaagaagcccgcacccatgaaaaaagatgtgagcaagagagacatgactaaatttttccattttcatggggattatggccatgacaccaatga

SEQ ID NO: 65399 - DNA, 1123 bp, Cannabis sativa
agacaatgcacaagctatgcctttgatgatattgattctcttacaccaatctaattcaacagcttctaaatcattgcttagaacactgaacaagcttcctctttccatgtactcataaatcaaaaacatgcttgtttgctcaaacagaatccatacagtcttatgatatttctgtgacgaattttagtcaacgtttccacctcattctcaaaactctttttgaacgataacttttctgcctctgaattgtgaagcttcttcaaggcaactattttaccactaggtagttgtgctctgtatacactaccataaccacctgttccaatgcaatatctaatgtcgaaatcttctgttgcttttatgatatcttcaaatgcaattttcccatcgtaattccatattgacaaaatatcaccattttttgaagcttcattggtttgttggacttgtctagttttaaatagacgttttttggcctttttaaataaaatgatcaagaagaagccaattgagaatgccaaggccaatacgataaccatcactagtacttgtctagtcttagattttggggtagttggtttgctgtgttctggacattttttaagaagtggagatccacagagttcaggatttccaatgtatgaggcttcatctcgctcttggagttgaggacttgttggtatttttccagacaagttattccacgacaagtctaacgtgctgagaagatccgcatttgtaagacttgaaggaatttccccagaaaagtggtttcttgacaaattaagaatgtctaagttatagagtttcgaaaaacaatttggaagctctatagtcactatcaaaacaaacttcaagtcatggtgtgtgttttatgaagtcttatatatatatgaacaggaaactctttaggtgagagtatcatttttgctttcacttataaaaatattttttttattttaattggttaaataatataagtgcatgcaattaaaatggattaatataaatacaaatatatataatgttagttatattagtatttttaaaattgaattttttttttaatcaaaattagggaaatcttttaaaagtgtgttggtaaaatttcaaaaaaatagaa

SEQ ID NO: 65400 - DNA, 5018 bp, Cannabis sativa
caaacataaatttaagataccaaatatatgtaagataatttcaaaatacaaaatactttataaacattaattattgtaataccaaatatattttaatcccttgaaaaatatatattttagtaacacatagggtaccatatttgtgattaacattagtacttaatgctctctctttcagctaacgaattctcttttaacttaatactttgtttaaacacaagattagttgagatatcgattatttactttatttggtttgcagactaaaaaaaactttatgtggtgtgtacattaaaattatataatatattatacttatttattcattattttgtaggagaatgtatgagtgagtccatgtgtgtaaagagattttaatttattcacaagtttgatgaggaaactgacacaaaaacggtcacataattatgaaaaaaacaaaataaaacagaaatcttaaaatacaatatatatgtcaccatccagcataacagaaagaaatatataacatattatagccctaaattaaataaaaaaattaaaatgtgaaggagagaaaaagagaaagaagaaaaaaaagcaacctaacctaatcatcatccaactaatacataaattgcatatataattcctggaatatatcccaacagagtcaacaacaaatcgatccagaactccacctgcaattaattaataattaatcaaataataatttaagaatacactacatttggattagatcatttgatttttctgaaacaaaattatttatggtcttgaaataaatggaattccaaacaattttatcttcttttgtttataatatagatatattaaaaattctataatataatattaggaaattatttttcaccaattttgtatctcacaattggttagcaatgtatatccttcattacatattcatgaatgttattttgtaaaaaaaaaaaaaaaaaatctataaatatatgtagttttgaaaaaaaaatatataaaaatatttctgataatcacaaattatttttggaaaattagttaatgataactgatgacaaagattattattaccccacagccatagcgaaggaagacacccactggaggaagaaggatggccaaaatcacctctaggaatgtttctgatcccattttaattaattctattatttattatgattataattattattagcttataaattatcaaaataattactagaagatcgatttattgactttacttctaataactctacaactaatcctgaaaaaaagaagcttatttgatggaatattgaaaacttgtgtatgtgtgagctaatgagcttcataattctttcatgatgagaaaattatggagttatttaagctaatatatttgaacccctctaccttgcattaaaattagacacataccccatgtactagtcaaactactattattttatttttattattttttaagaatatttcatttttttacattaaaaaaaatataataataataataaataatatttcatttttaatatattatacatccccattctccatacatgttgttgagggtgaaaaagttgtcgtacaatacttgctgtatttggaaggcgaatatttctggttcatttcgattccctccaaatattttgctagttcttcctgatgggagcttcgggagttttcctgtagaaaattgtctaatgcttgttagtagagattttggattaaagagagaaaacacggtaacacagaaaatttgaattgagagagagaattcagtaggttcaatgaataacccactaatcgaatgattaaattgccccttaaaaatagggaaattgctgatatttttcctatactttcgtgagttgttaagacccaagggttggctggccatatgatgtccaaaaagctggctgacctatgatggccacagggtcggccaggggtggccaaccagtccccttgaggtggctggtttatcatctcgttgttcctcctaagtactcggatccctcgttggttgaagtgctgagtagatggcttgaccttcttgttggcgagttgtacttccacgtgacattgatgtaggccatgtggacataccacgtcaagtgggcaaaaattgagataacaaagtgaatcgaagaaattaataacatgtatagaattttgtgattactgaagatttaagttgatttactattgatcatctttatgataggtctttatagtaaactgtatgtttgataaagacaactcaagaagtggatccattaatataatgttgctgcaaacttgagagaagtaattagaaagtcccatgaggaatgacattatgtattccatatgatgttgttcttgaagttttttacaccaccacatgtataaccattacaagtacacgatggtctatagtttgataattcttcccagatagtctttaatctggtaaaatacatgctgatagattgtgagtcttgtttaagattcattaaactcttctcaagattgtatatatgtggcccatttctttgatgaaatatgaccttgagatcaatccagatcattgaagcagactcatcatagagaatgctagaggagatctctttagaaacagagtttaggatccaagagataacaatattgttattcctgacccaggcattgtacaaggcaagatcggttggaggtggctttggaatggaaccatcaagaaatccaagtttatttttgacagagataggtagttgcatagctctactccaagaaacataattttcttgagcaatatgaagttgtgagataaggatattacttggattgtctccatgatgaaggtaataagggttggcaggatcctcaagagggtttttcaaattagttgtctgaaaactttgattgccatgaacgtttaaagctagagtatcttctgttccagatttaacggaggtttgatcatcatttgacatgcttgaagaaggtagaggagaggattaagaatacgataaagatagtgtcgacgaagagaaggaaagcacgacacattcaccagagaagaagaacatagaggacagagcaagaaccaagatcgatcagagaaagctcctctttctctgctttgataccatattgtggaatggaagaataaatgaatgaaaaatgttattgaattgattgaaaaaaaattacaaagagaaagccaggtatatatatataccactaactgactttgactaaacacaaaagtagctaaccaacggttaactgacaaactaactgtacacaactaaataactctcctaacagaattcaattgtaccaacatggtatataacagagtagtggaaaatgtaaaagttattactggtgtagtatgaggatattcatattaaaatacttccgctgcaaacttgatctagtacgacaaaactaacacaacactccaccaaagtttgcaacctcaattaaagcaagctcaaagggcttgatttgataaggtgtccactgatcttcacaactttggattcaagtcttctaaagctaataaatctctttttgtacagtacaatgtacacatttcaagcttacacttatgtgctagtttatgtacatgacatacctgatatgggcaacaccaaaaccattgtctctacactacagtgatcaacaagctaagtcacacatttgctttaaaagacttgggtcaagaagactatttcgtaggtactcaggcttttcatgctgctaatggagtgctattgtcttaaaccaagtatctgtaatacatcttgtgcaaagctaagatgcaaggagttaaaactcacaacactccaatgaatagtggccaaatattgtcactgatccaatgcattatacaactttacacaagtctattgtaggttctcttcaatatgcctgcatttcaaggtctgtcaattcatgcacttttcatttcaatttcattgggttacaatcaaacaaatcctcaattacattgttggcactttagattatggtctcatgattgcaccatctccaaatgtacatgtccaagctttatgtgatgtagactagacttagatccaaatgaatagagatccaccacaagctactacatttatcctggacctaatttagttgattggcaatctgagaagcaaacaaccctttatgggtccttaacaaaagttgagtttaaaagtcttgctagtgtgattagtaaagtcacttagattaagtcattagttaatgaacttcaatttcctcttaccacagctccaattatttggtgtgacaaccaaagcacaatcatggttgctgccaaccctgttcttcatgtctagactaagcacatagaaatcaacttgtactttgtaagggacaaagttctgctacatcgaatctttgtgcaacatgttccaaccatggatcaattatttaactgtatgaccaagcctatttcaagctccaggttccctttcttcatgaaaaattgtgtcaagtctagagccacactcagtttgtggtggctgtcaggacaataatgataaatgaagctctaaaataataacctaccacttgttagttttctgttaattctgttttattcttggttgtttgttagagttagttgcaggttatttcttgtaatcgattgtgtaaaagcaacccttgtaagctctttcaatcaattcatgaaattcatttcctccacccactttagaatccttactctctggatgtactggtgggtcctgagttgaaatggactataggccaaaaaaaaaaatttaaactcttactataaagataaatagtagttttaaaaattattaaaaaaatatgtatatattttaaaaagcaatttttttatttggacccctaaaatgagtgggccctaggcgcgggcctagcccgtctatgccccgggccggccatcatgtacatgtagatgaaatcttgcagatatacatctaagcttgttcaaaataatacaattataatatatatac

SEQ ID NO: 65401 - DNA, 904 bp, Cannabis sativa
ataaaaccaaactgttagggttgagaaaattatactcgggtcgaaaacgaatcgatatgtttgacacgaaatataaaagtgagtcaattaaattatgacacgaacacgatacgatgtcacattttaatacccctaataaaaccagatttttgggcggagaaataggaagtaattctatttcatttagattacaaaactcagtggtaataataacacaatctttaaaagttgactagtcgctatcaatgataaataataattaatagcagcataccctacctctaatgtttacgaagttaggaaacattaatatatttagttttttttaaaaaaaaaaaaattaaagatagttaaacaaattaaaaattaaaataataaattgtataaaaattttatttaattcaaaaaattaaaaatattttattttaacaccaacataaatacaaaattcattactattataatatttcaaaattaaactacataatacataaataaaatatacataagtttgtacagcactattaattacataaaaaagtttgcagcatttttgccctcttaaccttttacactattaatgtgccccttatgatatatgacttgtaaataatatttttcaaaatataacttttataataacgtaatttttcagatatactgttgaattttattataaaataggtgatgtaggaaatgttaataattaataagtggaatgaaatactcttcaccatttttacattaatgaatattaaaaaaatcctttgccagcacatttttgtgctggcaaaagttagtattgctctatatttttgtgctggcaaaagttagtattgcgctggtgtacataatttacttgtgatgtgttcgcaaaagggggttggctaatcaatgttggtat

SEQ ID NO: 65402 - DNA, 754 bp, Cannabis sativa
caacaggaaggcatcgtcggaccactaccggcggaccccaccatcaggcctgacaaaaaaaactcagttttttgcccaaaactcagatctaaccatttttcgaccctttaacatctcggaggtagtcgggtctcacggtagtcgtctgtgtaggcgatctgtgtaggcggtgagaggtaggttaagttttagtgagggtgagatgttgagagagaactgagatagatagagaaagaaattgaggtttgaaaatgagaagggtatttttaaggtttattattaaaagttgtcatattttttaaattttgaaatatattaatttatgcataaaattttaaagtattttatgcatattttttcaaatttccactcaagaatgacaaccgaaaatagtgatattgcctgacacaaggtaccctccattcagttttatatataatgaatgaatcattcataaccgaaaaattttgtttggacatgtctagtcgcaaaaaaagttagtaatagttattttaattatattatatattaatattttattttttaaataataacaattatgggctccactaaaaattgatattcacaacatggtttgttaccgttcttttattcatttttctatttcaatttatcaatctctctatttgaaatataacatataatttcatttatatttttatatatgcaacatttagtattggctaaatggcggaaaaatctctaaaatttttattttaatttcacttaatcc

SEQ ID NO: 65403 - DNA, 982 bp, Cannabis sativa
tttcattaaattaattaattttttattattctttttactcattttcatattttaattaataaaatatgtgtaaaaatataatatttaaatgatatagagaaaattagagagaaagtatggtgtaatgtaaatgtgtgaggtaaaataaagaaaatagagttttgatgagttattttaaagaatagagtaaagaagctgttgggagtgctctcactctctctcttcttagctagatgtagctacaattttttttgaaccaagagtttagctattatagttaaattatacattatctattggagtcccatttatacactttagctaaaaaaatttcattttttgagaggtacaaggtgtttacctcctctcttgtgagtgctcttaggtttcttttatatggagaagaaaaaccacgtcatctcttttttgaggtttttcttttctttctttttttttttgtttagtttgtgtatataatcaggggcgtatgtacactcaagcctatagtggccatggtcccccaaagaaaatatatatgtacatattttttaacaaatttatattatgcaaacttttgtttttcgtatttatcatatggtgtacctcattcacaaagaagtcaaactaaaattttaaagtgttaattttcttatcatcaaaatattgaatgctaaactaaatacaatttctttcctttttttctataaaaaatatatatgtttccttttaaaaaaatatttatttttttcattaatactattagcttgctttcctagtctagtcatcatcgtcacttagttaaaaactaattaaaatggaatgttcatctattcaattatgaatatagtgaaaactacactttgtaagaaaaaaaaaaagatgcatttttaaatgaatgtttactagtatatattgaaaaaaaaaagagaataatttgtgccataaatatgtaagtttaaggtatttagccgttaagtgtcga

SEQ ID NO: 65404 - DNA, 668 bp, Cannabis sativa
tctctctctctctctcttcctttgttctctcgctctctctctctccattttctctcttctgctgcatgaaagaccagcccgactagctgcctttctccagccacagacgacccacggagggcaaatatgagctccataccctccaaaacctcgaggtatttcatcttgttcttatttttttttattgaaactttgattctcggtcatcattttggatctctctcctttcttttctcaggttgacagagctgatctatggtcattcgtcggtcagggtgcttctaagttcttggcgtttcatggtgcacgaagattcgttattggtgttctttgatggtgtttttaatgctgtgaacccttgttgatgtattaatttgtatattttgatataaatttttggaatctaattgtaaatgtttcaagaaactaatatatttttttttggttttatttttttttattatatttttgacttttaatcccgttatttcataaaaaattgggatataaagggataaaagtctctttttatcccaatttttatgtaataaccgggatattaaaagtcccccttttatcctagtcttttaaagactttttatcccacaagcatatattctggtttttattttagcgaaaatcgagataaaaagccttaaaactgggat

SEQ ID NO: 65405 - DNA, 560 bp, Cannabis sativa
aagcccctgaatcaactatccaagtaccgttgttggaggcagcagtaaacgtgtgagatgtagaaccttgatgacacactatactaacatttgccttgagtaagggagattttggctgctgtataggctgtcgaagaggattcattgaaatgaaagaaaaagaaaatcaatctagagaaaaacttagccaaagaaataatctgttgtagtgaagaatcctagatcaagagtcacagccgaagcagggagtgctagggaggaagacgtcgaagaaatgatagccagagatggctcacgcgcctgcacgcgcgtggcgcgtgggtgatgatgttggacgatgggcggtgcgtgtggctcacgcgccactgttatggaccccaaactttggggttttgtcgatcggggctgtgggaagctttttggataggaggtgagattagaagaggactctgtaccagaattctaagattgggcctcaaagaactaaaccttaattttttaaaaaagaggggcagaaaagaaacgattttttttactacaaatgctctgataccatgtag

SEQ ID NO: 65406 - DNA, 786 bp, Cannabis sativa
aattattacgatagtataataaatttctatgtagaagaatgaagctagcattttttttttaaaaaaaataaaataataaataaataaataataaaaaagaaaaaaataattataatagattttgagcgtcacttctccatcagaagtaattacaaaaagggtttaggctgtatatgggctactcaagtattaatagactgatcaagatgatgagtcttatggttatatatagtgatgaagttaattctaatgtaactgtcttgaatggccatggtttcaccaacatgtgcttacaaattttgcatgcaccaaactgataatatgattaattaattggaggagattaaaaaaaaattaattttttatttaaataattattatttaatttaaaaatatattaaaaaaataggaataatctaatacattgtaagtattacttatttatatgcacttatcaatttatgacccttagattaaatatctatggctctaaaaatgtacttaccatagggacaaaagtaaagtacttaccatagacatatccaataataatatataaatcaatgttaacttcaaaaactatcagattttattattatttttttgtaacccaaaattattagtattttgcattttagtctattttaagactataaataggagctcacttctattattttggagtgtagtttgtagtgtaatttttagtggagataaactatatcaaaaattcttctcatttttcttctcatatttctttttagaatttttatgggaacgatgagt

SEQ ID NO: 65407 - DNA, 996 bp, Cannabis sativa
gattggatccaaaaaataaaatctgcacttagtacagattggatgttgtttgaccaaaaaagcgcggattggatcggatgaacagccctaccacgaacccacgaatctatccctatccccttcaagccacaaaattgccaaaatggagttgagttttggctccggtgagctctaccacgacggcgaaaaaacgagagaataggagagatcacaaggagagactttggggtttgagtttcgagattctggcatcgcgactttatggttcacttggaccattgacgaccatcgtggctttcgtcggtgttgcaccgagaggaatgatagagaaagagaaagttgtagagcgagggaaggtcggggttttaggctttggggattgggaaaactcattctttggtccgtttggaccaccgacatcgacaagggtcgtgcatgcgcactgtcgagatagagatgaagtcataaacaaggcaaggggattttttgggcctatgaggacagtgatgtgtggtcctctcggggcgtgggtgatcgaagcacgacatttccgttgtgctaatggccgccgcacaagtgcaaagagaatagagagagggtgtcaagtgaggaagaaagagaaagagaattagggtttttatcattttcaatttacaccctttgaaactaaatttatttttaagtttaattatttttatagttttttaaatttttttttatttacaattttttaaataattttttacatgtaccaataaaattgtgatcatgtgttccacatgtccacatagatttatacatgtatagtctaacatgaaacttaattaacaccaaaaagagatagaaactgtaaattgctaacggtttcatagttttaaaaattttactgctaaaatttgatttggggagtttttttttttttgagataaaatggtgacattttattagcaaattgaatcaaccattacaatgtttaaaagatcatccggagcagta

SEQ ID NO: 65408 - DNA, 1000 bp, Cannabis sativa
ccatgtggggggcctcgcatggaagccgttgtttgtgttgtgtgtttgtctttcagaggttgtaagtgtaaggtgagaggtggatgcatattgacaagaatgacattggaggaggaatcaaaggacaagacatgcaagtggaaagcgtacaaccacacctcctaaagactctaaaagtgagaaggtacaagtaacggtaacaacagacctgcgaggtttgaggacccaaccaagggtacgctgcaaccaccctctagcaacctgtaaccggagaccacatgcctataatcggggatcacttgcctgcaaccagggaccaccctcctacaacttataatcggggaccacatgcttatagctgggaatcacctgcctgcaacgagggatgacccacctgcaacctgtaaccagggaccacatgcctgtaaccggggatcacatgcctacaactggggaccaccctcctataactggcgaccacctaacaccaaacaagggtacgaggtgcaaggccacctcctgcacctgcagcatgcagcgtgagagtaacactttgtctccttgggaccactttgtaccttaggcgattagagcctataaatacccctttctgagatgtgagaggtggttggaaaattattcttgtaacttgaccttgatagcaatagaaagtttatcattttctctctattttgagatagcaatttgaattcatatttcatccttattttcgtcttagatctgagcttgaagcatagtttgattttccagctaataagttagttgacgatttctcaccgttaatcgttttggcgccatttgtgagaacgacatgcttgagtcgagctgttcctttaaacacaaataatacaaaatgcctagattccatcgccacctttagggcgtggagattcaccttgataacaactagttggtcgctttggggcaagacctccctccaaccgtcattggagaagaaggcactaatgatcacaaccct

SEQ ID NO: 65409 - DNA, 1002 bp, Cannabis sativa
  modified_base (204)..(206): a, c, t, g, unknown or other
tataagtttgtaaaaatacaggggatgttcggtaataattttaaaagtagttttttgtttttttaatcaaaaatttagcaatttaaattaaagcgtatgttcggtaaaactttttgttttttgtttttttaattcaaaattaaatttatgtgaattttaaaagcaaaaaatctacttttatttttctgtttttaaaattaaaannnaaaagtgttaccaaacgccactataatttttctcaaaacaaaaaaagttattttattgaatttttttttaaaaaaaatatagattaaacagtataaggtaactggttatcctttttatgataagtggttacctctctggttactatatgggtacatggttaccttacttaatttttctatatttttctaattttttcttcaattttctcaaaaaataatctttttgaaaaatatcgtatttttgcacaaaagtataaaaacccataaaatttataatttcctcaaaaactaataagaaaattacataaactgctatttttataaaaaaaaaaaaaaagtacattttttatgtttttttttttacataagaaaactacatgaaagtaacagaaaacaatatcaaaacagtaacaaacaacataaaaaataatatacaaataataaaaactcaacagcaaaataacaagagtacaacataaaaatatattaaaagaccgtattttatgtaaataaaatctaataaactataaaaatatttaaaattctgtacaaccttattacttttgtatttttttaaaattatcccaaaactagtgaactgtctttattataaaaaaaaagtgatatttttgaaaattattaaaaaaaattgtttttaatatcttgtatttactctttagtattttgtatatatgtatatatctatatatatatatactagaagaaagttacatgcaaggcacgtatacttagttttatgttaagtgctctgtaatttaattgagaaagattcaat

SEQ ID NO: 65410 - DNA, 970 bp, Cannabis sativa
aaaatccacttacaagattgccaatatgctatgcaacaacagccgtttgatgaaactttacaagcccatgaagttgaagcccgagagcattttgcaacaaagcaggctgcttacatgtcctttttacagcagaaggcaaaggtggcttggctcaaagatggggatacaaactcagctttttatcataaatgtatccgtgttaggaggagccagaattgcatcctgtctatctcagatgcacaaggggtaaggattgatgatcctcagcttatttctgctatgtttcttgattattataagatgttgcttggtagtaaaatccaaaatagaaggcaggtgttgctctctattattagacaagggaagagtgtttcggataatcaagctgatttgcttcttcagagtttctcattggaagaagtcaaacaagttatctttgacattcctggtaataaagttcctggtccagatggatattccagttatttcttccaagaaaattgggacttgattggtactgaaatctatgaggctatttcatcctttttgcagtcaggcaagcttcttagggaaataaactcaactgttttgactcttattccaaaaaataagtgccccaattaagttgtagattatagacctattgcctgctgcaatgttatctacaaggcaactacaaaattgatatgcaaaaggttgaaaacagtcttacctgacattgtctctcaaaatcaaagtggttttgtccaaggaaggtttattgggcataacatcatgatttgtcaggaccttataagacactatgggaggaagaatgggaagccgagttgtatgatcaaattggacttgcagaaagcctatgatacggttgaatgggactttattgaagagatgttgtttgcattcaaattccccgagaaatttatcaagctaatcatgatttgtgtcagaactccaagattctctttga

SEQ ID NO: 65411 - DNA, 1061 bp, Cannabis sativa
attctattattttattaatataataagaatattttaatactaaatatttattaaattcaataaattatattagtaaatattaaatttcttaatttgatgtaaacattacattattttttactcttaaaaataatatttaatttactctaaaaattaaaacactttaaaaatatcaattaaattttatttttgaactattcaattaatacattttaaaactcaattaattaataaatcatttattatataataataatttattagtcaaatatttatattaaaaaaatattaatattactttatttgcaataaatattccattacaattttactcttacaaaacaaattacatttaattaatttcagaaaataacacacattaaagatattaactaaattatactaattttgagaattagtatagggaaatttgattaattatgcttgcatttagttaaaaaatttctcaaaaactcataatacccaatatttgtaatatatgactacatttctattatgcccaaaataccctctttatttactttaccccctctctcttcttctctctttccctctctcttcttctctctatcctcttactgcccgaagctacaccacaaagggaactcaatttttgctcttctctacccttattcttttcagctcactacactagcagctactacactacaaggctcaccacataatttctctcatttttggacgagcatcatacactaagctcatgggtaatttttttttgtgtgtaattcttgtttgttgtttttatatttagtttagaatgttatttttatgcttgatctgtggattgttgctgttattttgttgttttatgtgttaaaatgcttgatgtctgtgaatactgtatttttcatggtttttgccaattttttcgtctggtccgatggggtccaatgtacccccgatggtggtctgatgcctgtcaaagtttcgttgatagggttgaaggcccgatggggcccgatattgaccgcaaatgatggggtctgatgggcccccgatgggtatccaaaatgggt

SEQ ID NO: 65412 - DNA, 562 bp, Cannabis sativa
cttcgatcggtttatttttttgggttggatagtcactagagattttttttgtttgttttgctctgataccatgttaaaatttgaggataagataaatgaagttctatctcaaaacgaattggcaatgggagaagtagcccattcattcctcttatatattctattatttttccacacattggtaatgtgggactctctaacaaaagttgaacccttccaaaacagccgtcaagcaattcctttttcatgttggcccattttgtgtaaatgctaagatggtttgaaactgtggaaacattgactattaatctcttcattagtttgagcatagaacattggtaaactagagatatacattggtaaagctcttggtcttttcttgttgtttctttgcatataactgcgccgtgtgtgaagatggcggatatgctttaaactcagtaacttcaatagcaactccccgtgtttcaggcattgtagctcttctgaaaacattaaatcagcacttgccacaactcacaaccgggtacttattattctgttttcacttattcaataatct

SEQ ID NO: 65413 - DNA, 728 bp, Cannabis sativa
aagtggtatagaaaccacctggctgacttgtgccgtctttggacacactggagtggcacaggtcgacgacatgagatggtgaagtttttctttggccaagtatatttccaacatcaaggtaccaaaaacaagtgagaaaagtcaccaagaggtgtagaacacttatggccgacctgtgccatctttgtgacccaaaagatggcacatgtctctcccaccaattgaccaataattatgtgaccaaagtatttttctagcatctatatgattaaaccaaacaagaaacactatcataggcttctcacaaaccatagttgacttgtgtcatctcctggtaccaaaagatggcacaggtctcctattagagtttcagacgtcgagatgaagtttcgggaccccgaaacctacaaaatatgactcaacataaacaaaagtcaaaatacatcccgaggtgtccaaaagcttgcaaggcatttactaaattttgtaatggactggaaaaaacatcaataacatatcgatttaccatcgttaaattttaaaaattgcaatgacaacatctagaggcttcacatgaaatattatcgaaaactcatcgagaacacatcaatttcttatcaagaaaccatcaaaaaacacgttttagctaaatttttaaaagcataaaaaaaaaacatcgagaacatatcaaaaatttcacaatagcagtttcaattaacattaaatat

SEQ ID NO: 65414 - DNA, 876 bp, Cannabis sativa
  modified_base (842)..(842): a, c, t, g, unknown or other
ctttaattaagtgctgaaagaaataccttgtagctaacaaaaagagaaaaggcataattaaatagaagtgaaaattagatgaaatatggaatttgatactaaagttacaaaaatgtgtcatttataagttttttactcttttatggtatttttttatatttaagattttttgtggtatttaatatgccatgtttttgtaaatctattaactaaactcatattttattatttttgtttctagaccaattagttttatcttgtttttttttttttggtttattttgcatttgcactttaaggtttttaattctctatctttatcgtctactttaatatttttagtggattttatgtttatttggggtattatttaagggaaagtagaaattacacattatataggaaaataaagtttacttttttatgacataaataaataatattatggggttataagtttttttatttttttacatttatatgagatttttatgtcatatattttgtaaaaatagatagaaattatttataaaataataataagtttcctagaaaagtcacaggcgccgaaaaaatcatcgagaaagttgtcgccaccgaaaaagtcaccggaaaagttacgccggaaaaatctccgtcgccaaaaaagtcactgtcgttggaaaaattcattggaaaagtcaccagaaatatatgtctctcatataaataaaaatagaactaattttattacataatgaataaaaataaatagcacaaaataactcaacccggttataattgaaatgagtaattggcggtaaaaccccctcaactcttaattcacttgcaaataaccatcnaaccttatattttggtgggaaaaccctccaaagt

SEQ ID NO: 65415 - DNA, 2494 bp, Cannabis sativa
cttgataaataacatgtaaagatttaaattttgtttttctttttttttttttttgtttcaactcaaaattaaacttaattggtcaaaaaaaaaattaaacaaataaacataattggcaatggagtaaaccatgttcttgatgttagtgtcaagtattaacagagttatttcttaagattatggctccaataatcctaaattaggacttgataatactagcttgtaaagttcctttttatttttcaactcaaaattaaacttaataagcaatggaatgaatgaacaatagtcttcatatagggttttacttgcagagaaataaggtttttacctgagagggctaacaatggcgggaggagcgttagggaaccaggtcaagacaagtctcacaatcaaaaccgtattgtagagattaagaaagttcgataaaccattagccaccacaagtccagccaccgaatctcctggaagaacagcagcgaaattatgtgtagagatcgaatttacacaccgataatttcttctctcacgaatctgaaatacacacaaacaaaaatcaactcactaaatttcaaaacacaacatatatataatcaaaatgtatgtaactgccattagtgaacctgattgaaggagtttagagagagcaatttgttgagaagaggattctgagaagcgaacgaatgaagattttgagcagcggagagaattgaggtgcgaagattttgagcaatggcgaaaatttctgattgaatgaaattgtgctttcttgaagatgatggaggaggaggagaagaagctttgagaaatggagagaatttgggggaagatagtagtaatgtaccggagttagggaggaagatgagtttggaggtttccgccattgatgaagatgatgaatcgttcggaatgggagccatgtttggttaactcggtcagttttcactcactgagtctgactcggtgagtataatgagtgcatgaaagactgaggtgaagagctgaagaggataacgattttttgtttttctcgtgtaacgcgtggatcagtaaaagcatgatccgtggcactttcccactcatccaattacgacgacgttttacttataaatttcttttgaaaatgttaaagggaatatgcgttttgatgaaaaataagggtggacatagcgtgcgttttcgggttcgggtgtataaaattagtaatccgaacctacctggttgtgtgacagggtttttgggtttcgggtgtgggtgggtcgggttcaagttaaattggattcggatggattttgctcgggctcgagctgggttgacctttttttttttgggtgggtttgagtttaactcaattatgtatttagataaaacacatggtaccaaatgtgtccctaaactatgacctatatattattatgccccttgaatttttcaactcgttaaaaatagcctctgaactattcatagtgtcgtaaattagtcattctatcaagttttgttacatgtagcaaacaaaatgatgacatagttatttagataattgacaagtcactttgaataattaattaaaaaataatttatttacttttaatttaattttgcgtaattcttttaatcattaattgatcttcagtttaatgatcttttaaaaatgcatatttttttttattttttttattttaaattatacacgtggcaattgactaagtaattaagttgtcattttgtttattacggatgacaaacttgacagaagaattaatttacaacattgtgaataattcatggactacttttaacaaactcaaagatttatggggcacaataatgtataaatcatagttcggagcttaattaggattaatccctctgaataattttgacatgtaccgaatttctttgaactttttaggtcgtcaaaaatcgccaataaatttttaagattgttaaatttaaagacttttattcaatttaaaaattgttcagagatagatttagaatattgacaaagtggcgatgagacatttattagtaaaattgaatgaaaagttttgaatctaacaattttaatagctcggatgaaatttttaacgacctaaaatatttataaaacataatttagattatgtcaaagtttagaaaaaatatcttaattaaaattttttatattttgatacaactaattatattctaattgactatcaaatttaacaataaaaacttttgatagttattatttgaaacatatttatggtatttattatttaaaactactatcacatgtatatttataactttgcagcatgaacattattttataaaaataattaatttcatggaatattggcagctaaatcacctgaactttatactttgtaataattaaccgcaaaaatagaaattttggcggctaaactatctaaaccctgatttcgttttgctctgcacccctctgtccaaaaatcacagttaagtgccacggtagactgtccac

SEQ ID NO: 65416 - DNA, 1574 bp, Cannabis sativa
gcaaacgcgtacagtttttatattttcatatatacaattgacatttgcaaaaatacggtttttcagtcaagttgccacaaatccatcataatacttctctccatagcaacaactgctcttgattatgagatttggcaaatggatgtcaagacaactttttttaacgaaattcttaacaagaaaatctatatggagcaaccaggaggttataaacttctaggacaagaagagaaagtttgcaagttgaatatgtccattatggacttaagcaggcttcttgctcatggaacaaaaggttcgatcaaataatcaaaacctacgactttcaccaaaatgaagatgaaccttgtgtttacagcctcaaggataattaagtggtagtatttttagtcctttatgttgatgacatcttagtcattgcaacaatgtcaggaagatgactgatgtaaaggagtggctaagcacccagttcaaaatgaaagacttgggtgaagctaattatgttcttgggatccaaattattagagaccaaaataatagatcacttgctctctcgcaagcagcttacattgataaggtgctagagcgtttctcaatgaccaataccaaaggggaaattatgccttctagacatggtttgggactatctaaggaacattctcccactgatccccaagagatagaagacatgagaaaaattccttatgctttagtagttggaagtctgatgtatgatatgctatgcactagacaagacatttgatatgcagtgagaattgtgagcaggtatcactccatcccaggaaaggaacattggatgatagttaagcatattctgaaatacttataaaaaataaggaactatgtgttactcagtttattctagaactatttattggcctggagcttaattatataggtccatggcccctacactaattgagataatattgtcttatagactcagtgaattgattttacttaatcatttagaaatctaaaatagactatgtattatttatgagttttcaataagtaagagcttatttgaaaagaaaagagattttagggtttattttctaattaagagactttaaaaggtttaattcataaataagttaaaagataattttatttaataattaattaattattaaataaatagaaatgacatttatagagatataattgaaaaatagcaattgagaaagaaagataagttttaataaaagtggcaaaattgaaacccaatgggtccactaaagatttcgaccatagggtttaaaataaggtaatttatcttttttttattccatatttaaattttaatctaacactaacagccatcatataaatagaaaattataagctcttatttttataacttggtaactggataacctagtttcactttgtcaaacaaaataagagagctcttctaatttttgaaattcattgcttcttcttctcttaaattcgtgccctatagtgaatgagtatttgcccatacaatttatatcaatactcaagatagtgtgaaagattgtgtagtgttcttgtcacctgaaggagaa

SEQ ID NO: 65417 - DNA, 901 bp, Cannabis sativa
cgaccaacgacgatcctaggagtccctaccaaaaaaaaaaaaaaaaaattacttttagtcacaaatttttaaataattgtgattaattataatttataatttttatattgtgactaaaaggtccgtaactaaaagtattagttaccaaaattataatttattgtgactaaatgtatttttaattagaatagttaactaaaaattaaattagtgacaatatataattaaatactatattttaatcacaaatagtattttgtaatgtcacatttagtcacacaaaaattatagtgtaattaaaagtcgtcgctaaaataatagtagtagtaattcctgttctctaatagcatgtttacttaaagggaatgagaataaatggtattgtattgattcttatataattatttattaaattttagaaagaaaaaaattaatgtgacccataaattagggagaaaacaaaaaaaaaatatacattcctctttttttacttaatttattataattttaattttattaattaaaaataaaaaagacaaatatactcattaaaaatctataaacataaaataattacatgttttaataatgataattttgttaaattaaaatatttcgattatctttgacttttttttttcggagtttagtaaacattataataaaatattgtttttcattatattattttattttaaactaatacatttatcaaattagtagtgtttagtaaatttctcataacattaatgttttagattatatcctcaatatttatttagttttcgtaaaacaaaaaaagttgaagctaagttgtaattgggccttcggtccaactttattgggcttcaaattaataaactacaattgggttcctgcgcgcaggtcgagaggatgacgg

SEQ ID NO: 65418 - DNA, 1431 bp, Cannabis sativa
tttttttaataatggggtgtacttatcattttgtggggtgtaaatagaactcccctaaatcaatttatttcctttttgcttgaaaggctattttgcccttatggcataaaacccacataatcaactaagggtataaaagtcattccaaccatacataacttcatttgaactcataaatatctcatatttttactaataatctcattcataacacataagactatttttggttcacgaaccctatttgagcccaaaatacccaattgtgaccatatagcccttacttgtcaaaaatcacatacaataaaacaatatgatcatactatataataatatagtccattagcacaatatgtaataaaattatgattttaccattctcaggccaaacttacgaaaataccctaactcataaatggagtcttataaatgataaatctaaagtaatttcatataattaattatataataatataattactcaattataattaatctattttaattagggtttctaatctatttactaatcttgagatattacaattttctcatccttatagaaattttgacttgaaatttacttgaataacttaggatattgttgtctcaatatcagactctaactcttaggtcgcctctacgaccttgctattccaccataacacttttactagaaccagcattttgttcctcaacactttctctcttctattgagtatctgcattggttgttcctagtatgaaagatctggttgaagttccaaagctttgtaactcgaaatatgagatgagtctgacacatatttccaaagcattgaaatatggaatacattgcatacagcttctagtcctggggccataaccaacttgcacgccacttaccctatcctcttcaagatttcaaaaggtccaataaacctcaggctgagtttcctcacttgtcaaagcatttcactcctttcattggtgaaatacggataaatataatatctccaacaagaaagtcaatatttcaccactttggataacataactcttctgtctactcttggctgtaagcatttgagccctaatcttatcaattacttcactcattttctaaatagcttttggacctagaaactttgtctcacctaactcatcccagtaaatagttgatctacactttatgccatagagtagttcataaggggccatcccgatagttgactaataattgttattgtaagaaaactcgatcaaggggaggtacttaacccaagatccctcaaaatccaacacacatgcctggagcatgtcttctagaatgtgaattgttctttcagattgtacatctatctgaggatggagcgctatgctgaatttcaactatgtacctatagctcgctgcagactttcccacaatcttgatgtaaacttcggatctct

SEQ ID NO: 65419 - DNA, 824 bp, Cannabis sativa
  modified_base (566)..(567): a, c, t, g, unknown or other
aattaataacttttacaaaataagtgtgaaatgtatttacccatatgacacatatcttaaatatgatatgtgcaaatcataattggtttcatttttcaaaggtcttatttttagcattttaaaaaatacaaagtctattttgtcatttaataaaataaaaggtccaattaataacttttacaaaatacatttcaaaatagtatttaccctattattgttaaaaaaaaattctcatataaaatgtacattgtcgttttcttcatcaattaatcagtagtggtctcaatcatattaatatattagcatgtgttattagtatgtgcattatccttaatgttcaaattaattaatgtgtgaacaattaaattggtttaacgaagattttaggtcacgtttggttcgaataaatgaaaatataagaatggtaatgggaataagaatatgaatggaattgaatgaaatgaaataaaatttaaaatacatgaaaaaaattgataaaaaaattattaaattttttttcattatacattagaatgctctttctttctatttcaaaatagaatagnnattccaccaaaatgatggaaagacaattttattctaatgacattccaacactttaatatgcaacaaaacaaagaaataaatagaaaattatttacattatttcttttccattccatttcattacctccaacaaaaaccaccttaattctaatatataaccatgactgtgtttagtatgttttttagcttttactttttacatttctgtatcttttgaaaaacaaaataaaatgtgaaaaagtgcgcccaccgtgggg

SEQ ID NO: 65420 - DNA, 639 bp, Cannabis sativa
tattagtttaggggaccaatttatgggtttattaagcatgaaaattcaaatttccctttgtaaataattggtctggtactggacgtagcttcttcacgggaaaaatgcttaatatttacaatgctttgatagttaaggatccagatactgttgatcaataaattaatgtgacttgtgaagtacagcaattattaggaaataatcgagttttagagggaaaataaccttatttcatgttgccacaatgttacactaacaacggcatgtaaaaaatagtccccaaaaatagaattctgtaaaaacataaatttttgattatttttaggtatttctgaaatattctcattcataaaacgatgagaatactaattaagcacacaaactgtagagcggtatgcaattgtttttcaaagcctagagtttctatttgcttttgcctgggtttgatatctgaaaatttagactctgcttacttttgatttgatataagttgggaatccattgtggtagagccagggaccttacggtttgcttgctctcaattgcctttaagctgctcataaatagaaaatgcttggcttaatgtcttcaaatcgcttgagatatggggcaattagggttaggacttaggaccttgta

SEQ ID NO: 65421 - DNA, 1440 bp, Cannabis sativa
ataaacccaaacaattcatgaaaagcatccacaatagtaaaaaaataagaagccccataggaggaacgggtcctatatggtccccactaatcacaatgaataagttcaaaattcttctagcacgactattactatgaggaaaactttttcaagatttctttgcacgaaaacatacatcacaaccatttttattcacactgttatggcatatctactaataagtaatgggaatcaatagtaatgtaatcattgccttacatttgtttacttgtattattaaaattaggaaagagagaagttgattaaataagagagaaaagaaagggagaacttcccccaccaattttgtaaggaacgccagagtaactcacaagcggaatcctccgaagaacttttccgatagatgccccaaaggtgtatgccataaatccattgactcagcactatctatagcaaggaccttgactggtggaacacctcaccaaagaatagtccatccttgcgctcacccactcaaatcaacctcctcgtcgtttggtcttgtataacacacagagtatcaatgatttgaacagtgcatttatgttcatataggagtcgtgtaacaaataacaaattacaatccaaattgggcacaaataacacattattaattttcaaattgccaagcaacaccacactcccctcacgtgtagcttcagcagatcaaccatctagtaatcccacaggacaatattaatgatcgtaatgtacctgtgacatgattagtagcccttgtatcaataatccataaacactcacccatcaatcaatttttaggcttaggcaaattaacaaagtcaagaatggtctgccactgtgtaggtgtaatgccagacaaactcgttgcttctaaagttgtggtcgatgcttgagaagaacacgcctaccctgaagagcgactaatagttctgtttgcacgaacatatggtacatcgtccttccatgcaccactatttcctcctcctttgccattacaactagcagaggcaccattacgaccatcacctctattgccacgtcggtcgtggccaccatgaggcctatcccgctactagtctgagaaaccatgaagttgaaagcatgaactctgatcatgcccttaacgattgcaatggacacaaaatttgttagaatgatcaaaagaacgcgatttacctcgaaagttcgtctgaacctcaaatgccattatattgtgttcttttgcacatgattaatatctctgccaggttattgctcctcttgaattagagtttgatacgccttattcagagaagttagcgattctgagtcaagaattgtgattgtaccgaggcataagaaatgtccaaaccaataagaaaccatagaagacattctttctacagtataatgaggtatttctctgcaatattgtactta

SEQ ID NO: 65422 - DNA, 2014 bp, Cannabis sativa
cattcaatgcaatcttcaaaggtacgtatatcatgaactgaagtactttgaattttattcatttgtttgtaaaataagaaagagcactatgtatatattttaaccatttatatttttatataaggactacattgtgtagttatgattaatgtgcgtagaaaatgtgtaattaagtgtatacacctcaaatacatatatctatgtatgaaaaacattataatgtccacatattattgatcaggcactacgaaatgcaagaataataaacaaattattatacaacctcgaatgtaataatacaagaaaaactaaacaagagatagttggccattacatatttcagtccattttattaattaattgtattatatttatttttaggtatacataattgttcttgttaaatttctgttttgtgtgtacactgtgggccttttatatatatatataatgatgcatgctttaaattcttgaaatgcaggtttctgaatttagtggccaggattcaccacaagtgtactattgataagatatctcaccagccactttgttgagatatatatatttatgctagcacgtagtagtagtagtaatgttggatatccagtataataatgaatatgatctatgtctatataatgtataatgtatgctttcatgaattgtgtgtgtatattatgccatcaccagactatatatattaaatatctatgagatatatattaattagttatgctcatcaaaacttcatttaccggagttcgttaattaagaatatgtattagtactgcagaagtaaagaaagtagagagagtagtgaaatgaatcagttctattctattattgatgattgattgagagaatacagtaggtaaaaagctacttatatagtacgtagttggtaacttgtaacagacatatatagttgtaaccaaaaaatataaataaatagataaataaagctagttataccaactaacatagacaattctaacaaactctactaaccaattcctaactatgtcaagcttgatactccctcaagatgggctatacatgatctttgaacccatattgtctttgaatgtcttgaactgattagaaaataatagttgagagatgagctatcttgataagccctttttgaactttctatctaattaagtgacaataagtctctatatatctggtcctcttatggagaactagatttgcagttgtgtgttgagctaacttattgtcacagtgcaataatattgcaggtccaacatgttcaattttcaactcctttagaggttcaaatgttcaattttcaactcctttagaactgataagagccaaataatttcacatgttatattagctattgtcctatattctacctctgctgaagacttgaaaacagtatgttgtttcaaacttttccaggaaatgatggactttccataaaaataaaaaatcttgttgtagacctccttgtatcaaagcaatatgcccaatttgagtctgtataggttctatttttacctttgaattagtaggaaaataaacccagacaagtcttgacatattgacgcaccctctgcaacattcaaatgactaacttgaggtgttgctaagaattgactcatcttgttaactgagtaagaaatactacaactttccaataatactcctatacaatattggatctgtcatgtctattttgtcatcttgattgatttaatgttgactctcattggtgtattcactggtttgcaaccaagaaaaccaaggtccactagaagctataacgaatatgatctctgggacacaaaattcttcttgtatgatcttgcaacttccaggccaaaagaatacttcaacaaacccaagtctttcaatttgaattgagcgttcaatctaatatttagagcctctagttcttgtaagttgttgatggccaagataacaccatctacataaactagaagaaaataaatttgccactaaatttttcatgaacaaagaatgg

SEQ ID NO: 65423 - DNA, 1754 bp, Cannabis sativa
atatgtgtcgtcgggtttctcatctcacaactgttggtgtggttcgtatcaggtccaggtctacgtccaggtccaaacctcgatcttagtttgggtcctcgaaccgggtctaggtctcggttctagtttgggttgtggtccgagttcggttctcgatccagggtcatatcccaaattcaaggtcccggtccaaggccaagtctcagtttgggttctgttctgagtttgggttcaggtttggctcttatttcggtactgggttcgggtctttgtcccagttctggtctggttccaattctaattctaggttcaagtccgggttcgtgttggtgtctaagtctggttctgtgtccgaatcctggtttgggtggaggtctgggtttgggttctgggtctcggtccagctccagtttataattcgggtccagttattggtctgggtctgggttcgggttcactccgagttggggtctggatccccatctatatttgggtctgggtcagggtttggggtcccaagtctgtttctgggttcgattctgaatctgggtcccggtctcggtacttgttcaagtttggatctaggtctgggtttggttctggttccaagtctgggtcccgagttccgatcccggtcagggcttggggtctgaggtcgggtctgggtttggttgtagttctgggtacgggtctgagtttgagtcttggtttagggtttagggtttagcggttataatttaaggtttagggtttagtgtttagggagtagggtttaggtttcagggtttagggtttaacatttggcgtttagggtttaggtttagggattaaggttcatggtttagggtttagggtaattaataataaatgtaattatcattacttattattaacgcaaatttttgttaactaattaacaagcctttttcgtaataaagttgacacaaaaactataagaaatttgaaaagaataataaaaacgataatggcaccatgtttttacgtggttttgcaattaattcggcatagtccacgagtctatcttattcagatatttcaggatacggtgtattacaattagtgatcttttttctctaggatttttctgtccttttttctgtatattctgcccctatttatagtaatataggttggcagttaattacatttgaattcaaattgcataacaataaatctcaaaattttgtgctttaattacgtcccatttaaacacgtataaataatattactaaatcacacagctgtgatttaaactgtctttaaggtggtcaacgctgacatagatgagaacatcctaccaaaggtatctcgctggacgcatcttgccttgtacatagatgaatgacttagtttattcatatgttttccagcaatggcatgagcaccagtgtactgggcaaacttaagaactgctctttgaccataaggtcttgtagcctggataatcatgtcgtacatgttcccagttatcacacttagttatataatgtgaattatacgctaagtgtttcaacaaccaattcacctcgtcaatactttcttagcgagataaatgcctcgctatgtattatcagtaactcttcgtgtcgcgaggaggatgcctcaatatacattgtccgtaattacctcgggattatgctttctgagacgaaatggtttttcgtcaatacaggaattgatagtttatgtatccttgtctcgcttaagactatgtagtcaatgagttatgaata

SEQ ID NO: 65424 - DNA, 3873 bp, Cannabis sativa
  modified_base (568)..(572): a, c, t, g, unknown or other
tgtatgtcatgagaagatccattgctggttgactttaacgaacaaattgaagaacataaataatacaactgaactagaacctaaccatctcatgattgcgattatttgatctaagattaactaggtgatattgaattagataaaaattacagtaagttaattatatcttattcaagttcaatatcagtcctttatgaggcatactccatacgtccaatccaagcttactttatccaatgtcctagaaaggacatatcacttatccaaggtgcaagtaaactacattatagattatcagttaaatcctgtgtacaaataaataataagaattcatttaatcacataatcttgattactttccactatgttgacatcacaataaccaataataccaatgtgataaggatttggatgaatttataaattaaaaaaatgatcatgaaataaacatacgaaccaaataacacattaaataagtaatgaaataaatctatttctttattgataaaagaatattcaataaatataattctataattactaagagtgtaattctatatttatagtnnnnnaatcatggaattaataaacaagatattatttagttgataagactcaataaataatctagtttattgaaacactattaagggtagggataaagagttgtataaagatatttgaagaaaatctatgttgaattggtaaaatagtaattatttagtttttgtaataaataaatatattttttaaattaattaaatagggaaaaatacaaaaattattaagagaaaatttgtcaggacaaaatgcaccaaccttgtcctaaagatggtggtaggtgtgtagcttgttcctgtccctattggattgtctttttaggttaataaattacttaattgaattagataaatatctaatttgaaaagtggttataaatatttcaaggttgttgagatattctcttaagtagttgagagattctctcataaatattagtaaccaaattcggttatagatatttatttatttaaataattaaataatgatttaattaaagagatttaactactaaaaataagagcttgatttgagaaatcagtttatcttttttcactgctaatttcgaattctatagagagaaaaagaaatttattttttctctctattgttcttgctcatgtgttgagaactcaacaagaacaaggttatacattttatcctaatagcccacactattccttgtttgtggtgtatcgatttgaaagacactgatgtaagtccaaatttctaattcctcatcgactggaataggggatacaacttacgagaagtttcgagaataccctgataggctttgataggtatactctaaaattatatttattattgttttgatttaatgtacacacatatggagatcttaggggctatggtacgatgataatctattaatccaaaacttttgtgctgcgtacttgatttagtaccataaaaccaacaccttctaagtgtggatttaggttttttcgacctgttgtatgcattgttgggtctttcttgaagaataggtatggtgagaaaatgttatgtgtagtggcactagattcaggcaaccaaaatttttttggtagctttcgcagtagttgatagtgaaaaccacgaatcttagacctatttcaggagaaactggaaagaagtgatttggagctcgtgttcctagatgcataccatgatgcatgctaccaccatattaccttgaacgtcaaccacatgttcaagattaacgtattcatgaatcattttacacatgtgcctacacgtattaaaaaaatagagtttcatagagaagttgagaagattagggcaatgaatgttgcaatatcttgaggacattagatttgaaatatgggttcggtcgtactttctaggggaacgttacaatgtaatgatgagtaactaggctataagcttcaacaacacaactaaggactgaagaggctttccgatcactactttggttgatatcctgaggttcaaagtccaagaatggtgtgctacgcgaaaaaagctgacaagtggatgaagaccctagcactagaaatggagcaggacatggcattgcagtttgagaaatctcggtatttgaatgttgacacatgtggaccttatatgttgaatgtccaccctagaggatcaattaagaccgatgccgtagtgtacttgcaagaatgaacgtccacttgcggcttgtttcaaattatgaaatttccttgtcctcatgcatgtgctacaactcaccaataaagtattagcatgtacacactatgctcgccatattacacaatagaatattaaaagagcacatatgaaggtacaattatgccagtttgtgatgagactaattgggaatatcctaatgacataaataacatgaaagttggagtgcctgttaagaagaaactagtagagtgatccaagaagcaaaaggttggaagaattatgtcaaaccaaattccttgtaattgtgaaaagattgtaataaaatatacttgtagaaagtgtggtggtaaggggcacaacagaatgtcttgcacctaccgagtttaaaaattcttgttgaattttagtaatcgtgttgttatgaattcttgttggactttgttaaatattacactataatttatggcatgagcaattttcatttacttactgcaccattatctctgaaaaatggctgatccgatgctagttcgatattggcctgatactggtccgatatggtcccgatgctcgtttgatgtcattatatttttcatataagaattttgaaaaattgtaaggttcaattagcaatatcggaccaacatcagaccattatcaaccttaacataaaattttgaaaatgaatggtgtaattagccatataaggccattggcccagtatcgaacatcctatcggacatgtatcaaacctaacaaaagtttttaaaaaatgtattgtaatttataacgaaccattagacttgcatcagaccaaaatcggacaagcatcgagcctaactgaaagccttggaaattgtacaagtgtaatttagccatatagcataatcagaccctacatcagaccaatattgggaccaacaaaagacttttgaaaatgtacaaatgtagtttagccataaagaatcattgatcctaaaatcggaccaatatcagaccagcatcgggcctaacaaaaagctttggaaaaaataagtgtaatttagccatacataaccatctatcctaaatcgatcctacatcaaactgtatcgggatgtaccttagaactttaaaagaaaatgtacaagtaaatattttacagtaagtataattttatctaatggaaagaatattagtttgttcgaaaaatacaataaaagttaaggtcattcaaaaaataaaataaaaaaataacatagttcatgataagttctggttcaataaatctacaacccatctctgtctaaagagcgacatatcatcattattcactccatcgaatggtagatccaaaatcttatgcttgatatgttttatcatgtatattatgcaatcggcactgcattagtagttaaacataacaatttattaaattatagtctaacattcatgaaaatttaatttaaatagtaagcgtattcataaaaatcttgttaaatcatctcatttttatcataggtacaaccttgtcatttaagatatcccaaatgaatggctgacttggctttcaaaggctatcatttgagggaccatgaccatataatgggtgttaaataaaccagattggtccaataatattgtgaatatcttgcaccaaacatccatcta

SEQ ID NO: 65425 - DNA, 961 bp, Cannabis sativa
ctatgattgacgagatgagggaagagtgagcgacatatatgcttccacacttgtaaagtcatcacattgtggtcattagttattttttaaaatatatatatatatatatacattatttatgacaaatatttagctaacattattagataattatatcttcttttcctctaatacaatatttattaattttgttatgtatatatatatatatatatctttaacaaatattgtaaactttgagatatctataatagtttaaaacttatattcttttttatgttactcttttttatgtgtattaattgagttaagttaattataaataatttgttggaaaaaaaatatattatataataaaaataattatttataatttaatataaaaaataaagaaatgaaattaattttacagtatttaacttagaaaaaaaaaaacaaaaaaatctagtttcaagtccaacttagctagtgttaaggagaatgaaagaatgaattgtgaagctctgtttgaaacagagtaagaagctgatatttatatacacagttagttacaacaggtataacagaaagatacagataaaccccaattctaactaactgactaagcctgaaacagataactaataacagttataactaactctcttttatatctctaatagctagactagaaaagtgttcctagtgtgggattgcttttcaagtccagcattgttagactagaaatatttttctaatccaacaattaaatttcatgttgtgggaccgctttttaagtccaataatgttagactaaatatgattttctagttcaataatattggactagaaatatttttctagtcaaacattaattgttagattttctagtctaataatgttgaactagaaaaatacggtaaataccattttggaccctctattttgtaaaagttattaattggaccttgtgttttgttaa

SEQ ID NO: 65426 - DNA, 636 bp, Cannabis sativa
taaatttaaatattattttaaatattttttccttctaaaattatttttcttttttgtaatatataataaataattaaataaatttttagcaaaaaataatttattatagagtgttttaattaaaacagctttttctaaaagttgagttgtgccaactttaacttttagctgtagcttttcaataaattcttcaatacgctgttttttaactgattaccgaacacctttttgtcataacttttttaaaaagtagttgttagcttttccaaaagttgtgttaaatgttccctttgtgccttgagaaaatatgtttgggccatttccatgaaagataacctttatattcgataggtcaactcgatatatataaaacaaaacaattggtgtgactatgaggtccccaatgcatcaagctggtattggaaaagggttgcacaagtgaaagagaagttaaagaatttttttattgagaaagatattcagcagtacaactactctattgctaaaatgttcatcaatgtgtcgcagcctctcatggaaactgaaaaactaagtttttgcaaatgtcaataatatatatgaaaatataaaactgtatacgtctgcagaagcataatgtaattctgttactgtaga

SEQ ID NO: 65427 - DNA, 1896 bp, Cannabis sativa
ttttcttatatagtagctcaaaattttgctggagagatcattgaaagcatgttagattcgtcggcctgacgtggtagctctggatattgtagaagttataggcatcaaaaaagtattgagttggataaaaagaagcggctagcatgatgtagtgttggaattcgactcgctaaatgcagtcttggcaagaactagaagctctatttttttattctcttcattcggatattataaaatcttgttttcatgtagatcgaatctaggaggaatgttcctaccatgttgtcatctttgtttattaaatgactgtttgagctaatgaagtttgctttcatattaggaaaaaaaatatagattaattggaattattatacacataaacttttcctcgataattttatttgaataaataagatttttgcactttaaactatgattttagtagagttttatctcctgaatttttctatgattgcgaaaattctcttccgaactatgcaaattgttgcaaatatccacatccaattacattctactcatttattaaaataatttatttatgtgactatgagttacacgtataattgcatacaatgacttatttaatagctttaagctacctaaaatctaatttattgagattaaacatacaaacattaattttaagaatacacatacatactctcatactttaccatgagattgttatttatgtatttattttttgtctggaattttcaactgggctaaattaatgttatattagttctatataaataaaattgtttaaataaatgaccaaaatacaattataggaagacatttgcaacgatttttatagtttagtggaaacttttgcaacagataaaagttcaggggcaaaactctacaaaaatcataatttgggaaatatatcttatttattcatttcctttttcctaaaaaaaaaaaaaactaacattgttggaacacaagattgtatggtatataccacgtgttgtatgttgtagtggtagggattgtttttactaacattcttttttgcttggatcgaggttcgaaacccgctacaacttctcttgaaagagattaaaggcttgatcattctaaagactagcttgttgtaggtggtgtcatctgtgtgatgagaaccttttaagtaattattgataacccaattaaagcagactgatatataaggccccgacacgtgatctccgaaattgtcaaaatgatcaaaggcgtcggaaatgaatttacaccacctaatccccatttagttagaaaaagaatatatgatatataaaaatgacatgtcgttttatattaaacagttaattgtttgacgaaattagtcaaaatcatacaaaactgttcaaatacaaatcgtggccgcaatgtccacaaaattagttggttttgtttgttattttttatttttcatttcaagtaatttcaacaaaagtttaggggtatatttgccacaaaaaaagttaaaaaattttataatacaacccttttaaaaaagtccaccgattcctaaaaaatttttgtctatttcttttttataatcatttacgttgtacttatttaaatatcctgcaatattttaaaaaagttttaaaaatttaacacgccaaatttaacacgacgaaaacagagttcaaacagtcaatttcactaaaatcggtcctaagattaggtggactttaggaaaaaaaaattattagaccttttatttttttaaaaaaaaatgtgtggtattttcgaaaactacgtataattttaattgaaaaatatttttttgagggtcactagcctaggttggccttaggcatgggcatagtacactttagtttagacccgaccttaaatttcacacgcgtataaaataaa

SEQ ID NO: 65428 - DNA, 848 bp, Cannabis sativa
aatatattccatttctttcacattctttataaattcctaaatattattcttgttgtttttttcttttttataattctctctttttttctttcatgttgttagaacaagtgaaaaacccaacacaagacaagaggcaagagttcaatataatttcccataacataatacatgtaccacttttttcactactttatatgtgttagtgtggacccaaaatataagacactgtttatttttcatttcaaattaggattcttattgacatgtgtttcataattagtgcatattgttttttttgatgaatttaattatataacacaacatttatttaatcaccaatactatatattacacgttgagcaacatttagttacacaaacattttattattaatgcatttacataaatatttggtttgaactagaaattttctagaaatataaaatagtataaataaatttttttttctttaattttaacatttaccaaatcatgtctctaaattttttaggctattaagaatttccctcaaactattgagattgttggattcaaagatttctatcaaattttactgacgtgatgattacctatgtactaaatcgtacctttcgaattttgatatctaccaaataatatttcttgaattttgatatctatcaaatcgtatacccaattaaatattaatatctacaaaattatgcacctagaattttcgtctacattaggattctatcagtaaaactgaataaaaaattctttcattcaacaatttcaatagttcaagatatttttttttaatctaaaaagttcaaataacataatttagtacttattaaagtttaagg

SEQ ID NO: 65429 - DNA, 1101 bp, Cannabis sativa
atttataggaagaaaaatgaaggagaatatgaggtcatatttttttataaatatatataaaatatttttaatgttattttgatttccttcaacgtggacagattttttaatagaaaaaaaaaaaataaagaacatgaaaatcaagaatattttggacattagtttgatccctattgacaaaatatatattattgtattcacatggtcatgtctttattataattatttgggtctagttcgatctattttgattttgctagaatatacttatgtatacatacaaagcccccacaagaaaattaataatcatatatatatatatatagaatatacggtttgatatattcaaagtatgaagattttagagcaaactccaacccattactagctattaatttgatagttttagctatcaaactattatataattaactgaaattattatagctgaaatttatatcttgaattttgttattaattacactttttaaatatataattttttgtatgaattcttgaattgtgtcatattaactgtaaattaagcaaattataaaataataataaaaaaataagctaaattcaattgttttgtaaacgtgaattatatattagtgcatgcatgtatatgtcaataaaaacatatttaattaaacccttaattatataatataattagcatataattaagttgtataaacagtggatgaattcgagaacagcataaactatgcaaaaatgttggaaaagttcattcacttatcattttgaactaaaaaagtaactaataagagaaagaatataatatgtcattaatattgtatataagttttggagtttggagtatatattaattaatatgtaattgctcattaattaataattatagtacaagaagagacaacgaacaagttcctatatactaattacgagtggaatattcctcaagtaatcgatcatattcaatatcattgttattggaaaatacagagaaaagagcctcttattattataaattgtccttttattcttcttcaaactcttccaaaaatgagaaaaaaaaaaacaagaaagaaatagaagacaacatatatatatata

SEQ ID NO: 65430 - DNA, 1108 bp, Cannabis sativa
ctgtcgccgaccctagccatattcacatgggtcaccatatctgcttctctgtctccaattttgaatcttttgtccaaactctcaatctgagtactttattacatctctccgattaattgtttttttaaagcattttgcttgaatgaaatgaaattttgggggttttcaggaaaagggtattgagaattttgagaattctgacccaatcgtggagtcaagaaagtattcttctttgacccggatggtaaggcttttcttcctttatcaattgatttttcattcatttggattcattctagaaatatcaactttctaatgccaaattcacatttctttgtacttcttgtttgtcatcttaagctattcgaattgttacaggaagaggaggccttgatcgctgctcacaggaaagagattgaggatacaatggagatcgttcgtgaagtaagtgattgcttccttgtctagtttctattttacgagtattatcggtgaccaaagtggaattttttggttttgttccattagtttcaaactgcaatgtgtattctcaagcaatttatcttcctcaatccccagcctccgtttaataggtatgtaacactaaatcattctcttgtttttcattggtcaaatcacttttgccctctactggcatttttcacttacttcttggttgtttcatataatataaacatagatgcaaactaccgatttggagtactgtttggtttgttttttttttttggagagtttcactattaagtttaattttagacttagttacatttcttatgcggaatctttactattccactgcttgtgtgataaaataaaagctttttcgttctctgcatttagtctcctctgtcacagaaaacccaactggtatatgtcttataaattctattattattgtgctttgccagaggatgtcactcacccactgactccatccaatccatactttagaaatttcacttcaaacttacaaatcttatggagtctcatactcaaactccagcttcatccatggctcattttgcaagttctggtatatttacaactccttacattttctttctttgttatatttgtgttagaataa

SEQ ID NO: 65431 - DNA, 2205 bp, Cannabis sativa
aagtcaaggtaagcctagtaacctttctttcttgaattttatagttgaaagtttagattttcatgcaatttgtgggattttcaattttggttgttttggagttttagagaatattttctcgggttgttgttaagttatatatatggttatattctggtttgaatggttatggttgagattgaactaggtttgggcttttgagttcaagtttagatctttaatggtgattttgcttctaggggttaaggatgtttttagttgttaaaataggtttgttttagccttatttgaagttctggacagtttggcaggtttggtatcgttttggttgagttttgaggttttggggaaaatttgctataaaaatggcagaccgtttctggtaaaacgacctaccatttttccaggcagaaaacccagaaaaacggtttgccattttcacaaaaatggcctgccgttttttggggtacttttctcaaaattttattttctgtgattttctcaagatgtaggatttagttacgctaattatcgataggaaaacttttagttcctaagtccccgaaagtgatttagcgaatcatttactagttttacgtaaattgtgacttaggaccttaaatcgtcgagaagcagtttccactcagagttatcggcacgcttgcattcgaaattaaggtaaggctagtataatagttgcatatatgtatacatgtttagtgtgcatgttagtttccgtcaaaataacatactaggacatcagtgaggtgtacatagagttgcactgagatgccaactgatacatggtaggtaaatcagtagccaacagattagcatattaggatatcagtgaggtgtacatagagttgcactgagatgccaacaaatatatgctaggctatcagatagtatgaattaactgctaccacatcagtacgactagagtactgagtataggttggattcatagttagttatacttagtcgagaacgttcctgacctagttatcagatcacgagtaggtgaatgggcgcctagttacggtatggatatatgtttatgtttatgattatgctttcttatttagtatatcgactcacagttattacgtgtatgtgtaggtaagagctagatgcgaaccgggatgagtctagagctaagagtgaggattgtacatatcaagacggttagacctagatcgttcaagatagttgggacactttaggctcacattttgatagtcgctagatgacgacttttatagtacaagtattttgtaaacttatgaaacttttaaacgggatctcaaacttatgtaaatcatgtttatttgttaaagtttaagttatttaagaaaattttaattatccatattttttaataaaccctttgattagcaaaggagtgcacaataaattaaaatcacgataacatgcctaatctattagggcgctacatcgagccttttgattttttatatttccaatatttggtggattttctccatccattgggatatccctcacattcccaaattgttcttcttgagtatttgtaggattaccttgattgttcccttatctcctggtcctagaacctcggggcatttcccgtggtcgtcttgcagatggatcaggttgagtttgaggagtcgccccttgtgcagcccttgttgtcgctacttttctttctaactcggcattccttcatgttcgactcagccagacgctgtcaaagttacctattttctagttccaccagtgggacatatctggttggatcataagcatcctcgcttcgcctttttgggatctgttcaccagttggattgaaatctccatcgtcccttccagaatagggagtttcaatagtgttagttctctgcgaagcccgaggctcctttctagggcaatgggttgtctcctctgactgattctcttcatcatactaagtatcgtccgccataaaggataacattaaataactgcataatcgctctttgtctttatccatcaacggttatgctgactgtgttagattgttctctccatttgcatgttatctctcttatccatctttgtaaaaaaatattgtgtagagatacaatgcttcctgctgttctcttttgccgtttggatggtattagcgaggcggttacttcaacgcgtcaaaagcgaggtgaacgaatgttgttgtcattcttt

SEQ ID NO: 65432 - DNA, 660 bp, Cannabis sativa
aacctcaaaatatcaaagaattaataataatctattaaaaattaaatatcattaattttaaaattgatatttaagttaaaatatattaaaaaatcatattttattttgatttttagggtttgaaaattgaaaaattcgaaaaaagtggaaaaaatccgaaaattttcaaatattttgtgaaggtgcacctgttgcccacgaaggctgcgtgcagcctagggcacgcagggagatgggcacatgcagggtgatctgtcgagggaactcggcgtttgcaggtgtagacacgagacttgcagcctctcgtgtctcagcgaggcgtgcatcgtgtctttagacacgatttttcaaagcacgcgcgcgcggagagatctccttgtccaaagcacctggtgcgtgcgagcaccatgcttgacacccattcaacttgaaacttcaaaaaatcctaacttttttcaatttttatcgaaatcgagtttcgtaaaaactaaaattgcttaatttttcagaaggaatataaataaattattttgagaataaaaaataaattattttcatggaatttttttttaaatcacatagtcatcaattaacacataaaccaacatgaacacatccaaatcaacataaaaacaatgttcatcgttttaaatccatatt

SEQ ID NO: 65433 - DNA, 1035 bp, Cannabis sativa
aaatctgatcactctcttttcatcctacaaaatgcatcatccattacactgattttggtgtatgttgatgacattttagtcactggaagtgatccaaaaactgttacttcactcatcgattccctcagtcgcaccttctccttaaaagatcttggtgaactcaaatacttccttgggatagaagttgcagaaacaaccaggggcctcacactatcacagaccaaatatgccacagaccttctctctcgagctgatatgacagatgcaaaacctatctccacaccaatggttagtggacagattctgtctgcatatggctctgaagtttttcctaatccccaaatgtacaggtccattcttggagccttacagtatttgactataactagaccagaactctcttacagtgtaaacaaggtttgccagtatatgcagaaacctctacaacaccactggaatgcagttaaaaggatccttcgttatgtggcaggcacaactcaatatggtctacatcttacaaaggcttccagtttcgaaatacaagcctactgtgatactgactgggcatctgatgttgatgacagaaggtctacctcaggctttgctatatttttgggttctaatctcattgcctggaagtctcaaaagcaacaaatagtctcaagatccagtattgaggcagagtacaggagcttaactaatgttgttgctgaacttgcttggctcaaatctctcttcactgagctacacatccatctgtctcagcctcctgtggtgtggtgtgataatctcagcacagtcttactcactgctaatcccattcttcacactcggacaaaacacatcgagttggacttgtattttgtcaaagagaaggtgcagagtcatcagattgctgtcaagcatgttccaaccatcgatcaactcgcagatggctttaccaaagccattttgactcagaatttctctggttttcgttccaaactcaccattgttgatacaaccaatgctgagtttgcgggggagtgttaagag

SEQ ID NO: 65434 - DNA, 3441 bp, Cannabis sativa
tatatctctagtgggttttcgatccgcgcatatctggatagttagttagtcgcatgagatccagatagtgcaaagacgcttgagatccgaataaaaataaaacgagcaaaatggcacgacctatgataaggtttgaagggagatattagtaaatattatctcatatggattaaatctaaaacattgagccatatataagaacgcgggttactccactcatcactaattagttttgagatagaaccccatgattctcaacaacttgtttagttggttttgttgtattgtattgtataatattatgttagattatattgtattgtattagtattagtctgaccctggctttggtctcggactccgacctagattccccatccctagacctcagtctgggttagttcattatctaaatgatttttaaataaattttctactatttgatatttaaataatttttaagatgtggagcaataaacttttgacacacaaaaatttaaaaaactacaaactgagttaaatttggtacctatatagtaattacggactaaagagaatctcgaacttgtagactataattacaacaattttcgagattcaagacctatttacatcaaagtaaactttttatgaacttatgcgtaatttaatatcaagaagtaatatttttgagagcaactaacggatttgttaaagtggagactaacagacttacaaaaaactcgagcttagagctattacctcaatttttcgagattgagaacttatgtacatcaaagtaaatttttttagaaacttatactgcaattttgcctttttaaaaaactaatttggagcaaaaagtaacaaaactttcccttagaaaatattgaattttcggatctaatattcagagactactttgctaattacattttgagttccattccatcttaattttataacctgctttttaattttttttttttattttcatgaaacttagccacaacatgatgttaaaatgagcatcatttaaaaaaataataaataaataaaagaaacgtggtgtaaaataaaaataaaatccagtggcctaagtaataatttgaaatgtttgtatttttcaaaaacagtcttaaaggtgatatatcttgaaaatattggaggcttacaaatcaaccagaacttcgttttgggcttcattttgggcccgtgtaacaacaatactcttgtaaatatatgattttttttaaaaaaaaaaaaaaaaaaaattatcttattggaaaattttagaaaaaaaattaaaagatatattaaaaatagtagtagctgattacttctttagttaaaataaaaatagtagttcttatatttttttaactttttcttcaaattttttttataaaataacatttttgaaaaaataaaaccatattgcacaaaaatataaaatcccataaaatttataatttatatagtactctacatcctacattttacaaaataaaataaaatttatttataataaaatggtgtttctatatgaacatgcgtgatttaatttgattctaatgtaattttcacatatttatcgaaatttacacaagttattataacatacatagaagctccaataatatattaagtcccctttgaaaaatctaaaatctagtttgagtataatgtaaatattgttgtgaaaatagtcacaaaaaatctagccataaaaaaattaatttaattatttatggctagatttttttgtgtcaaatagattaccattgtattattcaaatgaagaaaaaatattattaggaaattaaaaagatagaataagaataatttttttatagacaaaaacatagtttttcaataaaaaatttcaatataagtttcacacaaaacaaacacacacaaaatgagtgtgtcaactcttacaatggtattggaatggttttcacaacactttttcttgaattacagaaattttgaagatgagtttcatcgattgtaccgaacccagatagctgaaccccaaagtcttccaacttatgaacatcccggggaagaggagattgccaaatgccgtcccaccacgcaggcggaagaaggggtgtaagagcacattggttaggttggtggtgacaacttaggagccctgcataacgattccagacatgtccccatccaatctgaaatcttaaaccttctctcaacaagttccgttggaagctacttaagaagtagaaactagagctagtagagttatcacctgaaaacaattgaagagatgttgagaaatcaaaagttagaattttttagatgaaagaatgaatcaaaatggtgggagagccacttaagtacctaaactgttagctgcagcaagtgcggcgattaactgagcataggtggtaccaacacgcctatgagccccagaaacgacagcatgttttgctcgggatgcaagaaagaaatccacaaaggcaacccatctgggtgccggtccccaatcttttactctaaaatcaggaccttgcaaacgatttacatgcatcgatacattccctctaaagttttcgtaattgaaatgaagaacctgataatggcacaaccaaacaactaactaaatactgaacaacacaaatggcatagattgttgtaacatatgatcaacgaatatatgaaataatttacctcagcaattttactgatatcgggtgtaatgcttttcacaagggaaggagtatctgaaactacaaccactctgggccttgatgtcgtgttaagattatgaatggctttcgtaatgcagttcagtgcagcctgtacagctcttacagacctgaaaatagagtatgcaacactctgcatcattaatccacaaagacactagtcgaaacagaaatttgaattagacaacatatggtttcgtgaaatacttgttcatgagcatccgcatatgcaacgaaatatcaggatcagctccacctccaataacccagtttacagcttcctcgatattctttgaaggagatatgagaactctcataagttctccaaatacattaggccgggattggagaacctccgactttccaaacaaatcaatagcagcaaacctcatatcgggatgtacattcttcaagaaaaactgaattgccacagcatctgttgtaccttgaaacctgaagtaaaagactaaaaggcttaacttttcggtaaccatgcttgtggacttaaaaatgaagttgaatacaaactattatcatcgtaccaaatgattggttgcttccatgtcctccaattgctacaaagaacatttgtttgcattggcttctcaaaattatcagttcttatagcaagacgtcttccgtattttttctcgcacttattgagtctccatagatgcttaatttccttcaaggtaaaggaaacattggaatacaaaatgtaatcccc

SEQ ID NO: 65435 - DNA, 583 bp, Cannabis sativa
atcagcataagtttttgctttataaatatactaggtaacgtaaccgcgggttgcgcgatcctttcaataattgacaaaaaaatatatacaattttattaatttataattaattttatataattttaaagtaaaaaactaaccataaatagcaagacaaaatataaattataatcttctattatttgacaatttttttttaaataaagctttctttttatttttaaaaacaattaaagattaattcaaattttaaagtttccacaaaatattaaaaaattcaagaatctttcttgtactcatacaaaaatgtacaactaattaagcaatactaagttaattatattttgcggcataaacctctaattatttagattgatgccgatagtctaatagatacccttaaataaaaatttacgacatacgaagctctcaatttttgaaattatattagtattgttattaattaatatgtcaattcattctaaaaattaatcccatgtgatgatgctttagtgttcaaaccatgactttagacttcaatgatagaatccaacccaatattcaacaataggtccctctgat

SEQ ID NO: 65436 - DNA, 915 bp, Cannabis sativa
ttgttttttttttttttgctatatcgcattatgtgttgtgcattgtgcattgtgtgatgttttttttgctaaattgtattgtgtgttgttttttactatatttgtgattaatatttttatttttattcgtgtgcgagtgtttttctttactaggttgactgatgaaattgatttcagttgacttcattgtttatcatttatgttttgttaagatttttcatagggtcgaaactggtttcaccaggttcaagggttcgaaactggttttacatgttttgagagttctgtgatggggttgctccattttatgatgttattgcatattttttattttaagttacttttttattattttgtttctatgttcgaaacttacacttatattttgttttcaaattattggtatgtattttgtgttgttttgattatatttgtgattagtatttttttttgtatttttgtgtgtttttttatttttcatttggttgtctgatgaaattagtttcagttaactttattatttaacatttatattgatatgatttttcatagcgtcaaaactggtttcatagggtccaaactggtttcacaggttttaactgttctgtaatggggttgcttcatttttatgatgttattgtatatttttttttagtttgtataaaattagttttattattgtatgatatttgaacaaaaatttctgttttatttcaaataatcagtttttctgacacacattattttattgttttcataactgtttttttttttaaaaaagtaactagttttcataacaatttttttaattgttgttcataattgagttttaagtttcaattttttttaatttgattatttaaggaaactggtttttatctgttagtttttattttggttgttttactaactggt

SEQ ID NO: 65437 - DNA, 1052 bp, Cannabis sativa
ttggagctcatcgtcggccatcatggagaccatcttccccgccctctctctctctctctctctcaagaaaatggaattttcaatggtaagattcattatttttttctcgttccccgtctcatgcgcctagctccatggtttctctctttctcgctaatgttctctctctctttctctctaattttttttacgggtagtggtggtggtccggttggatggtggtggttcgatgtgcttttggtggtacgatgggttgctgtggtggcggtatttgtttttgttgttgttgggttgttgtggtggtccgaagggttgtggtaatctgaaagtttatgctttatttttattttttattcttttgcttcggttcataaccgaagcaaaaaaactaatttgcgtcaaggctttactattttcttcggttataaactgaagcaaaaatcttttagtctgttactaagtgaagcaaaaaataagactatttgcgtctacagttatagcgtcagttacacaaacttacgaaaattctttatatgtcccttaaaaactgaagcaaaaggccatttttatattagtgttagtcacacattttagtcataaagatttttaattataactgaatgtatttttagtcacaacatttagttgtaaccttttcccaatttaaaattttaaaaatttaaaatttgtcacaaataattagttatgattaaaatattatttgtcataagttgtgaccaaataatacacttagtcaagaattatttttactgtgattaaaagtcaaattttttgtagtgtcggtagtatttctggagtaagtcatagatcacatcaatttataagacttgaactagtatatatccttatgattttattattttattatttttgattttaatactctatttatttgtgttttaatttttgatacttgtgtttgaattgttgatcttgttattaaaaattatttattgattaagtttttgttaatttgattctcctataatttcccacatatatataagcttcaagattatgaagatctcttc

SEQ ID NO: 65438 - DNA, 608 bp, Cannabis sativa
ggtcaccttgcattttactttatcttgtttttgagcttcttgattttcatgccttgtgtttctgatggctgtcttctaaccatactatttttgttcagtggagacatgtctcggcagatgctcgacgatctaaggaagagaatggatggaagctctagcgcctctcctccgacaaagaagtctaagggcggtgaggggtcctcttcaaaggaaaagaggccttccgaggaggttattgatctttccgaggagttgactgctgcaaacccctctacccccaaagctgccaagtccgaggagtctggagcaccaacggttgggtctgagctggtcaggagtgatctagaacgggtgtgggcaccaactcaacctttgttagtgattctagaggccaaaaagggcaaggacatgctggcccattacatgaaccggttggttcctgatgtcaatgagcaactggctggtgctgacaatgactcttctttggatgtgctggtgggcggagttttgaaggagttcaccagggtaagtctttttgatacttccctttaatcttccacacttagctaaatatgctaaagtatttctgtttgtgcaggccggtctga

SEQ ID NO: 65439 - DNA, 949 bp, Cannabis sativa
  modified_base (50)..(59): a, c, t, g, unknown or other
atagttcggggggaatttttaacgtcaaaaaaagttcagggggcatgatnnnnnnnnnntcaaagttcgggaaaaaaaattaccaattagcctaaaaaatgaaaagcattaaaaaaaatatattaggccctttatttttttgggccctgtgcaatacccataagagccgctcatggtagtagaacattttcgaccatactctctaaacacattctttaactaaaatagaaaggtgttataatagaaaacaaaaatgttaatggatactttaaggtgtcaagcaccacaagagatacgtgattagctctgctactgataggaacattaatggaagcaacattttatattattattttttttatttttttctctctcatccacataaaatttgtcacattaacttgaaaaaaatactctaatagttgacaacttttgcccattatggacacataatattaaattaatgacttttttagtaaaaagtaaatttttttcaacaaaaaaaatataataacatgtggttatggtccatattgagcaatattttacgtaaaattaatctttaaaattagatcacattacatatgtagaagacaactcctatgaataactccgggagatgttctaatatcactcttcaatttaaatattttttttatcgctcttgaactaaatgatcaactagaattttttttttttcaaataaactaaaattgtataaaggaatgatagaaataagcattagaaaatagaagaaaaaaaaagactaacatgtttcttttttatttggtggccttcacataaaaaaaagtgagaaaaataagaaaggaacaaaaaaaaaaataaatggataattatataaggtactattttttgtagaaaaaattatatttttacgcttaattaaagaattttttttacatttttacggtattctataaaaacaaca

SEQ ID NO: 65440 - DNA, 563 bp, Cannabis sativa
taaatattaataatttaacattcttacatatattaaaattttcattttcaaaaatacacaataggtcaacaaccataagaaatagccatttacatataaaaaaataatatttaatttctcaataaattaaataatattttgataattaatttgtttaaaaagaactttacatgtttaaaagttcatgagaagagatacgtagtgagattttttcgtaaatagctgatttgtggccgaaatgtttggtgtggttgttttgtaattgcttgtgattaatgaagttctttccttcttaaaaaaaaataaaaaaaaaactttacatgtcatttgtttggtcattaagcaatttatttagccagtgtaaaaaataatcatgcatattatatggttgtaactagtaaagatactagtaccgtcaaaaaaaaaaaatcgaaccatattaatatcattatgttaaatcaatccatggaattattgtagcctttagacacataagtaagggccaactttgaaaacgaagtgaccaacaacaaattgcaagccacaagttgaactaatcattt

SEQ ID NO: 65441 - DNA, 517 bp, Cannabis sativa
aagaagagccagcatttcaatatgaccagccacttgttgaagatgcagagattgatacaaggtggagtattgttgagcgatttttgacagacactcctaaagacttcatagctatgcaaaatctgatggcagtgctctaggaaccaagaatgggaatgtatgtgaaggatatggggaaaataaatatatcttctaattctatcatgagattgatgttcagagagtaatcgacagaagtccttggacgttcaaaaatgctcctctgatattcgagagactgaagccaggatatgttccgagggctgtgagattgcatcattttgaaatctgggtgcaattacgtacgtgcgggtttcaagactgaaagaatggtgaaaaatgctgggaatcacatttggagctttgtgaataattttaatggggtgtggagggattacttacgggtatggattcagattgatattgagaatcttttgaaacagagaatgaagtagcagcaaatcagaggagactggtt

SEQ ID NO: 65442 - DNA, 1135 bp, Cannabis sativa
gtaaaagtgacttttaccagcgcattaccagcgcagtaccagaatgtgttggtaatgtgttggtaaaagtgacatttcttgtagtgaaatgatattgtatggcattatagattgggtcatccctcttgtgtaaagactcatcctttaaataaagatttgaagtttcatgccaattcaaattctttatttcattgttccatttgtcattatgctaagcaaagaaaattgtcattcacatctaatcacaatattgttaaaagttgttttgatcttattcatgttgacatttggggacaatacaacgccatgacaactgagggatacaagtattttatcaccattgttgatgattgttccaggtacaattagatcaatctgatcaaacaaaaatctgatgcacaaaatgctattcctcaattcataaaacttgttcaaaaccactaaagttgtcaggtctgataatgccaaggaattaccatttaaagaactgtttagtgaccttgggattatccattaccacttttgtgtccaaagacttcaacaaaattatgttgttgagagaaaacaccaacatctactcaatgttgcgagagctttgctatttcaatcacatataccactggtgtattggggagattgtgttgctatgcagcctatctcattaatagaatacctacaccaaacctatgagcacttacaagtttttttggatgtctagcatatgcttccactctaagtcaatttagatctaagtttgctcctaagtccattcctacatttttctttcctatatatgtataataattaggtttaattaaacactaaaactagttttttagcatggattatcaaaataacaaagacatatgtcttcagttccctcgtttgcatatttgaaatatgtggatcttaacccaagacataggtcatttatacggcttcgggcttcggtcacttcccagtgtcttcgttttgatagatttcagttctaaggtttttatttttgtaagagtagtggtagggtggagcacatgcatgcactgatcgtttcttcctatattaattcctgctggacgacatttctcttatctttgttgtctgttagtaaattctgactggtttatatatatatata

SEQ ID NO: 65443 - DNA, 892 bp, Cannabis sativa
  modified_base (58)..(59): a, c, t, g, unknown or other
ccatcaacttttggtttttgagattacggattaattttagattgaaaggcattttcannttcactttccttatgcctttctcgtctactttcatatgcttcaagagagcccattagttcagtcggtgatagagtttccaaatcttttgtttcttctatcatagaaactattgaatcatatttttctgtacaagaaattagtatctcttgtactatatttttctcagatattatttctccgtaggctcccatttgatttactatttctttaatttttagaatagcaatcttttgcggtcacattatttttcattttaaaattttcaaaatctcttctaagcttttgtcatctaacagtgcgtaccttaattgtttcttggaactcctcctgcagcgtgtcccatgcttcttttgccgttgctgtgcccataattcgtggaaaaagattatctactgtagcttgctacaagtagtataatgcatgagaatccttttattgattatcctcccgtgccttcttttgatcttccgaaagagatgtaatatcttctggaatattgattccttcttcaacaattttccataaattttgtgataaaaaataggtcctcattttgatggaccaaaaatcatagttttctccatagaaaattagaagaagtagagaaaagcagttactcatgttgaagagcggaaaagattatgcccaatgatatgatcgaacagagctttgataccaatgatggtttgagaataaatttgtattgattttgtttagttaaggtggatatgttgttaatggtttgttgtggtaatgtagtgaagtagtgatgttgatgagtaattgttgatttagtatatgaaattaatttggcttagaagagagaattgta

SEQ ID NO: 65444 - DNA, 705 bp, Cannabis sativa
  modified_base (337)..(345): a, c, t, g, unknown or other
ttattaaaaataataaaataaaataagtgtgaaaaatttatggtttgaaaccctaaaatttctattcaaacctaaactaactaattttttccaaattcatgttatttttgccaaaatataattttaataaaaaaaatataaaataagataaaatgttaaaactaacatattcctaatcttgtaattttaattaataaaatatatatcaaaaataacaaatttgaaaaaaaaaatatgatatggttagcaaattttaaaattaaaaaataatattttaatacgaaaataagatcattcaaatttaataacaaaaatgtaatatctgatcttataattnnnnnnnnnaaaataatctaaaatttcaaaattaaccataaggctatttttgtgagaaatcaaactttcaaaattcaaagcctactaatatttaaaactaatttttattaaaattaatacaagttaattttattctgacaattagatttttgatagaaaatttgaattctacacaaaattctaccaaaatttgatttttgtttcaatgaaaaacgattttttaatcaaaagatatcacaaaaacaagattgatgcattgcatactccccgtgcgcacaagaggctgcacatgcgcgagggagagactgcatgtactacccggaattaagaaaaatagattagcaaaaccctaactagataattatgtat

SEQ ID NO: 65445 - DNA, 1175 bp, Cannabis sativa
atatttttctacataattcccacttttaacacaagtgaaagaaaattctataaatttcaagttaaatatttcaacattgtgaagattggagtctatgtggattcactggtttgttgcaaaaatatatatatactttgttggttcaaacatgaaatatggagaagatgatttcggagagaagaatgaacacactaatgatagttgttcacattttaaaaataaatgtattaagttgacgattgagtcatggaatggagatgatgatgttgacctaagtattttgggcttaaacttgggctgagaattaacaaatagcttgtatttgaatttggctattattattttgtttgtttttgcattttatttatttattcttttaacacctcgagaacaagtgattttgaagggtgagaaagtattagacaatgaaaatactagaagggcttattagtaaactataaaggctgtgaaagtctataaatatataattgtatagctattgtacaatatggattgagaaaatataattttacttcaattgaaaaattgacatgaaaagtggatttcagagatttgccgaatcttaaaaaggatcatcacctattggaaaagaaccaatgaaatagtacgtaagtagatatctagatacctgagagtcatgaggccccaaaagattggaaaaagcattttttccaagcggttggtgttggtgacaagctgaacggtccacctatatgccccgtagttgtagttatctgcgctgtctaagcaggcagaccttacctgcttgttgagtgcccatccaactctagcctcccctctcaccattcttgtactcccatagtaaataggctcttgacaagacaatattcctactccacacccacttgtctttctacattgctcttttaagcactgtgttgctctttggatacccaacagataccaacatgctcctgcagcctataaaaacatatgtaaattaattattactttagataatattaattctatcatatatatacacaagattgtgtgtgcaatttgagtattagtaagagcaaattagtaagagggcgtgtttgttgcagctatatttgttaaatttttgaacagtttacccacaaaagatttactcaaatttaattattcagaataaagagagagagagagag

SEQ ID NO: 65446 - DNA, 1266 bp, Cannabis sativa
tataaataatttaattgtaaactttcatgaacaccatatgatcccagtgtaaaattattgaagaacactagtgatggtgtaagataatccgaatatgcgagcatcattgacagtcttcaatatgacattgaatcgagatctgacattgcctatgtcatggtattattatgcatgtttactagtatacctagattaaagcattggcatgctattgaaaggatggtgagataccttaaaagaaccatgaaccttgaattacattatcaaaagttccaactattcttgaagggtacaatgatgctaactagaaactttatcaaatgactccaaggcaactggtggctatatttttaccatagctggtgtgactattttattaaagtctaagaaacaaactacggtggcttaatctacaatgaagttcgaaatgatttcactagctactgctagtaaagaagcatgttggttgagaagatagctagctaagatttttttatgggaaagacctataccggttgtgttgatccgttgtgatagtattgcgactatttcaaaagttcaaaatcgttattacaatggtaagagacgacaaatatattgtaagcacaacactgcttgagagtttctctcaacagaaactgttagagtggatgatgtacacactgatgataactcagtcgatcatttgaccaaaggtttagctagagagaaaaaagaaatgagactattgcccttagattgataaatcattcataatggtaacccgacctatagactgaaaataccaagaaatatgttcaataggtaataataagttatgaagtgataagagtgagatcatgctataattatataaaaagttgaagtgagagattgttgaaatttcttacaaagtatgtaaatttttgacaaaataaaaaagtgtcctaatacgtgatatggagagaatcccacatgaaatatttaatggatggtctaatgttcatcaccatttattaaagtattcactgtaggataattctcatttccctttaataatgagagtttcttcattagttgattttataattaaacatttatttaaatgaagcctaaataattcataaaatccttacaaataataaaatgataagggaatattaatgaatatatgtcccgcgtccgttacttccatattgtttagtgtaaataagttaaacaaaatatttaatttatttttgcttttagtataaataagttaagaaaatatttaatttatttttacca

SEQ ID NO: 65447 - DNA, 1795 bp, Cannabis sativa
  modified_base (673)..(689): a, c, t, g, unknown or other
aacatcaagttcagattacaacattttcttcaggaaatatcgactatagtcatcaataaatccatcacaacacaagttaactatagataggactgtgcttacccactggctcttttagcggcagaaatttcttgaatcgctccactttccaaattggttatgtaagccctaaacctaaataacaagggtaccaaaaatgagtatgaaactccatagctcattgagaaatacaataagcttgatcacacaacctatccccctttgtttattgagaaagtatttttaaagtcatcagccaaaataagaaagctccattaatcattaaaaagaaaaagttgcatatatacataatgttatgttgcaattcataatggcaaggcaaaagcatatgtgttggagcaaataagtgtatacataaatgtcagtaaaacatttactctttgatgaagggatacatggagttgagcttttgggaaacaccaagggcatcaagagcaagccaagcatttcgtgaaaggatcaaggctgcacctgtggctctaagcccatttgatttctccaacaccaatgccttaacaccaactctcttcagtgccactgcagtggctaaaccagctattcctgctcccacaataaccacatcctcaatcatttcaatctctctctctctctnnnnnnnnnnnnnnnnntctctctctctctctcttacaaacacatggagtgagggttcaataaacgtgtgaaatttataaagcaacaactccacaacagattcttagttttcactgattttctcattcattggacaacagaaaactaatgcccaaaacaaaagaaagacaccatgtttgaccaaagtggcgaccaaggcaatatattaaatagtcaattatttgttgaacaaggaattgagttcactaattaagtccatttcaattcatcataatctattattattgttgctgttttcatattattaaattatgagaaaggagcagtgcatgttctctttcagtgttttttggattattattattggccaagtagagaagtacatctcagaaataacatagaagcactcaatccagctaaaagtttcattcttatgtttaacaaaatgaaaaatgtaatattaaacgtatataacgcgacacataatcttactgggaatcttttgaaatgaacttttgcctttttcttagttttaaaatggattaaaaaaatgaatagaaaaaaatattatcaaaattatgaaaagtagatatctatgagtgacagtgtgacacgagtattattattagagctcttgattttctgtggcaaattattagagctcttgattaattaaactttaaattcatttgaattataataagaacctctctcaaaaaaaaaaaaaagtaaaaaagatttaggaaaataattttaagagtattactgttagagatcataaaatgagttgagcagttgagagaaaatgagttgagcctaaaatggtataaagacacatattctatgaattacaatagaacgagcacaaccacactacccgaggcaggataatgcaaaataatttagcatgaaaaataaagtgaaatgttaaaagacatcattcaatgtgtcatattgctattaacacacttaattattaaattctataatttaataattaatttttattgaatgtagctagttaatcttgcacaacttttaaataatattgaagatctaatatcttataatcatgctcaaaataaaagtacttatttatagaaggaattatttcacaaataca

SEQ ID NO: 65448 - DNA, 752 bp, Cannabis sativa
tcatgtgaatcctctaataggatatcacttgatacaactttgggtagaactcactcccaaaaaactagcctaaagaagaagggtgcccaagtagttatatattactaaccaatcccatacttagccaagtgagatcctaacaatatacccccctttggagtcgaagtccacggtggcccactctacggttgcctcctctaggtctaattcacaggtcgccccttccgcgatgttggtcccacttgagggtgcatggctctaataccaatttgataggataccacttgatacaaccacttgggtagagctcgctctcaaaagctagactaagagaggagtgtacccgagtagttatatactactaaccaatcccatatttgaccaatgtgagatcctaacatcctcttagtttcatctaatgtcgtttcatatttaagaagaatttctggctttctttatgtagatgcattatgttggctttgttgacacggaagacatgaatgttaattctgggaaaaggaaattttcaagcttattgggatacaccagcagcaaactggctcaggtacactgttttatcttgtacttcataacagttcagtgtattggctcagtttgttttgtgtgaaacgaaaaatattgatactctattttaggttgtcaatccttcgcccatgtgttacttgtattggaactcatagaaactcttttttttttgtgtacgaattttctttcgatggaaatacaccaaa

SEQ ID NO: 65449 - DNA, 512 bp, Cannabis sativa
tagggcatcggtagatcacttttttgtgggtgtagaatttcaaatatctaaatgtattgtagaatttcccaataaattataatattataaaaaaaatctatagtgtaccccaaatatatgaatgtatcgatgcattttttcatgttttcaatattcaaataattttaattttttttatatgactatttagaacattatacaaattttgagaaaaatataatttaatgtacttaaaataaagtttaagtagtttgttgcacacatttcttttattttataatcgttgcaaaaaacattatctcaactttatttttttattttataaatttatcaaaattttacaaagtttctatctttaatacaaaagactaattaactacaaaaatgtgtaatatataccaacaattagattatatttgtaaaatataaataaaaataccaccaaataaacaagaaaaaataataatcaacagagcaagtacacaattaagcaggaattatcgggtaaaagt

SEQ ID NO: 65450 - DNA, 1587 bp, Cannabis sativa
agaagtatcaaaacaaaaactcgagagctcagaaatagggtgctcaatgcctaggttgacaaatggcctagtgcgttgggttctgcttatctgattctaattctgctttgaccgttcgtctagttttgcacaataattaagatcaatgaagtcatagaagtcaaattcacaactttgcatttttcattttcaacatgggaaactcactcagaaataaagagtttcgagtctctcatttctacaaaagagcaacatctctacgaactgatgtaatgtcctgatacttaggcacactacaatgattttcttaattaatgtgccacctttcctaatcaaagggtttttcttgaaaattttgcaaattaaaattttgatttaaactaataaatcttataaacatatacatgtattttacataagtcaggatcccgtatttaaactttgtacaaatattatcaaaatactttgacaaacatgtcgcacagcgactacaaaatacaatccaagatgtcccgagaccaaacactctagtccacgccgtcttgacatgtacaatcaccatccaatctaaaagtagcaactgtgagtcaacaaactcaataagaaaagaatataacaaataacatattaccgacacacctatccacaaggtttatcaaataagtaagaacgttctttacatttggtactatcaaccatgatatcagctactactagcgttataattgcactgtgggcttgatactatgtgcatatcgctatgatagcatcaataatacccaaaagtataattgacgatgatatcactcttaaccagtactatactcgtattgccgacccggtactatgctcgtaccgctatgatagcatcaattaatactttcaggaattggatatcagtcaaacccagtactatactcgtactgttgacccgacacgatggttgtgctgctgtgatatcaattcataactttatgtaatttacatatataacaggcatattcttacctcatttcttaattcaagtgagttggctgacctgaatggaaaactggattctggatggatgccctaagtcacatttacgtaaacgggtaaataacacaccaaaaacctaatccaggaatccaaactcactactaagggatctgctatcgttaatacttataacaataccctaattatcaaggaaataaccaactaaggctctaaaaataagacgaactgacaaatcaaacatttcaaaacctgcccctaatccggttaactagttaactggtttgcactaggtaatctaaaccagttcaaattttgccaaattcgtgtctaaaccataccaaaccttccaaaacacctgtatcaacctcaaataaaaatttccaagcactagtagcaacaattaaacacagaaaccaaatccatcattaatgagctaagtttgagttcttaaactcaaacttgctcaatctcctcattaatcactacaaccaactaagaataacctaaatctatccaaaataaccttgaaaatcaaactagaataaagtctaccctaaacagccactaatcttcaaaataacaatatca

SEQ ID NO: 65451 - DNA, 570 bp, Cannabis sativa
agttaatttcagttagtttgattagctacacatgtaactaattttgtaattaattcctaactgtcgctcaactgtatatatatgtatatatactgacttatttatagttgaacagaattcattctctttgaatcaacaaagacaaattctgttatttcttctaatattcttcgttttcatcagtccagcatgatattagagcttttttcgttctaatggcgtgtgcatcttcgtccgattccacacttcatcccaatggatccaatcctttaccaagaccttcatttctttcgttcaatcacactttttccattaaactcgatgaaaataattttctcccatggtgacactaggtttatgctgctatcaaaggccatcggttactcaagtttcttgattcaatggaagctccacccaagtatacgacaacaaaagatgcagcagaaaatcgaatcactgaagagtttcttgaatgggacgtttaagacagtctccttgtcacatggcttctctcgtccatgacagagaagatcctcactcgcataattggatggaatagtgctgctcaga

SEQ ID NO: 65452 - DNA, 1126 bp, Cannabis sativa
caatgctattttattttcttgttaaatgtataccataaattaaaatgtttgtgatttagagtacaatagcaaatatagttatttttttatgtcaaatttagaggaatgtttagatttttttcattggagagatgatcataggtgagataaattcttcagtgatgttataaaagagctacaattaagattttagtgccacttcaaaagaaaagaaaaagattttagtgggaaatttttaaataaagcataaaaagtttagagcgaattttaagtaggcacattaattagggagccttatacctaacacaaaggcttttgcaatatcacaaaatctgaaatagttgtgacacttgcttcggttaagaccaagtctttttgaactaatgtttactttaataataagataagagtattgctattggacaccagtagtgtctagtacctttaagacgtgtcgtcttgcaattggctagcgatactttctaaaagttattatattaaactatatgggacccgatactaaattaaactaataacgatattgacacgtaagagggtgcttgacactagccttttagcatttctcataagataaggtcttgctcagattctaccttctaatcaattaacatctgttcatttttatagtttgtgttagctgtactttcataccaaacttcttgctttgctaataataattacaccaaaattaggcttgattaataaaatatctatggttgccgaaattaggtgtccctgtcatatatggccttgattctatcaatataactaccacaaagtgccggccacatcaattatcaattttttccttttgtttgattggtacgtatacatagatatgaatgtttgctattttttcttttaattgatattttttggattttcaccaccatttgaaaaatatggcaatggtttcctaaatgtgcaagaaatatgttaatagtttaattgactaatttttttaaaagaagtgagcaaaggtccacgttggtggtcgacaatggtgcagcccaacaccgacaattgaagaagtgaagtattggttttgaagcccatgtcgtacatgagagtctcaaggtagtggtagtacgactcatgtcgccta

SEQ ID NO: 65453 - DNA, 1678 bp, Cannabis sativa
gagtttctactctcttcttagttctttgtactaagctactataagtagtaccattcttcttgtattttattactcttctctctctctctactttgtttgctcctttgagctaatatggtattagaaccattagtgtgagctcttttcttcttcttccttgatcttgtttttgttgtcaatggcatatggtagaggagttcaaactcatggaaatcgtgaagcagagaacgcttcgaatgattcaaatatgttctttgttcttggagaaaattctcgatcgacaaatgccaatgacctttcaaatccttactatctctctaatggcgataatccaggagatgtgcttgttccaaaaattcttactcgaagtaaaaattacagtacttaaagaagatctataataattgctctcgttgctcgaaataaaataaagtttgttaatggaagactacctcaacccaatgatgatcatgaagattatgtcagttggtgtcgttgcaataacactattatatcttcaatctttcatgctattttttatgaactcactgatagcattatgtatcatgataatgctactgaaatttgaatagagcttcatgaaagattcaatgaaaaaagtgcacatcgaatctttgaagttaaaaagactattcaaagtcttactcaatgattgaacagtgtcactacctattttactcgattgaaagttttatgagatcaaagtagggaatatacagaccacaaccagtgtattcttgtggtgctttgaaggtgatttagaaatatcaagaagaggatcgacttctcaaattcctggttagattgaacgactcctacagtgttatgagatctctgatcttgatgcatgatccacttccaagtgtgaataaagcttatgttgttgtcattcaagaagaaagacagtaaggattaactagtagctctagtaattcctttgaaattgatagatctacatcaaataccaccagacagtttgttggtgttgtccaaccttttcgatctaagtatacatgtactcattgtggtatgtctggacatacaattaatctaagtattagggatcaattatactgacacatttgcccttgtcactaaactagttactgtaaagctaggtcttgcacttgctgcaatcaaagattgacatctacaccaattagatgtcaacaatactctcttgcatggtgatctccaagaagatgtctatatgtctttacctcctaggtatagacataaggggaaattaccaccaaaccatgtttataagctaagaaagtcattgtatgacttgaaacaagcctcaagacagtggtttgcaaagtttttgagtgctttatatgttgaaggtttctctcattctgcaacaaatcattctctgttcataaaacacttcattggaggattcatctttctactggtatatgtaggtgatgtcatcttagccaacaataatgctcaagaactcaacactaaaactcagattgaatgctcaattaaagaaaagatttgggacagctaaaatacttcttaggactagaggttgcttaatcaaataagagaatttttgtttcccaaagaccatatgctctggaactattagaggatcttagttaccttggttgtaagctagtgagcacaccaatggaagccaatc

SEQ ID NO: 65454 - DNA, 1502 bp, Cannabis sativa
  modified_base (68)..(69): a, c, t, g, unknown or other
tttaaaatacaaccaaacaaaagaatggaatgaaaattgtttcttttctattccattccatttcattnnctccaaccaaacgccacctaaataatcagacgtaatcactacaaccactttaattggcctcaaatagagcacattcatatatacttaaattggccccaaatagagcatgtctacaatatacattacatacaacacaaacttcgtatatatataatatatatatttatatcatcttaattcaaacatcttaaaagctatcgtcacaagcatttgcagtactacaaatcaattttctttttgtttgttttgtaataccaccaaacttagacccctaattttaagacacatataataatggacctaacaccggactgttttacccgtgaatcaacgcatatttgttaatcaaagccaaagcattgctagtcaattgggcaacattcacaatcttccctctcaccacagttttcaaattcccattcatatcgtttcctccaaacccatcactgcacgtactctcatccgtcaaagcagcactaacccaagtttgaatgtcgtttatcatgatcttaaactcacggctttccttccctaccttgctcatttctcccatagaccttttcagctcatctaccgagtcactcagctcttccacgcagtccttcatcgcagccacctctttcagcttcaagccctggctcaacgacaggtttaacatcatggctgatgtcgttttggccgacgacagcgtcacctcgagggccgtgctagcaatgaggtgagggctcgtttggattgagtttgcgtggctcgagagtgaggtataacaaagtttgggatatgttgtggcaagacaagaagttctaatgaactctgtgtttattttcgatgttggatatcttgctgctgaggttgagtgtgtgtatgaagaaattaaaattagtgctgttagaaggaatgtggtcgatgattccattttttttttctctaacttttatcaaatagaaaatattttatttgaatttggaaggtagtggagtattgatgaaaaaaaatagagaagttgtgatcaatttatagagccccaaaagaaagtaggattaagtaagcgcgggtaaaccttactatcttagattatgtaagttgaagccttttatggggtccctagctaactatattagctagattatgatagggatgttttatgtaggaccaaaccaataaggatgtgtatgaacatagttgagttcttatctttgtatgaacaatttgaacctttttttttgttggtaaactccattaattagagtaatttgtggcattaaattttgagttacaaataaatatctaaatctaatttttgttgctaataatacctaagttatatttcgaaacttaagtacttgatcgttaaatgttaagtcattatacacgtgtcatttttttattggtatatctaaattaattttttaaaaaaataaaattcataagat

SEQ ID NO: 65455 - DNA, 539 bp, Cannabis sativa
tttattttatacgcgtgttaaatagactggttgaatattaccttttatattgtaaattatttcttaaaattttacgaggtgtgatcttaaataactataacgcatacgattataaaaaaaaaattaaaattaaatttttttatagatttcaaaatagataccgcgtatcaatacacctaattatatgaagttataatatacaaaaaattaaagagaaaattagctgtaataatttttaaggttatatttttttgtttgtctggtagttaattaatatccaattttaattactctgtatactaatttagaattattacgtgttgaaatattattagtacatgtgacaattaaaaaattaaaataataaaaaaataatataaattattaaaaatctttaaaactattattatttcttttcttttttcattttcttattcttacttattcttcgttttcttcctcttcagcatacactccgactccagccacatcgccaccaccaaaaccaaatctccagccaatcgtggccacctaaacct

SEQ ID NO: 65456 - DNA, 1584 bp, Cannabis sativa
aaaaaattataaattactaatactacatatgtttctctcaatttattaaaaattttgacttttcaatgggtaactaaaccgtgcaatgacagttttaaccgttagtgatttttttcaatttttgttctgttagtttcgattacaacagtattcggtaggtcggtttgaataattttttcaattttctaaattttatgctcaaccctaagaacaaacacacaaatttcaagctcactcttatattaaatttgaattaggatgagacttttctatcttttttctttagtatccaaaaatcaaattgaaaataatttccatcatgcgagtccaatattttctttttttagtattattttaggtgtgtttgtgtttataaagtagtgaattgacgacttttactttgccctaaaaatgttgatttgaaaagttgaatagtagaagtgatgatggagaaaagtgggaaagttgaaaaatagtaagaaaagaaaatgatgaattagttgtgttgtgtgtataaaaatacattaattaaaaggcctcgtgaatgaaatcggatgattaatttaattagagtttctttggttcagtcaaataaggtgaaaattaccatttcaaataatatgttaaaacatccattgagaaaaagaagaagaaaatatatttctatgacataataaggtcatccgtgacatattaagaacattgctatctatttttcccaacatataagtacctaaccctcaaaatactaattaacttttaccattactgttactagctacttctttaatagccacttaccaacttattatattctcctcctaattcatatgactctgattcacatcaaaaaaaaaatcatatgactttgaggaaccatgaattttcaaaaatatttatgaatattttaaagatatatctcaattttttttataagaaaaagatatattgtttaagaaaattgagtatatgttaagacaattttccttatataatctaataagtatcacattattattcattgaatataaaatgatacttttacccacaataaattataacttaaaaccagatttaaatagggaaatttgactaattattaatttatttggccaaaattattttactcaacctaagcttttcaatattagtagaataggtcatttttttttgtaaaaccccattctacccctcccatttgaacatctctctctctctctaaactttaaacacgcacacggatgagcacacaatcgggccacctcgaccttgcgaccacacacccacagaccaccgcaaccacaccacccaacgccgacaatatcttcgtcataggtaatccctaatttttttcatgaatttttaacttcgttttatcttttcatgatttagagctaaagcaattaaatttagaattgggtttgtatttttagtaaaaaatatgtaatttttgagatttttaggctcgaatttgtgttttgggggagggggaatctacgattttcgcctagcccgatgtaggcgcgatatagggtccgatggtaggttaatgttgggggagagggggggggggttaaggttgaa

SEQ ID NO: 65457 - DNA, 728 bp, Cannabis sativa
ttttgattggaaagaccactatcctaagcagtcttaacaacaaagaaaaagtcaggattttcaagccaaacattctcaaaatgaaatctttttccatttctagggtgagaattgtatccattatcattaagaataagctttaaagcacgatgatccgaccaaaaaaaagaaagatggtgtaaagaagcattaggaaaaagatcactccaagaagccgaactaacagcccaatcaatatgttccttaaccgaatgattgtgccaagtaaacttattaccctcaaaatgcaagggggaaagatgaaacttatgaataaaattcgagaaattatccatatccttactatcataataaatacttcctactttatcatcataagatagaaaactattaaagtcactcataattaaccaaggaagattaggggcattagaaaaaagtttatcaagaagagcccaagtaaaaggtctttgagaagaaataggggaaccataaaaacaagtgaaatgaaacagatcgttatcattaaaacttatattacaatctatatgattacaagagaagttaataatattaacaaaaagattgtccttccacaaaagtaaaagtccccccccccccaaaatatttcctagggacctcaaacccatggtcaaaacctagaccaaccctaaacctatcaaccgaaccagcaaccaaacgagtttcaatcaaaaaaaagaacatca

SEQ ID NO: 65458 - DNA, 1135 bp, Cannabis sativa
cagacgagacgtgtcaacctgaataaccttggccatgtgatcccttgcaacaccagcaatatacatgctctttaagcccactctaacatcacaattcagttttatcccatcctgtggaggagggttccaagttttcttcaagatcggtgtcggaatagtcaaaagagaatcatgcaactctgcaaaagaagtacaaatattgttaatatatttcaacacatctggggggagctattgtgtaccagttcgttgcgcgtcctccagatgttgtcaacaacaatcgatgcataaagaaaaatatcctcagcacggatccccttatgtctaaggtcccaaataaatttaatctaatcccaaacacgaatcccattatcacacacagggtaaataccccaaggagaagcacgccataagtgtggcgccatctcgcaagagagaaataaatattccatagattcctccccaaccccgcagaaagggcagtttgagttctcaatctggaaccttcttctaatgactgctctccgcattagaaaggatacaccaccaaagaactttatgacactccaagattttactattccacagcttattccaaagcgccagagcaacagcacaatgagtagctctatctaaggcccgggacagataagccgatttacacaagaattgaccattgctttccaaagtccaaatccatttgtccttaccttgccccgagggcttacccccttttaagatagcagaaatagtctctctccaaaaaatagtgttcagtttatggacatcccaatccccactagtcagtagaagatcgaccacaactaaatgttctgacatcacattaccattcagttttgggacgaaacctttgcaatggggtatccaaggatccctccaaacactagtatctttgccattggtcaccaatttacaggcccctttttttaaaatagcatttgctttcacaacatttttctaaaaccaggaattaaagtctttatatctgcaactgagaaaatcctttccttttaagtactttgcctccaagatcttgcagcataaagattgacacccattcaaaattttccacccccacttggccaaaaaagcgaggttcatttcttttattttc

SEQ ID NO: 65459 - DNA, 898 bp, Cannabis sativa
  modified_base (825)..(845): a, c, t, g, unknown or other
ttggaacttgtattttgaccttttaggttatgtttggttggggggtaggaagtgggaatgaaatttaatcattttcatgcaagtaaaacaaaataatatttgacttaatgaggtagtttaacaaattaatatataatatttagctattttttgagataaattaccaattcaatatagttttctgtcaaagtagtataagttttaaatgaggaagtttcaaaaatgcaattcatgtaacatttttgtgttaagcatagagatgaattataaaccatattaataacaataattagttcggtaaaatgctgtttttcttttaattcattttctaacttaccctagttttgataattattttcgaaataaagaattttttcattagggaacacttaaaaatgacaacaagtttccactgttatcagaatgataaataaaatctaaaaataaaaactaacagactctcttcatacaaaaaaagtattgtctactaaaacgagagatcaatattaattgactacgattagcttcaattgtcactaaagaatccgttttaaagtacttttaaaaaaatctataaaaatgtcaataaaacagtacaataaaattaagtgaatttttaattttataatttttaaagtataaatttgtaaaaatataattactctctaaaaaattattctataggaaaatttaaaaaaaaataaaaaatatagaaaaaaaaaataagataattgttacttcctagagagaaaggtttagttagagagaaagtccttaaaacatcgaaaagaatgggactgttgcccttagattgatgaatcactnnnnnnnnnnnnnnnnnnnnnagactggagatcccaagaaataggttcaatgggtaataacaagttatgaagtg

SEQ ID NO: 65460 - DNA, 587 bp, Cannabis sativa
atgcattatcaacagtgattgcaagcaccttttcaatacccaaatcttttaagcatgtctcaatagctttgcctattgtctctcctttgtgattaacaatttgacaaaaattcaaaattctcttttgcattttctactcatgatctataaagtgttatgtcaacaccatatagcaaacattttgaagggaagtccatgtgtcagtggtgagagaaactcattgtgaatttttaacaaaataatctctcaattttttcttctcatcattatacaacttcataatatctctagcaattgtaacacgtgaaggaatatcaaacttagggcaagcaacactacaaaataacttgaatccctcttgctccacaaacctaaaagccaactcatcaatgattatcatttttgcacatgcaagcctacaagcattttgattaaatcccacggccaccaaattactacctccaacactttcacacccaacaatatttttcttttgaaatattaaagttttttgctttttatcctccaatctaaaaggatatttctgacacaaattcatcaaatgattcctaagggtactagttcca

SEQ ID NO: 65461 - DNA, 951 bp, Cannabis sativa
agtctgagatgtatatgaagtatcctcacttgtttaattttcaacttgaggttgtactttaaaatttcgggacgaaatttctttaacgaggggagaatataaagacttggttttgaccgagtcaaatgtatatatataaataaaaaattaaataataatatatatatgtatgtatataaaaaaaaattaatacatacaataaagcagacgcccctgtcgttcccctctctctatctatctctccttttctctctcttcaaacacaaaacaagaaaacctacaaaccaccatcaccaccacactccggcgacccacctccggccatcgcccgacctcacacaccgaacaaatcgaagcccaagtgtcggcgacctcacccccaagcggcgccacttctctcgccgccgttagcttgggatcgcaagtcaaagtttgggagttcaaactttgaacggatttttcggtcacctccggcgtctgtttgacgagacattttcaccactaaactcacctcgaggagaataacctacactaaaccatttttcccggtttgcaagttttttcggtgacatttttgtagcttcgcccctttccggtgacttttcgctgacatcttgtactattttgacaaactgttggcatgggtgtgatctagtcgtcaaggtggtcgttttgatatacactacccctatttttggcgacgtttacggtacaccaatttttaccgccaccaattgttaatgtgcactgcttaggtgaggtttcggaaccccaaattttaaatatagtcatattatatgtcgttggactcggttttgaatgtagactgcgataatgataattatttaaacatttggtggtataggtgagagtaatatgtaagattggactaaacaattggagctcgggacttaagagcttaagatcgtcttttggaaaaaatttaacgac

SEQ ID NO: 65462 - DNA, 651 bp, Cannabis sativa
tattataagaaactattagggacccgaattgagaataggcaagttgtcaaagcgagggtggttgctcttggacatgttgtaactaactagcaggcaaattttctagaagcagaatttacaaaagaggatgtcaaggaggctatttttagtatctcggggatcaaagctctcggtctagatgggtttagtagctcattttttcaagacaattgggatcttttaaggcatgacgtaactaaagcaatacattcttctctacattctggatagatactcaaagaagtgaattcgacggtgctcacccttatgcccaagatcaaatgccccaacaaagtgagtgaattttgacccattgcttactgtaatgttttgtataaagtagtaaccaaacttatatgcagcaggctcaagcacatagtcccagaattggtagcagagaaccaagggggttcgaagtaggaagatttgttgcgcataatgtaccgccctaatctatagggacgccacgtgtgtgattttataaactagtttaatactagtagactacttaattattaaaagtcgtgataatattaaaaacttgactaaaataaaatactgaaaacagacattataacggcataaaaggtgtgttccagggatccctgttat

SEQ ID NO: 65463 - DNA, 1763 bp, Cannabis sativa
gaataaggcatatgaatagtgtgatcttacgagttctatgctatcacttgcgaagagatagtgatagttaatgtgttacccttatcaattggtgtgtcgggaggccgtaacaagatatacaaattagttacaatgatatctgcctttgtttgcttgctttttctgctgaagagttcaaatttgtcgagtacaaactgggctcaagtctttgctctaaaatcatgagttgaaagtattctctacttttctgtgttcaaagacatgcttcttccctaaaatatccacacacatacacacccaacaaaaaaaattatcaatccttgtttttttttttttttttgaatttataatttcctagtcgtttttatagttttctccctagtggcattttggagcttagatttctttttgcccttagtttcaccatgaaatattaagagctatatcaataaattgcatgctgatctgttctctgttttgctttctggaacatgaagttgttatgacccagagaaggacacattagcttttacaaaggtggatagatttcttcctaataaaatatattaccaaggatgccttaagtcctttcttgaaatcaccaagtggaatggcccagaggtaagttttgtttttatttgtttgctgtaaaatagttgccagtttttggaatctataatatgtttgaagtcaactttctttgctgttgcaagaagatagtgtaactccttgtcttataggtgatttactttggagatcacctatttagcgaccttagaggaccttcaaaagctggttggcgcactgctgcaatcatccatgaactagaggtatgttatcttgaccttttgaattgtagtagctttcattcaaagtgttctgaagtgtcttatgtgtacatgagaaaatctgtaaaaccaagagttccttatcagctttgtaattattgtgcaactgaatcacagcagatgataacttaatcttatgtatttgtagctaggggttaaaatggcatagtaaaacctacataatttataaaatacattagagagtctatttgagtaagtgaaatttcagagagaatcgtgtaaggttgacaggcaagaggattggtattttcttgcagctactgaggatgaatggctatcaattttgctttgtttcatgtttattgcactcttagtagtggattatatggcagttagaactgtaaatatgttcatcttggtctcaaatgttgctattttgatgttatattataatataggagttgaggatttgatgtatttataattagagtctgatgatatggaactaataactcagggctaaaagaagttcaggtagggatgttattctttggtagctgtttatgtaaagtagcaaggttgccatacatagcattttctcttgtagaaaggcatggttgaagatttgcattactgaccaggggaagaacatttggttattttggatttgtatattagttaatgtaacatgttcatgtgtcgatgtcaattgtcaaagaacctaaattaataaacaaacagtttcattaagaattaatttggaatcaattacatttcctgaacttccaattctaaatttttagttgttgatttgtcttttaaatctttataagttcagtttacagtttcttttcatagaggatgatgctattaacatgttttgccaactgcagagtgaaatccgtacacaaaatggagatgcttatcgttttgaacaggtaacttttctgttac

SEQ ID NO: 65464 - DNA, 610 bp, Cannabis sativa
agtgggagttgtatttgtttgtacacaatatattacttgtaagtgatgataaaagtttcttatttaaggtgaaataattcatatttcaaattataatttttgagataaagaacataaatgatatatacaattttagttaattagagaatagtcacaacatctctgatcaaataaaattatatattattcatcttatgttacttatctttatgtgtgataaatttaactcaaaccaatatctgtaaaatgatttgaaatgagaataaattaagaacattcatttgcttctatttttaaaaggctaatatattcctaagagtttgcataagacttcactacatttttttcaagaatgctaagtagtatcaaaataacttaagttaagaccactttataatttcatacaaagtgatgaagtatctatccttaagatactaaagattacatgcatacatacatactttattgagatgaactgacactctagaaatatagttaactattttgattctaatttcactggctacgttgatccacataaatcaacatttgattacgtccttaagattaccagtatattgtatcatggagaaccttaattgttatttct

SEQ ID NO: 65465 - DNA, 776 bp, Cannabis sativa
ggtacaaaagttggcaaagatgagcactaaaacattttcctacattcttactaatcatcaagtcaaatcccaactcttattctaggtaatttgaattcatgaatggcaagcaggtaccaagcatcttgaaaatattccaagcttcctcttctacaaaaataatataaacgcaatattagattttaataattacgatcgatccatgaagttaagaagcaaactttaagtaggaaacttcccaacttaaggtcaaaaagggctttgaatttagtggttacaatattataaaataatgtacatgttttcaaactggtttttgaaacttggtgcacactagaagacaatttttctagaactaaatgatcactatactatactaaaataatttaggatggacaggtgttgatataaaatgtcaattaaattcaaagaattataattatactgaacgggaggaacaaatcagttaataatttttttcttttgataaagataagttaataaattgattccaagtcaaacaaaaatttaataaagcaaaagaaacaatctcttcctccattaattacaaagcatcatcacatattcacatgacacattatgtgtggtggcttacactaaagttttcattttcaatacaaacaaaaaaaaaaataaaaaaaaaacacaacatatatcatacatcccattggatggagttggtaaaaaaatcatttctatctcatcattttttaagttttttcaaagggtagttaataatgtcagacaatggtaaa

SEQ ID NO: 65466 - DNA, 2147 bp, Cannabis sativa
aattaattatctgatttttaaaataaaaatttcttttcaccgtagtaatatttagaaaaatgaaaaagaaaaaagcaaaacctcgtttgctcctccttctcacaatagagagaagtcaatatagaaagtgataggaatttttttttccaaacaagcttcttattcgaatttcgaatcataatagagattacattatcttaaaaattaaaattacattcaaaagaaaatggaaatagttacccaataattaacttggattggaagtgcagtagtaaatgtagttattaacctcatgaaataaaattcaccgaaaaaagaaaaaactaatacgaggtcgtcaacaccttgtattagattagataatctttacaacctcaactaatgttacagtatatatacagagccataaaaaaaacagcctccattaatcgtaatactaccagttttctttctacaaactactaggaaaaaggtgtgaaattgtacaaatggaagagagggaagcaaatgctgagagaactgaactgaatccacaccccaccatttctcaagggtgaaatcaaatccatggctaccaaacccaaccaaccatgtagcagtcctcccagcagcacctattacattttctcaagaagacagaaccaactttcatgaaatgcctgctgctcttaacaacgatttgtttgtcgtgccgagccattcactgcttcgtttattctgctaaatactaattttaggggaatgcaagctattacaggcccctttggtttcaataccactgctttcctctcttcagatttcttgttacctgtcaatgaagatagtttccttatctttttgggcaatagcccagatttctttgttttggttgatttacttgatttagaccgccgctgcaaaaccatatgatgctttgttggaattcttccacgtactgaagtccgcttatcataactcactcgaccaccaccttccaccggattgcgctccactctgctcaatagagtatcacagtggccatcctccaatgcctccacagcaagagggtggcctacaatagctttaccattcaatttactcatcagggaaaccaatggaacatgaggtggcctatagttcgctttcacctcaacttttacgtcatataatgaggaatcagatggaccatttttggtggaaacatctgacatccgatatctagagtgaaccgtaaaacgggattgacgataaggaagtaatctttgaggtggcaatgagccatcttgcaaatccttcatttcagcagttggccctctcgcgttcagcttcatttcagacagatttttgccccagacatgggcaccatctccctcatcttcagcaactggtttggacttagcttgtaaaccacaggtgttggaacctgaggatccactaacgccattgcaatcaatttttttgtctaaaccctgaggaaatccatccggttgctctgtacctgctgaatagacattggattcatcatccatgtcaacatgcttttttgactcttcttttctatttttattcgtttgtcttgaattcctcttgcctttcaactgccactttgaagtgcctttctctatcctctgctccatatcagtatggacagcttctgaactggtagaaacagtctcgttaatgccctcatttctcaatgatacagcttctacctgactactttgactagattgccttttcagtgcaccattttgaggtttttcagataaacaagaaacaactacaggagaaacacctaacaaagaaagaaatgaaacctgtttcagaagaaaataccatgcaactctacacaaaaccctataaccactgttcaatatacagttacaaaaaagaaaaagaaatgcgagaaagatatgtgtagacctatgagtacttgaaatgcttaaaatgacatggcataattattcatgattcatcatcaacatccaggacactcgccttgtaatgatacaaagatgctcatgaggatatgcatactgacacagctcaaataatatttgttgatgtatgatctgaaaaaaaaatatggttgatgtaggactccactaaacatatacaaaagaatattgaatacaactagctacaaacaaaccaatctgacatgtaca

SEQ ID NO: 65467 - DNA, 666 bp, Cannabis sativa
tagtatttttagtagcgggacaattgttttgacattgggaatgtcgggaatagtcgggatattaaaattttccaaaaataccccttaaagcaattttatgacatttagtgtgggaggggcaaaatagtcattttgtcccataagcttttgtctttttgtggatttaattagataagtataatcaggtttttaatattcactacaagaaaatagggtctttatctacaaattataagtgtgggtaaaagtaatagaaatgtaggtaaatatctttacctacaaataatcaaataatttttgtttgtagacaaaagattgtggagaaagatttttgcctacaattattcacatttgtagataaaatatttggtggaccccacataacaagttggtactaatgactcaatgtatgacatggtgagtgacgtggtagccacataagatgaaatatggcacattcctatttatccatgtggcacactaattagatcatacttgatatttgaaatggattatatggccctcaatgattaattttaatattttttttatatttttattaataattattataaaaagtgaaacataacatattaacatcactaaaaaaaaactaaagtatatcatttattcactatagagatcctttacaaaaaaaaaaaaaaa

SEQ ID NO: 65468 - DNA, 7283 bp, Cannabis sativa
gacctacgatcaattcctgtaaattttatatatttttttaaaacagagcccagaagttccccgattttaattggtacacaagcaatgagaagtgtggaagacaaggaataattagaaatttttattagtacaaacgaatagtatttttagttttttgatgcacaaattgctttttcatttatttgtttattaattatgagttaattatacacaaatacctaattcgaacaagtgaaagacgattggtgtaaaagggtgtctaaagaactaaggctactttttgcaaatgatttatttacaaataagatatctatgatttacttttattaattattacaaaattagtaaattgaagacacctgtaagtggaattagtgttaaggtaaagtaaaataatggaagttagataaggcagtgttatttaatgacaaaactcctggtgatgaagagaaggacgacaccattggaaaggaaataaaacaagcatgaattaataatggaatgagaatcagaaactaatgcacagcccacgtaaatttcaaaagcaaactaaaccgaatggaaaatcttaaaaacaagaataagaagacacgtaaagctccaaattgcaacgacctatagtgacagttgaataattatacaggtaaatgcaggttatatagctccaaatgattgactataagaaatacggaactcctgtcctaggtcctctcatctggttattctcctctgtttcggtaaaaaatttcacctctctctcctgaaatcaagcacaacaaaaaagaaccatcatcaacaccaatagaataccaaagcacccaatgactgttagtgtttgatctcatagaaaaacaatttttcataagacacaagagaagaacaaagcgataggatgaaatcttgtattaccatattctcattaaaactcaatatagatgccacgtttccgcatcggtaacagtaattgggcgcagaccagacctgacaagatcaagggcaaacgtactattattgttaaccgaacctatagaaaaatgtcaaaagcattgaaattattataaaattttgttttatgtacagaggctcaccgtaacaaggcctttgtcttggaacatgtacttcaacccttcttgtacaagctggtgcgctcgacagaccagatcaagattgtttatgtggttaaactacaggaaagaaagaaagaaaaggtaatgatgtgttatgctaatggtcagaattgtggggaagaattatgcctacattgagatcaaattatcacctcagaagtgactctggatccaaagagccaacctgctccacgtggactgactgcccacgtttcaatatcttcaggatcactccacataagatcacaaaatggtccctcatgaggaatttcacaatttcgctcaattactcttatctgtaagaaaaatgttgcatgaaattagatttttatcaaatcaggtaatctttaaaggctaaaggattattgatacaaagaggttcatggctataatgggtagatcgagccacgatgggtttgctgcccttaaagcattatgaaatacttccttctgttctgtaaatcaagctattcaaaggtattttaagattcttccctgaaaacttctacaaagagtccaagcatactgatttacttccctgggacgttagagctattttacatgcatgataatgactcgtaactgataagataccaaaaacagtgataccaattatatatatggaaattcaaatagagagatagatataaaattaataataataacaaaagggcattggcaaccatatacagaagggcaaaaatttatcattgttcaaaacagaatgctaaaccattaaacaagaaagaggtaaaggccatctgacaagaaaaaagaagaagaagaaaagatgagataaagacctgatcaatagttcgaatatcaggagaaagaccgccatgaacgcaaagtacctggaaagaataacaatatatattattataaaactaaagcagccatggatgcaaccaaataggatatgataagtgcatgtaaactatgcacaaatgtcaggtaatattagaatgtaaatgacaaatcatgtgtgtgtgtgtaaggcaagagaaccttacagtgccatctatgattgctgagagcgtcaaataatcaaaaacatctgtacaataccgccatgcattagcgtttccatacttcctctggcactcgtcataaaaaccatacacctagaagaaatgaaattatccatgaaaaaaaaaaaaaacaaaaccaaatcagcgataagaattccttaaagcttctaaactgctatccagagacatctctgttttagttataattatcaacagtgaaaaataacagctgataaactttaataaaaaacagtttgttaccaatttaatattagttaaattagcaaaagcttgggtttgaaccacacacctctacacaccaaactgtctaagctatagataaaagtgaaagaaactgtttaggtgtaacacagtaaagtcttgtcttttgagctttttttgcacagaacagaactttttaacgaagaaatggacaatatataaaccattcagaagataaggcaacctctaaaactgaaaggagaagcaaaagcattgataactgttgaacactaaatccttccagttacggcaatcaaaagagaaaggaaggtctttgaactccttaacaattgacccacaaatagaagctaaaaacttgggtctacagcagagcatagatttaacctgataatgtagattacaaatataaaacataacaggcagatagatttagtcatagtttctcttttcctttgattgacgactaataaaagacgttcattctcacaaacaaatacatcattaaataataaaccaagagtaccatgcatgtgatgaaaatacttagtctaagcataagataacacggtcagcagttcttcaaactagcaaaaacaagcataacctacctgggtcagttgcctgctttcatggtttccacgcaaaagtgttatgtttgctggatatctgtaagtaaacgaacaaagttaaacaaaacaaagaagaattagcttctcaaaggaaggcattaaaagattaagcacataagataaaacaacaaaacaatgaaaagaaacatccaatgaaagaaattatagagaacttgattaccttcgcaaatattacaaaaaagggatttatgacaacctacactagaaattatagagaacttgataacttttgcaaatattaccaaaaggaatctatgacaagctacacaagaacaagtttgggaaggggagatcattatcccaaggttaataatatcgttatggtgctgtggaaaagttttgactgaaatgcatgacataggaaaattttctttcatccaaatgacatggcaaataatgtctaaaatgaaagaacagaaatataacaaccatccatcaagcccaaatctaggatccagccggaagaaaaagaaaacaaattatgatttcaagaaattgaatcattaaaaaaagattgtagatgcatcttgttaaccaaaaactatccacagctagaatgcaggaagaacgtgcaaaatatgttgaaatgaacatagtgtaacaaaggcaagacacaacaatagcatccctgtttcaacaaaatagtcggagaaaagcatatgcacatataggaagcatacctagctttaagaagcaaaagaattgtgaaaacttcaagactattgtaccctcgatcaacaaaatcaccctgtgaagaatttaaatattgtaagcacactggaaaacagatattctgaaatgacaggattaaattgcattcatggtaagaagcatataccataccataaatatgtaattggtctctgggacatggccaccagtttggaaaagtttcatgagatcgtggaactgaccatgaatatcaccgcaaacagtgactggactatttacaggttgcacattagattcctcaattagaatctctttaacctataaaatgtagtttaaacaagagattcagagagagaattaccacaatacatatcatattaaatatataaatagtgctcataaaatgtcacatgaacatatgtaagaaaacacatcaaatacttaaaattaggaaaaaaaaaaaaaaaagatttctagaccatttaatacacaagtatcaattattaaatatcaaatccaagaagatcacttgtgacttcagacagtgacatagacataaaacaatattcagaatttgacttttaaccataacagtaattacattagccaccacaccatatgaattataaccacttcaaatttgatcaaaatgtaactacttggaagagaatgttcaatgatttttaaaaataaatcaatatctaaggctttcaaagtaggccatatgtagtcattaacaagtttacgtaatctccagacttcagaacttcaaatcgcaacgagctatctgtggaatgaagattctagttcacagctatattatatgcccttatacacaggaatcatgtaaatatgaagcaaggccctacaattagctctccatccacaagcaattcaaaattattgatctagcagagtaaaagactgccaagccagaggtttaagcatcgtgccagttggagggcatggagcaatcaaacattcaaactgagtcaagaagcaatgcctggaaaaggatcaaccataatggaaaaagaaccaaattttgctccactatttcaaacaactaaattttgctcatttctcagtgtcattcattcaagaatctcaattagtcttgaaaattctatagatctcacatccaataataaatttggggaaatgtagcacctacaagaaaccaatcaagaaacgcaaccagttactttcacctcttagttcctcttgtggcacccatggattcgataacaaatactgtttgcactacactgaaattatgccctccgtcttcactaaacaatgaatatattaaattcggttgctcttgctagctctaaataagaaagcatatttctatctaaattatcagatttgacaaaaaacaagggtatgcaattttaaagccccattttctccgatctccacggagataaacagcaaatatacacacattaacgtaaaagtaccccggcaaataaatcctactcggaaattaagttcgaagaacttttctagacaagcaatcagaaaacgagcaaaacaagatcaaaatagatcgaagaaacaaagcgaagaaaacatttcggaaaaataacgaaaataggaagaaaaaacacgaacgtattcgcagagaagttgaagctcgtcctccaaaaggtgctggccttccttgaccttcgagatccactggtccaaatccatttgtcgattacttctttcgtattctttttcttcttcttcttcttcttcttccttgttcctctgtctagggttttcagcaagttcccccaatgatagaaaccaaaaaaaaaaaaaaacaatatccaaattaaatcaaaacattagcattggtcaaatacttgtatcaattttattatttcgaactggccaggcaaagccacactatgttttctctttcttttcaatttttatttatttattttttatgtggcatttataattttgtatttttttttttttgaaacattataattttgtatttattttatatgttttataatttttttggttaaattagttatattttttcttttttattttcgttactaaacacagtaaaaataaaaagtttatgtgtttttagtgttttaatttttagaattgtgtataattgagaatggaaaagagttttttattattttaaaaacttaacaatatttagctaatattttttaaaaattatttttagattttttttaccattaaaaaactacttaaatattatacaccataccaccacatgaacccagccccaccttcgatgcaggcctaagactcgaacccggtcctaggtcctaggtcttaggttagggttcgggttcaagtttagggctgagtttagggtctgaatctgtgtttatgtcccgattctggggtttggctccgggtctcaagggaaggtccgagttttattcctggaggcaggttcgggttcaacttcgggtcctaggtctggcacccgatccggatctgggtcccagtacgtgtcttgatctgcgtctggatctagactcgagtatgtgagagaaaatgtaaaaaagaatatgttagacaaaaaataaaacctatttttgaaaatagaaaacaacatgttgatgttttctgtgttttagttttttgtaactcactttttagcaaattgtttttaaaaaatttggccaaacaccccctattagattttgaaagttgttttgtgtttttaaaaactaaaaataatttctaagttatgaatccaaacaccctttaggtttactaagttaatattttattttcttagcaaaatatatatacgatcccaatttctgcaagggtgacgtggcatccaataaagtgacaagtggagatcattccaagacctagacgggttgtttgcctccaaatgctacgtctagaagagtctacactcaaagatggttatgacaattctcagcaagcatctagactagaattatgcttaatgctcctgccagaatgtctttagccatctaagtagaatcctccgtgcggaaggatgcggtgaatttagattctttaagataaattccttaaatatctcctcatttatagcatggttaaatctctatatttatgagatttattctgcacagccgagaaattataggaatttagtctttaatttcccatttatttcttactatttaagtaacaatattagttgtatcttccttataaacagtggagtcattccactatttacggatccgagttcatatttcttagggagtacttatgctgtcaaattacatataagctttcataagattgttaagaaactcacttggtcagctccttgtgattttgataatcttcaaagtaatagaaatataaatgggggtttgttgttactataatcacagggctgaacctttataaaattccttgtgttcatattactcgttattattatgttatttttactcatgatattattgctttaaacacttaggtggcgtttagttagaaggaatgaaaacataggaatgggaatatgaataagaatggaatagaataaaatttaa

SEQ ID NO: 65469 - DNA, 663 bp, Cannabis sativa
attttatgatctaaaatttttatttacaaaaatatactctcaaagttttaaaattacgaagaaaataactaaaaaacaaccaaaaattaacatcacgataactataaatcaactatttttatcccaagttttgcccacacttgacgtggcatgttcacatacgcaaaactaaggccacgtggagtacaacctgtcagtgacttgacaaatccgcttagcgcagcatgccaactgtcaaggattccaagcaatcaagcaagattaaactaggaagaaatggccagccaagggatcctggtcggaccacccctggcccgcctatgaggatctatataccggccagaccctaaaaatagtattggccggctagcacgtacgattaagcctcgcatagaggccggatgaatggtgggatccgcatgcaaaaattcagttacaagacaactctatcgacccacaaagatagggattgaacatcacattatctatatattctttagtgcttatctatttttgtaatttaaatataagataaaagagttagttttcccattttggggggatattcacttatttgaatattgatattttgtaagccctaaattatataaaaggccttaggcaagtagaaaagggacctgaattctaagtccctcaagccct

SEQ ID NO: 65470 - DNA, 2309 bp, Cannabis sativa
cttcccatgacttgctgtataccaaaatatcataaaaaaaaaacgatgacatggtgccttaggccttgttgaaagaggcgattcatcgctgcctggaatgtggagggcgcattagtcaaaccgaatggcatcaccgtaaattcataatggccctcgtgagtacggaaagccgtcttgtgagtgtcccgaggatccattcgtatttggtggtagcccgctcgtaaatccatctttgaaaatacttgtgcaccccccaattcatctagtaactcatcaatggtgggtatagggaaacgatctttgatggtgatgttgttcaaggctcgataatcaacacaaaaacgccatgttccgtctttctttttgaccaatagaaccggggaggagtatgggcttgtactgaccttggaaaaaccccatgatagaagatcacgtaccatcttttcaatgacgtccttttgaaagtggggatatcgataaggtttcacattcacaggggctgaacctggttgaagaaagattcgatgatccacacttctacgcggtggtaaatgtttgggctcttgaaaaacctctgaaaattctgaaatcaattgtttccccattggtggtaaattctcttgccaactgctatcttcacgctgatttggacatgcctcttttgtcactgtagttaactaatatacttctctaatttccccttcatgaagcaatgagtgaaattggtgaaatgttagctgatgtaatcccgagtcaagtgaaccagccaacttaaccgcctttccttgccactgaaactccatcgtcaaagccttgtggtcatgtaaacacggaccaagagtttgtagccattgcatgcctaacacaacatcaagaccccaaatcagtagcacatacaaatcaacagtaaattgatgtccctgcagccacaaatcaactccacagcacatttttgaacacaacaaggaattaccattgcccatgtaaaccttgaaacatttggtatcttcacatttcaaacccaaacggttagctaaagtttcttgaataaaattattattgcttcccgtatcaataagaacctccaatgtttctttaccatgctttgcactcaatcgaaagattctcgaattcaccgagttagataaagtattaagacttacctcatcaactggtgagtcttctgattcactgttgtccggctcagtggtgggtaatgtatccgagtcatcctcctcttccgtgccacataaaaccagcatctgattcttacatcgatgaccgtaactatacttctcatcacaagttaaacaaagtcccttctcacgcttttcgcgtatttcagccggagttaacttcttcataggcagcggagtggcaccagttttgaacgattttggccctgtagttgctattggtgtagacccgtaagaagaagatcctcccatactttgagctatcggacgtgagtacgtagcaggacgagtgaaccaactcgaacgtgatccttcgcttttggatcgtccaactaactcatcatttcgatcctcaaataattgagccttagccatggcatcagcaagatccacgggtttagccaacaacaattcccgtcgtatttccatcttgagaccccatacaaagaaattcaaaaacaaatgctcagaaatacctgtcactttagtcattagatcctcgaattcggatcgaaattgagctacacgacccgtttgagtgagtttcgagatacggcccagggggtcatcatacaccgagtctccgaaccgcagacgcaaggcgtggaggaaggcattccaatccacaaatgagccactcttctccatccattgaaaccacttcgacggttccccatccaagtgaaatgggactacagtcaaacgaacagaatcatcaatgttatgaagatcaaagaagcgattgatcttgtaaatccaatcttcaacctctgagccatgaaatctagcaaccttcacacgcagattttttaaaatgcgattgatattgccagcctttctatctgtcgaagcacgatagactgttcggcgaggttgtgccattcccgagctcgcacctgctttagttggatgagaattcgccatatgcgtgaacatcaccggaatctgagcgaacctctcgtcgtttttagcttcgtggtcattcaacaactggttatatctccccaaatgagcatcagaaaattctttgaaacttgccttcatatcttcgaacagagcagcgatcttatcgttcttcattggatgaagagcaatgaaagcactaattgatag

SEQ ID NO: 65471 - DNA, 939 bp, Cannabis sativa
  modified_base (893)..(893): a, c, t, g, unknown or other
tgtctccttaacttttaaggtcgttaaaatcctccctaaactatttagattgttggatttaaggatttttctctaattttagtaaggaaagtctaacatggatgaaagttgaagggacatgatttggtacatgtcaaagttcgaggggtatgatttggtagatatcaaagtctggagagcatgatttagtacatgaacaatcactaaattagtaaaattgaatgcaattggacaaaaatccttaaatccaataatttcaatattttagggggaatttttaacggccagaaaagttcaggagatatgaatttatacatgtctaaatttagcggtaaaaatcctaattagcctaaaaaaatatacaaataacaaaaagtcaacaacaaaataaaaagagtaacaaaagaatacaccaaaagagtgtatttgatgtaaataaaatttaaaaacccataaaaatatcaaaaaatccgtacagactgtatttttataatttgttttgttgtttttatattttttttttttgaaattatccaaagaaaaaaaatttcattgtagaagggtgagtaatatgagcaaggactcatttctgtttatacttcagccaatatacacttctaaattaaataacacatgtttagcaataaataaagggtaattaatactattttagatcctgtatattgtaaaagttaccaattagagtatctgttttgtcaaatgataaaatggaccttatattttttaaaattgtacaaataggaccctgaactaattttttgttaaaataaatcttaataataatctcatttagagatgttatgacaaaaattggttaaattttctgtatctgtccatgttagaaattgtgttaaagttagttatattaaaanaataaaattgttgaaaattgagtttagggtcctatttttactattt

SEQ ID NO: 65472 - DNA, 1369 bp, Cannabis sativa
aagtaacagttttttgtagtggtacacataagaattttctttggttttggagcattcttttttttttttttttgacgaaaaggatacttcagcaacaagagagattacaaaactgggacagatccgttccagctcaattcgttgtctagccccaatgccttccttgctaagaagtgagcattattattacatttcctgtttacatggtgaaggctagcatcaaggaagaaaaacaaagaactcctaatatcatccactacatccgataacgcaaaaagatctcgcttgcttccacaaatccgatcaactagaagctttgaatcggtctcaatgacagcaattagaattttgatatgatagcaccagtgaagacttgctcttagcgctaaagcttcagccatcagcaggtaaagatcaccagcagcatggatagaaagagcagcaataatcctgccattcccatctttaataacagccccaaaaccaagcttgccttgatctgagctcaaagccgcatctgtattaagctgatagaaacccggattgacttgcttttgctttcaatgagcaggtaaggtttgggatggactaagcttcctcatatttagctaggcttcattgtaatctgaaagataagagttaatccaatcaataacatcagcaggagacatattataagttgcaaacagttttttatttctaaagttccatatggcccagagacagtggtcaacaagagtgttagttcctctttgttaaaatgtgaaaacccagagattatgaactctttgatgtcaacatgtcgataattagcatagaagtgtttaagaggagaaactttccaaatcttggcagcactggaacaatctagcaaggcatgagtcacagattcagtaggacaacgacaaagagaacaacaagggcttgggagagatttcttgagaaaaaggttaagggcagtaggaaggatgtgatgatattgataagaggagcatctgattttttgttttatatgtggagaaatacaatatttttcttattcatataaatgtgtacattgtaattttaagacctcttacaaatttttgtgaaatttcaaattaataatttacaatccaaaaataagtttccaaagcaacttattcatatgtatattgactataaaataagtttcaaaacaacatatatatgatagtgagtaatcaatagttacagtaaaaatataaccatcaatcgtgtactatatttttttttatgacctgttataacatatcattaacaagtaaaatttctattttaaacttaaattaattatatacataaaataaaagtttttttttttaagttttaacaaaaaaaaaaaataaca

SEQ ID NO: 65473 - DNA, 976 bp, Cannabis sativa
caagttaaagttcttatacaggtttggttttttgtccgggtctgggtccgggtccaagtccaattcccaaatttaaacaccgactatggttcgggcccaagcctcgagtcttgggtcctgggtctcgggtccaaatctagatcctggtctagttctaaatcatgccttgggtcttggttcgggtctctgttccaagtttgggtataggttcgggtcttgggtcctgagtcattggtcccggtcctcgattcaggtcagggtcctaggtcccagtgtgggttagggtcccagtctgagtgcaggtctcggtccatgttcggtactggtccttctcttgggtcttggccatgtctgggtctgggtcacggttcgattctcaggtcctaggtccgagtatcgggtccagggtcctggtcccgatcttgggtcccagtctctgtcccagtccgggttctagtcccaaccaaggttccggtctcgatcctagtctaggtctgggtccaagtcctgatctcggtctgagtccgagtccctggttcgagttcgagttctggtacgagtctgggtttgggtccgtgtctgggtttgggtcttggtttgggtctgggtcttggtccgggtttttgtatgggtttgggttctagtataggtctcgggtcaccgatcctgagttaaaggttctaggtcgtaggtcctggcgcaagtccgggtctaggtacgggtctgggtcggggtatcgatcctgatctgggtctgggtctaggtccgtgttcggttcttcgtctagatctagttttgggtccaggtccaattcatgttccagggtcttgattccagttcttgtaccgattttgggtcgagggttcgagtctgggatggggtcctgatctggaaatcgttccaagttccggtcttggtacgattcaaagatctagagaccgactgcgggttatgtccaagcctcgggtcgtgggtc

SEQ ID NO: 65474 - DNA, 523 bp, Cannabis sativa
accatttatcttgtgatggaaaaaccgctcccggacacgtcttacacttagcgagtccaagtaaaaagttattctgtaatgagtgttaatcccttcacgattaaggccctttagtcatgtggagcctgatacattcgccacgtattttggtaaataaataggctcaatatttacccataagttctagctcataaattttgaggtgggacttgcattaattctttgaccatttagttcgctctcggagggtccgaggtatgacgtcagtggcaagcgaagaggcctcattcatacgaataagccacgtgctatatagggattggtctgtctatcatcgtgccttttcacctcgattttgatgatgtcgattcgcttccctgatatattaatccctagagggttataaatgcagggtgtcaagaagatgctcgagtactaaacgttccttcataaatgtacttgttatgaatcatccccaaacattggatttaaagtgtggttcttgagaaatgagaaacgccat

SEQ ID NO: 65475 - DNA, 765 bp, Cannabis sativa
tttttacgagtcatagtacttggaagacctaggtaaaagctgtcttcagaagcaatggacattcggagctgctggctaattacatttctatcagtgaccgaggtattagtgctaaagaagatagatgcctttgttaaattaacctcttgaccagatgccatttcaaactttctcaaaagttcttgtactcgacgagcctcggactcggtagcttggcaatataagtagctgtcatccgcaaatagcatgtgagaaactcgcggtgcaccattagccactttacaaccatgaatccaccccagtcgttcgtcctttctcaataaggcagagaggccttcagcacagagaataaacaaataaggagagagcgggtcaccttgtcagattcccttagttggaacaataggacccatctcatgccacccatgtaaaatcttgtaacgaaccgttgaaacacattgcataataaggcgcacccaacttttaacaaagcccagtttcctcaggacagcttccaagaatctccattcaatgcgatcatatgccttgctcatgtcaagttttaaggccatacaaccggtctttcattgccgctttcgttttaaatagtgcagaacctcaaaggagaccattatgttgtctgagataaggcggcccgaaataaaggcactttgaaagtctgcaacaatagaatccatgaaaggcttcattctatttttcataaccttcgtaacaatcttgtaaagcacattacacagagctata

SEQ ID NO: 65476 - DNA, 515 bp, Cannabis sativa
agccctaaaactagaaacaaagagtgaaaactaaccgaaaatatgacccgaaacttagactaattttagcctaacaattataattatagtaggtatcatatttatatttagaaaattttaaataatttatgtagctaaaaaatagaattttgaactttattttcatggataaattatttcacaataactacaatatataatatacagcaagagtatgaaaaaattggggaatacataaattgggctaaatttttctttaatgctgaaataaataaaagaagcctaaaatcacaaccccacccaccaagtgattgttgtccataaaagaaagtaagtggtgttgattggaaaatagacaaattaatagtgaaagtaagaaagaaaataaaagtaattataatggacaaaagaagacaaaaaaaaggtaattatgaatacaagtaagtagataagtactaattaataaacaacaatgactatggttattacttattattagtgcactttaagttgta

SEQ ID NO: 65477 - DNA, 928 bp, Cannabis sativa
ttataatttactttatccaaaataagtttgaaattttttcaaaaatttaaaaaaataatactataattataacaaataaatagtgctgtaagaaaaatattctgatttctaatgtaaaagtaaatcaaaatcaaaaggtgacaacacaaatgaaatcaaattctctctattttctttaaaaagaataaacgaatatcgaagcccaaatatacaaaataactgaggacttaaagagacaaaaagtcaaattaaaattccatttatacaaccattaactgtgaataacccaacgttggatgtggagataacggcgaaagaagcggcatattgtaaaccccgttcccatccgactcccaaacggccgaccaatcagacggcgtcaacggcatattcttcaaatagttaacggcctcatcaaactccgttaacttctctttctttaccaccaccacttcttctattacttcttcctcctgacgacgtcgtttcttatcgattacgtcactgttcttatagttcccggcttccaatggaaagttgagtatggctttggagccgcgaagcttgaatgcggctcggtcgtaagcttgagcggcttcaatggcggtgttgaaggtccccaaccaaacccgtgagcctttccgactcggatctcggatctccgacgcgaactttccccacggcctttgcctgacacctcggtagtgcttcttctctttctcgatcgatttcacttgtacggagtcttgagccttaggagctccgaattgaattatttctgttttcgcaggaagggaaatcgtcaaagatggctttcggttcgtttggcggactatctgaggtttagattcgaatttgaacgaaaagctgttcgattcagaggtggaaactccgagatcgatgatttcaggtttagattcgaattcaa

SEQ ID NO: 65478 - DNA, 859 bp, Cannabis sativa
  modified_base (808)..(824): a, c, t, g, unknown or other
aactggttttctaagtcagattttagtgagggttaaaaagtgagactttatcttttttttttaagttgaatattattttatataactttctattttatctattaatttaatatcaattcctaaattaacatggatatgggttagcttggggatttgatgctcatggtttaatttcatctatcagggttttttttttttttttttttgaacgtcaatctctattaaaataaagttaataatataatgaagggtctcataataaatactttattgttaacggaaattttcgttaactaaatatataagcattttacgtaataagatatacgaaaataataataataaatgaatactagatatttttacgtatttttgtagttaaaatctacatactaactccatgagtcattcttattagggatgataactttgatacaaagtataattctctaataaatgtaaagtatagttttgtctttcaattttgtcgtctctagcttctttcctggattctgctcctatttataggtgtataggatgacaattatttttattagaatctaattatttacaactgctcatgaaacgtggacattcctcacgtttcatttttgtacacatggaataatacttaataactacataaccgctctttctctttatccttaaacgattatgctaactaagaaggttgtttctcgattaatgtgagttgtcctttttcaccgtctttataggaaaaaatcactacaaaaaacggctacttctagtgacaaatttttttgtcacaacataatttttttgtgannnnnnnnnnnnnnnnntcacaacaaaatattacttgtgactaaaacgtggt

SEQ ID NO: 65479 - DNA, 724 bp, Cannabis sativa
  modified_base (31)..(37): a, c, t, g, unknown or other
aagataacagaacctaacagaaggggcatannnnnnnaactgttatattttaagaagaatttttaacaagccgtatattttagggggcaaaataagataatgtcgaaagttcaaggggtaaaaatactaattattctttcagtttttcactctctgtttttaatttctaataatcattcattttgactttgaattttcgacaatattagtttagcgatttattaaaaaaattccttaaattttacctccacagaaatttagtctttttgttacgtctcgtctcgtttcattatatttttattaaactttgacaactatcaaattatattcttcaaaataaaaataaaaaagattcaacattcttttaatattttagttagtaaatcttagaaaattaatttagatttttaaaaaaaaaaaaacattttgaataattaaaaaaataaaaaaaattaaaactaattaagaaatctaacaaaattatttatttattattaaaacatccattgagatataaaaatatattaaaaattcaatttttattaaaattaaattttgtgagaacaagtttgagtctatctttttcttctaaaaatctagatttgtttaagtaaagataagatttttttagtttaatttctaacttttttttcaaaataatattatatttttattgaatttaattatttctctttatttttataatataagtttataaatataa

SEQ ID NO: 65480 - DNA, 1187 bp, Cannabis sativa
  modified_base (293)..(295): a, c, t, g, unknown or other
tatttattagtttaatttaggtttgtcctatattttagaactagtattttttggatcggatcagatccatctaatattttaggttccgtatgtattggattggattggatccatccaattcaagaaaaaaatagtaaaattttaaggttaattttcatatatacataaatatttttacgtataataatacaaaatctaattactcatccaaactaaatgaaaatactaattagttcgattggatattgaatatattggatttttcgacaccccatccaacatccgatccgatnnnattggatatttaaaaataacatccgattcgatccgatcacaattggatatccaatgtggtggtcggttgtcattggagtggattgatttatgcacacaccctaaaaaaagtaaaattttggtaatcataattgtgtacgctataattatttaagatattttgtaaaattttaaataatttggaacaatttacaatgttaaaaaacagtgttcaaataatctatttcatacacgtacaaattaagtcatccgcacaatagactgtttgaatgttattttttgcgtgttaatttttttttttttttttgaatttcttaaacttttgcacgatgttttaaataactacaatgtacacgactttgaaaaaaagtttgacaaaaaaaaaattcctggatgctaaaacaaataggggttcatcggtgtatcctttttaggcggtgcactgtagagttttctaataatatttattacaatattgaaagtagtattcaaacaatctattccacacatataaaataaaatagtcacgtgtgcaacaaactgtttgaatcttatttttggcgtgttaaatttatttaaatttctcaaaatacattttacaggatgtcttaaataactacaacgtacacaactatataaaaaaaacttattatggttcacactgtcaataggttctcactatggtaaggaaaaatcccaacattatcgctaacctaatcaatcacgaccaaggtagcatgtgtcaccaaatgccaacaccaagctgatgtgccaacgcctctagtcatgccacattcgatactgtccaaatagtctccctcgtggcccaaggactctcatacatcctttgtccaatcctcaagacagagtgactccacgcatgtcggcaggcc

SEQ ID NO: 65481 - DNA, 907 bp, Cannabis sativa
ttgggacaaagaaccttggatagattgaagtcatccactgactggttctctgtgatcagcttggccctcctgcagtgtgcagttgtgaccaagtccccgacgttcaacccatccttgtcatacgtagagaagaccttaacgtgctgaaggaaaggttgtgtgggggcagtgcggtgcatcgggagtatcctgacccactctataagcaactccggatgctcaatggcttaaaacccggacgagaagaagaactggtggcggtattccttaacgttcttttggaaattgaaaggaaccagaccctcgttagcaagatggacccggagtgtgaaaaaaccatccttaagtttgtctcccttcttggggacagatacaagttcgtaaaaatacaaaatcttagccgggctaggcgaagcccagcctcttgcagcataaaaaataaataagcttgaaagtaggcgatatacttgaggcatgagttggtaaggtgcaaggccaatgaaaactaaaaaattaatgaagtaatcttgtagcagcagcaatgccccaaacatgagatgagtctggctccaagctccaaagccgttgtaattatggttggagtctcctcgtctctaggaagacggtgaaagactccggaagcggagggctgatcccagccacagtgacaatcttctccagcaggtgggcgcaggttagggtcaagtgcaactcgtctgcctcccagccgttggatcggcaagtatacttctcctgggcaacaggccctttcatcacctcttccaaggtggccatgatagtagatcctttgcttgaggatttcgctccaatcgtggggacaaacatttctcgagaataatgagattctgaaaaaggaaaatctagcagttagcccccaaaccaaacc

SEQ ID NO: 65482 - DNA, 588 bp, Cannabis sativa
ttaagaaatctaggtcttggtaaaatataatccaacacctttaccagcggaatcactcacttgcaaaagtttgtcagcacatttagttgattttttcctgacctaagttcatggctactccgatatcaaagggttggagcttgtagctagttttctatttcactcccgagctttgggttgttttattttacattggctttagtttagttgcttgttacagtttggaattatttctagttatagagattttgaggtttgtatcgttgtttagttttttttacctactatctttgatagtatcgtatctgttaacgaatatgacaataaatgacatgtgcactctttgaaaagaattatgaggttccatctcaaaactaattgaaggtgagtggagtagctcatgttcttataaattgataattattcttatatttaattcatgtgagacaatgttatccaatatcccccctcaagatagtatatcacgacttgagccctaggttgtggtatatatgtaatattcataacttgggcaatcaaatgtcatactttgacccttttggaaatacttacaaatgatcatttaat

SEQ ID NO: 65483 - DNA, 652 bp, Cannabis sativa
gaccgataagggggtatactgctacctggtcctgcctttcaaactaaaaaatgctggtgcaacatatagacggatggttaactggatgtttaaaggccttctgggacgaaacatggaggtgtacgtggacgacatgttggtgaagtcaaaggcatgtgcaatccatgcagatgacctcgaggaatgctttgaagtggttcgaatatacaaaatgaaacttaacccaaagaagtgcacttttggggtcaaattaggaaactttctgggatttattgtcagccaacgaggggtagaggcaaacgcggaaaaaatccaagctctcctgaatatggcttctcccaagaagcacaaagacgtatagagcttaaccggaaaggttgccgccctgagccggtttatctcctaatccacagacaagtgcattcccttcttcaacatcctgaaaaaatgccaaaaattcgaatggaccgacgaatgcgaggaggcattcaaaaaactaaaagaacacatggctaaacctccaatcctatcaaaacctattctcgaagaagacttgttactgtacttggccgtctccgagaatgcggttagcgcggccttagtctgggaagaggaaaagactcaactattggaaattattttacgaggatct

SEQ ID NO: 65484 - DNA, 1919 bp, Cannabis sativa
gaaccagactcaggacacagaactggggccaggacctagaactgcaccccaatcaaggcccctaaacaaaactcagacctgggacccaggacctgaaccagaaccagactgggacacatgatagggatccagatcggagactcagaccaggacccaaactcggaccgtgacctaaacctagaacccgaaacttgaagctaaacaagaaccgacagaccaggaccctcgaacaagactaggactgtgaccaggacccaaacccagacctataactgagctcgaacctagcccaagacccaaatcgagactggaactcgggccaagacacggtcgtgtacccagactgggaccaagatccagacccaaacacggacctggacctagagcagggacccgatcccggacctagactcggacctacatagggattcggatacaacttggacttgaaccctgatctggacccagatcgggatcgaaactcaggacctagatcctgacagagaccctgacccatgcccaaacatggacccgcacctgggacccaaactcggacctggacccgaacccagacccagaccgagatttggacctagacccaaacccgaaccgagactcaaaccaggactcagacccaaacccgaacccagacaccgaatcaaaattgaaacttggactaggaaccaaacctgaacatgtacctagactgggatctaggactcggaccttcatggggaacctagacctttgcctcgaaacccagacctagatcggaactcaggactcgaacccaaactttaccataaccaagccctgaaacttgagctcggacctagtccgatcccggatccacactaggactgagactcgaacacgaaccccaacctgaacacgggactcgatcccagacctagaataagcccataaccgagactgggattcggacctagacatggacacgaacccaaacccgaaactgaatactaacccagaccaaaacagggatcgaaacatgggacctaaactcggacgcagacccagacaaagacctatcgctgatcatgggacctttactcagacctagacccagttcgagatccgaaaaacccgtacccggactcaaactaagactaagaccccaaccccaacctggactctgaccctgactcggaatcgatgccggaccaagaatcagaattggaactgtgattaggacccaaacttgagatcaaaaccgaacccagactcagacaagaacttggaccgagaccttcactatgattgggacctgagacctgggactcgaacctagatcgggacatggacctggcctggtcctaaacgcttatgggagtcaaactagcatccagaccctaacaaggaaccgaacccgaactcggccgaagactgggaccaaaacctagacccaaacacggaccggcacctggactcaaacgaagattgaggacccaaacccgaagcttgaccaagactaggacctaggaaccggacttagataggggacctagaccatggacctaggcccgagagcccaaacaaaaatcagaattcgagactcgaaccggaaccaggacctgcccttgacttcagagttcgacgttggacccagacccggaaataaaacctaccctaaacacaaactagcacaggaacctagacacgaacaaggaccaaacctgaacccgaaatcgaatccaaaataggactcgaactcgggacccgaactcaaacccacacctagaatcagaccaaaaactagacctggacccggacccaaactcgaaacaagaacaggatcagaacaaaggacttagaacaagaactgaatccagactcatatcgggtttggaacttggtagtcggacccaacctagaccaagacccaggacgcgaaccca

SEQ ID NO: 65485 - DNA, 897 bp, Cannabis sativa
ttccctaagtgcttgtggtaggaggaaataagcttttggacaaaagtgtaagaccttgttcaagcttggtgattcccttattatatacttgtggtgtatgtggtgttgagattgctctcacatcttctatatatatatactatttatatattgtgtttcatgttttacttattcctttgagttgtaattcttctcttcgtctttatattcttaattttatgtatatattttgtttagtgttatataacattatttaatttataattttttccttagtattatttatcataaagttataatcttcttagtttgatatttatattagagcacaccaatttccaacaagtaatgcatataatttatgtatatattgttaagaattaaatggttcatagctttgttagcctacacctcacctcagcagagcattctctctgtcaacatcgtttgctgaatattccccttctgttagaatctttgattgtatgattgcattactttttgtgcctaattctgctattagctttccaattgtattttgccacttgtctgtcttagagtggctcttccttgtaatacctagctatatattgaatgcatttcacttagactcgattcagctgagatttcacattttccatctataccattttcacacttggtatcagagccaagcttggccaacgccaatgtcgactgacgattctcagactcccatgacagcaaacaatgctgctcgaaatgtccctgccccagggtccagccaagctgctgtaagcacaaatacaatgcaagctcagtccagcttcaccacaaattacacacaacccttcaataccctaaaccagccatttccgcaacaactactctatgtggaaaactatggtatcgaccata

SEQ ID NO: 65486 - DNA, 702 bp, Cannabis sativa
cttatttagaaaaaaaaaatatatggtatttttcaaaatcaataaaaacaatgtataattttaaaaagggagaaatttttttgagctatttacaaaaatatgagaaaaaagagataaattttcatatatatggcgtaaaaatttaattatacaaaatatgacatttttaaaaaaaacataaaaaaaaaactgatgaagaaggcattattcagcattccagtcatcatcatccattgcatgtacttgataatatcgacacaattcaatattgctttggatgtcaataaaaaatatgctcaatggatgatgtttatggttgtaccgaatgcaattatttccttcataaatcatgtgcagagtctcccaaagaaattcaatatcctttccattgggaccatgctcctctttctcttcactttcaatacttttggtttggtcaatgtgcactatgtaaggaaactttgaaaaattgtttcacttacaaatgtggtgagtgtacttttcgactgtgtttgaaatgcagtgcaatcaaaatgagaggaagtattaagtttgaaaatcacgagcactctctttgttacatggataacatgatacccatggataatcattgtagcatccaaggttgctatggtaagggactatctacttctcattgcaaagaactttcttacacttcttcttgtgcaacattttgcttgg

SEQ ID NO: 65487 - DNA, 732 bp, Cannabis sativa
aattgttttgaagtgtaaaaatgaaaaaacccttaaatttaattatgtgaaatgaggtaacgtttagttggagaaaatgagatacaatggaatggaaaggaaacaacttttattctatttctttgtttagttttattttaaagtattagaatgtatttttattctagctatgtttttcttcattctcgacaaactcatgcgtttgatagaattaacattaccactattttaattaaaaaaatgagacctactttgaaacacaccccttgtcatttaaattttatattctaattccatcaaatttaaacctcataccaaacattgtttagtaatataaaacaactaatatgtcactattaatatcatgttatttgattttatttacactaataatgatgtacgtgatagattattaattactaaaactaagattattttgtcaaacactattcattaattctatttgatctatataacaaaaaaagcaaattaaaggtggaagatagagagaaaaagatgtgttctttcacaattcacttttatcaagtcaataatagtcatataagttttgggtagccaaaaagcaatatgaataccaaaatttaggggcatgtcaaatcaatttcattaacgcatgaagatgatgcctttgtgcctatttctctttcctttggaattttgtatgaagagaaaaacataaacatgtgagaaacacttttcatttttatagtt

SEQ ID NO: 65488 - DNA, 874 bp, Cannabis sativa
taactaattattagaaaaatagtagcatgtctattattataattatatagttatgagcattgctacggtgtctagcacccttaagacatgtcgccttatgattggctaccgatactctctaaaaactattatattaaattatataggacccgatactaaattagaccaatagcgatattaacacatataagggtgcttgacagtgccttttagcatttctctatatttatatatattgatagtgaagaaattataaagtaggtgactagtaataattaagtccatagtattatattttattatataatattaggtatgtagttgttggtggttcttctcttgaagaggtttttggtcatactatattgatctccgaaagctaattaattaattaagaagaaataggatttcttaaatatgatcttatgtgattttttccttcaaattattattattatttgtaaaaacttctcctcaaactacaaaaataatcgtaaattttttccttctattgtatttcgttcatttttttaaataattttctcatgcaagactaatctaatagctaatttactatgattcgagagttcaagtaaagaataattgcatagataaacatctaacgataaaagttggaactatatatgtatgtacgtacctataaaatattttatttgtatatgtatatttgataaaaaaaaatagataaaaataatatttttgttattttttaaattgattttgtatttgtatttgcatttattattttcgaaaatattttctcattttttaatgtgaaaagtctttcaaattagattataactttgttggtgaataaatagggcattttacaaaaatactggatttggggtaa

SEQ ID NO: 65489 - DNA, 2146 bp, Cannabis sativa
ctcccattcctgctgaaccagttgtcaactctcaccctatgacaacccgagccaagtctgggattaagaagcctaaggtactcatggcctctcttcttcccaaatctgtcaagaaagctttaagtgatcctaagtggcttgctgccatgtctgatgaaaaccttgccctaaaaaagaacaagacatacacattggtaccccttccaccaggccgtgaaccaataggctgcaaatgggtttttcggatcaaagaaaattcagatggttcggttaacaggttaaaagctagactcgttgcaaaagggtatcaccaacaagcgggatttgattttcatgaaacatttagtccggttgtaaagcctatcactataagagttgttctaaccattgccttagccaaaggttggacggttaggcaattagatgttaacaatgcatttctcaatggagacttgcatgaagacatctacatggagcaacctcctggctttattgaccccgatcatcctacaaaagtgtgcaagttgcacaaagccatttatggcctcaaacaagctcctcgtgcttggtttgagaagttgtccacagtccttttgcaacttggttttactccggctaaaacagatcattctctatttactttacaaacatccaccaacaccatctacatactcatctatgtcgatgatatcttgattacaggcagcaacaacaaccttatttcctcccttatctcagacctgagctccaagtttgctttaaaagatctcggagtaatggatttcttccttggaatccaagttgttcctactgccaatggagttgttctttctcagcaaaaatatattcaagatattatctgcaaggctgaaatgcaaggagttaaaactcaaaagtctcccatgaatagtggacttcgtttatcaagctatggcagtgaaccggtagctgatgctacttcttatcgatcgcttgttggtgctttacaatatgctacaataaccaggcctgacattgcatttagtgtcaataaagtgtgtcaatttatgcaatctcctttgcaatcacatcttgtggctgtcaaacgcattattcgatacttggctggcacacttgactatggtttacacctcaaacgccccacttcgctggacattgaagccttttgtgatgcggattgggcggctgatcccgatgacaggagatcgacaactggttattgcatattttttggtggaaatttgattggctggcagtccaaaaagcagcaaactatctctcgttcttcaactgaggctgagtatcgcagcctcgctgctgttgtcactgaagtcagctggcttcagtccttgctgtctgaattgcaccagcttccttccacaccacctgttatctggtgtgataacctcagtgctgtgcatctttcagctaaccctattctccatgctcggactaaacatattgaaattgacattcactatgtccgtgacaaagtgcagctcaaacagatttcagttcagcatgttcctgctgaacaacagcttgccgattctctcacaaaaccaatctccagttctcggttctcttttcttcgtgacaaacttggtgtggcttgtttcaccaccctaagtttgaagggggctgttaagagaccctagttagttagtgattagttgagttagttaagcagttgggacagctgtaatcttttctaactaactttctatttgctatgagtcggttgttagctgtatataaacacttccttgtaatctgtttggttaatgaattgattcaataaaagatctttcttcctctttctctgttttctctgttcaagttctttcttcttgtttcttgaactgtaacagctaccctctgacgcttagtcccaccaaatgagatctagtctcctatgtaagaacatggtagtgcacacacaccaccaaaaggaatatgtcctttttgtccaacattgcatctctaacatctttgtctactgtagtagtacttgcgcgtgacacttgtctagatcgtgtgggccccatatgcacggacacctttgcccccactagccaaaatcatgtagatgactttaaagtcatgtgtatttcatgtattcaccctaatagtgggcctagtttcg

SEQ ID NO: 65490 - DNA, 989 bp, Cannabis sativa
atgattatattttctcaatatttaagcattatttcagtcaatctcatgtctttacaaattttagcaacaattcattttgtgtacaaatatatatatatacaaattttccattagaaatatttatttacaccctacaggccttactttatgtgagtaaacttacttggactacgtcatattatattgtaaatagtaagaacgcattatatatatgaatttaagaataaaaatatatgaggatatgaacatatacacatataatatataaaaaacaaagaaaaaaaaagaaaaaactaaaaggctcttaaaattatttcaatcagatgggtatatataaatatatattatgtgtataatgatttgaaataatttaaaaactttaacaaacaaaaaatatttatcgtaggtaaagactaatggtgataacgtgttataaaataatattcaatatatatagaaagaaataggagaagagtgaagacaaagagaagaagagaatgaaagagtaagaatttctcagtagtttattctaggaaaattacctcatacacagggccaaccctaggctaatagcggactaggcccgtacctagggcttactcattttaagggcccaaataaaaatactatttattttataataagggcttaaattatttttacttatgacctatttcaacctagggccggtcctacccatatattattttaacttttttttttaatttacgggttggatcgttctagtgatttctatgtaggttgcaatgtagattttgattgcgatttaggttgctctattgattgctatgtgtatttatagtataattgatttgtatgattttgacatcatatataatatttcataacaaaatggtttatttatttaattaattaaacattacacataattttttttttaaaaaaattatctttgtgatgtattttaattcgatgactaaatgataagattattttacaataaatta

SEQ ID NO: 65491 - DNA, 701 bp, Cannabis sativa
agtgtttttcatcattttatgaatgttttaagttttgaaagtaaattaaattttatgagtaaaaattaatggatttgttgtttttatgactaggtgatgttggaggatgaaaatactcaccaaaataatgttttcctagagttttgaaaatccatgaagatccaaaatttgagattcggcactacagtgaaggttagaggttcgttgcagcgagcttagaagaaattcactggcaaggggttatggctacgacgaggagattgtggctgcggcaaaaggtgaagctcgccgtgacgaagacatgattcttgcttttcaaaattttatctttttctttaaattgtagatctttgaggggatatatatataggacctttagggttcgatttttagcacctttgaactgcgtttttgagagagaaactcaaatagagagaaaaagaaagagattgcggaaccaattatttttcatcattgttttttattcttcttaatgtcatacttttattatgatttctattataatgtctagttcagaatagttttttttagttaagggttaattcaaaacccaagacatgaatttttaatttcgatgataaatgttatttttttagttttcattatatcgaatttcttctattcttctatttttaatgccatgattattattttaattttttttagatgatcactaattt

SEQ ID NO: 65492 - DNA, 792 bp, Cannabis sativa
ctctttcttccctcctatcaaaagttgtccttacatcttcaagtaactcacatttagcgtatgcatcaacaattgcattggaaacacttgtcttgaacactgatctagacttcaaaaccattccatgaacttaccttatgaaacctgtacattttacaacagataatgcattgaacacactacaatacgtgtaaaggtctggacaaatacctttctcatacatggttacaaatagttccaaagcttaattggctgtacccacattgtgaatagcctgatatcattgcattccatgggggtatgaattccacagctagtgaaatttgagtcaaaaatggatctcgcataagacaaagacttacattttgagtacatgtctattaaagcagttcccacattaatgttagaatccagatgaagttcaaaagcataagcctgaactattttacccttgtcagtatcacctattttaccaacaacatttgagacactaattatggtgtacatattaggtgaaattccctcattcttcattttgagaaaaaattcaaacgcttctaagtgatggttttttgatgtgaatcctgatatcatagcattccaggagacttgattatgtcctttcatgttcctaaacaccttacatgaatcttctatggagcccaacttcgcatacatgttaagaagagatatattgacaaaagtaagagatcaaaagccacttccaacaatttgagcatgtaccattttacccaattgaatacagtccaaaccaatacatgtctgaagaat

SEQ ID NO: 65493 - DNA, 1113 bp, Cannabis sativa
cctttgctattgagttatgtcaatctgtcaaacacatgatataatgtcataatcagtacttttttttgtaagaaaaaaatatataataataattactaactgaattcgtattaggtaataggtactatatcttgtatgaataatacttacctttcgttttctttttctttttctttttcttttaggaaagaatactcatatttcatgcagtaccataagatgtcaaaattaataaacaagtgtacctaagcttaattttgatcaacaaatttttattatcaacaaatttatatatagttataactaactaaatcattcaaataataatattcatcctttaaaaaatacttaaaataaagaaataagaaaacctcaaaactaaactaaataattcaaagctcaaataaatatcaaaatattgtaaataaccaaaaaaaaaaaaaaaaaaaaaaaacttgtaacttattaaaaaaagtagtttttttcatgaagaaattatttaattaattttcaaaaattgaggatcagtttaacacaactgtggtgagataaattttctcatatctaattaccaaaaattacatattttacgatttaaatatagttttcttaatagttattttatcgaatatgtatatttataaaaagaaaaataatataaagtaactagttaccaaaaggtaattaattacctggttactctaaatattttttttttcatattttttaattgtttttcacaaaataatttattctaaaaaaataataatatttttgtaaatttcgaaaaaaaaaatgataaaaatgaaatgaactcaattaagaagaggatcgaaataatgatagcgtgacaagtggtggtcgaagttgaagtacattattgagtcatcgacccagaaaagaaaaagcacaacgactgcaatgaattttgtgtacatttgtgagagttttttaacctctaaattctcttcgataaagaatgaatcatttgccaagatatttaggctatgatagttgctatctttaatgtttatgttatttggtattggatataaattagtaaaattacaatattatttttcaacagaaatatctataactttttaaaacata

SEQ ID NO: 65494 - DNA, 1726 bp, Cannabis sativa
atatatagatagatagatagattctcattaaaaaaaatcaaaagacataccattaaatattatttgagcctcttcattatcactctatatgaaacaaagatgaggtggcttaatctccttgtaatcttctactattttttttttttgaaaaatggatgatttcattaagaactggcgtctgccataacaatgtcacacaaagtagaaggagcattaagctcagtaaacatacaacctgacaaaaaacaagaccccatagcaatactatgggcagccctatttgcagatcaattaacaaaacaaacagcaacattattcaaagagaataaaatggaacggcagtcctccaccaataaaccaaactaagatggcatatgaactgaactattgattgcttgaaccacaactaaagcatcagactcaacaaccaccttctcccaagctttcatctttatccaactcaaagcttccttgatcccaattgcttctgctatttcaggaaggacactaccccaacgactttcagaaaaggcttccaaaagcttaccttggctgtcacgagcaatgaaaccatacccaaatttttgttgagattcgaagatagccccatcgacatttaccttaaccgtatttgcatctggtttgcgccatctattgctagttaaagagtcacccgtagcatacatagcagtaggggactgaaatttagcaattttccaatgattaaggacccgttttgccgactgtactacctccaacacagacctggatttcccttgccacagcacttcatttcgtgtcttccaaatgctccaacagagcatagcagcctccacaactacgtctcccaaattgttctccaacagatcaaaaaaccaagcagcaaaatcattgtacacaccagtcggttttgttgctgcagcaaaaaaccagcaggagttcgaaaagttgctgcccagtaacacatgaaaaattgtctcaacatccatattacacaaaggacaaataagatcaacattcacatgctttgtttagagttgtaccttagttggaagacaaccggagcaagctttacataagaaatgttgaaccttggaaggcactgaaagttgccacaactttttccaaccattgtcatcttgagtaaaaagccaatttccacttgacgattgaagaaacttataagcactcttgactgaataaaaacccgaagactccatattccaataccaactatccacatctcgagaatcacttagctgaatatttctgattaagctaatatccctttcctcaaacatatcatttagaatctccaagtcccaagacctctcaccaatactaagcagattaacaacctgcttatcaaccaaacccggatgagtagtgattacataggggttattatcattgggcagccacgggtcatttagaatgctaaccgagactccactagcaattgatcttcttgcaccctttttcactaagtcttgagcagcccatatactccgccaaataaaactaggattacttcctaactcagcatcaagaaaagacccattaggaaagtacctagctttgtagatttgtcccacaagagtgtctcccatggtgagcaacgccacccttgttttcccaaaaatgacaagttataatccctaagatctcgaaatcctagaccaccaaaattcttatgttgacagagacgcttccaactcacccaact

SEQ ID NO: 65495 - DNA, 1807 bp, Cannabis sativa
ttccatctccgcaccagtagcatcagactgtgatcctttgaaatacttcccttcccaaatactactatcgtagtcaataacgatgaacgcaccacctgacttaccatttttaaaggctccatctgctattagaacttttggggtaaaaggtaccttcccctcaacagtcgagttcttcaaagagcctacattgtgttcagatctattcttgtaaaggctttcaaccatctcagaatgcctacttttgacctcagctaggatcacttccgggtttatggaaacatcaacccctctgttcagcttgtttctccaaagccaaataatctccataacagaagccaaccaaattaaaggcccatccatctttgctgctttcagaatggtgatgataccagaggcaaattcggtaagatcagaccctacaacttgctcagagtggatggggacagggcccccaaaccagattgctctggctagtgtgcatctgctaaacagatgcaaaggagtctccatactatcattgcaaaagaagcatccagttccattatcacccccgtatttgtttcgagtaggcaatgcatccgatatagccctccacagaatcatactctgtctcgtgtgaataccagaatgccatatatctttccagagcaaatcttttccaccaaatcgcgctccttggcttgatacataagcactttttaccgaaaagctaccagagtttgaccccttccaaataaccatgtccgaactgccttgatgattaatctggatcaaactgatcttgattcctaactcctccccaaagagaaatttaagaaaccccacattccaagttcgagttcgacgatagagtaaatcagcaactgaacgtagagcaggagctttaaatcgtatcccttccataatgtccctgaattcagtatagtttaaccatgggatccatggttgaaaccatatatcgatgtcttccccattatggataattgtgtttgctctttcaacaatgatacgtctcgcctcaagaatgcccccccaccccggactgtccgaagctttaggagaaacttgccagaaggattcaagagcaaaatatttagctttaagggatctaatccacggtctttcattgccacaagccagcatccacgccagtttagacaaaagagccaaattgaaatcttcaaatcttctaaaacccaacccaccacagcatttaggttgacagagagaatcccaagatttagtagcaagaaatcgagagtctttgagatgacctttccaccaaaatcttctcacaatggcatccatctctttagaagaggaaatcaggagtttattcgtcgtcatagtataagcaggaagagccatagcaacagaattaatggagaccattcttcctgctatagaaagagttttcatcctccacccatcaagccaagaaaggagttttgatttaagaaagtcaaaatccttccgacggcttctagtaaagagaaagggattacccatatgtttctcgttgcccctcattgtttcaatacccaatttcagagaaatctcatttcgaatagaatcaggacagtttctagaaaagaggatacctgattttggtttactacatctttggccagaccaatctatcttcaaaaacctttctttaaacatttgccaaggttctcagcctctctactatttgctctgcagaagagaatcgtatcgtctgcgaacatgaggtgggaaattgccggagctcctctcgctagttgaataccatgaatcctccccagttcttgatctttagaaa

SEQ ID NO: 65496 - DNA, 1083 bp, Cannabis sativa
cagtaataataatttgttgccaactagaccttgtggaactaaatttttaaacttaaccctgtttcactcaaaacaaatttttgagcattgtctgcccttaaaatttgctctgtggcagttgtttccgtttttttctttttaactgttcctcttcaattttctgcccaggttttataatataacctcctcccatgagtctcaaccactcccgctcatctcttttttaaattataacctccttttcttcaaggtttcttcttctgcatcagttacaggcttctttccactgcaaatatggattcttttcatcctgatatttcacgagccctctctaatcgggaaagagaagttgtcaatttgtccaaccttcctaggccacccactcgacctgtctctcatcgaattatctgtcgtattttctctcatagaggctttaacccaaaacaatttaccaacttccttactactcaatggaaagggagatttgaagtcactgtctccacctatgaagagagttcttttatgatcacctttggctgtgaaggtgatttaatgagagttttgtccaaggaaccttggcacttccacaatcaacatatgattctatgcactccaactgttctgtcaaatgctcctttgagttcttttactataactcccttttgggttcaagtgttccgattgccctttttgagtaagtccgaatctctggctaaggttattgggaacctacttggtacttacatcgatgttcatgaggactcgctcaatgaaggatggggtccgttcctccgtatccgagttggtattgatgtttctcagcccattctccgtggccaaacagtcactttcccttggatgtctgatgaactttggcttgattatcgttacgaacgactccccgatttctgctatgaatgtggtattataggccacgtttttgataagtgcccttctttcctagaaaaattggatgaaggcaaggaacctgatcttccttatggtccatggcttgaaggatctcctcttccaaagtccaactatgatcgttatagacaggatttttctaaagcagggccctgg

SEQ ID NO: 65497 - DNA, 1865 bp, Cannabis sativa
gtcgcctagcgtgttgggcaatcagagttgaagttttcgagttgacgtggttgaattattggctttgagattgggtcttttttgggctaatcaaatgggttttaccatttgtagagctaaagtggactctactattgtgtgtgattgggttaataatctaatccaagttgtaattttgtctttcaaccaattattgaggatgtaatttctttattaaactgtaatttggtaattattgttattatgttatttggcgttatgtaaatggtgtagttttatcctcaattcttgtgtactctccaaatgattcttaattaatgcacatttcttttcaaaaataaaaaaataaatttttctacaaaattttatttagtgggttttttgttaaaattcttttttatatatattctttatttgttaaataaactttgttattaattgaaaatggaaaaagaagaagctttctttttcactgacatggagaatcttaaaaaaatcatatattaattagataaaaatgaagaagttccatcacactatcttcatcaacacatggctgtacctatcagagaaaagaatccctatgttgatagatatactcatataatttacaaatatatatacatatgtacattacaaagcactaaaaaaataaaaaggaggggaccctaagacctaaaaataaagatgttagcatgtgaattacagggtgtccaattgtacaattgtaatgtagttagctaagaaagaaggagttgagtattagaagtagtacaactcatagggcccaaaaccaactatatgatatgttatatgaaaatgaataagaagaagaagaagaagaagaaagaaagaaagaaaaaaggcacctatttttatattttgagttatttggggtccctaacttttcatatctgccttagtttggtatccccttttttgcaattcccctgaaaaaagggcacaaaaacaaaccactacacttggtgggctatgtttcaaagtgaccactgttctgtcccaataaccatattaattcaactattgaatgattactcatatcacaaagtaagtaccctaatctattctagttagggcttgttaattactcatatcacaaagtaccctattctattctattctattctaattagagcttgttaattactcatatcacaaattaccctattctattctaattagtacttgataattactcatatgtctaaacactactattattattgttgatgcgagtttttgtcaacaattaatgattaagaaatagattgaaaaaccctttaattatttagctctgacgagctctactgtgaagagagagatggcaagcagagttcgagagtaagaaggaacaaaaccctttaattatttttgtattttaaaataatatgaaccacttaaattttgttacgtgtatattaggaggtacactgtgatatgtctactgtgacatttaataacatcttttagacggaaggataaagaccaaaacaaaagaacaatttaggtattttaccattaaaaataaatttatatggttaagtgtcacaaatcgtataattcatgtagttttgctgccaatatttttattcaaattcatttttaagtttgtaatgtgataatattttaactttttattgagaatggatgttgagtttggttgagtgttgtttgcatggcgaataaataaaaggaaaataacgaagcgagcccaaaaatttataagggctgatacatatataaaatgggtaagttgaaaaatacccttttattaatcaattaatcaaatttgcctctaattttatatttatttgaaacatacctttttttatatgtgttgtacc

SEQ ID NO: 65498 - DNA, 2432 bp, Cannabis sativa
ctctgtgactcatgggtgcttcgtagtacaggtaaattttataaaagcacacacgtgacatccctgggagtcaggacgttatagtactagtaaacttatcaacatcatattttgttgtagccatgattaagaaccaagctctgatattaatttattgtgaaattcaatcaatgacttatgatgtaattatactggaccaacaaacatgaaatcgagaacaatactattaaagaatcacaagaatcaattaacgaattaaagtagtaaaacagagaaaaataataccaggtttaatgagttcaagccttgttcaatgctctacatctcaatcagaacaatgccagtcatatttttattgatatttgtattttcaaggttacaagaatcctttcaaactaatatagagattataagataaactttctctttctagtttaaacctctctctctctctaaccttacgcaattacgattttctctcaagctttttaatggtctgatacacaatagattacaaaggtgataactatatatagattttcatagttgctaaaattagccttgattctattgtggctaattaatgctatcttaaattctctaagtcagcgctagcaaacatattccacgtcagctttagaaatgcactttctgcatggacaatacacatatttcaaatgggcattcaagagtgacaacaagctatctggaagtacgtctttggatgtatgacaagctatctagaagaaccatcgacaactttacgaacaaagctttccagataaacaccaagctttccgtaacttttttcggagtaacaattagctttccaaaaaatgaaacttgtaaccataatcaacagtgataacttattccatgagtgttaagctacaagcaattgtagccaaccctagcagagacttgaaacaaagtttcttggataatattgcttcaatacgtcgagtctaagaagatttaatttgatttctcaatcaaattcggtgacttctgacttaatctctttatgtttattttgtgcatcattacttttgccttctcttctcaattcctttatttatgcttttaatcttttatgtgtattgtatgtggtaacgaatttagtaaaactaattattctttttctcaatttttaatgtatcagtttgtgaatactaaatgtccaatccacaatggtacagggataattagataatacaaaactctttcaatggctatttgatttagtaccacaaaaccaacagtaatgtggagaagaatcgatttttggctcttaaatcctggaattctattttatagccaaagacgttggagggcttgggtttacgaaagtttgaagaaatgaataaagcccttttgtcaaaattagcttggagattgcaaaaaaatgagtaatgcctccatcataatttctggtcaatttctcaaaaaggtagtgattcacctctttggaagtgtattttggagccaaggaaaaccattagaaaaggctcatttactttggttgctaagggtgattccatagatttctggaatcaacctttgattccttggctaagttttggggaattcaaggagattatggagagtttgtttactgtgaaaatagtggcggatatttcaatcaataatgaatggaaaaatgagatggttttgcagattttgaggaggaacttggtaatagaattattaatatgcctagaattcctagctctcataatgatcaactcattttgaagggttggaaaaatgaccaattttcagttaaagatgcatacatggtgctgatcaagagcataaattcgatcccaaaagagatatatggaaatggatttggcatactaaacttcatccaagggtatcaattatgctttagagagctttgaacgaggctcttcctacttgttcaagactcctttttctggtagacaaggacatgcagttctttttgtgaagcatgtagagactagagagtacttgtcttcatatcttctgggattgtcattttgttgaagctctcaactaagcaatctcgctctcaatagacaagtttttttgaactatgttggctgcttatttcaagagacatggcagtagagaaattctttaagttttaaacaccagctaatgccattacctctactgcaatgcaagaattgtcagctagctcctttgaattttcctctataggaaaaaacccatattaatcatatcccttagaatgggaatgtgagggaaagagccaattttattatcaacatagccaataattcttggagttatatcactcagcagacaaaggcaaagttacctatggaactcttggagtaaaatcaatttattatctgattgttttggtgtggtgagtgccttggctcagcaaagatgtaattttagattgtaattttttcttt

SEQ ID NO: 65499 - DNA, 1127 bp, Cannabis sativa
  modified_base (368)..(373): a, c, t, g, unknown or other
ttttttttgtacaaagaaattgtgagtaattctacaaattttattgattgatttttaagaataggtcagttgttttatatcaaattaattcacgataacaaaaataaagataacagttgttttcaatcattatttttgttgagaactgttatcttttcgaggtttgaccatagttaaaaatccagaaaaaaaatatttattcctactttaaataaaaattataattattttgtaaagataaatcaatttttttagatttaattattataaaaataggctaattaggatttttgtcccataaattttgacatgtactaaattatgtctcctgaacttttaaggtcgttaaaaatgccccctaaactatnnnnnntgttgaatttaaggactttttttccaattttagtaaaaaagtctaacatggataaaagttcagatgacataatttagtacatgtcaaagttcgagggacatgatttagtaaatatcaaagtttgggagcatgatttagtacataaacaatctttaaaaaaaaataaaattgaatgaaatttgacaaaagtccttaaatctaacaatttcaatagttcagggggcatttttaacgaccttaaaagttcagggggtataatttgatatatgttaaagttcagggggcaaaaatcttaattagcctataaaatattgtggagtaaaatttttactattagtatttttaaataaaataaaaatataaaatgtaaatataaaatatattttttaaaaaaaataaaaaatttcaatattatttattttaaatattttcattttttgtaatatataataaagaagtaaatatatttttagtacaataatttttttttgcaatgagtacaataaatttattatagtcttttaattaaaataatttttttaaaaaaaaaaattaagtataacttttagtttttaattgtaatttaattataaattttttaataaattattttttcacataaatacttttttattataatttcttcaaaaaataacttttaatttttctaaaactatacctgggcacataatcacatagttatacacaggggcggagccaggatgagataattggggggccaaactatatatta

SEQ ID NO: 65500 - DNA, 714 bp, Cannabis sativa
caatattaggttgttaaatcaacatacttgtgggtagatctaagatcctggataaatatatttccaacagcttgatccacagaagagcttccattcctttcactcaccatatcaagagcaactgcataaccacttcttacagtgtagcaaccattcgaagtataatgccaacaccaacgatcctcacatagcccactccgcaacgggatgccaaggatgacatcaatatccaacctcaaaaaatactgggacaaagtatggatatcccaagacccctccacaccaatcaattcattaaccatcacactgtcactaggagaaggcgagataggatgaaacgttctaggctggggaatccacggatcccgaaacgcgttaacactttggccttcccccactactttcctcatccccgattgcaacaactccaacccccacatcaaacttgaccacaaatgagacgaaccttggcgatctttagcttccaaaattgatgtattgggaaaatatttgtgtttcaagacacggccggccaaagaattcggcgattgaagtaagcgccaaacttgtttagcaaccatagcttgattaaaaagcatgagatccttgaagcctaaacccccccttcaatttaggttggcatacattctcccatttcacccaggcaattttccttttatcattctttgtaccccaccaaaattgtaatataat

SEQ ID NO: 65501 - DNA, 1266 bp, Cannabis sativa
atgcattttaaattttattccataattctattcctattcctattcccattcccactcatattcctatatttttattcctcccaaccaaacgccacatgtgctacttgtagattactaggccataatgttagtaattgtgcaagagataaaggaatagtttggatgaagaaaaacccagatcgggggaaggataaagttaatgaacataagcagaattgtgaaatagataacatgcctcgtaagcaagtaattgtagaggaagacaaagaagctaaggtaaaagatgatactgaaccaaagcaagttgagtctggaaggtgtggggattagattaccggccctcaaaaaataggaaataagaaatgtaaagggccaggtattaaaacaggggtcctgtcaaaatcctagaatacaggtccactaacttcatgttatcattgactttcgtcttggctattgcctccatcattagttggatataggctttaaggctctcccaagattgctgattgatgttggtcattgagctgacctccgtatcaaagttcttagcagctaaaaattgcttccaaaacatggactatagatctttccagttttagatagagtcgaacggcaaccttttccatcaatcttcgacatatttggaaaaatttaaagagaaacacaaacatttcccatcttcactaacttgcgccacttgcaccggcctattatacttggacaggtgggctctggggtccatcttgccttcatacagctccatttgtgacatttgggaatttctctggcagttgtgccttaatgattatttttacacatggctctgaatcttcatctttcaagtcgaatatggctccactttgtttccggaccaaactgtccgtgagttatgttaaagcaattatttgatcctctagtcatctggtgtaatcatctaggagctcaagttcacagattctatcgttgatgatttttcttaaatcgcctccacgaggccttgctttctcaccctttgtttttcccgtttcgcattcagacagttcctgaggtctgcagttggcatgctttcttccgggtctagatcatccacatgaatgttctcataattaacagaatcacatgggcagttttttaatcccctattgtttcctgagtacccgacccatcattctgcacaactctagcccgtagattgattggtctgcttcattttgttggggtcgggcagttacctttttgttgttccgtggaacattgtatgtg

SEQ ID NO: 65502 - DNA, 727 bp, Cannabis sativa
  modified_base (280)..(282): a, c, t, g, unknown or other
aaattaaagaaaaaaaatatagtaatttaaaaatataatacatacaatacaattttatgacaaaactgaataaatcaaatgtatattctattcttatattttttttctacatacaattaaaaataaaattatgcatataattttttttctttctttgaatttgttatttgctattttatttattttaataaattataaaaaacataaaataactataattttttttttattttagtactagttatgtgaaaaaaaaatattttttttataaatattaaannntttaatattaaaaaataaccaatccaaaataatcgatccaatccgcacttttgcaaattagattagatttaagctattgtgcgaattgaattggatccaaaagaatgaaatccacacttagtgcaaattgaatatactatgagcaaaatagtgcagattagattgaatgaacacccctaaacataaatgtcataattgactttaaatttcagtcgcagaaaatttacatgagctactctacagcttccacaattaatataaacgaagatctttgcctatcccaacttactattattgcctatcctaacttccaaccaactccaaatgttaaaacaaaaaaaaaaagcaaaaaaactatgtagacgcaaattagagatacagcgattgtggaaatgtcaaaccaatgcagtaaaatactatatcccaaaatgaagatggcaattcc

SEQ ID NO: 65503 - DNA, 1504 bp, Cannabis sativa
ggcccgtctaaatggggaacgggacggggacggggacggagattacttttttatcctcaaatattaaacggggcaggaacggggactccccgtcgcgatggagacccgtttagtattttatattatatttttagtaatattttataatttataatttatgtttgtattttattaatatattagtatcttttttatgaacaacttcacggtgagattctaacctacattgcctgactttcagcttacccttgtctaaaaagaaaaataactattattgtgcttctttgggcttgcttcaattcctcagaagctaacaataaaatctaggaatttccttgaggggactctaaaggtacattttttaggattcaacttcacactgtattttcgaattatcaagaaggcctcttccaaattattattgtgctccccaatagtcttggacttcaatagaatgtcatccacataaatttccgtatattttcctaggatatcttcgaacattatgttcaccaagcgctgataggcagtttcgacattcttaagcccaaaaggcattatgaggtagcagtaccttattagtttagaagctggtgtattcttgatatgcgacatgcattttgatctaattgtagccaaagtacgcatccaaaaagctcaaaagttcatacttgaatgtaccatctagactattcgaagaaacgggaagcaatccttcatacatgacttgtttaggtttgtaaatttgatgcacattctcaaggtcccatttgggttatggactagaacaaaattgataagccaaactggatataaaacttctctgaggaactctattgaggttaactttttgacttccaccttcacagcctctaacggtagcagatcaagcgatcctcttctacctaaatgggtagacatctttggtttatgttcaaggtgtggaaaattgcatggggactgatccccatcatatctttgtggctacatgcaagaatgtcttggttttgatttactttagacacaatttgttcttttattgttggaggcagggtctgtcccactttaatgacttttgtgggatttgttttgcttatgcagacttcttctacatcctctagcggttcaactattctttctaccctcagacgagggtctaactcatcttcttctcaaagtaccccctatgctagctgggtatgtgctccaagaatttattccttcgtctcttcattgaccacgaagactgatttgtgtgagacactatggcactttcatgtgctgttttggtaacctttcatcgttcccatactttcgttgtcacaggggaacttcatccatatgtgtcagatggattagcaaagccctaactaggtaattatgaataattgagaaattatattatttcataatttaatagatgagaatttatatgatttataacatgttacgaccccgttggtgagccaggggcattttagtaattttggcccgagaagggtaa

SEQ ID NO: 65504 - DNA, 565 bp, Cannabis sativa
cttagatttgaccatctgtagtagttcctcatgtacttgggaaattttgtagacaagtctggttataacggtgtcgacttttgaaaatacttcgctgatctaaataactttgtgggtaaccgtagatagtttctcgtctatctgttggaggatcttgttttgggccagcatattctccgtttgccagttgaggactgcttcagctggggttattttctttaaggtaccatcagcttctcggatgtttgggttaagaacttttggttggtgagtgatttccccaatttcgtccataaagctgcatggaagtggaaatctatcattgctaccttttagcatgaagagatgtggtttggacttctagcacgggagtaacggcttgtgctcatcattttcgcattcccatcctgttggctgaatatcctcgtgaattattggtttggaggaatatttgactaggtagtcaaattttcttgagggttcaccgagtgggccaatattcttttggccactttcccaatatatataattaagtgcagattggattggatcggttactttttga

SEQ ID NO: 65505 - DNA, 728 bp, Cannabis sativa
aatcagattgtaaagggttttatttagggcacaaaaccaaatagaaggcataccccacttctgggaagcgtaaaggacgaagagggcagacagatacttaatgcccttgggagtgaacagggcctggcagattccgaagaagtctgccgcattcttaaagtattgatgcaaaggcatcaatgccccttgcagggcatgaccatcttaccaagcacacatcccttttcaaggtttgtggctcgattattcaaggcgggaatgtagcagttcaattcgcccacgtagccatcctggtagagagggcttacccacctggcgcccacgacaccttgccttctatgaggaaccacatcagtaagctcctcgatgacgtagtccatgccctcaaccaggacgtctccatcagcatcgactggcaccccaacctcgttgtattcctcgtagtttgggggttcaacctctgcctcttcctctgccttagagggactaataggatgcacattttcgtgctcctctatatcctggacctgagcgtccacttcatgatccccctcctcctggacggcttgatcctattcaacgctgggcaaagtggcatgccgagccacttgagggtcagaagcgtcaaccaaacgcgttgttttattggtacgagccatcattccttggcaggataaaagatttgagggagaatgtccttcatcggaagaaggtgggctagaatagag

SEQ ID NO: 65506 - DNA, 742 bp, Cannabis sativa
ttttttatttttttttctatatcactaaaatattatattttataatatatatttattattttaaatatataatattaatattatgtatattctcacacaaaaataattattaaaacttaaattaattaataaaatgtgtttagagcaataaataatattctatacatatagagtaaattttaaagaaattttaaaataaaggaatttagaacatttgctatagcgtgttttcagtacgattatttaaattttttaaaatttttctattttaaagagattattgtgagtgctcttgcaatattggatgactttttaagcttttcactaatttacatagctaaaaaagttttttgttaatttttggtaactagttaacaaaaaagtttgaaggtaatttttagcactgatagaacaaatatagaaaacgtaaacaactttatcataacacctctatatcaagtctttattgagttttattttacaaaaaaatgaattcaaggtattatttagtactattttaaaaaatctaaaatttaatttgtcatttaataaaatagaagtacaaccaataaattttataaaatagagtatttaaaataatatttactcttttttttttttataaaactttggaattaagaatttaaaaattaaatatcaaggtaggtaaagtggatgacaacaaacttgtatggtgagttaaaaaaacaaacctgtatggttataatttttcttttattgg

SEQ ID NO: 65507 - DNA, 4178 bp, Cannabis sativa
aacttggcaacgagatctttaaaagttaattcgagggcattatctgatctgaaacatttgaagatgtagttgaattgggtctgaacataagcaagaaaattaggaataatttgcatagcatcaaacttttgcctcataagaaaaatccaagtgaacctagttatatcatcaactaaagttataaaatacttgtggttcgcgtgtgaaggaatatgataagggccccaagtatcaaaatgaattaaatcaaatttggatttagcaaaaccagtatgctttgaaaaatgaattttcttttgttttgccataggacaaacataacaaggagatttcttattaacattgtcaatgttacattgaatcttattacaaagtaaagctaatcgtttgtaggaaggatgtcccaaacgggaatgccaaacatcagtagtcattgcattgttgcaagtgtccgtgcgtgtttcatctaaaacatataagccattgcattctttacctttgccaatcactttcttggattgcctttcctgaatacagaaaccatcagtgtaaaatttaactttaatgcattcaattttggttagacaactgacagaaagaatattaaacttaaaattaggtacatagagcacattctcaagagtaagatctttagaaatggcaacagtgcaactttgatttatcataaaagattcattgtttggtagaattaatttggtagcagaaacataagagagactttgaaataatttggcattattgcatatgtgtctagtggcacccgaatcaataatccatgaagtatcaaagtatccagatgaaacataggtgagaaccatacctgaattacccatggaagtgccaggatcagtagtacttgtgttaatttgttgattagcaagaaggttaagaagttgttgatactgattggcacttacttgaggtaaaagggtgtgagtgtcctcggttttggccttgttctcttcattagtttgaatctgatttgccatggcatcctttgacttgtttggtttgttaaaaccaggtggataaccatgaatcttgtaacatctttcgatggtatgaccatgaatgttacagtgtgtacagaaaggtctccctttcttaggagattgagttctttggccttgactatctggtttatttcctttgtctccttggaaggcaaaggcatgacttgtgttaggattatttccagcacaattgtttcccttttgattctcttcatgtgtgaccaagtggaaaacacggttgacatctggtaaaggatccattaacagaatgctcccacgaacttgggaaaagttatctgataaacccgtaaggaaggacatgatgtattccatgtgatgatgctcctgcaatttcttgactcccccacaagtgcatccattgcaggtgcaatttggtctgtagttggccaattcttcccaaattgttttcaatttggtgaagtacatactgatagtttgagcttcttgtttcaggttcatcatattctttctaaggttgtaaatgtgtggtccatttctttgattgaattggaccttgagatcattccagatattggcaggggattcatcatacaatatactcgaggaaatctctttggaaatagaatttaaaatccaagatatgacgatattattgttcctaatccaagcattatacagagtataatcaaaaggcattggtttaggaatagatccatccaagaatccaagtttatttttcacagaaacagaaagttgcatggctctactccaagaagcatagttatcttgtccattgagaagttgagagacaagaacattacctggattatcgccatggtaaagatagtatggatttgtgggatcttcaagtggatttctttcattgatgaagtgcaaatcttgatttccatgtccagtcgaagcagatggactttctgttgattttaaagatggatcctcactttccaattgagttgtggatggattttcattcgacatgaatgaggagcagaaaatagagataatatcgtggtaaacaggatgtcgaagaagaagataggaacacgacgactgtaccagagaagaagaccaaagaatcacaggaccggtcagggaaagtatttctttccctactttgataacataatgcagaatggagaaaatagaattttgtatatattcaagtgaaacagtgatacaaagtatttatacagaggggatgccacacgcatcaaccaagaacacctagacaaacttaggcaaaatatcctaactaacatttgacacgaaaccagaaaagaaggggaagaaaaacaaatctaattgttagaaacagaaataactaacagtcaggtataaacgaacataacaactaaaaagaatgaaataagatataactcagaacttaatagatttcttccttttcattcgagattcactcatggcctctattccaaacctaaccaagagacaattatttgacaaatttcgtcgccttaagaaaaagtttaatgccaaccgatgaagttatcgcttgcatcctcctactcattagcacgatcagaaggtgtttgagctctccaacataatttggggtcatgatgatcatgatcatgaccgcgatttcaatcatgatgataaaaataaacaagtaacaattagtggctcagattgaagcgagaatgataatgatgaggatgatgatgatgatgatgatgaagtgtttttgtccgatgaatatgatattgttattctattgcctgaagcacttgaagattatcttttagatcatgttgtgtgttttgattggctggaaaaaatggatgtcaagaaattggaggagagttagaaaaaggttaaggttcttgaacacaaatatgttatcgaaaaatcaagtttggatatctttatgaatcgtttgaaacttcaaccctagggactacaatataattagaatatatgctactctttttattttttttctcttttaaaagttcaatattattattttattttttcagtctttagtgaatttttaaattaaggccattttattttaattcttttcattattaactaagatcctaaacatcttattatctttttattttttttttttatttgcatctccaacttttgaaaatcaatatatataggatcaatatttatttattctctccttaattgttttattttttttttaatttttttattaactttataaatatttaattgatataaaatatatacatctatttatttatttttttaattctctcatgagactaaccccaacgtttcaaaaaaaaaaaaatgtacttcatctaatgtctcttcctaaagagactatcgtttgtaatgttgaacgacatgtcagtgacctaataatgttgaacgacatgtcagtgacctaataattaacatatatttcaattttattttttttttgatattttttggtttatgagatctgtatatatataattttgaaatgcagcattatcatatatatattttttacaaatttgagtattattaaatgtcttgaattatatatgtacatatatagcatattgatagattatatgaggttaattcttttgatgtgtagttgatgcttcagatttgatatttgtagtggtgatctaataatataatgtatatatatagtttttttttaattgttgaaatttttctaattgatgatcattaattaatagaatttttctgaattctggtaatttatatttttttaattgatgatcattactatatattaaaaattaatgaaatttgatttttattataaaaggtaagtttgtaaatgtctatcagaaattaacatattgatcatatatattcccataattatatatgttataattataataatattaaaatatatgcgtattattattcttgtgtttttgtaatttgtaaattattaaatttattcattatttgttatatatagatattccttgtagagttaagcttccatttggtgtattacttgttttatttttttaattcttttattaacttcataaatatattgttatcctaaattttgcactctgatgtggcatcacgagactggtgacacgtgtagtctacttagagcatctgctcagaacgatagaccgagcaggacgcctcgct

SEQ ID NO: 65508 - DNA, 3811 bp, Cannabis sativa
ataataaattatatatattttaattatgagagtaagtaagcgttacattctcacaaaatttttattataaataaaataaaaatagataataaattatttataacttaatactaactaattttattgcattttctaataaataaaaaaaattataaatatcaagtgttaagaaggtctaattaaatattataattaaaaaattaatttattttaaataaatagttaattataattaatttaagtaaaaaatagaattttcacctcgtaataatccactataacaagttataaaaaaaatctaagaattattacatgaaaaatataaattggcactttatttacaaaagtaccttcagaaggtgtagacaacaattttatttttaataagtttttatttaccaaaataccacttacacatatccattcctgtttgcccaaaccaccttccagtcattacctttttaaaacccacgttcaaaacctaggaaaactacctctcagccataaccttcgtcgtgttcttcttccaactacctcatttatcaattttttttatatatcatcttctgcttctccatctctattgtcaaaaaaagcttcaaaaatatatcataaatcagttgttaacaagcgctaaagggaaacgcccagtcatcgacgatgataacttcaattttgctcctccaattgctaaaggtagtcgtcgtctagtgaagaagaagtcgaagacgactttgcttaaaaaaaatttcaacctcgacgaccagaagaaaaagaagaagtcatcttcaagacaactgtaatgcaataacataaaaccaccaaacaattaataattccacatatttaatataaatgaatataacaacaatcatgttttatctgttcaggtcgcgtatttgatatttcgagccttgtttttgtaatattatgatattgtagtagcaaaatcattattcaactaacgtgcaatttaattgcaactaaaaatgttaaatgtgaatgtgtatctgtaagaaactatttgttagtatttttttttttgtcactgatcaataattacttataacttaatagtaatatgtggagaaataactgttagcaaaatgtttaagcaactgtaataaaactgttatgaaatattaaaaatcaaaatagtattttcacgtgcgtaactctatctacatgtttattcgtgatttattataaataaattcaccattagaaattaggaaaataataaaaatacactaggataaacattttactatagtattgatgtaattttttttggataatacttaagttagattgttagttcaactttttgagatctgcatttcatggatttgaaaattgaagttaggatattagttttatgcgaattatactggatttctgattgaattttagtttcatagtagtttttctacattttttcatgaattcaaaacaatatatcccttttttgattgatttcgattgtcttctcaagtgatgtcgccaaaattgatgttgattattctcttcctggttgggttttatttcggttgtgttgagttgttgggtggttgattgaaggttgcatcacccgaaagtttcaatcccaggaagcgtggatcatggtttaaaggtgtgtgtaagaagtatttgtgtaatatttgttatttggattgtatatttgtttattgggccaactgaaagtttttttgtaatattgttatttttttttttaaaactagaaaaattccaaaaatataaccatcatatataatcatccataaaataataacttgatatccatgagcagttttagttaaaaaagcttataattaatttttacatagatgatgttcttcttataactaataatcaggtatttttgtagaaaatttcttggagtttgaaaattccttctaaagttcaccaatttttatggcattctcttagtgactatcttgcaactaaagttcaattagtgtctaaatatgtactaattgatagacttgccctatgtgtaattaagaggctgaatcaatcttccacttgttggtaaattgtcattttacaagatcttgttggtcttgttcaagcgtgaattgtggtaatgtataaacaaacaagattttcgtgattggtttgggaagatattgcagcagcactctgcttcatctggtttgagagaagaggcaacaatggtggcttgggcggtgtggaatgctcagatttcagcggtttggcgggagaagtcttcttctgcaccatatgttattctttcggcttgtgtcgtccttaattaatggttatatgctcaatcaaagaaaatgagatctctatttgttccttcgggatcggataatgatttaaagcattggacgaagccggtttctaacacaattataaggtgaatgtcgatagggtgatttttgcttcacctaggaagtttgggattgggttggtggcttgtgatagttctggcatgttgattgatcagctcgcttattgtgctatgatggttgggcgaagtcggcctttgtggaggcttatttggagatcaaagaatcgttgagttgggttgattcgaaaaattggggagttgtacaacttgaaaccgattctttagtttcaattcaagttgtctttagttctttgaacttaccttccccttttggtattgtgctctcaaattgtaagctccttttaacttctctgtgaataaaactgtttatggtgttgctcgtagctcttatttatacccagattgcagtttcaatattgataatattcttgctgaatttttatctattataatggttgattctatttattccataattaaagtttccattccttttaaaaaaattatttattaaaatgtttttatattaataataaggtatcttatcctagttatgttttttttattaagttatttttggcaacggtgatacataaaaatgtaatcatattacgaaaattacaaaatttagataagatctcaagctaaatataaaataaagtaaaataggaaatatataaactaataatgttcaaatattattctttactatatataaactataaaggataaattacgggccaactaatattatatatagagtgccatgctatagataattaaaagcactttatttaataataattaccatacctaaattacattgagtgtagtctttggcacaattgaacaatcgaaaatctaccgaatttaaaagtgtagtgtatagtgggacattactatagtctatgtaaacgtacgtactgaaatcttcagtgcctttagtcagacaactatatgtatttaatgtatatatataaagtctgcaaaagttgtataccagataatttatttttatataatatatgtatatctttcagaaaaaaaataatataaatatatatcctttgtgatggcatgcagttaatgtagaaacatgcatgatttgggaaaatgctaataattttatgcatatctttaaattagattatatttttaattatgtgatcttaattattagatgaacctggaaggtagatctccaaattatgcaaaaacaggatccataaatttattggattaaaaatttataattcagataggtaaaaatacagaaaagcttaaagtcaattgaaataaatattaatataattctgaactatatagctagctgttgtatgtaaatgtatatatataattacctacaatgcaaggaatttattcacatgttttaattttatatacaagtactactgtacccgtcattatcatggcaagctagctacatctcaa

SEQ ID NO: 65509 - DNA, 681 bp, Cannabis sativa
ccataaactgttgccaaagttgaaaaaagccatataaagtgtccatagttaattatgccatatttattataaaaggtttaaaaaacccatactccacgtaaattctactatcaacatttccagtaaaaaatgttctgggcttttgaacatggaggtggcaaaatggcccgattgcagaattataatgagactttcttttttatgttttttttgcgaagtttacaaatatgattttattttttgaaaaaatttgttttagaaaaaatcaaaagaaaaatacaaataaacattattgaaataaaaaacagttagtaacagagagataccagtcacttccttaggtatactctttttgttttctcttttaatctttcccaaaaaataacctttttttttcacaaattgaatgaaaactcataagtgcaatttttacttgtattattttctcaaaaacaataagtatttttcttttcataattttgtaatctcttcatttcctccatttttttttaatttgaaaaatttagctcctatttatataaattataaaattttgaaaaaatattagtgcatgttagtaaagtattgtattttcaaggcaaaaacctatttccttcctattttagtgcaactttcgtctgttactaccattaagtctgttgtgtttcagcaaaaaaaaaa

SEQ ID NO: 65510 - DNA, 1299 bp, Cannabis sativa
cccgagctagaacttgcctcgtcaggtaccggccttctcctttgggaacgggttgatacctaccctctgctaagatttgtatgtgccccttccctatcagtgcgagaaagacgttaacggtgtcttgttggaaacccacctgtcctgattcagtcccaggatctttctcgttaccatgagggatctcctgttccctagtccggggttgcctcttgtgagaggattctggtaaatcacggtttccattgccctgggttgtaaatccttggggcctccgatgcacttcttgatgatgtgtttggtcatttggttgctcatcttcatgggcatcctcagtttccctagcctgttcttcctgagtgttctaagggtccccctgagttgtctcctgcctactggttcgtgagccacgaggtctgcctcgtggcctccttaccctaggatcaggttggttttgagcattattttcctaagccaccctggcagcggcttcctctcattccaactcagtaattttttggtttgcttcctctaaatgttgcttgagttggcggttttccaactccaccaacggtacatacttggtggggtcataggcacccctagtcccaagagagccactagcctctgtgttgggcacttcattcccagtttctgggtttcggtgaccttcatgttggctttatcttgaacgtgttgaccgtataaatcgtgttatttgtgaattgggaggcctctgtgagcctgctggctcttttccagcgcagtgagtagtctcttcaggttgattattataattttcccaattgtcagtcatggagaaaaatttttcttttggttaggagggattttttctgagcttttttcacgtaggctctgaatgaaagcaccaaactattaacgcagatttaacaataataagcctattttcatgataggatcaacacataaattatcagaaatttaagaatgaatagcaaagcaaaaataacaccaagttttttacgtggttttgcagttaactctgcatagcccacgagtcaatcttattaagacttttctaatacagaactagggttcttttttctttcaaggatttttctccttttttctgtacattctacccctatttataatggcatcgggtggtagttaattacattcagatacgaatcccacaaaaatatttccccaaaattgtgggccttaattacgctccatgtaaataaatgcagtttattatttgaaaatcacaaagctccgatttaaaccgcttttaatgagtagacattgacgtgg

SEQ ID NO: 65511 - DNA, 844 bp, Cannabis sativa
  modified_base (31)..(57): a, c, t, g, unknown or other
tttcattgtttttagaattcatattaggatnnnnnnnnnnnnnnnnnnnnnnnnnnnctagatcctggtaaaagatttccaacactaaacacttatctttacttcgttgtagataatatgagtttcttggctgccatggcatcttgttttaagaggaagattaggtgccgaagaagtctgaacctttagtcaggaggattgttcaaggtatctctgctacttcttttgctcttaagaagaagaagcttaggaaggggattgtacctattgaagttgtaccccttgcccaagacactggcaaggagaaatctaaaggtatcactgcttatgagcatctcccattgatattcctccagatgagactgagaatggtgttccaaactcaagttcagacctagtggagaaattacgtgtgcatggctcttggattcttgtcaatggtgatgccttgattggatcaaaggctaagaacattctgctgtagaagttggttagctctaaacctccgtatgtcatcacccaaagatgcttcaccaatatctttgaggtaagtttttttcttgtctcctcttgaataaactttcttttgcttatccccacctgactttgtcttcttgctttcagacttgtgtcggttatgctaacgccatgggtaatgaacacaagaaggtggttgaacttgcgaaaaagctcactactatagaagatcaggttgtcggcttgagagaaagcactgactctctatagaaatctatggccagtctctgagaagtgggtgatggtgacaaggcttgagagagcaatttgaaaaagagtctggctgctgcttggaagaaaactttag

SEQ ID NO: 65512 - DNA, 1108 bp, Cannabis sativa
tggaatgaaaataccaaaataacctcactccgacaatatggacccactgtctgcagtaattttgtacaattaactgccacgaacagtaactcggttgtaccttttcgtacattaactaacacgaacagtaaattgattgtaccttttttattttttaattaaaaaaaacaaattcacaatcggtgaacaaacctacaacaaccgattatcaactaaattaaaaaataaaaaaaaaagtttcatataccgtgggacccacctgacgtacaacggattgcaatccgtattttctacatctgggtacaaaatcggctgcctatatattatatataaattaacaaaagtttgtcactatcacaaaaaagtggcaggtattttttttaattaaaagtatattatattttaagtgatataaaagtatggtttgatctctgttgtcactttagtgacatgtttttttttttttgaattttttttaattaaaattgatgataaaaaaggtgataccctaattattaatacccattcctttcactttaatctcacttccccattattctctcttcctatttcattatcttttttttttcactctctacttcctcgagttctctcgatttttctccatttacatataagtttctccatgaagttcttagtcacgtttttgaaaaatataagagttagtgtggtttttttgttctgattttccagaacttgcttgcaaatatagtctctattgcatagtattgaggttgtgaaaaagatagttagttttttttaatcattgttttcttttattttttttttacttgttttaatgttgttttatggttgtttgtcatgatttatttatttgacgtcgatttactgctcttgctccatctctctggaattaatggttattttttgggtgttctcgtattgctgtggtggttctatccgtgggtgtgaagatggaggctataaatacatttcttcttcattctctttggctgttttttgtagtttttttgtattctgactctcctataaatacatttgacgagctcactgacaaaagagttttgaggtgtatggttttttatatttttctaagtggttatat

SEQ ID NO: 65513 - DNA, 545 bp, Cannabis sativa
tatgatattttgtttattcttcttcataactttttttctttggtatcattattatttgttggtgaagaagatggtttgtttttaaaaataaatatggattaaagatgaagtgaaaaaacaattttgatctattctgtttgtttcattagaatataaataaaaaataattataaaaatgagaaataagtaaaatctacactgctctataatcgactttaagcctatacatctccaaaaaaacaaccaatcataaaacaaagaaaatgcattagcaagaacaaaagtggtgctcccacttaaaaaaaaaaaatatcctatatttatatatatgtatatattcattaaaaaaatttaaaactaattaaaattttattttgatttgctgttttgacatataacaaaaatatttttttttttgataatttaaaatatacattttattatcaatacttaacttgttttgttaacataaatatatattaataaatgactaattagtaattttttccctgaattttgaaaaaacaaaaaaatacaaaaaagga

SEQ ID NO: 65514 - DNA, 873 bp, Cannabis sativa
gcataagtgaaattgtgttttgcatttatttttaatattctaaatgtgaaatttttgcttaacagtagccattgagaacttgagaatgaggaaaaaacaagatagaagagagagattttttttttattttaagtttcaaattttattattattattttgtattttcttttaattttaaataatttttttaataaaattttatttaaaatgttttttaaataacatgggccaattaaatattgccacatatacatttatttgacatatacaataatttattgttaatgatgggaatgatttggcatttaaagaagtacttacggaagttctacactaatgacggaatgtatttttaccgctaaaaatacgacttagggacttatttgctacttaaagtaaaatttaagtatttatgctgtaaattactcttttaaaaaagaaaaaattgataaaaaactaactacaacaaaactgaacaaaaaccaaccacactagacacaaacgtggctggaatttttaaaactaaaaagaatgaaaaaagatgatgaagaagaacattataataatagcagttaaaaaaataatttttgtaatatatgtcttattttaattgcaataaagaaaaaagaactgccacaacaactaacttcacatcaaattttatttattttttattttttttttttttttgtaaaaacagtaataccgagacaaatggcaaaatagaggaaacacaacttttataccgtttttataaaacccggtataaaaaattagctaattagtaatttttctccttgaactttgacatgtagtaaattgtgctccctgaacttttttggccgttaaaaattccccccgaactattgagat

SEQ ID NO: 65515 - DNA, 2034 bp, Cannabis sativa
tcagctccaggggggggggggagatttgggtccgggtctggtgggagtccaaaatattaagtaagaaaaaatatcgtttaataaaatattgaaattaactttttttatttttaaaattttgatttccaattaaaaaattgaaaagtgaaaatagttttataaaacatgtttttgaaaaatatttttactttttcaattttaaaaatagaaaactgattaaaaaagtattaccaaacgatatctatattaatataataaatatttacttaaaaataattctaatatataataaaaataaaattatattatctaactctgattaataatttcatttatcaaaaaataactctataaaaagaagaaaaaaaatttaagtctatgcacaattttattaattattattatttggagttgtttattaagaagtataaaatttatcatatgtagtattttaaattgatttgttaaaaaaaaactattgttatgaaaataaataaatagggtaatatatgtagaaaaatattagagtaccgtatcttacttgttgtcttattatatctttacctttgtcatcaccgtgtcctacccaaattttaaattttgatataatatatgtgttatatcaactttcaaattttgatattttcttatataatatttttaataatattatgagtaattatcttaataaactttcatatttttttactcaaaaaagaaattaatatatatgtttttcctaaatatttttagtttcaaaaaatatatatagtttgaataaattaatgtaaattttataagttgttaaatatattttctaaaataatatatgtttgtataaaatccattaattacagtgagaaaatgaataaaattatatttctaagtaaatttaatttcatatggtacgttatagatattttctaatcaaattatttaatttttaattcttttaaaatcatttaatctaatgatgtaaatgttaataaatttgtgtatgtaactattgtgggaagtctatggttgtgatagtatgtaagagagtttgcaaaatgaacaaaattaattacataaaaatataagccaacataattttgttttctagcacattccagtataactactaattcaaaattgttgtcaatttgtcatcaccgtatcttacttgtaactatcattattttaaagttgttgtcatcaccgtatctcatttgtgtagtcgtcactattattcacaataatgttactctgtccataaaataaataagacaataataagttagctactcattattatacataagtgaatcatattatgttataaatttatcacttgcttattccaagtaatttgacgtgatcaattactaaatggatttcgattctcgaagtaattttcaaacatatataaccatgtatacatttaaaataaataagtaaattgtttttttaattataattaaatattaaattacaataaatttacatcaatatttttatattttcataaaaataaaatatatcaattttttttttattaaaaaaaaagtaaagataagacatgaagaagaaaagagcaccataataaagtataagatcttaacaattacatgtattattgtaacatgtaacatccatcttatagaatctttatatagactaaaacttataaaaaagtaggaaataagagttgcataaaatatgttagcttttaatatatattaatataaaaaaaaaactttggtagtttttttgttttaagtaaaacatcaataattgttgagagaatttacacataataaattattaaaataaatgagaaataaaaaaaattaatattgttaccaagaaaattataaaaataaaattatagtattgatgtattttatactaatatattatcatttaactaatatattaataaaatatttgtaatattaatatattaatattcaactgattattgatttttacactttttctttttgtccaaatttaaatttcctccccaatttaaataataataataataat

SEQ ID NO: 65516 - DNA, 1719 bp, Cannabis sativa
ctcttctgaaaatagtataaatatggttttggacaggtagtgggacacaattagggaaagagatatttgggatttacttgtgttatggaatgtaaagaaaatattattaataaaagaccacataatataatgtggagttgtggacatttctaattattaatattttactaatgatgattttttttttactaattaatttcataatgatacttattcagtattggttaaaattttgtacaaacttgaccaaattcaaaaagcttaaatacatgaatttgttgaatttgaaagaaggaccacctttcacctaaccattagttttggaaaatttcaaacatctcaaaagtcttccaaagtctttgttatttgaacaaataaagccttccttttcttctaactctttcttcttttttattttattttcataaatgtaaaagtttcaagcatatttttatagtgtccactctcccaaattgtgcttaaaatatttggcattagaatataatgaagcttttttttaataaatgtatcatgtgctttgtcctattatttttgttgtggggattctattgggatttcatagagcatataaggggcacccaatggtatattctacatctctgttgtaaaatataataatatgtaatttggctaataattgaaagaaaataattagatttttttttatgaatatagaaggtagtcatttttgttttgggtcatatttgactgatgggttaattgacaaaaatggttcttggagtatccaagtttgttatgatttggttcctaaaggcagtaaaggaacttattatatacaagcattgtgattttggtatagaagaagaaatttggtctaagaattatgctggcctgaattaatgaaaatatatgcataaatgtgagattttacataggcatatttttacaacacgtgcacatcacagtaaataaaataatgggaagaagtatcaaccaagaaccaaattccttaagtgttaaaaaatccatatatttgtgaaaaagtaaaaaaaaataatatatgtgggaaaaaaaaaagttcattttaaaagtaaactaaatatccaatttaacaatttaacgcttcaagaataaaaaattaagaataattaacatttttgtgcatgaatttttttacactagtaaattatatacgtatatgatttgttaataatatttttcgaaatgtaaattttactataatgtaatccttccattatattctatttagttttattgtaaaatgaataacgcggtgaataatagttgataaatagatgtaaattaaatatttttttttactttaaatattaaaaaattaaaaataaaaataaaatttattataaaaaagtcgtttattctattatttattaatgtaaatagggtgaagaatatttaaatttgcattcatttatcaaatatcatctaccactttattaagttaaattaaatgtgatagagagactatgttactgtaaaaattatattttgaaagatattattaacaagtcatatactatataagtacaacttgatagtatatactatagtatactccatctaaaaggtagtattgttccaaaaaaaaaaaaaaatagtttcggtacacccctatctattttgacattcagaatatttaatttttttttttttttttaatgatcgtatatgttttcattttttaagattacctataaa

SEQ ID NO: 65517 - DNA, 727 bp, Cannabis sativa
ggaagaagatgggacaaggatgacgatcactctcattctaagccaaccgttttttcttttttggtttgggccgtagggaacttttttgaggttttatattagttttatttatgtctttttctttttctttttttttttctcacaaaattataagagcaccataatatttttatttttttaacaaattatcattattattataaattaacagtcatttataatagtaaaaataagaaaaaaaaaattattatcgaataaaagtcttgatccaactctaaattatatttagctaaatcatgaacagtttagttaacatttctcctaatataagaaacaacagcttaaggaataaaggataaaagaccacgaatatccataattaaattcgagaaacacgataaattggttgatctagaattcaaagcattagagactctaagtgcattcgtttccatatgagtaatatgtatttgctcctgcatcgcctaattaaggctatgaaaaagggcctttgcttccattttatctaaacaaaaataatcttgtactagctttgagagagcagcaatcacacgaccttgatgatctcgaacaatcgcacctacacacaagatttttaaagtcaaattcagagcagcatcaatattaagtttcattctcgttccatttggaggcttccacgatatcccttcagttgggttggtagtagaacccgagttttgtaacg

SEQ ID NO: 65518 - DNA, 1174 bp, Cannabis sativa
tatttattttttgaaaaataattttacatacgaatttcactattaattttaatatttttgctactaatttatttaaatatatagttctattataattatattttaaattaatttactttattaaattttttaacaagaaaaattattttattaaatcaaacgaagttaattacatgagatttctcttcaaaataaaaatttacagttgttttacatttttaaaactaattttatctatactaaacatctttttttgttgtacaagattaaatttactttaaaagctctcttcaatgctataatatatacaactcaaattcatgtattttttttatttatacacaaatttcgatttaactaaatactatcaattatacttattaacacatttttacgactatatataatataatttttataaacattttaatacatttttttatttttttattttatgtttttttaaaaaaattaaaattaacaaagtcacgtacacactacatatatataaaacttccatctttccagttttttttttaacaattatttttattttttaatttttttatgacagcaattttttttaaataaaaaaaatcacacgtgtaggtacactaccatgtaagttcaaactgtcctaattaccctatatatttatacatataattttggtataaaaataattatataacacactaacttttacaattttttttttttctcaaaaaaaaaaaaaacttttacaattttttggttggagatttatttatttattttgataatcaatgctaacttgattgcttttgttttaattaaatttttgtttgaatgacacattatattaaattttgagtaaaaatataaattaaaagtgtgataatcattactataaaaatatttaacttagaaacgatttcatataatacaatattacttactctccaagctaaactgtgagtaatgcagttcaaaacggtgcggatcagtctccggcaacagaggcctcctcttttctcccacatacaactctaccgccgcctttaccaaatcacccaccgtattctccgacccaattactacctgaaccggtcccaagctcctctccatcgtcacgttcagcagaagtttcgtcggccgtcgtgggctggtcatcttctccttcgccggcaaaaaa

SEQ ID NO: 65519 - DNA, 952 bp, Cannabis sativa
tacatagaagccaacaccctaccgcctttactataaacattcttgatagtcagtaacatctcgtaacttacatgtttaagtatttcaattacttcatcaataattacattaaattactgagtcaatgaactttctaattttatttattcatttatttatttttaaaaaattgttctttaaatagttgcatttattttatgatgaaaatcgcacaacaaaataagtaatagttgattatcattattaggcattacaaaatttatcatacacaccaaatttatcgcaataaacaatgacataatttttaggggcgacaacatttgaggcgacaaaaaatcgcctctaatcaattgtcgccccctaaaatatagtttttttttttaattctgtgaggcgacacatttattttatattgactttagaattcttttggtattaactttggatctttgcatctaaataatgtaataaatcttttatgtcacaagagaatatacacttataataatatgagctttagagacttatattgtggtgtagctaaaggatgaaatgtccttacattaatttacgtttattttgttaatattattatattatttgttttgtaagtttttatctttttttttttttcagctaataaattttaataaatctactatgtaattctcaccaaatatacctgatgatatgcaatccttatatacattaacttttcacatgcaaatcattaaagctattgagaagtattttggggttgtcgatgttaagcggacaaaataaacaaagattgtttaatgatgttaaaaagaaagtttggtctcgactaaattcctagaataataagcttttctcttatggtggtaaagagatacttctaaaaattgttattcaatctatcctcatctacgcgatgtcttattttcacttacctttgaaagcttgtgaggag

SEQ ID NO: 65520 - DNA, 762 bp, Cannabis sativa
  modified_base (524)..(532): a, c, t, g, unknown or other
aaatgtgttagtttcagctcatccaaatcacttgctacatgttcatagtttattagtctacaatgattcgctcgtattgctaggttggacaaccaccaatttctattagttaggttcttttcaattcaattaagttagttatgccctgttggcaactttattttttgtctatataaactattcaataggtttataattaggggttggttcatttctgttttgctaagttaaagaaagagaagagtcgagagagacttgtggtgagatcgagttagagtgacaaagagttttcctataatttattatgttgcacagagttggtattgagtagccattgttgaaggcttgtaaaagaaattgattatgttgatgaggtggcacaagggcatgatggacattataaatgaggggatcccaaggatgattgtgtaatcattatttttgctaacaaccttttcgttgagcctaaatatttgtgtaacacgtgtactgcctttattggctcatgtatttaccctgaattnnnnnnnnncctatttaatgaaaggttgtagcactcactcaatgagctgagtttcccaatcaaatttttctctaaaatttaacttggtatcagagccaaggttcttgcctctgccatgtcgactgaacaaagccaaacagctcaaatctcacatgcaagagcaggaaatataaactcccatggaagctctggagcacagtcatccatggctattgctatcccctcactcacaactcctt

SEQ ID NO: 65521 - DNA, 1442 bp, Cannabis sativa
aaatgcatgaagaatttcttccaaataatcccaatcaagagtatcatacgccttctgaagatcaagtttaatcatacagctagccttggcattttcccttccataatgtctgatcaagtcctggcaaatcatgatgttatgggcaataaacctcccagagatgaatccaccttggttttgtgcaatcatatcaggatgaattgctttcaaccttgtacaaatgagtttagtggcggttttataaatgacattacagcatgcaataggacggaagtcacttagtgtattagggcacttacatttaggaataagtgttaaaacagtagcattgattttttcaaggatctgacctgtgtgcagaagagacaacaccgcttcgctaatatcttctccaattaagtctcaattatcctgaaaaaaacaactagtgtagccatttggacctggtgctttgattcccgggattgcaaatatggctttcttgacatcttctttggaaaattcttgcagcaacaagtctgattgttctttgcttacaagaggccccagcatcatcacttctctgttaaccttcctcctaccttccattttagagacaagcaggtgctgataaaaggaaaggaaagcagctgagatttcatttgctttatcagttcgtactccttgttggtcttcaatggaaagaatactgttagaccttctcctttccttgatactagcatgaaagatggctgtgttgtcatctccatttttaatccaagaaaccttggatttttggtgcaaaaaggagttgagacccttcaagagctgcccatatttcatacgagcagcaatttctgtagcaatgaggtctgaattaagaggatcagattgtaattttagctgagtttcaaggagctccttctttgcttcatcagtagcattttgtatgttagaaaaatgctgccgattaagctctttaaaagctccctttaatagcttcagcttagttacaatttgaaacatcttagaaccgtcaattctttgattccaaactccagaaacaatcttagaatagcgaggatgagtagtccacatcttgaagtacttaaaagtttttttcccccaagtatttcatgagataatgagattatagctggagtgtgatcaaataattcctcagctggaaaaataacttccgcagaggagaaattatctaaccaattctgattggcaagaacacgatctattttggagcaaattctctcattgcctttcctcttgttattccaagtatagtaaccgccactatacttaacatcttcaatcatacaccttcccacacaattgataaactcggttgcctccgtgtatttcactcttttcccaatccgttcctctttgaacaaaatatcattaaaatcacccataatcatccatggttctgttgggttttatgccct

SEQ ID NO: 65522 - DNA, 881 bp, Cannabis sativa
ttatatttatttgtgattatgttaattgattgtcattttttttttttttttgaaatattattgtgaacgatgattatgtttgattgatactctttagatatgattatctatatagatatttatatatataaatatttttacaatactaacaagttaataataattttactaactgaaattaatatattactctaattaaaatacattattaattatatattatttatgcaatatgttcaatctatctatatatatatatataaatactagatagatgttacgtgacaatgacaagtcacgtgtgttaattttattttaatttttagtttttttcaatattataattttaaaattaatgatattcaatgtagtgataattattaaaatttgaaagcataatagtgatttaaataaaaacaaaaattattattatactttgtaatagtaataaaaaaaaattattattcgtcctaaatttatcttcagaattacgatctattatatagccacattttatatagaatagatatggagaagtatgatgcggtgatgtgacactctaaacttatttcaaatatatatatatatattctctcctaaattctcccattttattaattttttattaagtttacaaatattatatttaatctaattaaattacataaacgttagttgtttttcttttcaaaatatccttatatattttttaaaaaattacatctttatttaatttttattatattacttttttttttttcaaaagatcattatatatttttttgaaacaaattacatctttatttaattttggaaattctacaatgcacccccttaaaatggatacattgatgtacccttatctgttttagcacccgaaa

SEQ ID NO: 65523 - DNA, 534 bp, Cannabis sativa
caactataactatgcattatcgtgtccctaaatttttttaactcgttaaaaatggtccttgaactattcacaatattataaattggtcctattgtcaagttttgtcatacgtggcaaataaaatgatgacttagttgctactgccagttggcactttagtgccacatatataatttataattggtttctacaagatcattctccacaaagagagcacgtgctagataactacttggatgatgtattcagatgtctttggaccacatagatgtacaagtcagagatgattatgagcacttcatcactttcattggcaattactctagatatttaccttacgttagaaatttgaagtttttaagaaatttttataaatttttagaattggcttaaacatattaggtaagtcgttaaaaatcctactaactaggagtggaaaaatatttggatatgtagtcattaagttaatgttttaattgtatcccaacttacctcctcagaatattggaatcgcatattgatggaaatggtaag

SEQ ID NO: 65524 - DNA, 1163 bp, Cannabis sativa
  modified_base (1015)..(1018): a, c, t, g, unknown or other
aatatcgggattgagcggggttatggaatttaacaattttacccctagctttagaaatacttaagttttaacctaaagggtattttggtcattttaaatggtagaggggtggctacctataggagtgacacctagcaactatattttagccaagattaactcaattaatctttttccatttagagaaaaatcaaagaaataccaatatcaagagaaactctttctctttctctctttcccttcgagctgcaccaaaccaaggaggaaccagttgattccttgcttttttttggaaattcagtatagattcaaaggtttttgaagctaaggtaagccctagtaacatccttccttatttcttgaattttatggttggttgagtaagtgatttttggttttagtggctgttaggtttagaaatgtttgggattcgatttttatggtcaatataggttggttaaaggttttagtagctgattttggtgtatggaattagttttgagcaagtttgagctttgagttcaaagctttaatctctaatggcataaattgattttgtatgtttttctgtgaaatactggttggaatatgttgtgtataccctaactaggtactctggaaagtttggtagcatttggtggaaaattgagcaaagaatgaaatatttggggtggactggtgcaaaccggctagccagttttaccagacccccggttttagcaggatccccaaacacctcattttcataattttcgtccattttagtgtcgtggttgggtgtttccctgattccagagtttgagtaacctctagggagtataacagaacctagggttatggattcaggttttccgggattagggttttgatcatgtaacttacccggtttcataatgtgattagggcaccatctagcacgagactttccgttcaggtcggccagcacacttgaatctagaaagaaggtaagaactgtatataatgtttgatatcaatatctgagtgtatgtatatnnnntgtgtatatgcatgcttaaagtgttagttgcactaccatcacttgaacagtaaaggtatagagtgcattgatatagtaaatgttatttgagagtacattacagtgataccagcacaagtatgagaaagtactgagtgtgtgtggt

SEQ ID NO: 65525 - DNA, 873 bp, Cannabis sativa
ctactaaattaaatacgtattgtgattttaaattactgtatactcctttgctaatcaaaagatttacttaagaacgtgaataaactttaatctttaatatataaatacttcacataatttaggatcccattttaaagttacaaccatttttttaaatacagtagttacaaaagttattgccgagcgactatcaaaatgaaacttgcaatatcccgaagatttgaacactccaggtctaaccgccccaatatgtatatatttacttgagctcactattgttcagtcttttctttacctttacctacacattaaatatctgtgagtcgataaattctctaagaaaagcataaacataacataaactgaattataatcgggtgctcatgcactcaatcacaaccctatatctcgcgttcaacgcgtactaagtctagaacgttcgtatgacagtacgattgatcataatatcagtctatactcagtactctagtcgtaccgatgtgataacgtcaatctgtactttgccaaacatatatccatcggtattcagtgcaaccctatgtacactaataccgctcttattgatatgttatctattaggcaatcataaaacatgcacactaaatatgtaaatatatatgcaactattatactaatcttaccttaattcaaatttaggtgtgccgatcaacttgagtagaaattactaatcgacgatttacaggtccctaagtcacaacacaagtaaaattaataagtgatatgctaaattactttttgagaacttaaactcaaaactaaaattttttctattgatagatagcgtgaaaatacccagaatatcgatagaacgtgaaaaattggggtctgaaa

SEQ ID NO: 65526 - DNA, 1906 bp, Cannabis sativa
aaatcgaactttgattcgaagaaagtttgttgagaataaagtctgttgattttcttttctctgtaagagagaaaaaatggcgggaaaaaagagtgaaggaggagggaatgggtatttataggctaatagaagagtgggccgaggccagaaaagcccaatagaagcccatttaagagggataatttaaaaaaatacaaaaattacaaaaagtacagtttctactttgtgcagagttttcaatatttttaaagttttttaaatttcatttccataaaatacggttttttgaggtatttttatgttgtatccttgttattttgtcgttaatttttttattatttattatactcttttgatgttattttgaagttattttcttgttacttgaatgtaatttttttgttttttttttcttatattttatagaataccgtaaaaatatataaaaaaaaatgaacgtaaaaatgtaaaatgtttacaaaaattagtgttatatataattatatcttgacaaatttacataaagtacttaaaattataatatttttacattacagattttttttcctttatatttttacagatttgtgatattgtagaaggaatataaggttatttttatgttgttgcaacattgtattatatttttcacaatgtgtaaataacagtcttttttgaaacaacctaaaaacaacattgtgtaagaaaaaaaatatgcaagaatgtaaaaaaaaaaatcaaaattccttaaaatataatcttctttgttacatatatcattttagaattaaaacaagaatttttgcttgaggacattcttttaattatttacattaattaaaagagcaataaatatcactttagcaaaaataaaacaagagtaattattaaactaatgggtgatagagcatattggcgggttgagagttccactcacagcaggtttgacatttttgcactcagaagacattgacccttgagtcccattatacttcaaattaatatcagaaacgacgacgttctggcaaggcattccaccactacacaccaattttatagctaatggtgtagaagaagtaccccttattctcttaaaacttacattactgattttaacattggaaggaagtttggccttgcaaccattaaagggacaatattcttggtcaatcaacactgggttgccaacattctccattgtaatgtcctcaaaatgaaggtctgatgctgctcctggtttggaatcaggccaagttttaattcgaaccccattttgtgtgttttttaatgtgcaactcttgacgtaaacaccttttacaggctcctcatctttgtactttcctaaactaccgatgctgatgccgtggccaggtccgcatgtgacattagtgattgtgatttggttgcttccatccccaatagagatacaatcatctccagtttcgattgtggtgttggtgatcttgatgttgcttgattttccaatgtggattccatcggtgttgaggctcttttcgggtgccaggacatggaagtgttggaaggtcatgttcttgcacccaataaggttcacatgaaactgtttgctgtctttgcttgtaatgtcttcgattatggagttggtcacaaagttgaaccttaaattctgtttattatatatttccaaataatattaaataaaaaacaaagaaattgtttatatatatatcatatatggtcctgtttgacacaccagattggattaaaccaattttagtagagaaatttacaaaaatgttggaatttggggtaatttttataaaaattctgtgtttttataaaatactactagaatacaaaacagaacaactcaaaacactagtaaaaacttaacacagtatactgcagtatgaaacttataaagaaa

SEQ ID NO: 65527 - DNA, 2154 bp, Cannabis sativa
gagaatgagaatatgaatataaattgaataaaatttaaaatacataaaaaaattattaaattttttctattggaatggtttttctttctattttaaaataaaatactcattccactaaaatgaacggactaacattctaatgctttaatatgcaaccaaacaaatgaatggaatgaaaattattttctttctattctattttatttcattacctccaactaaacaccaccttaatatgacaattcaatcctatcaataacaattagttcaaaatctaataaaaatttagttatattaaatcaacccttttattcaaactaaaacaaaagcaaataagttactacaaaaaaatataaaaaataaaagcaaataagtcaataacacccttcccatgtatctcactctccaccctctctactaaacataatcttagcattattgtgctgccatattgcaaaaaaaaaaaaataaaacgtgttagatacttagatttattttattatttcagaaagtttcacaaaagaaaaaaattattgtttcagaaaaattaaaaataaaaataaaataataaaacgtgattaggatcatctgcagcctacctcacctcacttgttataaactctcaccataccatacgagaccagatcttcatccttctgtctctcactcattttgccacccaattacagcccttttctcttttcttctttctctccctccaacacaaaattaataattaaacacgcacgaactccttctcctctggtatcaaaccataaccatggttcttacttcttagagagagagagagagaagagaacatgcaccctttctcatccattcatgtgacactacttaaaagttttgttctttaactaatattatcaacagaaacaaggcttccaatttgaacccaaactttccccactaaatcttgaggggttggttggagaactttcggagatgacaacgttcagtgtaccaccacgactgtcgatgtggcgtggtttaacttcggagtttgaatctggaccagcaatatctatgtcttttgggaagctaaggtttctgactatggtcggggaagataaatgtaatgcaattggtaagtgtaagagcaagctttatcatggaccccatgtggggttgaggtcaattaaggcaatggaggattgtgcttcaatttctggtacttacccatttattttttctaatcatattcttttgttataatgagcaaacttattttcaatgatttagatttcatggtttttttcggtaagtggtctgcattcaggttatagttttatttttttggttttgttaaaaggaaaaaacaaggtcaaatcaaatggattaattgtagagtcaattagaaaattagatggtgactgactatatatgtaaaaaaggaaggtgcatttttatttatttgtttgttgttgttgaataaaggaagactgttttgggcaatttaagcagacaattgaaaagtcttcacctttttgaatggtagtttaaatctttaaccccactctatagacctatttatttgtaatggtatcatctatgcacagctgtactgaattttctggacaaaactaaattatgctacaaagtgacttgacttgaggtaaaaattctcggtacccataaaaaagcaaaactcagtgaacctgtcttttgggaattttcttttgttgtggtgtaaggcacctaatctaaaatatagcttctcaaaaccataggaatacccattgtcgagattgtaaattcatttgttggatgaattatttgttgggtgtttttcattagcactagtgtgtgtacttagaatttgatgaagattaatgtgttttttcagctaactcaaaaatcattaagcattcagcttgaatggtgtgtgttgttcttcttgttgtggttttgttctcacatgggtctgtttagggttctaatttaagtaaatcgttctaactaggaagagatctccaccagatgtcaaccattgggaattcaacaaacattacatggcacaaaagctcagtggaaaaacatgacaggcaagagttacttcagcagaaaggctgtgtcatatggattactggtcttagtggttcaggtttgttaatagagcaactcctttttctctct

SEQ ID NO: 65528 - DNA, 1466 bp, Cannabis sativa
ggaacttttgctaggtcctaccataatcttgccctatatatatatttatattaataaaagttcatgacgacttcaaaagtacatacgagctatatagaataattgaaaaattatttgtaataatattaattaaattaatgttaataaaactatatatataatgatggttattgaggagacacattaatgacaacagagggagaatatttagttcccatgatgtaaagagaaagcgtacgtttacataatatttaaatattcatattatttattacttaatatatatttatttaaatatgttatataatattatatatgaatatgatatgtacgatatatatgccaaagttaaaaacaactcgttctgaggagtaataatgcaaatatatccaaccaaataaagaaactatttttaattaattattggataaggataaaagtattataatgcgtgtatatacaggcacatgcattcaagtggttataggtgagtgtgttagaaattctggattcgaatcctaagtaaaacatagttgtaatatataaatgtttaaataaaaaaaatcaccttatatgcttaatatattagaatttacgataaaaatattagattgatatattatcatcaatatttttggtgctttaaaaatacttgtgattggtcaacgataatgaatgaatgaaataatggtttggattttttgaaatggaaagtaatatatatgatcactaccgtaagcaatatggatgagaattgcatcatcaacaaaatatcaaattaacaacaattgaacatggtcgttacctcttaattaattaacttctttttattattaattatgaaagttaggttttcacacatatatatatttaaggtagaggattatataaatatatatacatatgcatgcatcatgcagctcgtcatggtccacggagaattttttggaacccaataatataaatatatatatatatatatacataaatatacgtacctaagcatgtagttaaagaatatatataattatataggatgaacatttcttttatcaaatacttttatacattttgatacatcgactacaaaattatgtaacgtaatcactatatacattctctatatttgtataattttaattattttcattgtgccctaaagtttaattggaagtgagtttccatatatagagtttgtggacgtgtgtgataaacttatagaccaacaatattatataagttccggatatatacggtataaataatttttgtttttagtgtcatataatacttatatattatatattctttaaatgaattaaatactatatgttatagatttttttttttgtagtttttaattccctattcgttaatttttattaggtctgactaaattataacgtatcaattcaataagaaaattattaaatacttccaactgaaaaaaaaaaaaactaaaaaat

SEQ ID NO: 65529 - DNA, 770 bp, Cannabis sativa
  modified_base (201)..(215): a, c, t, g, unknown or other
aaattgattaaatacaaaagactaaactaccccttgaaagtagatattttccatcagtttgttgggctattaaagagcccaattcccaggtagcttgatgtctacattttgggttgtacatagagtcctgccagattaatcttggccacccatagatctatagggaaggtctggcggcccaaggcctataggatgaggttnnnnnnnnnnnnnnntgcaggttgaggtctggtcggccatgctcttactaggacctcgtactaggacctgacaggtcatgtgtctgctagaatcatgtaggtcactatagctttaccaagaggaggccagcctttggatgtggagtccagctttttgcaagttgaggagagctctgtacaccatctccttgtagaggtcaggttcccttatcgaataaaaactcccttggtctgaaagtcactttttggtcggcaaacttttgcacagatcctggtcgacctataggctcaccctggtcggcctataggcttctcttggtcggcctgggatgtaggtatagacccttgagagcttgttgtgcttcttttaattgctgcttgatagttttgccataccttgtatagagaccctaacttgctactggcaagactatattccaccgtactctagctttggcttatgtggacatgccacgtcaggttgaaaaaatttgggttaacattttcccccaaggccctgttcgacatctggtcgaatagggactgtctagctcttgtcttgtttgtagt

SEQ ID NO: 65530 - DNA, 1152 bp, Cannabis sativa
aatattttgttataacagttaaatccttacagaattaaataaatttattaaaattgattatagttttttgttacaaataataaattttttttataacaattaaaccccactaagtaaagtttctgggtattgttcattattcagttcttcatgtcttttttttttaatctttcttgtatattcatgcatatatatatatatatatatatatatatatatgtgcgaaaatcgaaaagaaaaaatatgtatagtcatgtcaaatttggatattgatataaaataaaatggttttcaagttttaaaaacaaaaaacatttgaataaatggaaacataaaagaactgaaaatagaaagatatcaaaactaagactttctttgccccacaacaaaggatgccactaatggttgacacctgagggctgagaaagtaagtcaattccaattagttgttgaaataagaacttttcaaatgatcaacatcagctggtaaataatatatataaatgtgtgtgtacaaatagtaaactccttaacgtggtttcataattttcttgggtccaataataagttaggagaccatagccattctgctgcatagtttcttcttcatcacaatcatcataataatgagtaattaatatacaatttcacttcagctgggacccttttaatttatcattaagaccaaccacaactttcccccaatgtcaaaatacagtatgatgcactcagcaatcaaaacttgattctcaaaatatgtgtaaaatatttgattgattttgactttagcaacttaattaattaatggcagcacagtatagtttaatacattcacagtaagagaatagactggtaataatgtatgcaagtatgatttttttttttcaataaataacttaattcaaaataattatactaatgtcataaattgttatttaaggaatgttgggtattatttagtatttttttaaaaaaaaaaaaaaattgtgtatttagaatgggaaattttttatacttacatatacttaatactttattcttaaactaatgtatatcactattgaaaatatatgaccactttatctaaaattcaaaaatacccctctcataactcaactccattttttcccaacccgcacatgcatcggaccc

SEQ ID NO: 65531 - DNA, 831 bp, Cannabis sativa
tccctgctgtctccatggctttctgcatggcgaccatcacctcttgcatctttttgttttgttctttttgggctgtgatctcagcttcatgatcggcagctttttgtcttaagagcagcagctctgtgtaactgccttcgtcgtaggcgttatactcgtcaaagttttcctcgtattcgtcattgttggcctcctctcgctcctcagaatccatgttgactcttgaggccacttcctcgtcttcgggattttgagcatctggaggaggacggggctgacgtgtgttgcgagtttccaccattgctgcttcaatttataagattgttgtctatttgaagatgcttccttcagctctcaatgaaagcaccaaaatgttgatcgaagttttcggcaaccgattaacactacaagaaaagctacttttgccggagcttaagctcgccgacaaaagtatgtgtaactcgtcggcaaacttttgccggtgccatttgtcgttggcaaaagctgtcggcaatggctcgttggcgaatgaccttttgccggcgacataatgacttgcgccggcaaaagtacttacaccgacgcatttgtttgccagtataagggactcgtcggcaatacgtccgccggctgatgtgtccctgacgacgtttacgtcgccgacaaaacttttggcggggattagagcatttggtaaactcgccggcaaaacgggaataaaaaaataattaaaagtaaaaaatttatctatgccggcgacatatccgccgacaaaacgggaataaaaaaaataattaaaattaaaaatttatctatgccggcgacatatgc

SEQ ID NO: 65532 - DNA, 716 bp, Cannabis sativa
atttaattattttataaatgatttaaaattttataattctaataaactattaaattaaatctacataatttcatgttcgataaattaaaagaatttaatttaacatattaattatataaacatataatgaaatccttgtagagtacgattattatatccacataagtaattataaaacatgtctattatgtgatcctaatccacttaatatatataattttatataattaaagatgccggctactcccaaattattgaaaattatataatagttccctaaacactaaagtataagctgaagatgaaaattttactaaatttaaaattgcatgtggctaaattttaaattttataaaatttggtgaaccttaggatagatttaattaaacaaatagtttaggaaaagtgaaggtttattatctgtcttaattagatttataataacactattaaattaaatcttcataactccttgtggggtaaattaagagaatttaatttaacatattatcctaaataattatataaatataataaaatttctgtggggtaaaattattacactgatataattaattataagttatgtccattaagaagaattttaattaatatatataattcatatattaaaatcgtggctactccctaattatataaaattatattttcacggtgacattaggtattgggttctacctaatagtaattttatt

SEQ ID NO: 65533 - DNA, 520 bp, Cannabis sativa
tgttgtttgtgtgttggatgtgatgtggtaatggttcgagtttctgaatttcaacaattagtcgtgtttggaatattggattggattgaataatttttataaggtggctttgtaatgaaattgaagagaaaatattgaaaaaattaaatcaaatattctaaataatccctagtataggataacttgggatttttgtattcaatttaatctccatttacatgcatttcaattcattggtagaactcattcattcttctatgtttgttttttcccatctaacaattatttaaaggctaattattatttttgccctctaaattttgccatgtaccaaatcatgcctcttgaacttttttggccgttaaaaagtctccttgaactattgagattgttgggtttaaagaattttgtccaatttattcaattttactaattcggtgattgtccatgtactaaattatgcttcccaaactttgatatctaccaaatcatgtccttcaaattttgacatgtaccaaat

SEQ ID NO: 65534 - DNA, 763 bp, Cannabis sativa
  modified_base (492)..(493): a, c, t, g, unknown or other
ggaacaagctgaagaaaggcgcgatagatagagttgagtactagagacaagaaggaactattgaaaggaagaaatgaaaaccttctccaattcctcgcagagaaagctatatcaggtcttgtacaattagcaagatacatcaatgctcctattgtactaagatatgatacctctagaccaatgagcttttcatgttcttctctaggtcaaaaatgatctttttccacatcaagtgatctaattaccattgggctacttaattggtgtgatttatccatataaaaccgtctcaaaatcttttcagtgtaagttgactgataaatgaaaattttacattttaaatgttcaatttttaaaccaagataaaattttattttttctaaatatttcagttcaaactctttttttagatattccacagcttctgaaagtaaatttagcaagtaaatttaattatttgcttctttctattttgacattctttgatagatnnaggttcaagatcctcattttcatttataatttctggcgctacattttatgcaaaaatattgttgacaattacttcgagtcggtcccattcttttcctgtattgacataatttattgagatctcattgtttctaatatttttcaggtacctgaatttcttcaagagatttgtttatgtcaacatctttctcgaaatttttagcatcatcattagggccatcttaattattttctcattttcttttttgaggatttttatctttggaaccga

SEQ ID NO: 65535 - DNA, 1170 bp, Cannabis sativa
aacactatttaattatcacaaacaatctttctggtaataattaaagactcatgaacttggcatatatgtgcaaaagttagaactaagaccactctatgttctttccttaattaaaacaataataaaatatgatattcatacaaagaatatctacaaaacaaaatgataggctgtaaaatctttattattttttcttctcttttttttttcctttctcatatcttcaaatttgtttctagcaatatttcataggcacaaaaaaccaaaaccatacatgacttcatcaaacattttgaatatcttattaatttaccaaataatttttatgttttttgaaagtaaatccaaaattttccaatctagaaaatgtggatataaataatatatatagatatataaatatatattttgtatgtcaccaacatttcaaccgtaacaattcattcatgtaaggcccttgtctataaaatctcaagggacccttttttcctcatgggcatatattgtgtcggtcattaaacaatttgagaattttcatttttcctttttttaactaactaaataaataattatatcctgtattttttaaatacaaccatagtttaagtagctgtgttgcgttgtgtggtataatggtacgaatatctttatcgatatttttttttgtatgggtttgaatcttaccataacttattttaaaagaattatgtttgactctttaagatgctagtttaacaaggtatgaattgattaaatcaaacgaaaataaaatcacaaaagtatagaaaggtttttatattattaaaaaatatatgtgcatttattatttatttgatatcttgtgttttattaaaatacaaatttaatattttatatttttaatattacttatataatactctatattttgatattataaatgttagtactgtaaatttaaatttgattaatataatcaaactatctttaattatatgagtttcaaatttaatttaattatttaattataaataactaagagtaacttggtctaattgataaagaattattaatcaaatttgagttcgaaacataaaatatgtataattttaaaacaaaaagatattaccaaatttatactttcataaaacacttattttaatagtaacaaatagaggaaattacactcta

SEQ ID NO: 65536 - DNA, 2120 bp, Cannabis sativa
  modified_base (419)..(440): a, c, t, g, unknown or other
  modified_base (1260)..(1262): a, c, t, g, unknown or other
attgctaaaataaaatagtagaaattacacagtatatggaaaaattataagagtttacttttttatggcataaataaataatgctatggggttataagtttttttttatttttttacatttatatgggatttttttgtcatatttttgtaaaaatatatagaaatcccacatttgtaaaacaataataagtttcgctgaaaaggtcaccggtgccggaaaagtcacgggtaccggaaaagtcaccggtaccagaaaagtcgtcagaaaagttagtgacattagaaaattcgctggaaaagtcaccaaaaaagtcaccgtcggcggaaaaagtcactggaaaagtcaccagaagtacatgtctttgatataaacaaaaacagaactgattctattacataatgaataaaaacaaataacnnnnnnnnnnnnnnnnnnnnnntaattgaaatataacttgttctgtaacataatgaataaaaacaaataacaccaaataactcaaaccggttataatttaaatataactgattctgtaacatgataaataaaaacaaataacacaaaataactcaaatcagttataattaaaatagaatcggtttcataacaatgttataatgaataaaaataaataacacgaaataactcaaaccaattataactaaaacagaaccgattatataacataatgaatgagtatttttggggtaaatatggtatatgtgtaattattttgtgggttggagcatgttgaatgaatgtttttgtttaagttattttatttaactagtttttgtgtatgagtttttatcttagttgttttacagaattagtttttttgtctcaaatttttaactaattgataaatataaccagtttcttaacttattttgtgttattttttgtgtttatttatttcattatacaaccgattttttttttatatttatgcctcagtattttttgaaattgatctctattttttttttaaaaaaaaaataattataatcgattttatgaggtattttgttgttgaactagttttgtttttaatttatgtttcaatgttttaagaactgatttcctctttgttttttattgtaatcggtttgaataattgcgtgttacttgtttgtattcattatgttatataaccagttctattttagttataatcggtttgagttatttcgtttataacactattataggatcagttctattttaattatagctggtttgagttattttgtgttatnnntttttattcattatgttacagagccgattatatttcaattataatcggtttaagttatttgtttttattcattatgttatagaaccgattttatttttagttatatctgagacatctacttcatgtgacttttccagtgatttttccggcgacaatgactttttcggtgacttttccagcgacgatgacttttccgatgacactaacttttccggtaacttttctagcgcttgtgacttttctagcgaaacttattattacaaattttattaaatttatttattgtttttttccatattttaaactttaattattttttaattccatattttttttgcattatttatttatgccagaaaaaagtaaattatatcctcaatggctcaattcccatatttatgaaaatttaccaataaaatatcacctcgatagttttatttaggcaaattaatattgggcttactcaattaataacaattatttatttaaaattgaattctagacaggcaacgtcaaattaaatttacttacaaatatggccttatgtgttttaatgcgattttataccatttatattttaaaaaattttgtaccacgtataccgatatgaaaagcttttgcctctatgataaattttttgtgtattacacgattataaaattataactatatcatagcctattctctctctcatagcttactgatcagtcacaatcatttcactgctatttttctttaattttggacaatttctctctcatctttcagtacctttatggcatatttactaaaggggaatgagaatcaattgtaaggattgatgctcattcatttgtatactaaattttggaatgggag

SEQ ID NO: 65537 - DNA, 810 bp, Cannabis sativa
gttggacagatcaagttggttgagccagtaagcaagcattttgcttcgcttgctttcttcaaactcccaattgaatccaaagcccagagaaacaagttatgacaagaaccatttttcattaatataccaatcttgcggtatcagtttcaagttccacatggatcgctaacaggttactcttatcagtaattaatcattttccaaggtatttatatatgtactgtatatataattcatacttttacattattagacctataaaattcgtcttatccctataattacttttccattattattatattactatatattgttattgttcttatattggttagccattagaaaaaatcatttatgaggtataaactactccatagcaaggaagttataaatattaattattattattttatttatttttaattttgatcgattattctataatattactataatatatattttttttattattatttataaaaacggttgattataaatagttttttcctttcaattatatagaaatttttaatatatttttcctatcaatcattttaatttttttttttttgagattgtatattctttttaaaatattttttcatcattaaatattttcagatagtagttaaattagattcctacaattataatttaggttattaatgattgaattagtgcttgtgaatcttcttcaatgttactaattgcatttaacaagataagttatttcactttttttttttgttggaaaaacttttttaatgtgattattgttagtattttttataaattctatctatt

SEQ ID NO: 65538 - DNA, 1143 bp, Cannabis sativa
tcaagactgatgttgaattctctcttgaacaagaaccgagtcttgaagcctattatgctcagttcaatcgaaatatgaagcctcctgtgccaaatcgaagcttctcacagccattttttaattctcctagaagtggatatactgctggaactcccaggggaactggttttccatcatatcagcaaggttctaactctcgtggaggagcttctatgggcagaggaactagattcccccctcaaccttctaggattcaatgtcagctctgtcacagacttggccacagtgccatagactgcttttatcgatttgataaaagcttcacaggtgccaataccaatattcaacaacaacctcaggctaacttggctcaaaattcagctgttgcacctacagatccaaactggtacccagattctggtgcaacaaatcattgcactcctgatgtgcaaaatctgatgcatagagctgattacaatggccaagagaatctctttgtgggcgacggcacaggtttgtccatctctcatattggtaattcttcaattcttactagttctaatcactctttagtccttaacaacttgcttcatgtcccaaaaatcacaaaaaacctgcttagtgtatccaagtttgctaaggataacaaagtgttctttgaatttcaccctgatttctgtcttgttaaggaccaggtaactcgaaccactctcctgactggtgttcacaggaatggcctgtattcttttgaccatattcagctccagccccctcccacttcaaacacaacttctgttcctgatcaaccagacagcaatcagtgttgttcttttcaagccaatgtcctgagttctgaatgttctaattgtaataatcctagcaattcattgtactctttatggcacaataggctaggtcatcctagtgaaaaagttgttagacaagttcttcaatcttgtaatatttctgtcaataataaagaacaattctctatttgctctgcttgctgtcttcgtaagattcacaaactcccctttccaaaattttccatgacagaatacaataaacctctgcaacttgtagttacagatctatggggtccttcccacactacatctctcaatggatacaagtattatatcc

SEQ ID NO: 65539 - DNA, 766 bp, Cannabis sativa
gtattatgtgtttagaaaatttagggttttttatttataaggaaagagaaataatgagagattaaatgagaaatagagagagaataattaaaactcaccaatatatatatttttgaatgtaatctagtattttttttaaaaaaaaaataataatttaaggttattgtaaaccttaatattgtattttatatgtgcttgttttttctttttagcttttctttttccaacgtataagtgtatttttaaaaaaaaaaattataaaaaattaaaaatatatgcattttttttaattagggttgagtacatatagtgacacgccaggcatgtggggacacgcttttccagtctctcctggcgtgactctattagtcaatattttttataaaaaaatataaaaagaaaaattatggatattcctctttagtgacactttatgtttttagtgacacacattacatgaggctaatattgaaaatttagagtctaattgtgtgtgtcactaaaaatccttcctagcctttagtgacaagaacttttgtccatgtcactaaagagtgtcactaaaagcccaaattgtagtagtgcaaggcttaacaaatgatcaagaacattcttaacagaagtacgacctctgtaccacatgcaccaagtacaactactgtactagcgttggtagggctgaaccgtaccccaagtactattgagtgttgtaccacatgcactacgtacttaactgtactacgtattaattattgggttttgtgcc

SEQ ID NO: 65540 - DNA, 1973 bp, Cannabis sativa
  modified_base (1840)..(1840): a, c, t, g, unknown or other
tccctattgtactctggtagctgttgttacaagaaaattctattaatggtaggtaattgctccacgaaccttcgaaatctaacacataggctcgtaacatatcttctagaacttgaatcatccttttagtctgaccatctatctaaggtgaaaagttgtactaaacttcagcttcgtacccatggacttcttgagactttgccaaaatttggaagtaaattttggatctctatccgaaactatagatttcagagctccatggagacgcactatctccttaacatacaactcagcatactaatccattgtaaaggtggttttcactggcgaaaggtgtgctgactttgtgaaacgatccacaattacccaactgaatcatatgttttggtagttctaggtaatccaaccacaaaatccatggtgacatcttcccatttccactcagaaagtgtcaaaggctgtaaccctaccagtttttgatgttcagccttgatctgttgacaagtcaaacaccttgacacataatctaccacatcgcttgtaaagatcgcttaactttaatttagaaattagtagatgaataggatttaattatgaaacttgcatattagttatgaattatcagtttaccgagatttatttgaattcagaatgcatgttatatttcatatttggaatttcatatttttgcatgttttgtgcccagcaacattggaacgcggccagcaacattggaacgcggtgtttagtatttttagtatagcggggtaatatagttagacattgagaatatcggggatagtcgggattttagaattgaccaaaatacccctaagtgattttatgactttttggctaagtgaggggcaaagtggtctttttgccctaagttcctttgtcttttagtgagtagtaattaattctttttaatctgattttttttattaattctattgctgaaactaattaaataaagataagctttattttcattttactaaaattaaaagaaaaacacaaaattacttttctccctctccaagctctctctctttcgaacccctctagagcccagggtttgatttttcttcaccaattctagtgattttccaacaagctttaagtgatttcaagctcaagtgagttcctagcactactctttttaatttcttgggttttaagttaaggaattatccatgatttgagtatttaagtgttgtaattgctgttagtgttcgaagtggttttatgaagttaaattaagattattcatgttgttttgaggtagatttaagggttgtagtgttagttgagcaagctttgagttttagaactcaagcttggctctttaatggtgaattttaattttgagcatgctatgttgttatgttgcttgggttatgttctttggagtataatatgcaggtctagaaggtttggtttcgaattgattgacatttcgaatatttggggttacctggtgcaaaccgtttaaccagttttacaggccctataaaaccgattaaccagatcagcagctaggttctcgaacttttagtgttgacgatttgtgttagtttcagagctttagttggttaattccctattagtttagggtatttccatgttaacttttagtaggaaagcttttggttaaaaacctaagtccccagttgtgatttagcatgtcacttacccgtgttatgaacaatgtgatttaggggcctgtaactcgccgagcagttgttccactcaagttggccggcacacataaatttggaaacaaggtaatattagtataatgttatgcatatgtatttacatgtttagcatacatgtngtttatgcctgttagagtacattgataacagtattaatatacatagagttgtactagatactaataaatgtatgtttggctaatatactaatcgatgctatcacatcaatatggctagagtatgactggcata

SEQ ID NO: 65541 - DNA, 575 bp, Cannabis sativa
tggcatttactttttatgccatatttagtggcatttactttttatgccatatttatcgtaaccttaataatttttcccatatttttaaaatattaaaatttacctattttaccatttctaatttatgaagttttttttttttaaaaaaaatgaatttatgaagtattaattgttaaagcacataagtttcaaaatacagaccctctcaacactatcatatccatgtcaatatcatgatcccaagaaacaaaagagaggttacatgatttatttttttggcttcaagttaaaatgatcgacgtgtatacaaaatttcagtggacttacatttcaatagaataagcaatgagagtaaatccaaatgtgaaaaataaattaaacataactaacaatggagattcatcttacatgcacacattcgaaccaaagttggtgacaattttaatagtatcaacgaaaagtaacgaaaacggttacagtacttgccgaagcacataagtctcctgtccatggaaagttctgagtcttcctcagattttatcagacattataaatagtagctcttcacctcaacc

SEQ ID NO: 65542 - DNA, 533 bp, Cannabis sativa
taattttaataatctaaaattgcatataaaaaaattaaaaataattttttttgcactaacctggtggctgcagctgatggtggtggaggtcggaggttaggctccgactgggtcgtgtcgtgggcctcatggctgcggctgatggtggtggtggtcggaggttgggctccggctgggtcatatcgtgggcctcgtggctgtggctaggaggagtgaaggggaagagggtgaggttgggtgtgggtttgggtttgggaaagagggtttttttttttttttttcaaagaaaaataaaaataaaaattgggggaagaagaagatgaaatggcttggggaaggggaagtgtaagactttaatgtgcacactattagagacgactattgaggcgatattgtcgcccctaataccttgaccgtgtcaggtggcagggcattaggggcgactttattcgctcctaatagtgtgagcggaaaaatttctgcctaaaagtaacggttactttcaacttacatgtcgcccctaataatttttt

SEQ ID NO: 65543 - DNA, 943 bp, Cannabis sativa
cttcccagactgatatgcccgactgaggctgcatttgtccctaggcttagtattcaggacaataacgtattagttcaagaaatcatccacacgttcaagcttaaaaaaggaaaagagggtttatttgccgttaaaattgatctctcgtgaaagcatatgatagactaagttggcagtttattgatcatgtgctctgaagctttaaggctcctgaaatgttttgtaattgggtcaggcaatgcatatccatgacctcatttcatgtatgcctgaatggatatcagattaataagcttatacccccgaaggcagttttaggcaaggagattctccatccccttatctgtccatatgggcggccgagattctatcgcatattcttaaaagggaactagacaatggaaccattaaaggaattaagttgagtaggaatgctccttagatttcccatctattcttcacgaatgatattattcttgtgggcagggccacgttggaggaggctacgggtatttggaggtgtctagaaaaattttgtgactggttgggacaacgtataaatacattgaaaacttctattttctttagcgagaatacgaacgaggggatgaaacgtaatatcaagaaagaacttggccttaacattggcactagaaatattaattatctagggctcccactgttttgtagtcgaaataaagatgcatactttaattttattcttgataacctaatctccaagctttatgagtggaagttgaaatcgctttctagagcaggtcgagctactctaatcaaatcaataggtcactccttacaattttacgcaatgcaaacaacaaagctacctaataggcttgcttctaaaattgatggtatggttagggatttttggtggagttgtaagcagggaaacaagggtatctacttaaaggcttgggat

SEQ ID NO: 65544 - DNA, 1154 bp, Cannabis sativa
tattttaagaatagatatgaattaatttaagataaatgagtgtaattcattgaatttggataaaaataattggatattagattttggtagaaggtgtcacttaataaatataaggtcttgattttcgagaccaatattcaaacacaataaatccatttaaagagagtagagagaccttggaagcccgattaacgtatttcgattctttattcatagtgcatatatgtttgattaattctacattttatacatgatcatatatatttcatatcatacatataaatgtctaataagaagtttaatagtaagtaatatacctcatgagtatacttcttaagtggaacagtgaaggctcgagctaacccaagatctgcaattttaagcatcattgtcttccgatccatgaggagattgtgaggcttaagatccctgcaaaggcaaatgtgagtacactcacgttttgaaaagagaataacgaaagagatggattttgacctgtgtaagatcccatgaccatggcaaaaggctacacctttgcaaagctggaacatcagagtctgcaaaagaacaagttcatttcaatttttttttactgaataatgaatgaaaccacaaaatacatcaaaacaataggaaaatgattattactttgacgatatcgagagggactttgtctgtagtttgacgaaaagaacgaatgaatttcttcagatcagtgtccatatactcaaaaaccaaatacagaactgtcttcccttccttattaaacccttgtttcacatccattaacctaattcaaatcaaacaactgaaaatcaaaaaccctaaatcttaaaaaaagaaattaaagaaagcaaagaaagagactttacctaacgatatgaggatccctggagagcattcgcaagatggagacctcacggagagtagtgggaggaacgccttcctcgtcctcatggagacgggttttcttgagagccacgatctttccagtaaccttatctcgagccttatacacctttccataggttccttctccaaccttctctagcttctcgaaagcatccatggccgatacagtggctgtggcttccagagtttccatcttcggattcttgggagggaatttttaccgttatcacaacgcaaaggtg

SEQ ID NO: 65545 - DNA, 1475 bp, Cannabis sativa
gttcttatattggaaatcatttcagaggtgtttaggtgatcaaaccaggtggattttgttgaggtttgaccacttgagcttggtattattgtcggttttaacagttagctactctcccaactaacttaactgtcatgacagttaagttaattatatgctatccgagtacctataaaagggatgcctctcacttgtgtatgaaaagagacagaaattcagagggtttagagagaaatagagagagtatttgagagttgtaaatggcctctcttgtgtttgtttgagagtgtcactagtgaggcacattgtaaggagcaagactccattgtgacaagggtttcatccctgttttgtaacctctatttagatcaataaaatttcatctccatagccaatttaaggctactttctcctgtggattaagctcatgatcaccttggttgtgtagcccaaccatgtaagtttttgttgttgttttgtgctttcattagttgttgttattgctggtttatgttatgatttatgctaatggtttgatgttcaattcatgttcttgataattgtgcattgttcttggtgttttgttggttcttgtttggagtttaagactccacaactacagtgtgaatttctacaattgaggaagttatacaatctggtgttgttccttgttttgttgaatttctaataagggaggactttccacaactgtaggtttgcaattttttgtaccaaatgttatttacttgctgaatgcgtcttatttttatcatttgtattttcctgcaatttgaagcagcttgggctctcacaaatatctcaaaggctgtaattgatcatggagctttccctatatctgtcaaacttcttggttatccaagtgatgatgtttgtgagcaggtattgaatttaagcatgtagtgtagctgcttcttattttctttttctgtgattgctcataatgttgtcaattatctattacattgcttttgcttacaaatgtgaaatggaatctcctagctctttttgctgaaccttgattttgactaaagtatttccaacataagtgcaaaagaaaatattgtaatatgttttcttaagtgttttagaaggtgattgtactctaattattcagatgatggaattataaggtgttaatgaaaaataagattcaagttctgttattagttgttagttacattacaaaattctgttagttgttattttttttttctttttgtaaaaagagtattgcgtactctataaatactttgtattttgttctgttgtaaatgaagcttttcatttttctgttttcatcttcgtctctctctctctctcactctcaaaattcatctatgaattttacatggtatcagattgccattgatccttctccttcaatggcgtccacttctactgatcctgccactcaagcttctaatggtcacactctgaccaatgatcctcctact

SEQ ID NO: 65546 - DNA, 998 bp, Cannabis sativa
tataataaacatttaaaaatctatgaagttttaacaatacaaaaataatcttgttaaagttttaatatcataacatatatattaatcaagttattatattgaattgtctccgtaatatatacatatattacatatatttattcttatataaaaaaaagaatcaaaattttattgtaaaaattagtaactagataatatatagtgcggtgcggtgcggtttgaattgcaattataaaattcaagactgaaaaccgcatcgcaccgcgggatttggaaaaaatacaaactgcaatgacactgcaaaggatttcaagctgcatttttatgtgatgtgtggtggtgcggacagtttgtgcggtgtgagcgatttgatgaacacccctttaacatacgaaaacatttgcccatcttttagtacatttaatatcatatatttatattttggttataataattaaaataattagcatttttgtccataaaattttgacactatctgatcatgccccctaaaatatacagcttgttaaaaatttctctaaaatataacagttacataattatgttccttttgttaggttccgtttcttttaccattaatgttggctgaggttttcagcaactgctaattatctttgaagtaattaatgagtgttaaagaagagaactttctacgtagttggggtattaatgaaccttagtccacgagccactgttattaatgagcatttttttcttacagagaattctgaaaagctctatttttatacatatttataggctcataattgtagtaacaggccacatgattgtatcaaccatgctttgtacaatttcctaaatttgatcataaagcgtgattgcctactttttataatgtgtttaggcttgctataggtgtttagtgagaccttacttatctattgcttgtgatttgatagctcattatgtagccatcaattgatgtatgaggtattatgaaatcaaaaaattatggg

SEQ ID NO: 65547 - DNA, 1498 bp, Cannabis sativa
  modified_base (1285)..(1293): a, c, t, g, unknown or other
aatttgtcttttgttagaagagttgtattgataaactcagtacttttgacaatacatatttactggagccaaatcctcatccttccaaagaaagtcataaaagagatagaaagtatttgtagaagtttcttatggacaggaaaaagtaatatgaatggttcgggtagcattgcttgggataatctttgcaaatctaagaaaactggtagaattgggattcatgcggtagcaaaacatgtttggacaattgctaataagaaagataatctctgggtgaagtggatgcatagtgtgtacatcgatcaagaaaattggtgggagtacaaggctcttgcccacacagcagctggtactggagcaaaatcatcaatgtcaaagaagcagtgaagctgatgttacctctagatcagtttactgcatcagacttcaaaagcacatatgtacaagatgttaaatcaagaacaaagagttttcatgttagcaagcaagttcggagcagattaaatgttccaaagcatagttttcttctttggatagcagtgcagaaccagttgaaaacaagagaaagacttctaaaaagcagattattgctgatgcttcctgtatactgtgtaataatgcagtagaaaactgcttacaagaattaaaaacatggctgcactggaagattaaactgaatcactgcagagcatattgagatggattgattgagcaaagttgagcaaattcaaggcaaactgctacacagcctgcatattgcttccttggtttacaagatttggcaatccaggaataaaatgttatggtcctaggagactacagaactgcaagcactcattcaagaagctaaatggctgataaagaatagaattacttgtgtaatgtccaaatgtatagatcaaaaagaattagaatagtttcaagaattataagagatttgtttttttttacagaaagttgtatagttgattgctccttgaagagccataggttgtaacataaaaagtttattgtgtaatcaaattcctgattcatcaaaaaaaaaaaattatataacaactccaattaataaataaaaaatgttacaaggcaccactcaaaatataataatatatattgcaagtagttaaattaattaaatatttgagtccacatgatttaattaaatataatgaaatattcattgctagctatttgcaatgtggtcctcactgagttgaaatgagttataggtaaacaaaattttttgagcccttactctaaagataaatgatatttttaaaannnnnnnnnaaaatatgtatattttttaaaagtatttttttatttgaatccctaaaataagtgggtcctaagcacaggcctagcccgcctatacttatagggccgacctgcgtgacaccattatgatgcataacaacaagaggaaattacacttagtatgagattttaaaagttcttatgataaatatggcacatttaagtttggccaatttat

SEQ ID NO: 65548 - DNA, 5565 bp, Cannabis sativa
ttcagggagcatttttaacgactttaaaagttcaagggcatgatttggtacatgtcaaagttcagggggcaaaatcctaattagccaaaaataaaaaccctaaaattaagtttatcttattttattttttataactattggggataccagtgtctaaagtacttgaattttaaatttgctaacacttaactataaaaattaaaattttgactgcaaaatttactgaaggcacgtttcgtttagctcttcacacttctatctaaaaatcttagttgagtgtcatattagactaccacgtatagacaaataattatattaggtggaccaatataaatgtaccacgtatatctaatggtaaacgtaagtagtctatgtcaacaagtttggagggttttacaattaaaagttgagattggaagattaagtgcaaataaaatgatagttgggagagtttaaaaaaatcaaattgaatcgatttaattattattcaataattgtattatattcatttgtagaaactttgaatgccttcagctgttgtattatattcatatgtagaaactttgtgctaaaccccttctggacaagacactaggcattcttgtagaaactttattattcgatttaattattattcagctgttgagttactgcacactaggcattataataatgacttcaacaatatccagtatttattaccagaaatatgttatgtcttttatttaataaaactaggagaatatgcagagattagcaatgtctattcatatagaatttaccacttaaaaaaataaataaaaaaataactggatttcactcactcactcactcaaccaaaccaaattaaaccaaaccaaaccaccaaactttgaatagaaactagaaaaaattccaggacatgggaagatcaccgacgtctttggcgagaatagcttggggatccagtaacatgtgtccctctaaagtttctgctgggtgagtccattggacccctgaatgaagcataagcagacttaacaggttctggcaccaactccataggaattgaatccgcaaagcatgctgtgttgattcgagtcctttcgagttctgactgaagcaactccgaagtatactgttgggcaagagcaattagatcatctggtgacacactcattccttgttgtctctcatcatctgcaagtgcatcttcactaccacgggtaggtctccgtcggtgatgccctggattctccaaagcctcacttgcactctctgttgctttctccaaaatcacaccttgtaaggacctcaaagactctcttgcatcagaagtaaaataagggttcaatatgttctccaaatattcaagctcgatcgagagctgacaaaaaccattcacgtcaaccaacctaagatgtgtctccttgttttcatggaaaagactgaggaaagtgtcaatcagaccttccacaagaatgcctagtgtcttgtccagaaggggtttagcaccagaaaaaacctcggcatgaacagctactaaagtgtgcagtaactcaacagctgcatcccgaacaccttttactgcaggtgcagcaccccactgaaccccagaatccaacaaatagttcgctgcagcagatctgatcaagttagccttagcaaaagtatatttctcaaggactttttcttcaaccccagaaaaagacattacaagatcttgtacgtcactctcctcttcgtccttttccctaccctgcagccagatgtgtttgtatttgttgtacaactcaaatgaaagttggtctttgcaatagccaatattacttaaaaccatcaagagcctttgatgtggatcctgtacactttctgggacatcagtcaatgacttgtcttcttctgattcattcgaatatccaatctccaaatgtgatacttctttgctttgtgagagctcattcccaatacgctccaaatgaccagcgaaatccaggtaacagttcaaaaatgcaagtctaacagattcttgggtatcttgaaactgagcaaacatgtcttcagattttgtggcttcattcctaagagactgatgaaccatcaaactgatctgatccattgctgaggccataacagaacggaaagccagaggcagataggatattgtgtaaggagatttgttcctctcaataattgatactggaacccatatttctttatttgaaatctcctcagtcgatacacgcatccatgagcaaagccttaaaatgtaaatctttgttatctctgattgaagcgtctgtagtgcagtaacagcaacaaggggagctgattccttcgcttcaaaagcttggcaagctttactaatatcctttatagcatcactcataaacgaacgaagaatatttgattcttcaagatcattaaatgtactatgtactttcgcctcataagcagaaatagtactgagaaaatcattccagcaacttcatcgagagggaatgcgttgaaaactttccatccccaattttatcatcaactttatttgcagaagtactagcaaattttccactgaaaacagaaagtgctattttccaaaaggctggaatatgatgaataagtacagcagttaatctacgaatataccttcctctgagtgcatcaacttcttcacatgccaattccaatggaaggtgattgtccaatgaactgttaacatctgtagattgatttaagccttgctgaatttgcttccattttgcattagataaggctttttccttcatctcattctgcaaaatttccaatctactctcatgatcaaaggtacacttatctagcaaaccacgaattctttggttctgtatatttaagtaatgccaaactgggtctgaatcaggttccagctccatcaacaatctcacagtattttcaaggtttgttaagtctatatttggatcttccatagacttatacaacatacctttgaattcatgcattactttctcaacctcttcaagaacacgtttgagtattccaacatgagatggcagagcaatcgatttcgccttcttgtattccctaactgctaaatcatattctcctttactaatgctcccacgaatagtacttggcaaattgaataatgtacgaaatctctgtaacattccctggactgacctgattttctcagcttgagcttgcctctcaaacaaaggctgaaaagcacgattagccaatgaactcactccagaaatacaattaaacaaatttgaagtacctgatccttctgggtcttcttcaatccgtctcaacttcgactcaatatcatcaattgtggttttgcacgagacaaaacaatcaaaattgtcttttactaattttttcttttgctgagtacgtcctttaagatcactcttcaaagcaagagcaccactttgtagctctgctgcactagtatcttggtgaatccgagatagaaacaactttgcatcaaatttctcagaacaatataacaacttcatacgaaggttttgatcttgactatctctttcctgcttagatggagaactttctgatgcctcagttatcaacctaagcgatttgttatcaattatacccaaaccaagtggatcaacacattccataccacgagggaaagattgtagagaattaaatcccttcttacccacaactgatgctttcttctcgaatttttgagcaactggagctgttcttgtctctcgcatttctctaacccttcgagaaatctcagcctcgtcaacgcgtttccaacgatcgggctcatctccatcccaaccgccatcgtcatccttcccagaaactctaccagccccaggacgagacctcgaacccacagcaccaggtcgagaattatctctgtcggtggattcatcatcaccacttgaaatactaagcatttcaacctcggaatcatcgtcgtcatcgtccaccacaactctcgcctttgctcctcttcctccgtcgggcttgggtacctgaggaacagagactttcttcggttgagtccgagcgttattggcggcaggtttgcggttgttggcggaggaaggtctccggtaattgagatctcgctgagattgctctttcagcgccatttgaagaagctcgtcctcgtccaattcattgtcactcgacattatctctcgtatacgtcgttaatggtggattaggttgttgaaaacccttcttccagagatctgaatacacaatttttctaaattgattagtaataagaaaaccacttcaataccaattgaaatctcaaccaaaatatcgtaattatttatggaaaatatcaatacaaaaaaaaacagtgcaaaattaattcttgacttgccatggaaactcaaaatctctagtaataataaataaaattgatcgatgaagaagtagttctttaaattctataaataattttcctcaaattccggtcaaatgtggagaaatgtcaagtatattgaaaaaatattatttttactaatatttgtttgattataaccttttagttgatttttatttctcaaatcatatttggaaaaaaaaatttaaaatttttttatagtggtattcgttatagttacaatattattcctataaatttttaaaaaaattaaattaatttacagtaccaaaaacagagttactaatattctactttaccacgcgtgttcaaaaaatttcaaaagtatttttggcactgtaaattatttgaaatttttaaaaattttacaggaattatgttgtaagcaaaacaaacacagtcgtgaaaaaaaaactgaaaaaaagtattctgatacatatattttcgggcgtgaaagttgactaagaggttgtaacaagagattgaaagtagcactcctcgtatttatttgagagttttattttcagctaaaaacttaaatacatattttttaaaaaaatttataatcgtgtaagttataattatttaagacattttacaatatagtattccatgttcaaaatatctatttcatacgcgtataaaataaaaaagtcacgcgtgcctctttgaaccctattttggaagtgttaaaattttttcaaatttttcaaaattttacaatcttaaataattataatgaccataaaaattttttagactggatttgtttctagatatcaaaaaagataagagtgtattggtgtactcatgcattgtagaattttcctatatctttaattatattagatattttttcttccatttatattcttaaaaaatatgcctattaaagaaaaataaattacatttcaaatattaatagaaaaaaaaattaaaaaataaaagtatataaaaatttatttgaaaaaaaattatacccaaattgtttaaaaatatataaaaataaaattaatataagtatttttttaatggaaattaatataagtattgaaactaatgtaagaaaaaaaatttaaaaaaaaaagtatgaaaattgatttttacaaattattttaagcttaacttttaaatattttggtgtgtacttatcaattttgtggcgttgcaagtagaactct

SEQ ID NO: 65549 - DNA, 659 bp, Cannabis sativa
cctcaacaactaagggatcattataagggtagctgacatgatacgagtcagagtctccaaatgtgattggatcacacttgtagtgttgagatttcggaggacgttctgcaacctctaatacttttgcttttggatcatgtctcaaaggcctcgcatatctttctaaggcctttcttgaattcccaactaggtgtggacctccaatcacaatctcaagcctgcctacaacaagagtaggctggaaaggtgcattacccccagctggagcttcgggtcgtacatacggctaaagagcagcatgcttttgtctgattaggaattatgtctcatctcacaactgattacactcatttttttcatgaccgtaattgttgtgatagcgacataatttattcatatctctcttctctgactctttgaagggaagatatttgtggcacgacaccgttgactaggtggccatatgttggaattttatgtcctaaatagaattcattttaatataattaaatttactaattaataaaagatcaaagatcattttatgtttcatgtgaagcttccatgattatatgtttaatgtataaattctattaaattaagaacatatagttattaatgattatagtgttgtcaacacagtggaatataatcatgat

SEQ ID NO: 65550 - DNA, 1586 bp, Cannabis sativa
aatttttaaataaaacttaataataactcattatagaggtgttataataaaattgattgtattttctactaggagtgagtaacagtcggttttttacacaaaaaaatctaaaattcgattttgtattttcatggttataatctaaaaatcaaactgaccattataaaaatatatataaaaaaaaaccgactttttaatccaagtttggccgatttaaactgaccaaatcgagcttcatcttttctttttttaaaacaagtctttaaatttgttataattatttagaaactaaaaaaactagagtattgttagagagtctcacattgctaatgtgtggaaaaataatgaaatatataagatgaatgggctactcctctcattgtcaattggttttgagatggaacctcattcaccttatctcaaattctaacatggtaccagagcaagagcaaaaacaaaaaacaaaaaacaaacaaaaaaaaacctctaacgactatcctatcccaaaaaaaaaaacgatcaaagtagagccaccaaaaatccaaaaataatttattcaagagccaaagtcaaaaaagtcacttgtgatttagagataatgagctaaaaaaagccaccaatctaaaaataccgatctgaaaagtaaaacaaaagagcacttgtgattagggatagtgagccaaaaaaaaagctacttatgatcaagttgtccaagatggtgagcaaataaaatagctaccatctagaaggggaatgttagagagtctcacattgctaatgtgtagaaagataatagaatatataagattaatgagctactcatcccatcgacaattgattttgagatggaactccattcagcttatctcaaattctaacaagtattgtatcaaatatcatacaatttaagaataaaaactttcttagttaaataaataatgtaaatatatattttttttaatttcttttaaattatttgtgatgctagtatgataatgagttatattaagaaactcgtattatgttataaatatgtttatataatacataaatacatcaaattataataaaataaaacaatagagaagtgagactttgaatgaaaaagataagacgtaagagtagtttaataaaattgtacatcaaatatgtacaaaaataattatattatatatgtatagtgtataacatatatgttcggttggttctcagtttaatcggtcggtttgttattgacactaaaaccgaccgtgcaaaggttgttttaaccagaggccattttttttggtttttcagctttttttgtgttagtttcttcagtgttcggacgattggtgtattcaatttttcgatttcttagattttttacgtagccttattttctacatttattcgtactagaaattatcttcaagttaattatattaaaaaaattatcaaaaattaaactcaaaattttatttgtactattttagaaaatacaaatctgttattttattatttaataaaataaatggtacaattactattttttgcaaaatactaggtattatgcattattaaagtacaaaaatagtttttcccga

SEQ ID NO: 65551 - DNA, 811 bp, Cannabis sativa
cataaaacccaacacatataacaacgtttaattttttatctaattaaaaaaatctctcattttcttattatatgggctgagattgttctattagataaaaataaattaagaaaataatttacagcaaaagaaaaaagataaaaaaaacttgagttgacttaaatattttgtatataaacatatttctaatatattataagaagagatatatttttttaattaagtagctaaattaagtatgtaaatttatatttttcttttattattcgttattagaataaaattaaatagcttaatatttttaaaatggaaaatttacatgtatgcacgttttttggtatttattatcagtattaacgtggctttattaattattaatattaccgtaccgttttctattattattattattgatttcgaatattgatttttttttaaagtttgttcggacctaagatagaatagggtgaatttaatagtttgtagtttgtatacttaatagttttttttttcacttttttaggattttatttatgtatgtttaaatgtatttttgatactgtatatcataggttttttttcttgtatattataaggttgtatactgtataatgtactataattgtttgcatctgatttattttatgattaatataattttgtttgctactaataaatacatgtcattttatatgatgtgattttgcaaaatctttcgtagatttatttttgaggggttttcaatattatacttaaaatttattttatttgtaaaaatacctttaagaaaagggaaaatggcggcaaaacc

SEQ ID NO: 65552 - DNA, 537 bp, Cannabis sativa
gaggagaataaagttgagaaataattaataatttctccactgatttcctcttcagtatgaaccattccaccattactagcttgaagctttttaattttatttactgcatttctagacttagctctggagtgaaaaaacttagtgtttgaatcgccactttggagccaatctactcgtgcacgttgatgccaatataactcttctttttcaagtaactcatcaagaactttatcagcatcttccaccagtttcaaatgagcagcagaattatcatgtatattattcaattgtgaagaattcttatgagcagcagcaatatccttccccatttgaccatattttttgccatgccaatcttgtaatgcacttgaacaggctgcaatattttgcagaacagtagccgtggcatgtgaatgagagtttgggcaccaaaaagcttgaataatatccctgcaatcagtatctttgagccacatttgctcaaaacgaaatctggaacgcctttgagttgtgtgaactggcagtgaaggttggcac

SEQ ID NO: 65553 - DNA, 2583 bp, Cannabis sativa
  modified_base (919)..(925): a, c, t, g, unknown or other
attttttctcgtattgagtttctacgtaaaattttagtgtgtcacttttatgcttgatttgtgtacttttatattgcttgtggtgctttagttaatatttaatattactttttttttttttgatatttgataagtatagagaaaaaatattgtgattaattacaaataatttcctcaacatgaaaaaattacattcttaaaactttattttttttggtagttttatcagttattataaatataaactgaagggagtttgcccttccgtatttttttcatttttattttatgttcttaataatttattccacttgtctattagtagtaattagtaatttttagttttatagcttaatttcatttaattatttatgtagttttgtttatcagttatccttatactttatattatgttaactacaaatgttagtgtgtttttttttcttttcttcttaaaggtttctttctggtggtggtttaagaaaagtgtgtagttggcatttagatgttatagactcaaatgtaattcatgcatacactataactcatatagcattaagaattttaaattaagatgtgtaacaactttttacacacttaatattaattggtgaaaatggtggaggttactcatagtaacaagtataactcccctaaatattataaaataataacaattaatattgtcatatgttacatattattaattagtttattacacatatttaatcttatatattatatttttataaataatataacaccaagattattgagaaaaaaaaattgtctattattcaaagcagaaatagctgttaggcaatttatttcagctatatgagcattaaatcctaaggaatctatgagttgtgaatttaaatttcaaatggtgatatcttaaacactatataaagaggtnnnnnnnctcatattgagatgagaagttttctatcaaaaaagtaatttgcaagaaaccctaaaaggcttgataattcctaaaattatttcctagagagtttccttagtgcttagagataggggaaataagtttttggacaaaggtatatatataatataccttgttcaagtcatatggtaattcccactaatctaccctcaagattgtgagtaagtatttatatatatattcttcttttgttatatatatatatgtattatattacatgtgttgtattcttcttcttctacttatatatttgcaatatataatagtgtatatatacgttgtaacatatatatataatcaatcttttattttagtctttatattattttacaatagacttgtaatattatataggttgtaacatatatatatataatcaaatacattatgatttttaatcaatgatatattcattgtgtttttttttaaaaaaaaaaataataaccatacaacaaacatccaattattactaattcactacgagaagaataagactagcgaatctcgtagccacgaaaaaaatatattgtattcctgcttaagaagtgagatatggacttatgatttacatgataaataatgtcaaaaatctatatttagtatattaacatgtttggattcaaacaaaaaattgtgttacttttcaacggccagcgcggttatatatacgcttatatataacacgtatacgtcgtacgtgttcactagatattacactagtgaatattcatgaagaaatgttgatgtaatgcagcatatcaaaagaagcaataatgttgatcatgaaactaattaatgggcttaatctctctctatatatagatagagatatgtattgttgcatattattcacgaccactaccctactttaatacgagtcacaagcaacacttaactaaacaccatactattatatatggataaacatatatagtgcgaagcgaaagatgatgatttgaacatttttgtcggggaagactgaattaacaatgcatgccatcgacacaattccactaaaagttattacgtatggaaagacaatcaatcccacatgtcaattttcaaatactcttgttattttttggttatccagctatgcatccataacaaacatctcaatatctagcttatcttagaaactttatagtggaaacattcattcacaaaattaatatagagaagtttctagaagatattgtcgtttttagaaatatatatatacacatacctaataaaattaggtacatgtgtgtgggagcatgaagatgcatcaaaccgtgggggattttactggggtagatcataactcataaggcatatttttgagttgtgaagacatgtgatcacgaataagaataggtgaaaatatagaggcacgcatgcatgagtctctcaatgcaaagccaacttttcaccattgttcttaaacactcatcacatcacaatcaatatttttgttttggcgatgattaatttgttcaatcataacggacactatttaactcaaatgtatatattagtaaattaataaataatctcttcgcctataatattattcatattttcttttgaaaataaatattatttttgtaattaatgggcatgttttaaatata

SEQ ID NO: 65554 - DNA, 665 bp, Cannabis sativa
atggcttcctcactaaaagaccaaattcctcactcgagatatccttctttttctaacatttttttaggcttacagcctctggaccctgctttcctttccctggatcccttttcaagttttcgcgactttgaacccattacatttcccccactacacttctcagaggtctgcagttgtccatgctttgagcaggctgcattaggcttggggacttacgccacttctcgagttgaggatgtgccacctttggcaatgtgccccttccctatttttcctcctgtattggcacatgtcgaggcggttaaggagaagcctgaggtgtcagaggggagctcaactcaaacgacggcggcttattatcccgagttgaggctactgctcagtctgagaattttgaagaggtccctatttttgtcgatgcttcaccttcgattttttgtatatctgcttcttcctttcctcaagaattacctcgggtagtttccgagattatacgccctccttcttcctccaaccgtcgagagtggcttgcaatgcggaggacatttcagcagagggaaagttattctgtatagggggcctattttgttttacatttatatgtatttttagcaatttgtaagttcgcgtcggtcctttggtatgggtattttggcaggccacta

SEQ ID NO: 65555 - DNA, 703 bp, Cannabis sativa
attgtttaagcctttttaaacagtgtaaactatttaatttttttaaaaaaatttacaagtggtcctaaatagttacaatatatctatcattaaaaaaaaggttagactaatatttttttttctaaatgccacaaaagataaagaatttaccaaaacaatcttttagaatccactatagaaattttcaataatatacactagttagtactattttaataaaatttaattacaaagtacattaattattaaaaagaaatataatgagaataaaatgtggatatgtgcattattattaattagatgttgaaaataaaaagttaaaaaaataaaaaataataaatatagatacacattaacatgtgttccttgtaataataataataataataataatagtacttatgtactaaaaaagggttatcaataattaagccacgtattgatgatctgtggggtggcctatatataccatccatttctcccattgttattcacaacactcatcttctacaaaaacaagtacgtataaatataattgcttattgatccttaaagagttggttaattgcatattattattaagatgaatctagctgggaaattggtggacacactaactgggggtctaaatggaaagaaaataaaaggaagggttgttttagcaaaaaaaaatgttttagagttcaatcctttggctgcttct

SEQ ID NO: 65556 - DNA, 873 bp, Cannabis sativa
aaaaaaagtattttgatatcctaacaaaaaaaattatattgtgatgtaaaattttttttaaaattattatacataccgcacgaagtgcggcttcgttaactagtctttaataaaagagtttttgaaaacaaaactattggacccgtacaaatgttgaagatgtgcttttggtgaataatttaaaaaactattgaaattttcaacaagaaaaacctaaaaatagaaaaaaaaaaaaatatcaatattatattaataaagattaataaaaatgtcaaaaaacaactcctaagttcgaatcttccactcctaatattatataaaaaaaacaatatatatttacggttgcaaccatgttgatggtaaattaaaagggtaaacaaactaataagtttgttggagtcgctctcttttgagtgtgtgtgtgtcgctctcttttgagtgtgtgtgtttgtcgtttgttgttcactggttttgtcttttggtgctgttggttacgtcatggcttctagtagcagaaacgatggggatttatctaagaaatgggctgatatgtgtctggacgaagaagaagatacagaggcaatcttcgatgaagaagatggtgatgaaacagaacccgatttggacgaccgctggtgcttgataggaaggctattgacaagcaaagtttcggacttccttgttttccaaaacataatggcagatctttggaagcctggaaaaggcatgtatgtgaagatactagagcagaaccgactccttttccaattttaccacgaaattgatattagaagagtgatcaatggcagcccatggacttatgacaggaaacaactaataactgaacgtctgaaaccaggtggtaatccaaag

SEQ ID NO: 65557 - DNA, 1573 bp, Cannabis sativa
cccgacacccgtgtggagcactttcgggttagatccgacccgaccatacgggtttttaatttttcaactttttttggcagcgtgtcggggcgggtggctggatttttcgggtttacggatctaaatgttcagccctactttacattgtggcgtgccaagatgagggctttgcttgttcaacagggtctacaagctgctcttctggtagaaagaaatctaccagagggattaactccaaaagagaagacaaacattcttcaaaaggctcatagttcttagagaagtgtcaaaagaagattcagcagctggagtatgattgaaaccagagagtttgtacatgacaaagtcactagctaacaggttatttttgaagcagaaattgtattctttaaagatgatatcagggaagagcattgaagatcatcttaatgattttaataaggtgatactcgatctagaaatatagggatcacaatcgaggatgatgatcaagcaatcatattactgaattctcttcccacgaagagttatgagcattttttggataccatgatgtatggtaaggattcactgatattagaggaagtttagaatgcattaatgtaaaaggaattgaagagaaagttagaatagcaagaagaaggtgttgggaatggattgttgatcaaaggtaaaactccaaagaaggatagtaaaggtcagaacaattcaaataaaggcaatcataatttaaagttcaagaagagatgctttgtatgtaataaaactactcatctaagaagagattgtcttgtcttgaagaactacaattctaagaaagatggtgatgctgatgtagtttcagatggagaaaatactgatggatacgacagtgctagtcttttcaaaatctccaagaatggatcagaagatgtttggataattgacttaggttgttcttttcatatctgtccagatagaagccagtttttgagttatgcaactgttaaaactggtactgtgaagcttagggataaccaatcttgtccagttcttggaattggtactgtcatgttgaaatctagatggaggaaaagttactgaattaaggcatgttcaacatgtaccagatatcaaaagaaatatgatctcagttactatgatggatcaagatgggtgatttattaaagttgaaatggtatgttgaaggtaataaagggatctatgacaatcatgactggagttagttggaatggtatctatatattgaatggaacttcagccaagaaccatgttaatgccaccactcagataacaacagatcaacaatgatttggcacagaaagcttggccatatcagccttggtgacatggatctatgtgagcaatgtgtgcttgggaaatcaacaaagatcaaatttggaattggaaagcacacctcaagcaacaaaatagactacattcactcagatttatagggaccttcaaggactttctcagaggtggagcaaggtactttctaactgttatagattattataccacatatgtgtggattcaaattttgaataataaaaatgatgcctttaacaag

SEQ ID NO: 65558 - DNA, 548 bp, Cannabis sativa
tattgcatgacaagacatcatttgagcttctccacaataaagctcctaattaccatcacttaagaaactttggttgtctagcttatgcttctcatattaaccatccaactaaattttctcctagagctcgagcttgcattttcttaggataccccgataacatgaaggcttacacactccttgatattcaaacaaactacatatttccctcaagggatgtaatcttctatgagtccatttatcctctcctcaaattttctaacaccaacaccagtcaaattgacaacttttttccccacattccactcagcatccacattcagatgccacatacaattcatcaacttctactgcaccattaaacacaactacaacaaatctcaatcctgctgcaccacactcaaacacccctattgcaacacactcacccgtatttactgaacaatcaacatcaacacccatccaattaaacctgcattcttgtaggattacatctgtcaaattcaccaacaaacctttagtatatcctatcctattaccaactacat

SEQ ID NO: 65559 - DNA, 1277 bp, Cannabis sativa
ttccaacctcaaggtgctctttttgctgtgataacgaagtttattgggttttgagtttgacctctcacaacccaacccacaataatattggtgtattattgtattggcacaactataatatatagtagtttggtgtatactatgattttaaatagtgcatttattagaatgatgataccaaatatcaatgaatgaataagtggcacgaattagtcatggataagaaaagtactatagtgtgttaagaaaaataacaaaatattatagtttttttatttcttctatgataaatagatgtttttaaaatataaataaaaagtaaattaattaagttgagtgttgccttaatattattttttatcatgaattatttattgcacgtgtcctgtgcttgaggaaaacagagattttgaatgtgggccatagacaaccgtctaaccaatcaaaggttttcacaatattataggctttatttacccaaaaaggtggattgggcccattctcgtcatctggtctcccatagtatattatattgggccacgtgttcgttagcaaagatatatagttttggtattggcccattgcctcactttctttcatttttataaaaaaaaaattgttccaaattttaaatatatatatgtatatgcatatgtatcatatgtactagaccatatccaatgaatcaagatctgttgaaaaatagtattcataatccattaaaccagtctaatataaaaagataatttaattttaacacatcaagatagaaaatataagtcactacaaattaacacaaaataaatatatttaagtggcacgtttaataatagtgtcgtattaatatttactttaattgtagcatatcacaatcatctttcacaattaataataataatttttggttataattatgtttacacgataacactaattaattgccataattttcataatttgatttcttttaaaaaaaatcatatttgccttaattattagtatcgtgttgtatgacttgataattattagtatcgtgttgtatgacttgttaattattagtatcatgcttatattaaaatattcaataggtttaacatgtgttgtgccgacacaaatacaaattgccaaccctaatttttgtcatatgaaaatttatttcaactaaaatttactttaagtcttaattttaatctttttataactacacacattgtccaaaatgatatatatctattatatataaagtgtgcctatataaccgaattcttgatttatga

SEQ ID NO: 65560 - DNA, 585 bp, Cannabis sativa
aaaaaaaaaaaaaagattattgtgtatttagtcttacaatattttatacctatatctacatctaacaaaagtttgtataatattgtgtattgtcataaaagttttttgaataatttattgtaacaaggaaatataattcatatatttattaagagtgtatttaaaagtaattgtgtaattattaggtagtgtaattattagagcactaattacacaatgtaataaaatacaatatgtatttgaataaacaatgataattatttatgaattcataatttcttgttttttttttttttgtaaaataattaacaattatacagaaaaataataatttttagtacataatatttaaaatgaaatttttttagtaattgcacactgtaatatttagattcaattctcatgggggcatgagaattagagagagtaattgaagcctctcaattatttctaattacacagttaaaatgtaattatgtagtcagacaaataaataaaactgtataattaacttcaatttatattcaattccaattcactcttgcctttccaaatgcacctactataatttttttttacttttag

SEQ ID NO: 65561 - DNA, 885 bp, Cannabis sativa
aagcacatttatggtgtgtttattgagattaagaaataagaataaggaatttgtttgattaacttatttattaaatgttgttgaattagttgttaataatttattagctttgaattagttgttaataatttattagctcataagaccaaagtaataaaagagagagagaaaacagagtaaggaaatgaattgtgtatattgatctaataaatctttataagagggtatagtagctaagtacaatgtcaatgaaaagagtataattaactctctaactaactcaaagatagttcacattaaactagtaaacctctaactaactaaagtctaatcctaacaaccttgataccaccctaaagatgggctatatatgtcctttaaacccatcttatgtttgaatatcttgaactagttaggaaattgaggcttagttaaaatgtcagctagttgttcttttgaggaaacgtgttaaaaaatacagaaaatatgcagggaaatgttttgctcagctcaattgcagctgagataggtcatttcaatttatagatggaaattcttgatacaggaatattctaggcctttacacgtataaaaatatatacaaatctgcagtacacagagtcctaacagaaatcgtacaacaatcattgctcaatgatgagctgtcctttaaaattgagtgcaaaaaaaagatctaaatgcacctagcctaatgatagaaatacacctgagattaattaattttcttcacatcttctctcaaacgaagtgggttctccaacacaccgagtttggtgacaagaaaatgaaattgagtgtgagaaagactcttggtaaggcagtcagcgatttgttcacttaagggaatgtatctaatctccaaag

SEQ ID NO: 65562 - DNA, 1680 bp, Cannabis sativa
agatctgactgttaatttggtaggtgacaattccagtgtgcagtgcacaaaggtatgaggagtactgtccaaatatcccctacgtgtcactcaaaggtctttccttttcgaatcatcccctcacatggctattggataatgggcaggcacgagggtgcgcatgcccttgtaaatatgacctgacatggcgggggggtgggggacaaaaactaacgtcgtacctgaaaagcattgtcatcactcctgtgatctgacaggtacgtgtggtggcctcccgcgacaccgtattcgaagaaaaatctgtcctaagcctttccactgtaaactaggagagcgccttggcttctataggcatttccttcccaaaagtgacaccttcccttttgctcggggtatgcacatgaatccttcatgtgctcctgccttgtggtgggagtaattttcacggaagcccttcatggaagctagaaccgtgggcactaattaactgcagattagcttgacttcttttgctgaattccacgagtcatgcttgcataaatttgtccccaagcttctggagcaccccgtgttccgagagctttgtaatgtttccctattttctcatgattggtccctaacacgtggcgtcacttgaaatcgaattatgtcacgtgagtggtcgtcagctgatacgtcactaatagtgaatatcattaatatggtaaaaaggcagtactataaatgcaacttctggcagtacgcgcgtgttcgatgcgtgtcttaggagacgttaatttggcagtaaggtgattgagcggagccctcatttaataagaaattttcacaagacataccataattgatgttaagcttttgggctgatacaaccttcccaattcaccatccatcaaatcctgagatgcaatcttggtgaatgatctgggccgtttgatttgcgtggaaggaacaccacttagcacgtactaaatattcaaagcatcctcattcccttttaagtttaaaattttcactctttgcaccagaggttttacatcttaacttaactcacttttttccaagcacaactctgttagtcaagtcagggttagctacgtaaccggacatgatgtactcgagccctcccaaacaacatccacatccatcactcagtaagtagtttgttgctcttgctctatatatacaacttcatgcttatcgtaaaaatattaagggttgacttaagtttatgtgtatcgtatgcgagtctctgtactctgtgaaagtcagtcttatttgaatgatctgttgctaaaagagaagcgtggtggtttggtaggacgaccgtgtattgaggggccatccatttgggaagaaagactacctaacgcttgatagattatttctactaaccccattattttgaattgacttactcaagcctacatccaccgtctttgcaggcacttcttggtctaacatgctgaactcaaggaagaaagttggtccttcaaacgccggtggcgacagcagtcctcgtgggaagaggaagatgcagggcactactctctacactggggccttcattgcatcatcatctactccatattcctgtgaggacagcccccgatgacataatcgaatatcactgcaaggccaatctcgtctgcgccatccatcttctcttccgaagataccctc

SEQ ID NO: 65563 - DNA, 821 bp, Cannabis sativa
  modified_base (517)..(517): a, c, t, g, unknown or other
aataaaaggttcttgccccttttttttcatttttagtgcccctataatacctaatcataatcatgaatatgttgaggaaataatgacatcaatccaatattataacatggagataaaggtaaatattaactaacttatgttgcatttaatatgatacttaacatagctatataaatataatgaggaaataagaacaccctctccaatacaatgtcatagagtttaaagtaaataacaaatctatcacatgaactttgaaatgagaagaaaaaacaatttaacacgcctaataaattaataatttaatactaatacattattttttttgtgtcaatgctaattctgacgacttttttgacgctagcagctactccgacgatttttccggcactgacaacaaacttcgaaaaaattatcggaattggcatagtcgttggaaaaattaccaagaaactggtttcttgatgaagaaaccagctacttgatgaataaattaatttcttgatgaagaaaccantttcttggtgatttttctggtgatttttttgacgacaatgtcaattttgatgatttttttgacattggcagcaactccgacgactttttcgataccgacagctactccagtgagtgacttttttggtaccaataaaaaactctaaaaaatttatcggaattgatattgtcaccgaagtttatcatttattgatatgagcaagatgatcaatgtatatatacaagcataagttaattataagctaaccaaaacaagaggacaaaaagctaacaaataacaaatataaataatagaaaataaccga

SEQ ID NO: 65564 - DNA, 917 bp, Cannabis sativa
gctccagctctaaattaaaatgagcaactaattaatgctaagatgactctgagagaatctttctttgatacaggagaaaaagtctccgtatagtcaatttctttttcttgagtgaattctttagcaacaagtcttgctttgtatctctctgtgttgcctaatgagtcttttttaattttatagacccatttacatatatttatatatgtatgtatgtgcattatagttcgataattaatatttaaatagaatagttttttaattttaaaaataataaattacttcaattttcaaattttattgaaatagtttttattttttaatttgttatgtcttattttttataatatgaattttaaattttagaatgataaattacacatagcatagttttgtaaagtattatttaatttatttattttttaaattttagattttattaatattcatttaatattattctttattaataaaaaattaaaaaaaaataattaatttattaagaaaaacttatacgccattttgtcttatcctacaccaaacataacatagtactaatataattcaatccagtccaatcaaattcacattaatagtctaattcaatccaatccatactaataatccaattcaatctaatttatactatgttggagttattatttgcatctcacattaagagaaataacatgttccatattctaaataaaaaaaaagacatcttccatattcttaatttaatttttgtaaaccaatggattacatctaggaataacatgttgcatattctgtaaaaaaaaaaaaagggggggaattagtaatgtgtcaggagaaattggtacaagaagctgtggatacccttcttgataatgaaatacgcggacaaccaatgcgagacggtcataataaggtttaca

SEQ ID NO: 65565 - DNA, 2570 bp, Cannabis sativa
ttttttttttttttttgaactttggataccctgcaggccccactgccaggtcccaggagacagcagagcattttttggtagtagctgaggttcaaaccttggaagtctgccctaactaaagaacccttgccagtacatcaactccctggggacaactaaaagagcctattcgaaaactagaataatgtaacatagacgctgtttcttgtaacacattctgaaataaaacacttcgtgagaaaaggcttcaactttcagtcaatttcaaaacaataataaatagaaagataacatggacatatttaaatcatttttttaaaaaaaaaaaaggctggccatagttcttatgaagaatgaaatggaaatgacaatataaagaacctacaatcctaacttaaagtaaacaaaagaaagtttgacgccaccatgcatgtgtgaaaaacaggtaatctgcaacgagcattaatgagggtacatatgcattttacaaacaaattgtaccttcggaaacacaagattaggtccactagttgagttgatcattagtacctccacaaccttgttaccattttcaacacagtttctatacctgaaaggaatacacctgccaaattgccaatgaacacaattgagactaacaagatttaaagtatatggatttgacgcaagatattcaatcaacgattgaaaatgccaatctaccttctgggttatataatacattaacaaataactaaacgataaaactgatatatgttaacacagtaactgttagacccaaatcacatgaatatctgcacatgttcgagttaatatatacgcatatcaatatatttgttgggttactcaactcagtgtacagctccaatgaagttgaattgaaaatttaaaaattggggaaaaggttaagaagtcaacacaaccaagtcaataggtttgaattttaggtacaaaatataatgatttccaaagttgacaaataacattaacctgaaaactgtacacgaatgctatcattcttcctaaacgggaaagctaagatcactaatacccttgcccaacctatcacggtatggaccattattaaatcttccgaaacaaataattaattacccaaaaacaagactccctcatcaaaagtcatatcattccataatatgaacacggcttatcactttcgtatccatataacttcaaatcatataatcctcatctacctctacaatcatgcacatttaccctccatccattgaacaatataatcacgcttaaacaacacaaagtagaaaaaagcaataacccatttgatgaaaacgattccaacacattccacgccaatgaacccctcatttccctatcccgtcctaatattaaattatagaaataataaatttaccaatttgcagtttcgaacaatcaattccaacaaaggagaaaaacaagaacacattttatgcacacatacccggcgatgagacggcaaccgtctttgtatcgctgcaattgacgaccagtacgagcgaccaactccgccatttggccctaaacgaaacaataacctctctcactctctcgtcaaatccgtacgtgttgatattatgatatttcaacaaacttgtaaatgaggggtaaaaggaagaagataaacagccatctgaaacatattccctctctctctcgctcgctcgtttatctctctctctctcgttctctctctctctctctcaatatattaatatataacagaaaggtcttattaatagaagtttctctctctaaatctaaaaatctgaaagagggaaaaaagaagagaaaagacgaatgggagtgagccctgaggaagggacctgccgcatttaagtagtttcaccgcaatttctcaattttcgcgcccatcaaccatgaaccaccgtacaccaacctagccggtacccggttttccactttttttttgcttaattttatatttgtaaaaggaaagaaaatgaggcctggaatgggaatcagtttgtttgggaaccccaagctttttttttttttttctctctctctttatttggtcagcattcgtggaccattagccagctcctctgctttggtcggttattttcgtatcttccatttccgtttcacacactttctccactttcatctttatctattctcttctcaaacttttgctaaatgttcaattttacatattaaagacaaatttggtcacaccttaatggataaagaagttagacaatttacttaaataaaatcaaaattatgaatgcttcaattgcaatgtctgttgcttgtggagtttgaactcaaattaacatgccatttgggtgtgtgttggatgtattgaaataggccacccgcattttacatctttattttttgttcatactatattatttataatacatctaattgatattaagtttttttattcatattttaaattcaatccgacctaggtgaaatttaatctaatttgcaataatgtatattgaattgatattttttattgattattttttaatattaaattatttaatatatatcaaaatatttttttt

SEQ ID NO: 65566 - DNA, 533 bp, Cannabis sativa
tatcaagtatgattgaggactaacttgtaatgtgtgggcatggactcaatcactaatggctgaattttgtttcgtgaagaaggctatatgatttcgaaattaaaaggaaaaggaagaagatgaagtctcataaacctagagagaaaactaggtttttagctttagaagcatttattggataaagagacaatagctttccttttatactaatttcacctagggttaaggttgatttatttggaataaaaaatgataaaaatggagcaaaaatacccttttgccattagtggggccaacactagttagatttttgccatttttctcaatcatttatctatatttcacaaatactacttttgcaatttcaaccctataaatacaaaaactatttatttaataattaaattaattatcaaataaaattatcatttataatatatattaattagactccaaaaagtctcttaattgataaactaaccttaaaatcctatttcttcacaatcaagtcataacatagtgaaaattcataa

SEQ ID NO: 65567 - DNA, 689 bp, Cannabis sativa
aacaagaagcagatcgagacccaggaacaggttcaggaccaggacttggacgcagacccaaaattttcaccgaaccaagacccaaactcagacacagacccaccctgggattgggtcccaaacttgaatccaaacctaaacttggactcaagaccagaagtaacacatgaacacagtcccaaacatggaacaggactggtgacccagaatcacgatcgagacctagaatggcaccccagtctttgtcccgaacctatatcgagaaccagaccgggacttgggacatgaaccgaaaccagattgggacccatcattgggatctagatcttgtcccgacattcaggaatcggggcttggacaaaacccgtagtaggtgtcttgatctgggactcgatcaaggacccgaagcaagaccaggaccttgacccaaacccaaacatgggacacaaaaccgaaagttgaaccagaacgtgaccatgaccctagaaaaggaccgagaccgtgaccaggaactgaacctggaccaacaccctgaactagaccataaccaagccccgaaatttgagttcaggcccagtcatggacctgatcccggacccaaacaaggactgagactcaaacccgaaaccaaacccaaactcatgactcgatcccagacccagaccaagcccctttataagactaggatt

SEQ ID NO: 65568 - DNA, 1005 bp, Cannabis sativa
  modified_base (455)..(458): a, c, t, g, unknown or other
cccccttttgatcttgtctgccactatttataattgcatagtagcagttaattacaaagctgaccaaaatatgtgtacacccattatccctaaaatcgtgggatctgattacaaatcaagccaaataaatgaggtttttatacagttgtgaatgtgctacttttattggaccgagatgaacacgtaataaaaaatatacggtaagccttatctcatagggatgcctcgccaagaatggagccaagatcactttgatagagggcagttgcttgtcatttggcttctcgagactaatattgttttaactctaataattatactttctgttgtcgagatgatcttccttgcatgcataccgtcttctagcgagataagcaccttgttgtctgttatcttgactcgccacactatccatactcagtttgtatatcgtataatatacgctaagtattttnnnngttgtcgttttctctttcacgcagcgacgttgatgcctcgtcatgaccgtgtacactcacatggtttctcgtcaatacataagttagcagttcgtacgtttctgtctcgcagaaggctatccagccaaccgtgttataaacataccctgcgaattaaatttccaatgagttgttccatgctaagtatacttttcgtttgcgtgtttgagttctttgttcttctccgctcgacacgtgtcttcctctaatgtgcttactgattacaaagagctttttaatgattacaaagggtatttctatcatgttcctctttttttgaaaagatgtatttcctctgattttggcggttgtgctatttcgaggtacatcgaaattaaatgaccatctttcccactttcgcttcgaatcgtgtccattggatcaaatctttctctgatttaacaaaaacattatcacagatgtaaaataacaaaaaaggaagcacctttgcaccatttcagaaagtttgagaaaaacccttaaacttcttcgtcaaggatcaccatta

SEQ ID NO: 65569 - DNA, 4410 bp, Cannabis sativa
agggaggtagttatcataaatacttatggtagtcagaacccaggaaattgggtgataataaaatcaaacattaaatataagcagcatattttaagtgaagacaacaaaattatattagaaaaccattcttttgtaccttaaatttaagtacaaaaatcaagcttatgataaataatttaccactctccatatataatgaattgtcccagaactaaataatgaattgtgtcggcagttttgaagtcgctgtgataaataatttaccactctccatatataatctttttgcaactgcccaactagacgaatgaagagaaacttgcaagtaccaggagagagttgaaattttgcaaacagctaacttcatagtaatgagtccctactgcttttggagtttatgacacttaaaccccaaagccatgttcttcttctcctgtcattcctcttcttgtttttaattgatatttattagttactgtggaagaaaaagaaaggctaacgtacagagataacaccccacccctggatgttctaaaaatgattggatactgatttaatctgtttcatgtattttgatcataatgatgacataattagtatgtcagaacataaatagtttcacttaaaacatgtacaatttcactgtttaaatttgtcaaataatgtaaggcgattattcgttcaattactcggcaatcagtaagcataccttagctattttcagagatgtttcttttccccaccggagaaatagaagctttggtgcttcaacatctaacttttgctcaacttgctatgtgcctatggctcataacctagtagaatttgtacttaaagatgattggttccaggtataaacaatttccatttatactattgagtttgaggtacctttttagccaagttcttcagctgccacagaagtaaggggtcaatgaatgtgttatgcaacaacacgttgactgaaaaaaatgaaagatgtaccttggcagcaagagatctaatcactccttttgcaactttggttttctcagcttcctcctgagctgtcactgttgcatctctcagctgccttgatgtccttttcagttctgcttctaaattttcagatttgcaggtaaggtcttctacctacatatcaaattcccattggaactagctatagttaattacagcataaatctccatttcctgccatggaatcacacatggccctcaaaccgccaaactttttaaacaacagaaaatcgtaatacaagacattctaatgtgatggaaagatcatccatcaattttctattattattgagatcaaacataaaccaagtgaaagcggtatgcccactaaaagtacctatagtaacgtttagtttgatcaatatagatagaacgagatcaagtaatgtactttatatttattctattattttcatgcattttcctgtcactttgcatggtcttcatagcagtgtgacataatttgcaaggaacttttgtaacataacaagacttacctgtgcccttaatatatttatttcctgagagatactctcttctttttggtttgagacatcaatagtgctttctgaatgatcatgactagtaagggttgaagtaattgactctaaataagctggacttgatcttcttgaagcaagagctttttctcgaagaaccaatctcggtctaggaataaaaggagagcgtgcctttggtttttcaaatgttgtgactgattcactgctgaaacattcatttgaaatgggactgaaagttcctttgttggtctgtgggctaagagccagtttagatgagtcaaaagaagcagggcgccgatgaaaaggtccatggtttggagttcctttctcagaaacagcactaatattccgagacagacttctgcttgaatttgacccaaattcagtgaccctcattaatttggtaaagcaatcatcacagacatgataaggtttcatagtattaggagccaaagcggcttttacagacttgttactgctgcatgctttacagaacacaaggccacaattgtagcagtgatgtcgctttcttctaaagccaaatggattgcggcaacctgaacatatggaatggtcagcaccagacatccactcatgaagacagatgacagccgtaaaattggagccgcataccactttctttacttgtttatcttttaaagctttaacaagtgtaggattcttcttgtcttctttgtctccatggcctagttgaccatttcttcccattccccaagtgtaaacctctgctttagagctcaaaactgcaacatgatgagaaccacaagctatctcttcgatgcatctgtttttgatattaccttctaccttaataggaaccttgtaagcactctcatgaatacaagattgcccaaaatcagcacttcccattgtataaacttgtcctgaggtagttagagcgatggttatgacatgaccacaagccacttgacagaagtttgctttatctaacacagttacacgagatggagagagtctatgtattttatcaccatgcccaagttggcctttatccccatctccccaagtaaacagtttcccagaaacgttactattacaaccagaagaagttccagtagaaacttcaaccaccgcagcagtgtgccaaacaccacaagatgtcctcacagttcgcagtcctttcaaagtttctacttccctagggacggctgtgctgtgacgatcaccatgtccaagggcaccaaaagttccatcaccaaatgtaaacaactgacctgctgacgtaacaaaagctgtatgccaaggtccagaagagataaatgacacttgagcagagtcctggccaatgagtttttttggtatccaatgactggtttcatttccatgcccgagaataccaaaatcacgagcaccatctccccaagtgtataaatctcctgaaactgttacagcacaggtgtgaagttccccacaagctactagctcaatctttgatccaccaagaccatcaatgagctttggatgagaaacatcttcctctactccatgtccaagtttgccacctgaaccctcaccccaactaaacagctgcttctgcttggtaattaacatggcgtgctgtctcccacaagcaatatcataaggatcaagcacagcagtagattccagagtctttggaagcaaagcatccattctgaccgccgtagtaccgattctgtggatgccaccacccaacagcccatcaccaattccttcaccccaaatgtaaacatcattgaagttatcaatgtcttcataaaaggatcccttgctggatgaactaaaggcactggattcactacttcgaaaagtatcagtagctgaagtgctactttgtgtatcatctaacccatcaggcgataacaagctgatatgttttgcaaatgactcagctctgttgtatcccttccctgatgcagtgcatgagaagacctcggcaaatgcctttcccaaactattctgagaagaattctcatacggaaccaaaattggttgactgccttctacatcctgtcgtaaaaatctatgagatagaaaatggtgatcagaaatcaaagataaaatatcttcaatgatatcatcacaaagaaaaccttgtcacttatatcatttctactgcatgacaggtctgatgttgattttctttgtgtagggatacatgggccatctattgttccactttcgcttcttgtttcactacaccaatgtctgttatcccgagaaatcaaggccctcagagcagcaagccagacttcagcttcatccttgtccttgcatatctgcccagttcaacaaattttcagaagtcttccatcaaatttaaggaataacttacgattgaaaacattgacacttcaactggacataaatatcttaagaaattaattggattactgtcaaagagtattgataagaaaaattgctggatacagaaggaaaaacgagcacacattcgccattttttcttgattatgacaaaagttctaattcaagacggctattaatatatgaagtcaacaagccaaccgtcaaattcagcaaaatagttaaaccatatcttcaggattgttatggagattagatatgatcaaaatgggaattcaacaatccattatcaatttatcatcaacgatagaagaacctttgaggagccaatgagctattctgaatacaagttaaaaggaaaatataataacactggcataaagcagctcaaacacttatattgtgtcatccaggaatcaaatggtttaagacataatatcaattgaaaacaaagaatattcataatcagtaaacctgtttattacaatcagtaagtacaatgctgaaagcatggtgagaagagtaa

SEQ ID NO: 65570 - DNA, 622 bp, Cannabis sativa
cacagcagccaggtataggcttggctagcctaggccaactcttatacttgggaatggtcgaacatggtatacagggtctaattgatcttcaccatacactctcccaaggtatggccagtcaacctttatctcttcagaatctgcagcctccccaaggagggttagcgtaacgccctaatccataggaacgtcacgtgtgtgattttataaaactagtttaatactaatatattaattaatcattaaaaattgtgagggtaataaaaacttgactaaaataaaacactaaaaatagacattataacggctgtaaaaaggagttctagggatccctattataaaatatttatccaaaagacgatatacaacaacaatttaaaatacagcagacacaactagtcaaaaacaactcttggaaactcaacacgcaggcaagtggggtcagtatgtacattactggagaagaccgtcatctcatggctgctctaactttgtattgcccttacctgcaccacaaagcaccggtgagtcacatagactcagcaagaaaagtgataaagaatgatacattaaatagctaattatacatttcattatcacaaaatgattaaactataacatt

SEQ ID NO: 65571 - DNA, 884 bp, Cannabis sativa
  modified_base (69)..(70): a, c, t, g, unknown or other
ttaccaaaatctataagaaaaaaatcaatgaagaaaattttaacaaaaaaaatgaacgaagaaaaaaanngtcataaacattattgaataatgacagttggcaacacaagaatttcagcacaaaaatatattactatttcttagccactaagaaaactctaacgttagggcattcagttaatctcgagtatctcaaaataatccagtaattcttaaattaacatgtctcactaatctcataaaattgctaactaaactcgttgtgatatttttggcctcttatcgagtctcaaagattgttaaacttgaaaatatttttattacacaaacatttcacatcatatccacatattctaaataaatctatgtaactaataaatatgcttattaattcacttatggaaaaaatcataattgatcaccttgaattggattagtaggatcataatcccgcttattactctctaattaactcatatataataaaccctaatgattcataattagatttttagaatattacaatctggctccgctaattctaagatattcaaacgtatttaagtgactctaatagtcaaatcaccgcattctacttttaccgggcataaaatatgaaaaatataaaatttcttatgtgacatatacaatacaaataaaattcaaatatatctccataattgagtaattattattctaaggcctatttctgaacacacccttaattttttactaaaaagtatataatcacaaattaataattaaatccttaattatttgctatttcccatataattaaactatgcggtcattacatatatatacaaaaatatacaatgccacatcctcatatacatacacatacacataataaatatacatat

SEQ ID NO: 65572 - DNA, 823 bp, Cannabis sativa
tgattgcgtatacttgcgtagtgatcataattttcgtaacaccaacactcttaaacctttgactctgatattacttgttgggtcccgctcttaccttatcgggtcgtcacctcaccttgattctcatattagtatgatattgtccgctttagggcctaaaccctcacagttttatttttagagacctacccaaaagattttgtactataatgaagtaggtggaacatttatattcactacaaaaaaaatcatacttttagtcacacaaaatttgtgactaataaagataaaaaattgtggctaatttaattatcaatattgtgttgtgactaaaaggtccatggctaaaagtattagtcataaaaattacaatttgttatgactaaatgtgtttatagtcacaatatttattgtgactaaaactaaattagtgataacttgtaactaaatactatgttttagccgcaaataattttttgttgtgactaaagtcacatttagtcacaaaaatatataatgctgtgactaaaagactgtcactaaaagtaatagttttttgtaatgatttaaaataactcttgctccaatgtgaaacttgggttgatactccaataaagatttttttttttttgacaaatttacatatatatattttttgcttaccaaaaagataataatgtcaaaatatgcacgtcttcaacgatttatttgaagctggattttaataaggaataattacatatgacactattttttgtagtatatttacatttttacgttcaaataatgtttttttttacatttttacggttttccaaaaaat

SEQ ID NO: 65573 - DNA, 979 bp, Cannabis sativa
gagagagagagagagaaattttaattaaagggcaatttggctatcttggaaattataggtatcatttggtacaaattagtttagggtataaattttgatatggagtattttattaagtattgatagttaaattttccttatttatattaatgtataattttttaaaatttagtgtgataatgtatgtataattaaaaaattaatatattaaataataatgtgtgagatcttgtagtatttttgaagagtactatattattgagcgatttcagaagtaaaaatgccaaaaataatataaaaaaatattatatttttaaatgatataaatttatgttttaaagatgctatgctcttgtagcaatttccaatagaaaatggccaccaggcaaaaataaaaaggaaagctaaagattccggcatattctttcagcgagaaaacttttattcgaattaaacaatttgatttttcaacaatcaatacttgttttttttttgttttttttttttttaaaaaaaatgtttaatttcactctttttatatcaattattattaatattattgttattattttaatttcacgtgcgtgccgaatcagctcatgaatcatgcgggctcaaccgtcgtggatcattctggatggactcgatttttcaaccagcgttggaggttgtaaatggacaagcgcattgtaatacagtagaacccggaacaccagatcacaaagcgaggttccagaaagacgcaataagcacaagccacgtgtaccctaacaaagataaatcaacggcgtcagatctaatctaatctatgggagatggtttgtcttgcttttgtcgcctatatatatacgtgggtagttgatagttcgaagtagtcaggttctatatttccttcttccattgattccatttctcctaattatgtaagtattttcttttcattttgcatttggtatttagtttcttctatttttttttt

SEQ ID NO: 65574 - DNA, 1163 bp, Cannabis sativa
tattttttttagtggattgctaaatatacttttattctctacttaagtctagtacatattttacattaatttaagggtataataagtacattatctataaaataggtatatttgaaagaatatgaaaatgaagataaaaattaaaataaataaagtaaaatgtgtgtacaatataattttctcaagtatttttgggtttttatttaaaaaaaaattaatatttttcaaaatcaataaaaaaaatgtattttagaaaaaaaaaaatttttttttgggccattgagctaggtgtgccttgggcattagatctagtccccttataggaaattaggctctatatctttttaatattgtcctcttttatttttatcttttttttttaagtctaccattttattttattttatttttttttaaatactttaccaattttgtctttgttacttcaatatattctctatgtgacttttttatgtcaatatattttgagtacagtacatatataaaaggaaaagtatattttaattaaatattaattaaaagtaaatttagttaattgaaaaataaaaaagatatttttcggcggcctaaccacaagtaatatgattaaaatttagaaaatttcatacactacaaccaatcacatatttagaaataatttcacttacaaaatttaaatttttgttttgaaaacacatttttaaaaaacacaatttttaaatcacaaaccaatcaaaccctaaaagatagatgactattataatcctataaatacatagttataaacattcacagagtaaattgtatactaatcctttagttgtggttgcatactagatggtgatgactgcgtattgattggtggtagtgctgaagacgcttctgtctcacattatcttgaactatccagaaaactttaattaattaatgattttccacaccatttttcttcaacttgttcacttcctctttattaataaacctgaaaatgttaacaaactaaaacgtaaaattacacaaaacaaaaataaaactaattaacaacactttgaaaacacactcaaaagtaggggtgggcatccgatccaatccaacctttttttccttatccgatccaatccaattagtaattggatttggaaaatcatcatccgatccaatcc

SEQ ID NO: 65575 - DNA, 886 bp, Cannabis sativa
gtataaaatatcgtgtattattttaatttctgcaatatatttctgatctatcaagttcggaatctgatagaatagattttaatttgattcaaataattttataccaattttgcattaattaaattctttgctaatttcacttggtaatcatgaaaacaaaatttcaattgtttgctaacaccacaaacatgtcaacctggcactgggcccaacgcccaagttgacatattgtcaacctgttctattttcaatcaagttctcaaaaaagtattctagacatttttttccatcatcagaaataataaagattcaaacaaactcggggagaaaactatatacttgaggctctgtaagcaaaacccattgcccaagttgacaatcaacctggtgcgctggtttcaatcacttaaatgtcaaatctgatttgaccattgaatctagaatagtcaaaaatagggtaggagacctcattctcaagttcaagaaccttggaagtatcaaaacgacaaccggccgggagctcaaaaatggggtacctagcactcaggttgataaatggcctagtgtgctgggttttgcttatccgattctgattttgtttcgactgtccgtttagtttttcacaataactaagattcataaagtcagagaagtcaaatttacaactttgcatttctcatttctaacatgggaaactcactcggaaatgaagagtttcgagtctcccatttttgtagaacaacaacatctccgagaacttatgaccaggtttgctaaaacacaaaaacagactaagtaatgttaaaatatcacttatgcatcttaaagtacattccttggacatttgttcacttactgagcatccatgttgacatcatatgtcaac

SEQ ID NO: 65576 - DNA, 660 bp, Cannabis sativa
aatgtaattacattcaaaaaatctggtcttccccgttcaaggaatttgagctggtttgggtcttgccttggttggtgtctcaagctttgatcaacaaaccagtgggtggcaaatgaagggttataatctggaggactgcaatattggctatgatttgggcaatatggattgaaataaatagcagaatattcgaagcaattgaaagttcagcaaggttcctttaggagaaaatcagcttttggacagcatcatgggtctatagaaccaaacattttgtgaatttatcattcctagacttgtgtagggagtggagaacgctgatatgttaggctctaatgctagatttcttattttcctcattttgaattgtaatatttatatttaccaaggtattccttataatctattttctcaataaaatttattggaatgaaatgttttgctacaagatctcttgcgttgaactatacaatcatattgttttgtgggtttttactttttgggcattgggcaatattttcttttgttgcctattttttctctttactgtagaaatgaatgctcagctgagtttatgatatcaattatttctctactgtttttggtattgagaaactagtaaatcttaaacattatgtatcaacaatgtatagagaaatt

SEQ ID NO: 65577 - DNA, 595 bp, Cannabis sativa
aaaattaaaagacctcgttaaatcaaaaattatatatattacataactacattttatatatagatagaatagatgttaaaatgtataaaatgtagacctccttttattgcacatgcacttgtcttcaaatttgaattatatatttcttcctaaacatataaaatgtagagctccaacttgttagatatttatatatataatattagataatagatctctttgccggctagctctagaaataatagtgaaattaagttaattatcctatatgctaaaaactgactaataataaaggttgttttggtattgtaatatatttttctagaattaaattatattatattatattatattatatattatatttttatataatattatattaaattttaatttatattaaaatattatttatttattaaatgcttataaaaatttatacgtaattttataaaaatcttccttaaaagatagtctaacataatactatgcaatataatattgtttagtagcatatatatatgtactaaacaaatcctaaaatcaataaagcttaattttatttagcttttgatatacgatcattttgaccata

SEQ ID NO: 65578 - DNA, 759 bp, Cannabis sativa
gccttcgttcagcacgtaaattttcattcaggttgaccaacacacttgaatcaagaaacgagaaaagactagcatagaatgtatatgtatatgtgtatgtgtattatatgcatgttgtttatatgattcatatgctatcaacactagtatggtagcggtactaagtgcattgatacaacatatgatgtttaaggatacaatccagtgttaccaacacaagtatagttttgtcctatatatatgagtgcattcttaatgggattatccatgaatgagaattatttagagaatttgaatttttatgcttagtttttctacataattaaaaaatatctcatttttatattatatgagctgagtttgttccatcggttgaaaaaaaaagttattcagcaaaaaataaataaataaaaaaggttgagtttaatttttatatagtgtaaagagatatatttttatatatattttttaattaagtagttaaattaaatataaaaaattcaaaattttcttttattatttgttattcgatcaaaatttaatgttttattatatttataattaatatttatagtgaaattattttagtaaccatcaatgaatattctgtttgataaatactttcatttataaattcacaaaaatgaaagtagattttttgtgttattcaaaattgtgtttcataactgtttctattttttttattttaaaaataaaaacgaaaacatgttttgaaaatttccttttttatgttattat

SEQ ID NO: 65579 - DNA, 1005 bp, Cannabis sativa
gacattgatcttctctattgcctcttggtccattataatgattctggacccaagtatttcttttctcccatttgatcccagtgaataggagatttacactttctgtcatacaacatttcatagggattcatccttatagtactctgatagctatttctatatgaaaattctattagtggtaaatatctattccaggagccttcaaaatccattacacaaactcgtaacatatctttcaatattggattattctctcgaactaaccatctgtttgggatgaaaagctatactaaacttcagcttcgtacccatggcttgctcgagacttgcccaaaacttggaagtaaactttggatccctatccgaaataatagacttcggagccccatgcaaccttactatttccttcacatataattctgcatattgatccactgtgtacgttatttttaccggtagaaagtgtgctcacttggtaaatcgatccataactactcttatggaatcaaatatacctgtagttctaagtaatccaaccacgaaatccatactactttccaaacattatcccttgttcattttgtataatattttttgtaaatgaaatttaataattttactgtatgagtttatataaaatatattatgtgtgaattaaagtgaaaacaaaaacaaaacttattgtttgaaattatataaagatttgcattaatatacttaaacatgttggaaaagttttaggtgagagcagctttcgtccctataataaaggtatttcttttattctgtaaatagagaaatcgtaaactatttttttaaatgaagttgtacattatatttatagtaggtatcatgttcgttctcaaaaaattccaagtaatttaaaatgtcaaaaatataattcaaatagttaattgtacatgtgcatattttttttaattattggtacctcaaacgagaacccaggaacaaaataacaaagaaaaacacgacgtctaaaagtga

SEQ ID NO: 65580 - DNA, 706 bp, Cannabis sativa
ttttttgaaaatttacaagtaattaatcctaaataattataatatacacgatcataaaaaaaatatactaaaaaaatttcatgaatattgaaataaataagttgtctatcgaaacaaccctttaggaattgtactgtctagtacaccccctaaaggtgtgttttgtagaccccctatatgcttcaacattcagaattttttctagtctaattttttttcatcataatcgtgtacattgtacatataattagaatcacatttaaatttttaaaaaattctgaatagtttacagtgctaaaagtaaaattcaaataattacttacttcgcgtttatactaactcagtaaaaaaattacaaatatatatattccctacgcaacactccaccaaataatattagaagagtactaattacaacttgttagaacttccacgtctgaaatcacatgttgaaatatttttaaaaaaaaaaattataatgacattctttatagttataatatcatctctgtaaatttttaaaaaattctaaataatttacaatatcgaaaagagagttcttgatattctagttcatcactcatattaaaaaaaaatcaaatattatttcgttattgtaaactattcgaaaattttcaaaaatatacagaaaagatgttgtatctataacgaacatcgccgtgaaaaaaaaattatttaaaaaaaa

SEQ ID NO: 65581 - DNA, 1183 bp, Cannabis sativa
  modified_base (36)..(53): a, c, t, g, unknown or other
caccttctcgacatgttacgttgcgattggctagcnnnnnnnnnnnnnnnnnnttatattaaactatgtgggacccgatacttagttagaccaacagcaatactgacacataagagagtgctaagcaccactgataccctttaacatttttcaatatttttgtatttattgtaaagtttattgtttattagacttttttctaacacgtgtcatttggcacgtgcccccatatatatgtacatgcagggtgaatcttatacaagtcgattaaataagttggagaaagatgtgaaaaggatgctaattggagtggaaaactctttagcccaacttgaactaattgatacaatacaaagacttggaatatcttatcgttttgaaaatgaaatcatttctattttgaaagaaaaattcaccaataataataacaaccctaatcctattaattatgatttatatgctactgctctccaatttaggcttctacgccaatatggatttgaagtacctcaaggtatgtatattatagatacatataaacaattaattattattattaattaaaatatctattttatataaaatgtggttatgcaacgaaatttttgatttaactgtattttttaattttctatattaactttaacagatcgagaatatgccaattatctagaatatctctaaattacttaatataatattctttattaattttctaatattattatatgtatttaaaaataaaattatataaatattttataaaaattatgtagatattatatctaaaaaaaattaattttattgtatatttttacattatacaagataaaaaaaactttgggttgttccaccaactgaaaaaaattagaaaaaattgttcggtaaaataaagataatttttttaattagtttgacttaaataatttttatataaatatatttttgatataatgtaaaaaattaaatattttgtgatattttatttaattaaatagataaactaagtataaaaatttaaatttctcttttattattcgtaattgaattcaaatttaatggtttaatattgagaagtgttccatatatatatatatgttaaatatataatttgtattatgttattattgcagaaattttcaataattttaaaaatcacaagacaggagagttcaaggcaaat

SEQ ID NO: 65582 - DNA, 519 bp, Cannabis sativa
acatgtcatctttggtcttttttcggacaccggtggatcatagccatacaaagcttgcctattgaagacacatccagtaccgacgtacaccggtccttggatcccatcaagacctttcatgttaatctacaatgaaggaaaaacccagacaatgagctaaatttgataaaaacacaatattcaatcacacaaacacttaatttattaatatcacttacatcaaagaacaccgtgtttctattggcatatctatcatgacgatcaataccatcaaatctttgaggaaactgaacataacagagcttcttccccaattgaggatccattagaaaacacatagcttccctgacggccttgctgttgttaaggtagtgatcacaatccagattcaacatgaacggtgcatttgtaagcacagcagaaactctcacctattaatcaaaacaaccaaccatgcattataatcccaactcataaaatcaatcttatctcttgtttttccctttaaaagcttcattt

SEQ ID NO: 65583 - DNA, 726 bp, Cannabis sativa
gatcattttgctatggtcttccaaagctctttggaccttaatgctaaaccggcccataaaaaatccaggccctttcttaaagggggagagtctttcaaatgctctgagttgtgggtcgagtaatgctccacttgttggacctagaataggaaagaaaagaagaatagatgacttagtggatggcccgtatgcttggatggatgggcttcggattaatgatatctcaaaggcaagtggtacaaaaaaaatcttattttattcttccactgagatagagaatacaactctactaaaggcgattatttcttatatggaggttgtggaagtagtgtttggagtagattcgcaagtctcaaagggaaaactaaagagcaatcttttgggtgactcgaggtttaccaagaatgcaaactagcttgtagatggagggaagagcaagaaggattttctcatggccgaggaggtgagtttacacatgccacccaaatctccatgttaatcctatcttggaactaccgggggcttggaaaacctgaggcagttaactctctccgaagtttgattcggagtcccaatccagatgtaatttttctaatggaaactaagaaaagtttgctagacacagagggtatttggcaacgttcgggtttcattaatggtgttgctatttcttcggtaggtttttctggtggtttggctctgttctagagacgaggttgggatatt

SEQ ID NO: 65584 - DNA, 4680 bp, Cannabis sativa
  modified_base (2187)..(2196): a, c, t, g, unknown or other
  modified_base (2444)..(2447): a, c, t, g, unknown or other
  modified_base (2474)..(2477): a, c, t, g, unknown or other
  modified_base (4461)..(4487): a, c, t, g, unknown or other
aacttaatctaaaattaatactaaaaataacctaacagtttatctcatcaactcatcctgccttatatagacaaacagttgattctcttttctcaatcgaggatcgaagatatgatgctgaaattgtctacgatttgctcaataatcgtgatgctactttgatacttggtatccccctatcacctaatgccgatgctgatttttggtcttggtcgggagaacgctcaggcactttctctgttaaaagtgcctacagtactcttttgcaaaatggtaaacccaagcatgcgagagctgataactctggtttctggcacaaactgtggcattcaaaaatcctcctaaggttaagaattttctgtggcgtgctacttctgaatgccttccaacttatctccaactggtgtcaaaagatgtgagaaactctacttgccgggtatgtaataccaaacctgaagctactgttcatgctctactaaactgccatcttgcttgcattgttggtcaacattggagattactttgaatatggcagtataccatcctctttcggcagttggttggaagaaatgacaccaaaatagtgcaataatttaactttggaggatttggcaagttgaccttttattgcacaaagcatagcagctcaaggagcaaaaattcatggacagaaaatcaaaaaaaccaaagcaatttaagaatctactatttttgagctttcaaaaaaaaaaagtattatttaagaatttaactcaaaatggaatatacattatcgagaatggtaaatttgttaccagttttattacaaaatgttcacatgagatttttctctttttttttttcttttcacttagaattctcttcctgtaaattgtttaagccagtcaagtttttcttaataaaactaatattaaagaatcataattatctcaataagttaaatgaacaataatacctcttagttgatgtaggatgaaagataaaaccaagtgcaaatatcgaagctgtaagaaaatggatattactacaaaatgcatacactataaaaatagtaaagtttttctttcttttgtctcttttgactaaaaaaacttatttcttaatagattaatttttaactacttggctcgagaacaacaagttcattatcataatcatacattattattatttcaatagctatcttaggctgtgctatgatgtcggtacgaccatatcattgaaaaagattatgcacaatacaaatctttattacggttttctttacatatcattaaattggtacactacacaactggtttttcgtctttttctgtgaaaatattctcagtcaaataaatcaaaggttgttaattcatttcatacatatattttgttattgagatggcatatataatattgtatacgaatattaataatcataatcaactatctatgctccaaagtggcttttacgttccaagtttcccatcctgtgaataatgatattgtgggtctcccttaacaatgcaatcattatatctttatgtacctttaaaagtgtgtttgtaatactttaggcagacaatttttatgagtcgtcggtgggttcacctttcaaacctgtggctgtaagttgtaacaaaataacaataaatgttatcgttttgttaaaattgtaaaatttactgtaattgcatgtggtaaaaaaaacttgaattttaataatgagatctataattcttgagcaatgagcactaatacctaggtaccatcaaaatggatgactcatagcatagggacagaagccaaaaggaaaaatgggatttgttgtttgttgaaaaacatgtcatgattgagatttatgtggttaattaaaatttatttaacatatttttgggtagtttagtagttgttgacatgaggtcaatttgagagttatccaacaaaattattatataaacacttaacactaataccaaatctctcgctgaataaagaaaataagactcattttaaaaaataaataaataaagtgtcaattttatcttttcaatatttttattcttatcaattatcattatataaataataaaaaatcaacaatttaataaaaatataacataaaaatatatcaaaatagcgtatttttttgtaaataaaatcataaaaaattaaaattatgtacaactgtatttttataatttnnnnnnnnnntttgtgtatttgtaaaataattccgaaaaaatctcaaaagaaaaagaaactaagaagcctttcgagctgagggggctatagctccgtgccggccaaccaaccctaaagacagccgtgcttacatatatcatctgtaatgtttaagctatttaatttaataaagctgtattttggtacgtacatggaaaaaaaaacaatagaactttcaaacacatagcaaagcaaaaattcttttcttttcttttctnnnnaaaaattcttttcttttcttttctttnnnntttaaaaaaaaaagacatataaatatgaaattttatgtatacaatgaaattaattggatgggtggagtgcacatggaaatggaatgatgtataataatccaatgagaggaagaaaaattccatttacacagtcaaacatctcaatgctgtattatataatatatataggtaaaaaagtccaaattaagtttagagattttcttatctctccatataatttatgcatttgtttgtgtccatatacatatctaattagataagtcaattagatcaatcaaaaccaaacaatttggtttatgtcttaatcgtgtagttaatagatgttgtgtatgatggttgacatttcggcatgtctttcaagtttagtccatttatgtttttatggaaacgacaaagattttgttgagcctactacgtccctctctcttctagtgtcaaatttgtgaattgacttaacattattttaatgatctaataattcgaaatcctcaacttaattaacccactaaataacaatacttataagagaatctcctatgatatgatgtatatcattatacttattcaaatgatacacttgatctacactaaattacacaccattaataatattgacaatatatactacataaaatatttttatttaatattaaattattaaaattattgcatcaaaagtaaacaattctattagtaaaaaaaaatatactaaaatagtataacttttacagatagtcttataagtgttaatattagaactagtcaacccaactaattagatattcaatcgtaatcggttcagaatggatattatttcttaatattcaagtggattgaatcggatgttggataggggtgttcaaaaattctatacatccaacatcaaataaaattaattagtatttttatttaatttggatgagtaattagattttatgttattataaataaagtatatatataaatatatgcatatattaaaatgaacattaaatttttttttttagattgaatggattcaatccaatctaatacatattggatttgaaatattagatgaatccgattcaatctgatccaaaaaaatactaggttaaaaatattagataaacctaaattaaaaccaaattatatacatgaaatacatccaatgaatagaaacgatcaaattcaacatttaatagatgtttgatcgattggatgacttgaattaattggatcggatcggatgacaaaatttaacatctaatatataattagatcgaatccaaatagacttaaaaatattaaatatggtccaatgaatacctataatcataatagagtaattttttttattcatctattgaatgagttacctaaaaaagaatatttactatttgacatgtatccttacatatatccttatatcggtgttcactacaattatatgttcatttcagtgaatttttggcttcataactgaaaaactgtttttaatttttaaaaacagaaaacagtttttaaaaactaataggggttgtttggcaaaaattttcaaaaactttttttttttgtttaacatgttatattttatatttttgttcacatactcggatcctagacccgaacccgaatgggttcaaattatggtatggtgttgaaatattgattatttttagtaagaaaaaaattaaaaatagttttaaaaaacttgtgtcaaacaccattaaatttttaaaatgacaaaagactgttttctattctcacttttaaaaactgaaaactgaaaacacaaccaaacaagctcttaacattgttgaaaataagataatttttttgaacaaatgtaataaattgtagttacaaaaactgtattttcagtataacgagcgatatcataaaaaagtatttaaaaaataataatcttattttaagatgtgaaagttgagaaaaatgttgaagtgtgcctacctcgacctattaagagttagtcccacattgnnnnnnnnnnnnnnnnnnnnnnnnnnnataagatgaatgggctactcctcatattgccaattggttttgagatggaacccattcatcttatctccaaattctaacatggtatcagagtcacttgtgatccgttatgtgtcatcagtccaaaaaagccgtttgtgatccattgtgagccaaagtgttgccggtccaaatttcaaaatccacaaatttcccg

SEQ ID NO: 65585 - DNA, 901 bp, Cannabis sativa
agtttttcatttattagactcggtcaataccattttagatgatatgttttgtaaaagttactaattgaattttctgttttgttaaatgataaattagatcgtatatttactaaaatagtattaaatagtactctaaactgatattttttttttgtaaaataaaatttaataataattaatgtagaattattatgacaaaacttgttacgttttttacatttgtttatattaaaaaaaatatccaaaattgagcttaaaatcctagttttattattttaaaaaatacataatctattttatcatttaacaaaaaaaaagtcaaatataactttacgacatccaaattactattatcccttaatgccatcctaaaagaaattaataattatttattatcctttattctttagaataataagcaataatagaaagtatgaatatggagcaatttgttgctcataggtaggggtcaatatacaaaaactaaaagcattaatttgtttaaaatcaataaataattaagcagatatgatatttatttatttatttatttttgctgaaaaatatcacatttaattattgctttcaatttttcccaaaggccatgtagaagtcacacacaccaagcaaaagacaaaaagataaaatgggagattttaatatttttaggtcattgaaggaaaactgggaatttaaaatatcaattaagtagtaggcatataattatatttacacctaaaaattgtttatttatgaatcaaaatattaaaaaaaaaacttatattaatttataactctttctattattttatgttaatttagtaacttttattttattttttcatatttttttaacaacgtatatttattttaataagagttcatatatttttttgtttta

SEQ ID NO: 65586 - DNA, 861 bp, Cannabis sativa
ccttcgatttttgaatatacctgactacaaccgttcccgccttgtctctcctcccctttccgccacacttcccctgttctttgccgtcttcctccttctccactggtgttatccgttgtgcagccctgttctgatatggatccattttcggattctttacattccacactttccctcacagatgaagaacgacatattatctcccttcccactgttaccgaacctaatgcccttctcaaaaacccattctccctgattgccagagttatctcctctagaccaatctacaaacctggttttttcgaacagatgccgggtcattgggcaggccgttatcccgtggtcatcactgagttccaatctgatatgttccatatctctttcggctgtgagggagatagaagaagagtacttcataaggagccttggcactttcagaatcacttgattgttctgcacataccagatgctcgactaaatgtctcaaaggaaaatttaatatacactccattttgggttcagatatatcgactgccctttctcagtaaaaccactgcccttgctgaagcccttggtaacacaattggtgaattcattgaagttttcgaggattccacaaacgaaggttggggcccttttcttcgtgttcggatcaaaatttgtgttactaaacctctactccgtggacaaatgatccgattaccatctatcaaagacgagttttggattgactaccggtatgaacgactacctgaattttgttttgaatgtggcattcttggacatccttatgagcagtgtgttgcgtttatggaaaggatggataacggtaatgatgatgatctcccatatggtccttgg

SEQ ID NO: 65587 - DNA, 1372 bp, Cannabis sativa
  modified_base (181)..(191): a, c, t, g, unknown or other
cgaggcatttattggtcagagcattaactagaaaaaaatcaaagggacgcttggtcagagtcacatcgaatcatgaatagatgcagtcgacacgtgtcacccattcaaatgttaagtcagctcggatgaagtctctacgcaacttcggaagtcctacatagacttggggggcaaatgttannnnnnnnnnngcactctgacgtggcatcacatgctggtgacacgtggatccaattcttcataactccccaaaagagatgttccgaacagaacaccgcatatacctgcatggacgcagtcctcctagccgagcagtggacaattcgagcagcatatcaacacttagcaattccagaattagcattgtgaagcacaatagtaatccttataaatcagggatcgtatcacacagatatggcaagctgtccaaatcccacaatctgtgtatcctaaatatgtaatctatatattcttaccaattatagacatcgtaagcaaaagggaaaccttccctcaagcatgtagccctataaatagtgatccattctcactggtacggggtcgaaagaattacttgagaaagatctaagagagcatactcagagattttattgtaagagctttaagagagggaacgttgtgttctttgttcttaaatcaatacaaatcaaggggagtagactattaccgaactatttggagccgaacctctttaaaaccatgtgttctttatttatctttttgtattgtacctgaattatatcacttatcgcttacaattaagactcattgtcgttggttaaaagcgagatcaacaaaagccttacatttttttaagaaaaaaattattctgccatttttgtaatttaaaactctaattaaatttatttttgtcaaaacattttcaacatgacaaaactaacctttagaattatgaaagtattaattatatataaaaaaactttttaacataaataaaactaaattaagaataacaatattctgcacatgtggtctccaatgccaatactatattggaaataattaattagtagttctctataataattatgagaaatgtaaaagtattaagcattataagaggtgacatattactattagtgcaatttaatataaatctcataaattttaatttaataaataatataaataattcctaagcaattataaagtactaaatcattgttgttaggcaccttaagctttaaaataacaaagctagtatattcttccaacaaactcaagataattgtttcatctatcgcttacttttacttttacttaggtaaaatcgttcgaactattgtatggttaatttgtgagttaattatgtgttagaactaatttctta

SEQ ID NO: 65588 - DNA, 653 bp, Cannabis sativa
  modified_base (544)..(557): a, c, t, g, unknown or other
ttctatgcttaatttaactacttatttaaaaaaaatatctatttttacactataccaaaaatattttataaacacataaataatatatagaaatggggttcacataggttgcacaaatttcacaaaaatgaaaaactaaaaatattttaagtaaaaagatatcacaaaaatgacagcaattaatgaattcaaatttatatatatatataaatatatacatatatatatttaagaataattagcattttcgcccctaaactttcggccctacttagattttccccctaaaatatacgacttgttaaaaatttcccctaaaatataacagttacataattatacctcttctgtaaggttctgtttcttttacccataaaaattagtattttcacctcctgaactttgaccaatacaaaattttaccccattttattaataaaattaattttataaattaaaatatttaatattttttaaaagcaattataatattttattaattctggaaaaataattaagattattaaaaaattagataaaaatnnnnnnnnnnnnnnaaaatattaattttacttaaaaagctgaaattatttctataaaatattttcaaactttattttatttataattacttatcttaaaaaattaaacta

SEQ ID NO: 65589 - DNA, 837 bp, Cannabis sativa
caatttgaattcatgtttcatctttcttttcgtcttagatctgcacttgaagcatagtttgattttccgaccaacaagttagttgacgagttctcgccatcaatagtttggcgtcgtctgttgaaacaacaagcttaagccaagtcgtttctttataacacacacaatcaatacaaaatgcgtagatgatctcgctgccttcaggttgtggagatttgccttgatgatgattagttgatcgcttcggggcaagaccttcctccacacgtcattagagaagaagacgctaattgtcatagacctcaagtaagaagagaaaatgtgaacgttatccggcctcaagtaggaggagagggggcaagcaggtgaggatctcaagcaaggcaagtagacaatcgttgtgaagagattgcagtggacgagcagtgcaacagagttaccgcctttgacacgaccaaaggtgaaggtggggcacaatggaagaaggtctcatcatcacgaaggcaccctccacggccaccaccaacactatgagattccagtacctcgcgacatcgccccagcaaggaagagaaccaattttgtgagcctaaaatcccaaactcaccattgtgaagatgaactaaatgatctttgctagaaaaactaaagactggaaactacggtggctaacatgcaaaaattgacaaagaagattttgagattggttaataactagtctcggcggtcaagagacatcgactgtgagagtcggtggaggaatgactgaatcaatgcatatggtccagggcttgttaatctcaaggatcaatgttgcaagtcttggggtatatccat

SEQ ID NO: 65590 - DNA, 907 bp, Cannabis sativa
cttttttactatacctaactaaaactctactttattttaatttaaaattttacatatatcataccttaacttctctttgctctacattatttacagttaaaattacatcaactacagatttttttaaaaaaaaaattacttaaataagataattttaagtttgatcacattatatggtattttttaatttttaaacttttatatgatttatactctgtcatattttttatatatttatttcaaaaaccatatttattaaaaaaaaaacctaaattaaaaggagagtctccttctctgttcagctcaaccctagccgccaccctccaactacggctccagccaaagctccaccatcgtctacacatttctctctctttctcttagtactcaacaacaaatatatataagctcacattaaaaattttaatccaacattataataataaagttttcttctagaaaatgtgcatcaaattttacaattataaattagagtacaatgttaaaattgatgtaaatatatcacaaacttattattattatttttttgtcaaatataattaatacaaactttatatttcttattggagattagtttgctttcatgttgatttgatgaggtttttaaaaaaaaatatataattgaaaaatataaaataaaatatcttactatccatttttaccctttacaacaacatataattacattgatactaatgaagtgtaaagtgtaacataatgagatatgtatacatctttaaaaagtcaatctcatattattaggagggtatgatattttgacaattctttaacaggtacataattcatatagtaataactaatatgttagtagagaagcaaaatttaatattttatcttttactaactcatttacattttaaccact

SEQ ID NO: 65591 - DNA, 988 bp, Cannabis sativa
ttttctaatttatatttttaaaaatatacctatcaaacaaaatgaaattatattttaaatattatgtaaaaaaattatataaaattttcttaaaagaaaaaaagaaaaatatagacataatttagaaaaaaaaatataaacataaattcatataagtattagaattataaaataatgtgaagaattttttttaaaaaatacaataagaataatttttaaaaattatttaagtttacttttttaataatagggtatacttataattaatctcctattttttgacaaaaaaaaaaaaaatatggcttaaacataaatttgtacaaaaataagagaaaacaaaactcataaatacaaaattttggaaaagcgaataggcatcaaataagaatttataataaatttcatatttttgtaaacatttttctttttaaaaaaaagctgtcaattatgtaatttctaccaaaaaaaatatttggttgtaagaaatgatgtaagaattactaatttatgaaattaaagcaatttcaaattttatatttagctttcctaaacaattagtacaatttttttttttacttttagtcacaaacaaaacttgtgactaaaaaaaaaaattgtgactaattataaatcattatttttatgttatgactaaaaagtctgtgactaagtattaatcacaaaaattttaaattattgtgactaaatgtgcttttagttacaatacttgttgtgactacaagtaaattagtggcaacttgtatctaaacattatgttttagtcacaaataactttttattgtgattaaaagtcacatttagttataaagaattatatttttactaaaaatttatcactaaaagtaactattttctgtaatgaatattgtattatagacatgccaagtctacaacggttaaaacttgtcaactttttaggtaatattaggagtttttacatttcatactaacatttttaactttttta

SEQ ID NO: 65592 - DNA, 3290 bp, Cannabis sativa
  modified_base (376)..(377): a, c, t, g, unknown or other
tcaataaaaggatggaataagtgcgaacccataatcgttgttgatggaactttccttaaatcaacatatggaaggacattgctctctgcttgtacacaagatgaaaatgggcacattttcccctatctttttctattgtggattcagaaaacaacaactcatggcaatagttttttacaaaattaagggaaacatatggggtcagagaagaacaatgcttgatctcagacagacatgagagcataattaaggcagctgctcatgtatttcaaaaaataatgcatggctactgtgtataccacctattaagtaaccttcaagaagaatgcaggaaaacttgataaactattctttgcagcagcaaaagcatacacanngaggaaatttgaataccatatgagcgagcttgatagcttgaacaatcgtgttagaccctatttacaacatgttggataccacaaatggtcaaggtaccacagcaaacacaacaagtatacaactatgacttctaacattgttgaatctctaaactcagcaaacttagcagctagataactaccaatcacaacactaatggagtcattgagagctttgatacaacaatggacatacaaaaacaagaaaaaagcacagaaaaccacaataattttgacacctacagtaaagaagaagttaatcaacaactttatggactcgttaacggaaaatgcaagatcacataaaacttcaagttgcataacattttcgttataaattatttttggttttataacattcaatacattgactatcttcacctaatatgcaggtgaaaccaataaacgagagcatgtttgaagtggtacaactaacaaggtcatgggtagtcaatctaaaagaaaagacatgcaattgcaatagattccaactagacaaactaccacatgttcatgctcttgctgtgatgaaagagatgaacttgaatgtttataattactattcacagtattacacaaccaaaacatggcttgaaacatatagcgagttaatatattttgtacacaatcccacaacatgggatgtaccacaaaacataaaagatatcattgttctgccacgaaaccagaaaatgagatccagaagaccaagggaaaagagatttatagctgattgggatacaaaaaatagaataggtgcagcaaatatggacaacaaggtcacaactgaaagacatgccacaaccaagcaattaactagatacaacacatttatttgaattatttaaatttctatgtgaactcttacatcatgaaaagttagtttgatagattgctattactttcttgattgaaatagctttttcaaggttgcagaacagttgctagacagttgagatccttgctaaaaatatattacaattagatttctactaaattggtttttaagagttagatattagtttttttaaagttgtatgcctgagcaagtatactaaaaatgttcttgataagttcataacacatttggtgttaacatgaaaaagaattaacatactagaatgattaatttaaaattgcataacagttgctaatcagttgagatacatgttaaaaatatattgacaaatagattgctactaaattggattcttaagagatggataatttaaaagttgtatgcctaagcaaatatactaaaaatgttcattataagttcataatacattttgctattaagatgaaaaagaatgaacatactagaatgattaatttcaaattgcataatagttgctaagcaattgccataatattaaacgtattaagtatttaaatacagaaaagaccaacaattgtctgaaaagaaaagattacaataagtcatacagaacttaaactagagcataaaaagagaaaaaaatagcgtccattaaaaagtataatcatttaagatataaaaatcaaacaacgagcataaaacagttccccatcaaatgaccttacttcttccctttagaagccttcgaagacttgttctgcttcccatcctcactgtcaatatttttgttgttttccatttgaccataggaaaacaagagggcagcaagatgagtacggtaaacttcaatgtcaaagtcatttgggacatatttcccatggatgaagaacttcacaaaagcaccaacaaattcgctgcaatcactgctcaacgaaaataaaaaaaaaaacaacagttaagtaactattatgcaatataaaaacaacacaataacaataacttacttttctgctgaactggaaggctagcaatctccacaactcttagtggagtttttaggtcagaacccaaatcagaaacattggacctattcttgtaaaacccaagaagataaaaaaataatgggagcaaaacagaataagtcttcattgcattccttactgcagcattcattttggcagtccttaaggaattataaagaaatataattctctcattcaaatccagacggccaaaaatccaatggctcttttttctaagatttacaataaatgaaatatggttggcttcataccaagacatagaacaaggaattcgcaagtctttgatataatgggctattgggtgagcagcatgaatgtgagacatctttgtttttaatgacttagccttgtagaatttatggtataaagacttgatagaatcatcaaaaagacaatctgttgtagcaaaattctcagtaacaacagaagaaaacttttcttttttctaaggtaatagaaaatagtattcatgtgctgaaataacacaataaaaaatagtaaaatgtgaacacacattctaagatcataataacaaatgcaaaactaaaaaataatcaacaagcaactatattaaaactacaaattttacaaatggatttaaatatattaccgagtcattgataaacatgtggcagtaagacaaatgataaaaccaagttttatcttcaacacacctaatttgaaacctgaagaaaacttcttggcatcatcctcataaacattaaaggccctatataaaatacaaatgaatataaaaaaaatgaattaaaataattggcaaaataaaatcaaatacatacaaaatagataaaataggttaaagaaaaatatcacctaggatatttaagcaatcctttgctaatctattcgtcaaactttgcctcaagttcaggagaaacgggaacaaacaaagaatcatcaagagcataaaggccattgacattagtaacgatcttgaaatcttgctcatttcctgcagattgagaacctgaa

SEQ ID NO: 65593 - DNA, 547 bp, Cannabis sativa
tagacgagtagttggacaaaacttcgggcaacgatgctctcctctaaaaatccaatcaaagtaacttgggtttcctgggtcttcaaatcttcgatttccattttcttttaaaccacaacaaataggatattggcagagcttcccgtgtctacgagcatttgcttcatacgtacgtgggccacatctaaggtgataatcagggtatcgtcgtgagggtgttccaattcagaatcctccccttggctgaacaatatttgcacatcgggtccctcattatcaatcactgtcattgttttgacagagtggatccggcgagaatgagctaatgaggctcgaattgaattctcgcttaggtccaatccctcagatatcacattcacagttttcttaatgtacgtcggggaagattgatcctgattcttatcatgcccctattgaacatgcaatgccgaatccacagtcaaacaatcctgaaaaaaatccttctttaactaacctgttgactttaatcttcaattgtctacactcgtaggtcgcatggccatgt

SEQ ID NO: 65594 - DNA, 1274 bp, Cannabis sativa
  modified_base (1232)..(1245): a, c, t, g, unknown or other
tctttaaggcaaactctaaaaacatcgaaccctacttgaaatcgcagtgtgtctctctcctcacacatccatgatttatccataacaaaaattctaacaaaaacatttcagtatttagtaactaattataactaattactacttacataatgtaactaaggacgtttctcacaattaattcatattaatttatatattactataattcttgttttagtttagttcatgttattaagttgtataagttgtaactaactagggtagtgtttagttgattggaatggatccaagaatggaatgacttttcctaaagtgaatccattcatttgtttagtttgtcatttataattgtaaagtttacataaatgtgtatagaattatttgtgttatatcgcctaatttgttacaactagctagtaattaactagttatttgtgttatgtacttttccttcaatatttatatttttttagtaaaatttatcctaatcctactaaaatttcgatagtataacggctgtgattggacgttcccaaatttttaaaaaattcctaaaataacaaacaaaacaaataaaataatacagaataaacaaaataacattaacaatacaaaatttatccacccattcgaccgcagtacatgtattcgtagaacttactttcactatggttgaatatttaagatatttaaactcaactaacatgcatattattacacccatccgacaacagtacaatatatcacagaacctacttcactacggatgaatatctaagatatttaaactccactaagcatgcattgataattaattataataacaaaaagttagtgaatctatatacctatagcaacttaaaatctgatcaacaccaaattctttcgaacctcaaaaattagctcacaacctacaatacaatgaaagacaataaaattaaaattttaattatttaattacttactagttataaaaaaaaaaaaaaagtaacaagttagtagttactaaattatatagattaatttttgaaaaaaatcacatatacatacatatataataaattatatctcacacttacacaatttaaactttatttcttaactaatgaaatatctcctatctcattctcattcacattaaatatatatacatacatatatattacttagaatatatactgttggagaatattgtcccacatggattaaatgtgaaagtattgagccatatnnnnnnnnnnnnnntactccactcattgccaattggttttgag

SEQ ID NO: 65595 - DNA, 1195 bp, Cannabis sativa
cacaaggtctggtttcctaatattgtaattgagacatgataagcaaccttagtagaagagtgttgtacatactacatatatataacttgggtttattatgggattattcatgtaaagccactagccacattgagttgtttagaagttgggatttgggaatgggaagtacagaatcttattgtggagccttattttcttaccttttgttagcaaatcttttgatctcagtgtcagtagtatgtgttggtccctcatcaaaggaaagccaaggaatgatttatatattatgaaaaggaaaaaagaaaaaagaaaaaaagagaatgtgtttatatttcttctctttctctatctccaatttctattatttattattatcattattattttaactaatcttcctttcaaaaaaaaaaaaaactagtcttataacgtagaattagatttaagtatggtgatggtgaaaatgacactaattattaaataatattaaataatatagaaaagaatatataatgtgaaatgactattgctctgtttgattctctcaattgggtcaattttgttcagcttctggagtacatgtacttgcttgcactcttctattattcaacttttggctttttccttccaaacacccgtttttgaattgtcaattaatatacatattacaagtttgccttttattttattttataaattaatggattattcaccactttaatgattatggatataatcaactagagttgcacctatataaaagctaggtctagtgtatatatataaaaaaatgaaaataaatatttcattaacagtctttaaaattatggtagtaatgtttggtttgatgtaatggaaaggtaatagtaatttaatagaataaaaatcatggtaattaattataatatttagtttattgttggaataaatattacaatcaaaattattgtgtttggtgtgggaatataatggaataaaagattaattgacctaaatattcctattatttttatttttataattataaaatatataatataagatagaatagacttttgaatttttttattatatttttatttgatatgtaatttcttttataatcaatatattaaatataacctaacataatttaattagaattagagtcccaaatgcacataatagggatatgatttataaaattaaatataaa

SEQ ID NO: 65596 - DNA, 1443 bp, Cannabis sativa
ggtgggtaaatgcccacttagccagattatggacaacaaaattacaattctaactaatattagagaaaatacaagtgaagaaaaagagagaggatctaatacaaaatgagacatagttctcaagctcccacctggactcagtccagttaagagcgttgataactaccctcgaatcactctcaacaataataaacttaaatccataagtcttcgcaacgtccagcgcagtgcaacaagcaaactccaatttagaagtatgaactcaaattaccttgccaagatgatcccttgcaacaacagcggtacacatagtgtccaaccccactttaacatcacagttcagttttatccagtcttggaggagggcgccaggttttcgccaaactcggaagcgaacaagagagcaacgaagcatgataaacatcaaaagaagagcggatactatcaatacacttaatcacatcaaccagacaattatgtaccttttcattcttggcccgccagatggtgtcgacaattaacgaagcataaaggaacacctcattagaattgatgtctttgtgtttaaggtcctaaatgaatttgacccagtcctacatccggatgccattaccacaaataggaaagatgccccacgaagaggacctccacaagtggaaagccacattacaagataagaacagatgttcaatagattcatcatctgtcccacacaaggggcatagcacatcctcaatatgaaatcttttgcagatttcatactgaacagggatagccttggacaggatgcaccaccaaaaattcttcaatctttcagagattttactattccacagacggttcaaaagagacgggacaacctcacaattgggcgctctttcatgtgcttgggcaatataggccgatttgcttgagaactgaccattactttccaaagtccaaatccatttatcactgactaggccagacgtaagacccccttttaaaatagttgtgacaatttccttgttaaaaagactatttagcttggggatattccagcctccattatccaacagaagctcagcatctctgttcactcccatcctggaagagtcgacagtgcgaggtaagaaatctttccaatgaggaatccaagggtcttcccaaatattagtatccttcccgtccaccaccaacttacaagcacctttttgtaagatagtttggacttaacctcatttttccaaaaccacgagtcagaatttttagaagtacaattaagaaaagactttccttttaggtattttgcctccaagatctgacaacaaagggattgattgtgaatcaaaaggttccaccccattttgccaggaaggcgagattcatttctctagttttacggcatccaagaccccctaaggacttcgagaggcaaagcttatcccaagcttttagatgtag

SEQ ID NO: 65597 - DNA, 1222 bp, Cannabis sativa
ggggacccctgggttagttcccctcttcttccctttctgatgcaagatatctgtaaaacctcccatgtctgcaaaacaaaataaagtgttacaattattaaaaaggtagataaaaaaaaggaaggggggagtacaaatttcaacctaagggatttaccgaagtcactagaaggcgaggtatcactagaagaaggggtagaaggaccataatattcactaaaatccctacagtctgtaaacttgaatatatcaaagggctcgattggttttaaatcccagctcgcgtctatatgacttgccctatctatcatagtgccatattgctcagctataccataatatgattcgtggtagttaatctagacgtggaatctagggtattagctgtcaaacttatgaccgactaggtctatgagaaaagaatcccaaatataaaaattaaggatggtgtctcgaaaggtgattaatgtgttacgttcagccctaagtactatgtgagacgaaccacattgattacctcgggacgctccttcaccaacttcctgaggggcaatgttttgaagatactgcgctcgagccacgtgatcccaggccttatcctcctatggaatcgcaagtatactccttgttagtaagaaggcccaccaatcattaattggcctcgttcaaaaggaagtcgcgtgacctaaggccaaggggaagagtcattaggcgcttatgctgactgaccatctcgggggtagggatggctctcgtcgagagggctgcaaaaaaaacaaacaaaacattggtcagaaaactgcgaaacaaggattaatttaactgagcatgaggaaaacaatcacttacgaattctgcaaaaggtggttgtgctgaatggggaaagaccagatgtccaaaagaagtcttctttgaaagacactttatttggcaggtccacaataattttaggtttgctagaatgagaaccaatataatagaagccccctgcagcattcttcctcgctggaacggccttaaccgaatagagatactcgatttctactggtgtagggcactcctagttcagaattgtctacaagaccttcaaactagtgagtattctgtaagtgatacgattcaactggaatggggcaactccaaggttgtttatgtaatccttgaagtagtcttgaagagaaagtatggcccttgcattaatatgctcaaggcttcaggcacc

SEQ ID NO: 65598 - DNA, 641 bp, Cannabis sativa
tgggagttgagttgggtttagattgtctgtgcttattattatactacaaaagtttacgggaatttataagatgacacaaatacatacaatatttatcaatataccttattttcaattgcattccataattactcctataataacaagtaacaacattcttaaaatttatttttattattattattgttttgtttgaatatatatgatattactactgtaacgccctgaccaacagagacgccacgtgtgtgcttttataaaattctcattttatatactatataaatatactaaaatgtgggtaattaaatttttgataattaaaaacagacatatgaaacttctttataaacaaagataagtaatagtaactagggggtcccctgttttcaaaatagttacaactagttataaaactgctattacattattacaaaagtaggttacattttcaatcatagaaaaatgattgatcctgcttctctgaagccaagacaccacggctgatatgtacactgctgtagagacctcaaactcatggctgtccaattttgcctttccctttacctgcaccatttagcacccgtgagtcacagagactcagcaagaaaaatgaataaatccataaacattattaaatc

SEQ ID NO: 65599 - DNA, 706 bp, Cannabis sativa
gaaacactaccaaagcttatccaaatcactccaaacttcacagggcgcatagataccataaatattaccatccttacgtaacaaaaataaaaattgagccattaaataaaaaaacaccattaacgttcgaactaagctttaaaaagttcaaaagttggtttctaattcaaaattacctcaaattcaacaagtaaacatcgatactagtcccatagctatcaaagaacaattctacgaagtaagaatctccataattgttctaattcgcgaaactcctatataaaaccaatcatttttagcttaaaatataattaaaccataccttcaattttccctcttcaaggatttgctaacccgctgctaccagagcttagatcgctaggtttcatgttgaaaatcaaagaaaatggatagaaaaagaaaaagttttgtcaaagaaagaggaagagattttgtatgttcgtttacagtaactgatataacttataatatatatagacttacgataagttttatatatataaaaataatattataataataaaataataatataatataatattactaataataataataattttttttattattattgatacttatctggttatttcttaatcactaagaaatctttacttttagggtatttagccaacttcgagtaccccaaaatactccggtatttttaaaatcaacttat

SEQ ID NO: 65600 - DNA, 1076 bp, Cannabis sativa
  modified_base (1048)..(1050): a, c, t, g, unknown or other
caaaaagataaaagaaagcaattttaattaagtattaattatttacctgctcatgaagtataattaaatatgagttcataaatataaattataatctaataatattttacctgttgtaaaacaaaggtctcaaacttgaattgtcttccactgttataaatatatacatatatacctacaatgcataaatgttataaataaacaaatgagcacattatgatgttggtacaagacacactacaacagttgtacaatttgtattataataaaaaggtcgaactggacatgaatgctttggagatgctcaacacgacaaaatgctaataattaatatgcacacaatatttatatagatatgtattcttcacgtctttttcatttggtgtcatcatgtcaattagcctagcatactaatctaatgcatgctttgttcttttttttttatttccttgtctttcatatcttacttggctacatgcatcgtggaattaaatcattaatataatattaaaaattttatttttaacctcaacaaaatttataactaaaagtaaaaatattttaactaattataaatcatcacttctatattgtgactaaaaggtccgtagctaaaggtattagttaaaaatcacaatttgttatgactatatacaactgggctttaaaggcagtttttaaggcctttcaacgtcgattttggcaaaattcgctgccgacactgttacgggtgacactaaaagggttaaaaataaccgacactgcagggaccctacgacgtcagttattataaaaaaaaaactgcctctgtaaggtcctacggcgtcaattatttcataataaccgacaccgttgggaccctacagagtcagttattatgaaataaccgacttcgtaggggtttcctataattttttttttcaactttaaaatttgcgttttaacattttttatttttattaaaaatctgattttatttttatgtatagattattttattattaatataattaaattattaagtataaatctttatatattaaaagtnnntatctaacggcatttcttggtttaac

SEQ ID NO: 65601 - DNA, 798 bp, Cannabis sativa
ttgagttagacactctaactttaccgattctcctttttttgggggggagctaacacccattggttctaataaagtttcttttagcaaaaaaaaaagtctccattacatttagtataagtcttactcttacatatgattgaagatcagatgaaagaaaaaatatttgacattaaatactagaacatatcttaaggtgttaaacactatatgaaattactaagtgttattaatatgttaatatataatttcatgttggtatgtttggcaccataaagacataaatttacaattaaaatgtcatacttaagataatagtcaaacaaaatattattatcatgaaaataaaataaaattaattcattttcttttcattaaagaaagagaagtgctaaaaggcattattgatatctagtactctactcggtgtcatactgctattggtataattaagataataacttttaggaaatatcgttgaccaattataaaacaccacctataaaagttgctaggtagggtcggcaaaacggatcagacatgataacacaactcgaaacctgcacgagagttagcaggtctgagtttgccttaaatggattcgagtcgtgttcggattgactcgtctaacccgtttaataaacggatcgtatttggattaacatggctaacaaaaaactaacttgttaattacatatttaaagttattatagtactttaacaggtcataaatgagtcataaacgtatcgagtatgtcataaacgtattattagttgacatgtttaaacaaaatatgctta

SEQ ID NO: 65602 - DNA, 3106 bp, Cannabis sativa
aggatgttaatgaaacatacatggtagaaaatctagatcctggtaaaatatttccaacaagcactccatggccttactagttttgcctgctatatggggtccgtcaattatgacccctaggtgacctgccactagaggtggcattaggtcattgcctttggcatcctgtgcctgagtttggtcattctacaaataacaacacaaatgaggattatttttcctaatcaagaatttaatgtccatctttaaattctttcattcgtttgtgtcatggccgaaatcattatgaaatcggtaaaatttagaggtgtccctcttgttgatgtccttcttgatgggaggaggcttcttatataggatagcatcttgggtgaccatgtatattgtttcaggagtttctatcaggagagtgaagcatgtgtacttcttctccttctcccttgggttttatggcgtaggggaattgttgaatttcccttttttgccattattttggctagagccattgttgttgtgtttgcctccattattcttattattggagggtttgtcggtattccctatgttggttggcatgtagggcaaaactggggggttgtacgccattttgattttgtccaatactaacctgccttcctgtctgggcttgttggatagcttcttccaagtttatgaaaccatcaactcgttcaaggaactccttcatgttgttcattgagatccttctgatgtctttccagaagtcactcaatggtaagatacctcgaactatggtcatataacaaccttcttctgttatccctttagccatagtggcctcggccatgaacctttgaatgtagtctttcaagggtttgccttctctttttttattttgacaaggtcttcaaactatgaaggtatttgtctcgaggacaagaactaagtatagaattcttgagagaattcctcccaagagttgaacctttctcgagctaggttgaaataccactattgggctattttaaatagggttgtcagaaagatctggcatcgcgcatctctagttaatttttagagatttgttttgatcttaaagtattttatgtgtgtcagaggatcttctttcccggtctacatcttctaagctaacattttgaactttggtaggggcaatgcattgatatatgccgagaaggatgatccccttgatctttccagctctaggtctgttaactttgggctagacaggcctttgatcatgtctttgagttgatccaattttgtttgcacagatggatctattttggtgacctcttgtccggacaactctccttagccaggcagcactccttggccaaccagcaatccttggtcggccagcataccttgaccggctaggccttctttaccggccaggctgaccagacctctacggtcggtcaggctagttggtggataggttaagggaagatcataccaaccactcgaattgggtagatccactgatctgaggtcattggtttggggaaaaatgtcattccagttctcccttcctgaaattttgccttgtgtgttttcattcagcctaagaattatcctattgaaaacagtatccctaggcctcagttccacctattcttggacattcagggggagggtatcgttgtacttctcgggcatgccatggtcagttatcacagtcctctatttgggattgtcctccctcctaccgtcattccttggtgttatgaattggtcattctggtcgtatggtctgttaggtaatacttgtccatcctcaagtaggatagagtttggccccttgtttgagggacatggacagattttttgtccattttctacctattggtagaccctggtcatcccatttgtggctctctagtaaacgatatcttatcaaggcctcacctctgaagcatgttctctcatcgaactactttattagtttagtggcctctcgatcgtggcggttaagttcctcctggtgggctcgtagggtggctgcttggccatccatccatgtcgcgaattcatgtctctactgggtgtaggcattgcgcatagcagtgtgtgtttcttcttgtcctatttgagtgacgtggcctacaacttctctgagcctaaccagctcagtatcatccccaaggtccaagcgaggttttccaatagctttggccaactcctgccccagtttctcctgcataaactcgcagggaattcttattactattgtgaatgggtttcaccacgttgatctattcttctatatgagatcttgtaggtggctttagccttagaagaatggtgaggtcaacaggattcgcaagattggatggattgacagtattagccagattagtaggaccttctatggtgggaggaacacgaacattgggatctcacaccatgggttctagaggaagatctgagagatcagttcttctagtttgaaccatggtgattgatcaaaatgaaatgaagaaacttaaaaaaggctcttgatgaaaggaccaaaatgatgactttagccaactgacagtaaagccttataaattactgattatcaccatgtgtaaataagaataataaatagtaaagggaaatgatgtactccctttttagttgtatttactcttgagataataccatgcagattacaggcttagaccttgcaatttctagctatggctctctttagtattacaattgtgagaacaatgtgttatagatgaagaactggtaagaatatatgataaacttatgaagaaaatagacttagagtctgagaggccttaggtgcgtgtggaacttaaagagagagacagagagacagagagagagttataggcgtgtagcttaggattggggtcctttgctgggtatattttaccaggatctagatttactaacaagtatgtcgattaacatcctaaatatgaatatctctaaaataatgaaattaaacacataagagtttaaaaacccttgcttagatctctaactcttattccttatggtcgtagagtattatcaagatctgagcttggatctctttctctcctgcgggtttagttaccaccgtcatactcactatgattgagta

SEQ ID NO: 65603 - DNA, 952 bp, Cannabis sativa
  modified_base (916)..(926): a, c, t, g, unknown or other
tacattcaagaacttcaagcggttattactctgactcttatgtaattaatgagttatttaataagagaaattgcattgattcatattcccttcattataacacgtgtccttcattgaggtggcaaccgaattttgggtctaacaattgccccttaaaaagttcttttttagtaaaaagagctttttaataattaaaaaggggatttttgccaaaatcctttcttggaaaaaatgcatcccttgattctggcggttgtacggttttgaggatcattatgaatcatctcttcatattctgcccatcttccaatcgttcgatttctcaatctttagctttcttgtcaatgagctttgtgtataaaagggcaaatcaagcttgtcatttttcataaacctttggctctttagtgagatccattttcagaatggatcatctctttcctgccaaaatgtcccttctgagttcagaagttcatccttctaaacttataatagccagatgcgtcaaccattttccatttgttcccaaagacttcaagcctcaactagagtcagaaacgatggattcgaaggctgaggagcttccgaccaatccaaaccaagggaaccctgtagcctgccatgggcgatccccacaaaggatctgcatagatcttgtgcgcgatcttaaaggtcctcctcaggctgataaagaattccagaggaaaattggcatggttcaagataaatctgggaaggaagttggcgtggtttttatcagagaatccagccaacccaagacccaaacttgcgccagaagacctttgcgccaacctcttttgggtatcgagggatttcctaaggctaggaaaaagatctcggcttcaggaaatggaatcttctgatggtgagggtgttagaaatattttaccaggannnnnnnnnnntaccatgtatgtttcattaacatcct

SEQ ID NO: 65604 - DNA, 629 bp, Cannabis sativa
tttggttggccatccaagatagataaaaaatgagagcgagattatataagttcaaaatgatagatgatccaatgtgtatactctgcaacactgcagctaaaacaaaggaccatttattttttgattgtgctgttttgattcactgtctttcccaggtgaagaggtggctgaattggaatgcaaaggctggctctctacaggggttgctaaaatggattgaaggatccaaacaaagcaagtttaagaaacaagtgttctctcctactgttgcaaatttagtgtattaaatttggtatgttcaacatggcaaaatttggaatttaaatgatgttaacatacttagaaaatagagaacactaggttttgtgaaaatgcagctcaatgagctttgaataattcatttcaatatataggcattacaagaagattctggaatgattacacctcatcattggtcgtacaaggccttaaccaaatcaaaatatactctgacacataacagaaaagagagagaaaagtaaaaaaatgattccccaatcattacaagcaaatgcagacaaaatagcaaaagagtaaatgataaatggtgactaattggtaactggttataataatgtcattttctaaca

SEQ ID NO: 65605 - DNA, 853 bp, Cannabis sativa
agctaacagagacaatattatattagaaagtaggaacataaagtacttcttgtaaaaccagatctttgctgatacgaacattgccacatttgtgaaccaagacatggttattgttagggagaatcagtctagttgtatggacagtatgaatattttgaaaaagctttaaatctgaacatatatgcctagtggcacctgaatccactatccaagatttctctttaggcaaaaaaatcataatttgttaatacaatacctgaactacctgaggaggaattaggatcggcagtaggcatattagtggattgagatgctaagagattgagtagttgttgatattggtttggtgttaattgaggcagcataatgttgttgtcattagcatccgaaccagtatcttttgtagtctgaaattgattagctgcagcaccttttgatttttctagtttgttgtatccaggagggtatatcttgtagcacttttcaatggtgtgcccgtgcatattgcaatgagtgcaaaagggcctaccacgtttctgtccttggttcttggaagctttggattttccagggtttctttctccttgaaaggcaaaagccatattggagttgggatcggcagtagcaatttgccccctttttgattctcttcctgtgacactaaatgaaaaaccctattaatttcaggtaaaggatccataacaagaatattacctctcacttgtgaataaagatcagataatcccatgaggaaggacatgatgtactccatattgtggtgttcttgtaatttcttgactcctccacatgtacagccattacaagtgcaattaggtctgaagttggacaattg

SEQ ID NO: 65606 - DNA, 1046 bp, Cannabis sativa
gacccaactagtatatatatatatgttaatttttcctttttacggactttgatttatattcttatgatatttttatagaaaacaacataatgtaaatgtagcatcaaacaacacaaaacacctatctctatttttgtttaaaagaaacttcaaatcaatcaaaatgttgaaaaaacgttaaatcactatttttgtaaattttttgtctttttggataatcatgaaaaaaaatttacccaaaattgcacttttttttttacaatgttatttttactttcccataatagtaacatgaaaaaaaattatttaaaaaacaatagaaaaaaacaattcatagttttgtaagaaaaaatttaaaatccgtatttttgtaaactttttgtcatttataagtatttatgaaaatatcaccaccaaattccctctaaatattttgggcttctttccacaataaaagcccattattttttcttttttaatattttattattttaattttgttgattagagacctaaaaggaagtgattcaacgaagctttctttcatgtcggagctctctaaaacccatcaacttcaacaccctaattctcccaaactcacatccatggacacccagatttctctgaaaacatcttatggtttcgaatattcaactaaattccttgcataattttgttttatgattccttttctaggtttagttggaataacttaaaagatgacccaaccctcggtcatacttgctactgctagctatgatcacactattcggttctgggaggccaaaagtggtcgctgttatcgaaccatacaataccctgattcggttagtgttgtttcacttaatacttttttgtgtttttaattgcttcaaaattatttaggcattggaatttaatatttaatacacaaacatggctattttgaatgttttgttggctttgatatgtgattctttgttcaattactttgtttttttttttttcctcaaatcaaatgttaatgttttttatttgatgagtacccattatgtcatttttcctgg
